United States Patent Application Publication US 2010/0105865 A1 - sequence listing, part 3

SEQ ID NO: 4846 - protein, 229 aa, Streptococcus agalactiae
MGKKILIIEDEKNLARFVSLELLHEGYDVVVETNGREGLDTALEKDFDLILLDLMLPEMDGFEITRRLQAEKTTYIMMMTARDSVMDIVAGLDRGADDYIVKPFAIEELLARVRAIFRRQEIETKTKEKGDSGSFRDLSLNTHNRSAMRGDEEISLTKREFDLLNVLMTNMNRVMTREELLEHVWKYDVAAETNVVDVYIRYLRGKIDIPGRESYIQTVRGMGYVIREK

SEQ ID NO: 4847 - DNA, 531 bp, Streptococcus agalactiae
gtgttacttacagaaatcaaaaaatcaccagaggggctttattttgataaaaaaatagatatcaaagagtcgcttatggagcgtcattcagagataatggatatttctgatattcaagtttcaggtcatgtggtgtatgaagatggtctctatctacttgactataatatggcttacgatattacattaccgtctagtcgttctatgaaaccagttgttttatctgaaaagcaaactattaatgaagtttttattgaagctgaaaatgttagcactaaaaaagagctcgttgatcaggagttggtcttaatattagaggaagatgatattaatttagaagaaagcgttatcgataatatcttgttaaatatacctcttcgtgttctggcagctgatgaggttggggtagaagcggatttatcaggtaaaaattggtcgttaatgactgaaaagcagtatgaagaaaaacaagctaaagaaaaagaaaaatctaatcctttcgcagccttagaaggtatgtttgatagtgat

SEQ ID NO: 4848 - protein, 177 aa, Streptococcus agalactiae
MLLTEIKKSPEGLYFDKKIDIKESLMERHSEIMDISDIQVSGHVVYEDGLYLLDYNMAYDITLPSSRSMKPVVLSEKQTINEVFIEAENVSTKKELVDQELVLILEEDDINLEESVIDNILLNIPLRVLAADEVGVEADLSGKNWSLMTEKQYEEKQAKEKEKSNPFAALEGMFDSD

SEQ ID NO: 4849 - DNA, 534 bp, Streptococcus pyogenes
atgatgttagctatttccgaaatcagaaaacacccagacggtctctcgtttgatcgtttatgtgatgtcaaaagtatgttacttgagcgtgaccaacagattattgacataaaggcagttaaagctgtcggtaatgttcgctatgataaggggctttatctgttagattatcaattgagttacgaagtgatattaccgtctagccgttctatggttccggtctgtttaagtgaagtccaacacattcaagaattatttatagaggcgacagatttagctgataagaaagagttggttgaagacaatctggtattagttttagacaaagacgctattaacctcgaagaaagtattgtggataatatcttacttgctattccggtacaggtcttgacagaggaagaaaagaaatcaaaagagttgccagcaggtcaaaattgggcagttttgacagaagaagactaccagtgtctaaaagaagaaaagcaaaaagaaaataatccttttgctagcttgcaagggttgtttgatgaa

SEQ ID NO: 4850 - protein, 178 aa, Streptococcus pyogenes
MMLAISEIRKHPDGLSFDRLCDVKSMLLERDQQIIDIKAVKAVGNVRYDKGLYLLDYQLSYEVILPSSRSMVPVCLSEVQHIQELFIEATDLADKKELVEDNLVLVLDKDAINLEESIVDNILLAIPVQVLTEEEKKSKELPAGQNWAVLTEEDYQCLKEEKQKENNPFASLQGLFDE

SEQ ID NO: 4851 - DNA, 888 bp, Streptococcus agalactiae
ttgctgtatcaacaaattgcaagtaataagagaaaaacagttgtcttgttaattgtcttcttctgtcttttagcagctattggagcagctgtaggttatttggtattaggcagctaccaatttgggcttgttctagctctaattattggggttatctatgcagtaagtatgatttttcaatcaactaatgttgttatgtcaatgaacaatgcgcgtgaagttacagaagatgaggcgccaaattattttcatattgttgaagatatggcaatgatagctcagatacctatgccacgcgttttcattgttgaagatgactccctaaatgcctttgccacaggctctaagccagaaaatgctgctgttgcagcaacgacaggcctattagctgttatgaaccgcgaagagttagagggtgttattggacatgaggttagtcatattcgtaattatgatatccgtatttcaaccattgcagtagctttagcgagtgctgtaactctaatatcaagcattggtagccgtatgttattttacggcggaggtcgtaggcgtgatgatgacagagaagatggtggaaacatcttggttttgattttctctattttatcactaatccttgcaccattagccgctagtttagttcaattagctatttcaagacagcgcgaatacttagcagacgctagttctgttgagttaacaagaaatccacaaggaatgatctctgctttagaaaaacttgatcgttctgaacctatggggcatccagtagatgatgctagtgcggctctctatatcaatgacccaacgaaaaaagaagggttaaagtctttattttatacgcatccaccaattgcagatcgtattgagcgtttgcgtcatatg

SEQ ID NO: 4852 - protein, 296 aa, Streptococcus agalactiae
MLYQQIASNKRKTVVLLIVFFCLLAAIGAAVGYLVLGSYQFGLVLALIIGVIYAVSMIFQSTNVVMSMNNAREVTEDEAPNYFHIVEDMAMIAQIPMPRVFIVEDDSLNAFATGSKPENAAVAATTGLLAVMNREELEGVIGHEVSHIRNYDIRISTIAVALASAVTLISSIGSRMLFYGGGRRRDDDREDGGNILVLIFSILSLILAPLAASLVQLAISRQREYLADASSVELTRNPQGMISALEKLDRSEPMGHPVDDASAALYINDPTKKEGLKSLFYTHPPIADRIERLRHM

SEQ ID NO: 4853 - DNA, 894 bp, Streptococcus pyogenes
atgctttatcaacagatttcacaaaataagcaacgaacagttgttttattagttggtttcttcgctctcttagcacttattggagcttcagcaggctatctgctgttagataattatgccatgggcttggtccttgctcttgtcattggggtgatttatgctaccagtatgatttttcaatccaccagtcttgtaatgagtatgaacaatgctagagaagttacagaaaaagaggctccaggctttttccatattgtcgaggatatggctatggtggcccagattccgatgccgagagtttttattattgaagatccttctttaaatgcttttgcgacaggatctagccctcaaaatgctgctgttgcagcaacgacaggtttacttgaagtcatgaatcgtgaagaacttgaaggtgttatcggccatgaaattagccacatccgaaattatgatatccgtatttcgactattgctgtagctttggcgagtgctgttaccgttatttctagtatcggtgggcgtatgctatggtatggtggcggttctcgcaggcaaagagatgacggagatgatgatgttttaagaatcattacattacttttgtcgttattatctttgcttttagcgcccctagtagcaagtttgattcagttggctatttctcgtcaaagagaatatctagctgatgctagttctgttgaactaacaagaaatccccaaggtatgattaaggctcttgaaaaattgcagttatctcagccaatgaagcatcctgttgatgatgctagtgcggccttgtatattaatgagcctcgcaaaaaaaggagcttcagttcattattcagcacccatcctcctattgaggagaggattgaaaggttaaaaaacatg

SEQ ID NO: 4854 - protein, 298 aa, Streptococcus pyogenes
MLYQQISQNKQRTVVLLVGFFALLALIGASAGYLLLDNYAMGLVLALVIGVIYATSMIFQSTSLVMSMNNAREVTEKEAPGFFHIVEDMAMVAQIPMPRVFIIEDPSLNAFATGSSPQNAAVAATTGLLEVMNREELEGVIGHEISHIRNYDIRISTIAVALASAVTVISSIGGRMLWYGGGSRRQRDDGDDDVLRIITLLLSLLSLLLAPLVASLIQLAISRQREYLADASSVELTRNPQGMIKALEKLQLSQPMKHPVDDASAALYINEPRKKRSFSSLFSTHPPIEERIERLKNM

SEQ ID NO: 4855 - DNA, 552 bp, Streptococcus agalactiae
atgggaactatgattttaatagcaattattgctttgtttgttatttggttgattgttgcttataacagtttagttagaagtcgcatgcatactaaagaatcatggagtcaaatagacgttcaattgaaacgtcgtaacgatttaattccaaacctaatcgaaactgttaaaggctatgctgcgtacgaagggaaaacacttgagaagattgcagaactgcgtgctcaagttgctaaagctaacacacctgctgaagcaatgacagcaagtaatgagctaacaagacagctttcaagtattttagcggttgctgaaaattacccagatttaaaagccaacaatagctttgttaaacttcaagaagaactaactaatacggaaaataaaatttcttattcacgtcagttatataacacaacaacatccaattataatgtgaaattagaaactttcccaagtaatattgttggaaaactatttgggttcaaaccaagccaattcttagaaactcctgaagaagaaaaagaagtgccaaaagtttcctttgacttt

SEQ ID NO: 4856 - protein, 184 aa, Streptococcus agalactiae
MGTMILIAIIALFVIWLIVAYNSLVRSRMHTKESWSQIDVQLKRRNDLIPNLIETVKGYAAYEGKTLEKIAELRAQVAKANTPAEAMTASNELTRQLSSILAVAENYPDLKANNSFVKLQEELTNTENKISYSRQLYNTTTSNYNVKLETFPSNIVGKLFGFKPSQFLETPEEEKEVPKVSFDF

SEQ ID NO: 4857 - DNA, 555 bp, Streptococcus pyogenes
atgccaacagttttgattatcttagtcgttttaggagtgcttgcgctatggttaatgattagttacaatagcctggttaaatctcggatgcacacaaaagaagcttggagtcagattgatgtgcaattaaagcgtcgtaatgacttgattccaaatcttattgaaaccgtaaagggatatgctagctacgagcaaaagacatttgaaaaaatcactgatttgcgtgcgcgtgttgcgaatgcctcaactcctcaagaaaccatggcggcttctaacgaattgagtaaacaagtgaccagtttgtttgccgttgctgaaaattacccagacttaaaagctaacgaaaacttcttgaaattacaagaagagttgaccaatacggaaaataaaatctcatattctcgtcaactctataattcaacaacgtctaattacaaccttcaattagaatctttcccaagcaatatcgctggtaaattatttggttttaaaccaagtgaattcttacaaacaccagaagctgaaaaagaagttccaaaagttgaatttaacttt

SEQ ID NO: 4858 - protein, 185 aa, Streptococcus pyogenes
MPTVLIILVVLGVLALWLMISYNSLVKSRMHTKEAWSQIDVQLKRRNDLIPNLIETVKGYASYEQKTFEKITDLRARVANASTPQETMAASNELSKQVTSLFAVAENYPDLKANENFLKLQEELTNTENKISYSRQLYNSTTSNYNLQLESFPSNIAGKLFGFKPSEFLQTPEAEKEVPKVEFNF

SEQ ID NO: 4859 - DNA, 723 bp, Streptococcus agalactiae
ttgaggtttactatgacaccccaagcattttatcaagttctgatagagcatggtattacacttactgacaaacagaaaaaacaatttgaaacttattttagacttcttgttgaatggaatgagaaaattaacctaacagctattacagataaggaagaggtttacttaaagcacttctatgattctattgcgccgattttacaaggttatattgacaatagtcctcttagcattttagatattggtgctggtgcaggttttcctagtattcctatgaaaatcctttatcctgaaattgatattactattattgattcactgaataaacgcattaattttctaaacatattagctaatgaacttgaactttcaggagttcacttcttccatgggcgcgctgaggactttggtcaagatagagtatttcgagctaaatttgatatcgtaacagctcgtgcagtagctaaaatgcaggttctagcagaattgacaataccttttcttaaagttaatggtcgcttgattgcactgaaagctgcagctgctgaagaggaattaatttctgcagaaaaagctttgaaaacactattttcacaagtaactgtaaataaaaattataagttacctaatggtgatgaccgaaatatcacaatcgttagcaagaaaaaagaaacgcctaataaataccctcgtaaagctggtactccaaacaagaagcctttg

SEQ ID NO: 4860 - protein, 241 aa, Streptococcus agalactiae
MRFTMTPQAFYQVLIEHGITLTDKQKKQFETYFRLLVEWNEKINLTAITDKEEVYLKHFYDSIAPILQGYIDNSPLSILDIGAGAGFPSIPMKILYPEIDITIIDSLNKRINFLNILANELELSGVHFFHGRAEDFGQDRVFRAKFDIVTARAVAKMQVLAELTIPFLKVNGRLIALKAAAAEEELISAEKALKTLFSQVTVNKNYKLPNGDDRNITIVSKKKETPNKYPRKAGTPNKKPL

SEQ ID NO: 4861 - DNA, 711 bp, Streptococcus pyogenes
atgacaccccaagacttttaccgaacactagaggaagatggtttttccttatcatcgaaacaaaaagaacaatttgacacctacttcaaatcactagtggaatggaacactaaaattaatttaacagctattacagaagaaaatgaggtttacctcaagcatttttatgattccatcgctcctattttacagggctttttagctaatgaaccaatcaaattattggacattggagctggagctggttttcctagcctacccatgaaaattcttttcccaaaccttgaggttaccattattgattctcttaataagcggatttcttttctgacactccttgctcaggaattgggcttggaaaatgtccacttttttcatggtagagcagaagatttcggacaggacaaggcctttcgaggtcaatttgatgttgttactgccagagcggttgctcggatgcaggttctatctgaattaaccatcccctttttaaaaattggaggaaaattaatcgccttaaaggcacaagctgctgaccaagagttagaagaagctaagaatgctctttgtcttctttttggtaaagtcattaaaaaccatagctaccaattgccaaatggagattctcgcttcatcaccattgttgagaagaaaaaggaaacacctaacaagtatccaagaaaagctggcttgcctaacaaaaaacctcta

SEQ ID NO: 4862 - protein, 237 aa, Streptococcus pyogenes
MTPQDFYRTLEEDGFSLSSKQKEQFDTYFKSLVEWNTKINLTAITEENEVYLKHFYDSIAPILQGFLANEPIKLLDIGAGAGFPSLPMKILFPNLEVTIIDSLNKRISFLTLLAQELGLENVHFFHGRAEDFGQDKAFRGQFDVVTARAVARMQVLSELTIPFLKIGGKLIALKAQAADQELEEAKNALCLLFGKVIKNHSYQLPNGDSRFITIVEKKKETPNKYPRKAGLPNKKPL

SEQ ID NO: 4863 - DNA, 102 bp, Streptococcus agalactiae
ttggtagtgttcattgttacacccacggttgctaaggcactagatgcctcaaagaaaagagaaaaaggatctatatggggattgagttccagaagaaggaga

SEQ ID NO: 4864 - protein, 34 aa, Streptococcus agalactiae
MVVFIVTPTVAKALDASKKREKGSIWGLSSRRRR

SEQ ID NO: 4865 - DNA, 1389 bp, Streptococcus agalactiae
ttgggagctagtatgaaacatttctttgattacaagacaatgtctgtcgcacgtaaactcagcattagttttatcgctgttatcctattgggaagtattttactttcacttccaatttttcaatatgctaacgcccctaaaacacattacattgatcaccttttcacgactgtttcaatggtatgtgtaactggtttatctgtttttcctatcagtaaggtttataacggttgggggcagattgtagctattttactcatgcaaacagggggacttggtttagtaacactaatgtcgttgtcttactataccctaagacgtaaaatgtcgttaaatgatcagacccttttgcagtcagcgataacttataacagttcgacagatttaaaaaaatatctctatatgatttttaaagtaactttaactttagaagttttagcagccagcattttagccatagattttattcctcgatttggtttgggtcatggtatctttaatagtatattcttagctgtctcagccttttgtaatgccggttttgataatctagaggcaacgagcttagctcaatttaaactaaatcctttggttaacattatcgtttgtttcttgattatttcaggaggacttggatttgccgtatggaaagatttaattgaagctactatacaaacatctcacaagggaccaaaattaatcaagacatttccaaaacgcctcagcaaccattctaaactggttttaaaaacaacaaccattattttactaacaggaactttgctttcttggttgttagagtttggaaattttagaacaattgctaatttatctctacctaaacaactaatggtcagctttttccaaacagttacgatgcgtaccgctggattttcaactattgattatacccaaactgatttcgcaaccaaccttgtttatattatccaaatgttaattggaggagctcctggtggaacggcaggaggatttaaagtcactgttatcgccattttactcttactatttaaagccgaactgagtggccaaagccaagtgacttttcattatcgaacaattccttccagtattattaaacaaacactatcgattttaactttcttttttatcatacttattagcggctatctccttcttctggaactcaatccccatatagatcctttttctcttttctttgaggcatctagtgccttagcaaccgtgggtgtaacaatgaacactaccaatcaattaactctgggcggtcgaattgtaattatgttcctcatgtttattggtcgagtcggtccaattaccgtactgctatcaattcttcagaaaaaagagaaggaaattcactatgctgaaacagaaattattctaggt

SEQ ID NO: 4866 - protein, 463 aa, Streptococcus agalactiae
MGASMKHFFDYKTMSVARKLSISFIAVILLGSILLSLPIFQYANAPKTHYIDHLFTTVSMVCVTGLSVFPISKVYNGWGQIVAILLMQTGGLGLVTLMSLSYYTLRRKMSLNDQTLLQSAITYNSSTDLKKYLYMIFKVTLTLEVLAASILAIDFIPRFGLGHGIFNSIFLAVSAFCNAGFDNLEATSLAQFKLNPLVNIIVCFLIISGGLGFAVWKDLIEATIQTSHKGPKLIKTFPKRLSNHSKLVLKTTTIILLTGTLLSWLLEFGNFRTIANLSLPKQLMVSFFQTVTMRTAGFSTIDYTQTDFATNLVYIIQMLIGGAPGGTAGGFKVTVIAILLLLFKAELSGQSQVTFHYRTIPSSIIKQTLSILTFFFIILISGYLLLLELNPHIDPFSLFFEASSALATVGVTMNTTNQLTLGGRIVIMFLMFIGRVGPITVLLSILQKKEKEIHYAETEIILG

SEQ ID NO: 4867 - DNA, 1389 bp, Streptococcus pyogenes
atgtctggaggaaacatgaaacgctcttttatcaaatctctttcagtcacacagcgcttaacatttagttttgccattgtgattctgattgggactctcttgttatccatgccctttacccattatcaaaatggtcctaataccgtctatcttgatcatttctttaatgtggtttccatggtttgtgtgactggactttctgttgttcccgtcgctgaagtgtataacggtatcggacaaaccattgctatggcactaatgcagattggttgtcttggcttggtgacgttaatagctgtgagtacttttgccctcaagcgaaaaatgcgattgagcgatcaaaccttgctccaatcagcgttaaatcgaggtgatagcaaagatttaaagcactaccttttttttgcttataaagtaacctttagtctagaagcctttgctgcgatagttatcatgattgacttcatcccccgcttcgggtggaaaaatggtatcttcaatagtatttttttagctgtgtcggcgttttgtaacgctggttttgacaatttaggatcttctagtttaaaagactttatgttaaatcctacattaaatgttatcattacgttcttgattatctctggtggacttggttttgcggtttgggttgatttaggagtagcttttaaaaaatacttttttgaaagacctcattgttatggggcaacttttcgtaaattatccaatcagtctcgtctagtactacaaaccacagctgttattctttttcttggaaccttcttaacctggtttttagaaaaagataacagcaaaaccattgccaattttagtttacatcagcaacttatggtttcattttttcaaacagtcactatgagaacagctggctttgcaacaatctcttataacgataccctagcaccgactaacattctttatatgattcaaatggttattggtggtgctcctggtggaacagctggtggtattaaagtgacgactgctgccattactttcttactctttaaagcggaactttcagggcaatcagaagttacctttcgtaaccgaattatcgcaaataagacaattaagcagaccatgacagttcttatcttcttttttgcagttcttatgataggttttattttattacttagcgtggagcctcatatcgctcctataccactcttatttgaatctatttctgccatcgcgacagttggggtatctatggatttgacaccacaattgtctactgctggacgtcttattgtcattgtcttgatgttcgtcggccgcgttggcccaattactgtcctcatcagtctgattcaacgaaaagaaaaaaccattcaatatgccactactgatattctagtgggt

SEQ ID NO: 4868 - protein, 463 aa, Streptococcus pyogenes
MSGGNMKRSFIKSLSVTQRLTFSFAIVILIGTLLLSMPFTHYQNGPNTVYLDHFFNVVSMVCVTGLSVVPVAEVYNGIGQTIAMALMQIGCLGLVTLIAVSTFALKRKMRLSDQTLLQSALNRGDSKDLKHYLFFAYKVTFSLEAFAAIVIMIDFIPRFGWKNGIFNSIFLAVSAFCNAGFDNLGSSSLKDFMLNPTLNVIITFLIISGGLGFAVWVDLGVAFKKYFFERPHCYGATFRKLSNQSRLVLQTTAVILFLGTFLTWFLEKDNSKTIANFSLHQQLMVSFFQTVTMRTAGFATISYNDTLAPTNILYMIQMVIGGAPGGTAGGIKVTTAAITFLLFKAELSGQSEVTFRNRIIANKTIKQTMTVLIFFFAVLMIGFILLLSVEPHIAPIPLLFESISAIATVGVSMDLTPQLSTAGRLIVIVLMFVGRVGPITVLISLIQRKEKTIQYATTDILVG

SEQ ID NO: 4869 - DNA, 669 bp, Streptococcus agalactiae
atgaaaacaaaaattattggtgtacttggtctaggaatatttggacaaacactcgcacaagaactaagtaactttgaacaagatgttattgctattgacagcaatcctgaaaatgtacaagctgtcgccgaagttgttacaaaagcagctatcggagacattactgatttagctttcctaaaacacatcgggatcagtgactgtgatactgttattattgctacaggaaacagtttagagagctcagtattggccgtaatgcactgtaaaaagttaggcgtcccacaagttattgctaaagctcgaaaccttgtatacgaagaagtactttatgaaattggtgctgatttggttatctctccggagcgagaatctgggcaaaatgttgctgcaaacctcatgagaaataaaattacagatgtcttccagattgaatctgatatttctgtcattgaatttaaaattcccaaatcatgggtagggaaaactgtcgaacaattaaatatccgtcacaagtttgatcttaacctcataggtatcagaaaagcaaaaaacaaacctgtcgataccgaagttccaatcaatagtccacttgaagaaggtattattctagtggctatcgctaactcagatgccttccaacgctatgactatttaggatactttaac

SEQ ID NO: 4870 - protein, 223 aa, Streptococcus agalactiae
MKTKIIGVLGLGIFGQTLAQELSNFEQDVIAIDSNPENVQAVAEVVTKAAIGDITDLAFLKHIGISDCDTVIIATGNSLESSVLAVMHCKKLGVPQVIAKARNLVYEEVLYEIGADLVISPERESGQNVAANLMRNKITDVFQIESDISVIEFKIPKSWVGKTVEQLNIRHKFDLNLIGIRKAKNKPVDTEVPINSPLEEGIILVAIANSDAFQRYDYLGYFN

SEQ ID NO: 4871 - DNA, 849 bp, Streptococcus agalactiae
ttgataatcaaggaggtaagaatggctaaacaattaattggttatcaagagggttatggctttctatacaggctatcaggtgccagtaagttactattttttattttagtttctgttgcttgcatgaccacttatgatacaagatttttaattgttgtttcattgggatcgctagtcttatttagattagcaaaaatcaaatggcaacaggtgtcctttgttatgactttagttgttgtattcgctgttttaaatattataatggtctatctttttgctccccattatggtgataagatttatggtagttcttctttattgttaaaaggaattggcccatatgatgtgactagccaagagttgttttacctctttaatctgattttaaaatacttttgtacagtgcctttagctcttttgtttttgatgacaactaatcctagtcagttcgcatcaagtttaaatcaattaggtttatcatataaaatagcttatgctgttagtttgacccttagatatatacctgatgttcaagaagaattttatacaatacgtcgagcacaagaggcaagaggaatagaattatcaaaaaaatcgaacttagtagcacgcattaaggggaatttgcagattgtcacaccattaatttttagctctctagaacgtattgatacagtagcaactgctatggaacttcgacgatttggtaaaaataaaagacgtacttggtactctaagcaatctttggaaaaaagtgacattgtcttaatcatacttgctctagctagtctgtttgtaagcctttatttaattcaccttaatcatggacgtttctataacccatggcaa

SEQ ID NO: 4872 - protein, 283 aa, Streptococcus agalactiae
MIIKEVRMAKQLIGYQEGYGFLYRLSGASKLLFFILVSVACMTTYDTRFLIVVSLGSLVLFRLAKIKWQQVSFVMTLVVVFAVLNIIMVYLFAPHYGDKIYGSSSLLLKGIGPYDVTSQELFYLFNLILKYFCTVPLALLFLMTTNPSQFASSLNQLGLSYKIAYAVSLTLRYIPDVQEEFYTIRRAQEARGIELSKKSNLVARIKGNLQIVTPLIFSSLERIDTVATAMELRRFGKNKRRTWYSKQSLEKSDIVLIILALASLFVSLYLIHLNHGRFYNPWQ

SEQ ID NO: 4873 - DNA, 1674 bp, Streptococcus agalactiae
atgaaagattttattgaatggaaggattttacctttcaatatgacgttcaatctgaaccaactttaaaagggattaacttaagcattcctaaaggtgaaaaggtcttgatattaggaccttcagggtcggggaagtcaacgcttggtcattgtttaaatggtattatcccaaatactcataaaggccaatatagtggtatttttacgattaaccataaaaatgcttttgacttgtcaatatatgacaagtctcatttagtttctacggttttacaagatccagatggccaatttataggattgacagtagcagaagatattgcttttgcattagaaaatgatgttgtagcacaggaagaaatggcctctatcgttgaaatgtgggcaaaacgtttagaaatagctcctcttttgtctaaacgtccacaagacttgtcgggaggacaaaaacaacgggttagtttagctggagttttagtagacgatagcccaattctattatttgatgagcctttggctaatctagatccacaatcgggacaagatatcatggcattggttgaccgtattcatcaagagcaagatgcgaccactattattattgaacatcgattggaagatgttttttatgagcgagtagatcgtgtagttctttttagtgatggacaaattatttataatggggagccggatcaacttttaaaaactaattttttatctgaatatggtattcgagaaccactgtatatttctgctctcaaaaatttaggatatgactttgaaaaacaaaatacaatgacgtctattgatgactttgatttcagtgaactattgatacctaaaatgcgagcattagatttagataaacatacagataaattattatcagtacagcatttgtcggtgtcatatgatttagagaataatactttagatgatgtttcgtttgatttatataaaggtcagcggttagctatcgttgggaaaaatggtgcaggtaaatctactttagctaaagcgttatgtcaatttatccctaataatgctactctaatttataataatgaagatgtcagtcaagactctataaaagaaagagcagaacgaattggctatgttttgcaaaatcccaatcagatgataagtcaagcgatggtttttgatgaagttgctctgggtctccgtttaagaggttttagtgataatgatatagaaagtcgtgtctacgatatattaaaggtttgtgggctctaccaatttaggaattggcctatatcggctctatcattcggtcagaaaaaacgtgttacgattgcttcgatactgattttaaatccagaagttattattttggatgaaccaacagctggtcaagatatgaagcattatactgaaatgatgtctttccttgataaactaagttgtgatggacataccattgttatgattacacatgatatgcagcttatgttagagtatacagatcgtgcaattgtaatcgacaatggtctgattgttgcagatgatcatcctattaacatcctttcaaatacagagcttttgaaaaagactcatttaaagaaaacgagtttatttgctttagcagacagattagggatatctccacagaaactaacacaatggtacattgataatcaaggaggtaagaatggc

SEQ ID NO: 4874 - protein, 558 aa, Streptococcus agalactiae
MKDFIEWKDFTFQYDVQSEPTLKGINLSIPKGEKVLILGPSGSGKSTLGHCLNGIIPNTHKGQYSGIFTINHKNAFDLSIYDKSHLVSTVLQDPDGQFIGLTVAEDIAFALENDVVAQEEMASIVEMWAKRLEIAPLLSKRPQDLSGGQKQRVSLAGVLVDDSPILLFDEPLANLDPQSGQDIMALVDRIHQEQDATTIIIEHRLEDVFYERVDRVVLFSDGQIIYNGEPDQLLKTNFLSEYGIREPLYISALKNLGYDFEKQNTMTSIDDFDFSELLIPKMRALDLDKHTDKLLSVQHLSVSYDLENNTLDDVSFDLYKGQRLAIVGKNGAGKSTLAKALCQFIPNNATLIYNNEDVSQDSIKERAERIGYVLQNPNQMISQAMVFDEVALGLRLRGFSDNDIESRVYDILKVCGLYQFRNWPISALSFGQKKRVTIASILILNPEVIILDEPTAGQDMKHYTEMMSFLDKLSCDGHTIVMITHDMQLMLEYTDRAIVIDNGLIVADDHPINILSNTELLKKTHLKKTSLFALADRLGISPQKLTQWYIDNQGGKNG

SEQ ID NO: 4875 - DNA, 636 bp, Streptococcus agalactiae
ttgtcaataaggtttcaaatcagcttgaaatatgataaaatagaacagattgtaagtgactgtttaagcttgtttttcagagaggtttttatgaatacaaacacaataaaaaaggttgtagcgactggaattggagctgcactttttatcattataggtatgctagttaatataccaacaccaattccaaatactaatattcaattgcagtatgcagttttagcattatttgcagttatttatggaccaggagttggtttttttactggttttatcggacacgcattgaaagattcgattcaatatggttctccgtggtggacttgggttttagttagtggtcttttaggtttgatgataggcttttttgctaaaaaattagctattcaattatctggcatgactaagaaggatttgcttctatttaatgtagttcaagttattgctaaccttataggttggtctgtcgttgcaccgtatggtgatattttcttttatagcgaacctgcaagcaaagtttttgcacaaggtttcttatcaagccttgtgaattccattactattggagtaggtggtacgcttttgttgctagcatacgctaaatcacgaccacaaaaaggtagtttatccaaagat

SEQ ID NO: 4876 - protein, 212 aa, Streptococcus agalactiae
MSIRFQISLKYDKIEQIVSDCLSLFFREVFMNTNTIKKVVATGIGAALFIIIGMLVNIPTPIPNTNIQLQYAVLALFAVIYGPGVGFFTGFIGHALKDSIQYGSPWWTWVLVSGLLGLMIGFFAKKLAIQLSGMTKKDLLLFNVVQVIANLIGWSVVAPYGDIFFYSEPASKVFAQGFLSSLVNSITIGVGGTLLLLAYAKSRPQKGSLSKD

SEQ ID NO: 4877 - DNA, 324 bp, Streptococcus agalactiae
gtgaacagaacgtctgtcgatgaatttaaggctgtctcacacgaatcctgtatcacccctacaatgaaaccaactcctacgacttgcattgcaacgtcatttgaaataccaaataagctacatgccaccggaatcaataaaagtgaaccaccagttacaccagaagctccacatgctgatacagcagcaaccacacttaataagaatgctgttggaaaatcaacagtaattcctaaagtatttactgctgctaaagtcaggatattaattgtaatagctgcaccagccatattgatagctgcaccaagcgggatagatactgag

SEQ ID NO: 4878 - protein, 108 aa, Streptococcus agalactiae
MNRTSVDEFKAVSHESCITPTMKPTPTTCIATSFEIPNKLHATGINKSEPPVTPEAPHADTAATTLNKNAVGKSTVIPKVFTAAKVRILIVIAAPAILIAAPSGIDTE

SEQ ID NO: 4879 - DNA, 558 bp, Streptococcus agalactiae
ttggtgggtacgatgttatttgtagctcttgtcgttaacccaatcattgcttttgttatgatgcgtaaaaatccttaccctttggtattacgatgcttaaaggattcaggtattacagctttctttacacgtagttctgcggcgaatattcctgttaatatgagactatgtgaggatttaggattagataaagacacttactcagtatctatcccgcttggtgcagctatcaatatggctggtgcagctattacaattaatatcctgactttagcagcagtaaatactttaggaattactgttgattttccaacagcattcttattaagtgtggttgctgctgtatcagcatgtggagcttctggtgtaactggtggttcacttttattgattccggtggcatgtagcttatttggtatttcaaatgacgttgcaatgcaagtcgtaggagttggtttcattgtaggggtgatacaggattcgtgtgagacagccttaaattcatcgacagacgttctgttcacggctgtagctgaaaaatcagtttttggaaaaaaa

SEQ ID NO: 4880 - protein, 186 aa, Streptococcus agalactiae
MVGTMLFVALVVNPIIAFVMMRKNPYPLVLRCLKDSGITAFFTRSSAANIPVNMRLCEDLGLDKDTYSVSIPLGAAINMAGAAITINILTLAAVNTLGITVDFPTAFLLSVVAAVSACGASGVTGGSLLLIPVACSLFGISNDVAMQVVGVGFIVGVIQDSCETALNSSTDVLFTAVAEKSVFGKK

SEQ ID NO: 4881 - DNA, 1212 bp, Streptococcus pyogenes
atgaaaaaaatatatgatttatgggttagggttagtctaatcaaaaaaataggtatcggtgttgtaataggagtcatgttgggcattttggctcctgatcttacaggttttagtattttaggaaagttatttgttggtggtttaaaggctatcgcacctttgcttgtatttgctttggtttcccaagctatctcccatcagaaaaaagggaaacagactaatatgacattaatcattgttctgtatttatttggtacctttgcgtcagctttagtagcagtactgacagcttatctattccctttgacgttagtgttaaatacacctgtaaatacagaattatcaccacctcaaggtgttgctgaagtttttcagtcacttctattaaaattagtggataatccgatcaatgctttagctactgccaattatattggtgtgctatcatgggcaattatttttggactagcattaaaggctgcaagtaaagaaacaaagcatcttataaaaacagcggcagaagttacttcacaaatagttgtttggatcatcaatctggcacctattgggattatgagtctggtgttcactacgatttctgaaaacggtgttggaatcttatctgattatgcttttttgatactagttttagtaggaacaatgctttttgtcgccttagtggttaatccacttattgcggttttgattacacgacaaaatccttatccccttgtcttgagatgtttacgtgagtcaggtcttacagcatttttcacacgaagttctgcagccaatattccagtcaatatgcaattatgccaaaaaattggattgagtaaagatacttattcagtgtcaattccacttggagcaactattaatatgggtggggcagcaattaccatcaatgtcctaacgcttgctgctgtacacacttttggtattcctattgattttctaacagccctcttacttagcgttgttgctgctgtctctgcttgtggtgcttctggtgttgctgggggatcgttgttacttattcctgtagcatgtagtttgtttggcatttcaaatgatcttgcgatgcaggtggttggtgttggttttattgttggtgttatccaggattcttgtgagacagccttaaattcgtcaaccgatgttctttttacagctattgctgaaaatgctttttggaaacgtaaaaaagca

SEQ ID NO: 4882 - protein, 404 aa, Streptococcus pyogenes
MKKIYDLWVRVSLIKKIGIGVVIGVMLGILAPDLTGFSILGKLFVGGLKAIAPLLVFALVSQAISHQKKGKQTNMTLIIVLYLFGTFASALVAVLTAYLFPLTLVLNTPVNTELSPPQGVAEVFQSLLLKLVDNPINALATANYIGVLSWAIIFGLALKAASKETKHLIKTAAEVTSQIVVWIINLAPIGIMSLVFTTISENGVGILSDYAFLILVLVGTMLFVALVVNPLIAVLITRQNPYPLVLRCLRESGLTAFFTRSSAANIPVNMQLCQKIGLSKDTYSVSIPLGATINMGGAAITINVLTLAAVHTFGIPIDFLTALLLSVVAAVSACGASGVAGGSLLLIPVACSLFGISNDLAMQVVGVGFIVGVIQDSCETALNSSTDVLFTAIAENAFWKRKKA

SEQ ID NO: 4883 - DNA, 771 bp, Streptococcus agalactiae
atgtctccagataaggtggagcaaaagacgaaatttaaaaatatttctctaagttctaataaactgttggctaaggaaaacactatgtctgtcctttggtatcaaaattctgcagaagccaaggctttatatttacaaggttataatgttgctaaaatgaagttagatgattggttacaaaagcccagtgaaaaaccatattcaattatcttagatttagatgaaacagttttagataatagcccatatcaagcaaagaatattaaagatggctctagtttcacgccagagagttgggataaatgggtgcaaaagaaatcagctaaggctgttgcgggtgccaaagaatttttgaagtatgctaatgaaaagggaataaaaatttattatgtctcagatcgtacagatgctcaagttgatgcgactaaagaaaatttagagaaggaaggtatacctgttcaagggaaagaccacttgcttttccttaaaaaaggaatgaaatctaaagagagtcgccgtcaggcagttcaaaaagataccaatttaattatgctttttggagataatttagttgattttgctgatttttctaaatcatctagtacagatagagaacaactactaactaaacttcaaagtgagtttggtagtaaatttattgttttcccaaatcctatgtacggttcttgggaaagtgctatttatcaaggaaaacatctggatgttcaaaaacaattgaaagaacgacaaaaaatgttgcattcgtatgat

SEQ ID NO: 4884 - protein, 257 aa, Streptococcus agalactiae
MSPDKVEQKTKFKNISLSSNKLLAKENTMSVLWYQNSAEAKALYLQGYNVAKMKLDDWLQKPSEKPYSIILDLDETVLDNSPYQAKNIKDGSSFTPESWDKWVQKKSAKAVAGAKEFLKYANEKGIKIYYVSDRTDAQVDATKENLEKEGIPVQGKDHLLFLKKGMKSKESRRQAVQKDTNLIMLFGDNLVDFADFSKSSSTDREQLLTKLQSEFGSKFIVFPNPMYGSWESAIYQGKHLDVQKQLKERQKMLHSYD

SEQ ID NO: 4885 - DNA, 852 bp, Streptococcus pyogenes
atgaaatccaaaaaagttgttagtgttatatcacttaccttatccctttttttggtgacaggttgtgctaaagttgataacaacaaatcagttaatcttaagcctgctactaaacaaacctataatagctatagtgatgaccaattaagatcgcgtgaaaataccatgtctgttttatggtaccagcgagctgcggaaactcaagcgctttatttacaggggtatcagttagcaacggatcgcttaaaagaacaactcaataaaccaacggataaaccttattcaattgtattagatattgacgaaacagttcttgataatagcccttatcaagctaaaaatgttttggaaggaacaggatttacacctgaaagctgggattattgggtacaaaagaaagaagcaaaaccggttgctggtgctaaagactttttgcaatttgcagaccaaaatggtgttcaaatttactacatttcagacagatcaactactcaagtagatgctacaatggaaaatctccaaaaagaaggtattccagtacaaggtcgtgatcatcttctattcttagaaaaaggcgtaaaatcaaaggagagtcgtcgtcaaaaggtcaaagaaacaactaatgtaacgatgctatttggtgataatcttctagattttgctgatttttcaaaaaaatctcaagaagatagaacagctttattatcagatttacaagaagagtttggaagacgctttatcattttccctaatcctatgtatggttcatgggaaggtgccatttataaaggtgaaaagctggatgtgcttaagcaactagaggaacgccgtaaaagtttaaaaagctttaaa

SEQ ID NO: 4886 - protein, 284 aa, Streptococcus pyogenes
MKSKKVVSVISLTLSLFLVTGCAKVDNNKSVNLKPATKQTYNSYSDDQLRSRENTMSVLWYQRAAETQALYLQGYQLATDRLKEQLNKPTDKPYSIVLDIDETVLDNSPYQAKNVLEGTGFTPESWDYWVQKKEAKPVAGAKDFLQFADQNGVQIYYISDRSTTQVDATMENLQKEGIPVQGRDHLLFLEKGVKSKESRRQKVKETTNVTMLFGDNLLDFADFSKKSQEDRTALLSDLQEEFGRRFIIFPNPMYGSWEGAIYKGEKLDVLKQLEERRKSLKSFK

SEQ ID NO: 4887 - DNA, 1194 bp, Streptococcus agalactiae
atggctaaattgactgttaaagacgttgatttgaaaggtaaaaaagtcctcgttcgtgttgactttaatgtgcctttgaaagacggcgttatcactaacgacaaccgtatcactgcggctcttccaacaatcaagtatatcatcgaacaaggtggtcgtgctatcctcttctctcaccttggacgtgttaaagaagaagctgacaaagaaggaaaatcacttgcaccggtagctgctgatttagctgctaaacttggtcaagatgttgtattcccaggtgttactcgtggtgcaaaattagaagaagcaatcaatgctttggaagatggacaagttcttttggttgaaaacactcgttttgaagatgttgacggtaagaaagaatctaagaatgacgaagaacttggtaaatactgggcttcacttggagatggaatcttcgttaacgatgcatttggtacagcacaccgtgctcatgcatcaaacgtaggtatttcagcaaacgttgaaaaagctgtagctggtttccttcttgaaaacgaaattgcttacatccaagaagcagttgaaactccagaacgcccattcgtagctattcttggtggctcaaaagtttctgataagattggtgttatcgaaaaccttcttgaaaaagctgataaagttcttatcggtggtggtatgacttacacattctacaaagctcaaggtatcgaaatcggtaactcacttgtagaagaagacaaattggatgttgctaaagacctccttgaaaaatcaaacggtaaattgatcttgccagttgactcaaaagaagcaaacgcatttgctggttatactgaagttcgcgacactgaaggtgaagcagtttcagaagggttccttggtcttgacatcggtcctaaatcaatcgctaaatttgatgaagcacttactggtgctaaaacagttgtatggaacggacctatgggtgtctttgaaaaccctgacttccaagctggtacaatcggtgtaatggacgctatcgttaaacaaccaggcgttaaatcaatcatcggtggtggtgattcagcagcagctgctatcaaccttggccgtgctgacaaattctcatggatctctactggtggtggagcaagcatggaattgctcgaaggtaaagtattaccaggtttggcagcattgactgaaaaa

SEQ ID NO: 4888 - protein, 398 aa, Streptococcus agalactiae
MAKLTVKDVDLKGKKVLVRVDFNVPLKDGVITNDNRITAALPTIKYIIEQGGRAILFSHLGRVKEEADKEGKSLAPVAADLAAKLGQDVVFPGVTRGAKLEEAINALEDGQVLLVENTRFEDVDGKKESKNDEELGKYWASLGDGIFVNDAFGTAHRAHASNVGISANVEKAVAGFLLENEIAYIQEAVETPERPFVAILGGSKVSDKIGVIENLLEKADKVLIGGGMTYTFYKAQGIEIGNSLVEEDKLDVAKDLLEKSNGKLILPVDSKEANAFAGYTEVRDTEGEAVSEGFLGLDIGPKSIAKFDEALTGAKTVVWNGPMGVFENPDFQAGTIGVMDAIVKQPGVKSIIGGGDSAAAAINLGRADKFSWISTGGGASMELLEGKVLPGLAALTEK

SEQ ID NO: 4889 - DNA, 1194 bp, Streptococcus pyogenes
atggctaaattgactgttaaagacgttgatttgaaaggtaaaaaagtcctcgttcgtgttgactttaatgtgcctttgaaagacggcgttatcactaacgacaaccgtatcactgcggctcttccaacaatcaagtatatcatcgaacaaggtggtcgtgctatcctcttctctcaccttggacgtgttaaagaagaagctgacaaagaaggaaaatcacttgcaccggtagctgctgatttagctgctaaacttggtcaagatgttgtattcccaggtgttactcgtggttcaaaattagaagaagcaatcaatgctttggaagatggacaagttcttttggttgaaaacactcgttttgaagatgttgacggtaagaaagaatctaagaatgacgaagaacttggtaaatactgggcttcacttggagatggaatcttcgttaacgatgcatttggtacagcacaccgtgctcacgcatcaaacgtaggtatttcagcaaacgttgaaaaagctgtagctggtttccttcttgaaaacgaaattgcttacatccaagaagcagttgaaactccagaacgtccattcgtagctattcttggtggatcaaaagtttctgataagattggtgttatcgaaaatcttcttgaaaaagctgataaagttcttatcggtggtggtatgacttacacattctacaaagctcaaggtatcgaaatcggtaactcacttgtagaagaagacaaattggatgttgctaaagacctccttgaaaaatcaaatggtaaattgatcttgccagttgactcgaaagaagcaaacgcatttgctggttacactgaagttcgcgacactgaaggtgaagcagtttcagaaggcttccttggtcttgacatcggtcctaaatcaatcgctgagtttgaccaagcacttactggtgctaaaacagttgtttggaatggtccaatgggtgtctttgaaaaccctgacttccaagctggtacaatcggtgtcatggacgctatcgttaaacaaccaggcgttaaatccatcatcggtggtggtgattcagcagctgctgctatcaaccttggccgtgctgacaaattctcatggatcagtactggcggaggcgctagcatggaacttctcgagggtaaagtattaccaggtttggcagcattgactgaaaaa

SEQ ID NO: 4890 - protein, 398 aa, Streptococcus pyogenes
MAKLTVKDVDLKGKKVLVRVDFNVPLKDGVITNDNRITAALPTIKYIIEQGGRAILFSHLGRVKEEADKEGKSLAPVAADLAAKLGQDVVFPGVTRGSKLEEAINALEDGQVLLVENTRFEDVDGKKESKNDEELGKYWASLGDGIFVNDAFGTAHRAHASNVGISANVEKAVAGFLLENEIAYIQEAVETPERPFVAILGGSKVSDKIGVIENLLEKADKVLIGGGMTYTFYKAQGIEIGNSLVEEDKLDVAKDLLEKSNGKLILPVDSKEANAFAGYTEVRDTEGEAVSEGFLGLDIGPKSIAEFDQALTGAKTVVWNGPMGVFENPDFQAGTIGVMDAIVKQPGVKSIIGGGDSAAAAINLGRADKFSWISTGGGASMELLEGKVLPGLAALTEK

SEQ ID NO: 4891 - DNA, 537 bp, Streptococcus agalactiae
atgaaaacgttaaaaaaattattatctaattacaagtttgatattaaaaagtttaaattgggaatgagaacatttaaaacaggcttatcggtctttttagttttattggtttttcatttatttggttggaaagggcttcaaattggtgctctaactgctgtatttagtttaagagaagactttgataaaagcgtgcactttggtttttctagaattattggtaatagtataggtggcttactctccttagtattttttgcattcaatgagatatttcatcaagctttttgggtcactttattaattgttcctatttgtaccatgttatgtatcatgattaatgttgcttgtaataataaatcaggtattattgggggaacagccgcattacttattataactttatctatcccaagcggagagacaattctatatgtttttgcacgtatttttgaaactttttgtggtgtttttattgcaatgatggttaatacagatattgaaatacttcggaaaaaactaaaaaataacaaatta

SEQ ID NO: 4892 - protein, 179 aa, Streptococcus agalactiae
MKTLKKLLSNYKFDIKKFKLGMRTFKTGLSVFLVLLVFHLFGWKGLQIGALTAVFSLREDFDKSVHFGFSRIIGNSIGGLLSLVFFAFNEIFHQAFWVTLLIVPICTMLCIMINVACNNKSGIIGGTAALLIITLSIPSGETILYVFARIFETFCGVFIAMMVNTDIEILRKKLKNNKL

SEQ ID NO: 4893 - DNA, 549 bp, Streptococcus pyogenes
atgaaaacgttaagaaaattattatctaattacaagtttgatattaaaaagtttaaattgggaatgagaacattgaaaacaggcttatcggtctttttagttttattggtttttcatttatttggttggaaagggctccaaattggtgctctaactgctgtatttagtttaagagaagactttgataaaagcgtgcactttggcttttctagaattattggtaatagtataggtggcctactctccttagtattttttgcattcaatgagatatttcatcaagctttttgggttactttattaattgttcctatttgtaccatgttatgtatcatggttaatgttgcatgtaataataaatcaggtattattggggcagtggctgctcttttgattattacactgtctattccaacaggacaaacgtttatttatgtgacttcgcgggtatttgaaacattttgtggcgtctttgtagctattttagttaatactgatgttgaacttattaaaaataaatggtttaacaaaaaacacagtgatgttaga

SEQ ID NO: 4894 - protein, 183 aa, Streptococcus pyogenes
MKTLRKLLSNYKFDIKKFKLGMRTLKTGLSVFLVLLVFHLFGWKGLQIGALTAVFSLREDFDKSVHFGFSRIIGNSIGGLLSLVFFAFNEIFHQAFWVTLLIVPICTMLCIMVNVACNNKSGIIGAVAALLIITLSIPTGQTFIYVTSRVFETFCGVFVAILVNTDVELIKNKWFNKKHSDVR

SEQ ID NO: 4895 - DNA, 369 bp, Streptococcus agalactiae
atgaaagaaagagaacttaggcgtacaatggctgtattcccgattggagctgttatgaagttgacagatttgactgccagacaaattcgctattatgaggatcaagggttaatcacacctgaacgtactgaaggtaaccgccgcatgttttcactgaatgatatggaccgcttactggaaataaaagacttcattagcgatggtttgcatatttctgatattaaaaatgaatacatgcaaagacaacataagtccaaagagaaacaaaagtcattatcagatgccgaggttcgtcgacttttacaagatgagctccgtaatcaagggcgtttttcaagtccttcacagcacattggaaatatgcatttg

SEQ ID NO: 4896 - protein, 123 aa, Streptococcus agalactiae
MKERELRRTMAVFPIGAVMKLTDLTARQIRYYEDQGLITPERTEGNRRMFSLNDMDRLLEIKDFISDGLHISDIKNEYMQRQHKSKEKQKSLSDAEVRRLLQDELRNQGRFSSPSQHIGNMHL

SEQ ID NO: 4897 - DNA, 369 bp, Streptococcus pyogenes
atgaaagaaaaagaacttagacgctcaatggctgtttttcctattggaacggtgatgacattaacagatctctctgcgagacaaattcgctattatgaagatcaaggtttaattaagcctgaacgaacgcaagggaatcggcgtatgttttccttaaatgacatggaccgacttttggaaattaaagattttttgtctgagggattaaatattgcagctattaaacgcgaatatgtcgagcgtcaaggtaagttaatgcaaaaacaaaaagctctaacagatgcagatgtcagacggatcttacatgatgaaatgctgacacaaagcggtttttctactccctcacagcatattggtaattttcgtatt

SEQ ID NO: 4898 - protein, 123 aa, Streptococcus pyogenes
MKEKELRRSMAVFPIGTVMTLTDLSARQIRYYEDQGLIKPERTQGNRRMFSLNDMDRLLEIKDFLSEGLNIAAIKREYVERQGKLMQKQKALTDADVRRILHDEMLTQSGFSTPSQHIGNFRI

SEQ ID NO: 4899 - DNA, 1344 bp, Streptococcus agalactiae
atgactatcacagcagaagatattcgtcgcgaagttaaggaaaaaaatgttaccttcctccgtttgatgttcacagatatcttaggagtaatgaaaaatgtcgaaattccggctacagatgaacaattagacaaagttttatcaaataaagcaatgtttgatggatcttctattgagggctttgttcgtatcaatgaatctgatatgtatttatatcctgatttagatacttggattgtctttccttggggagatgaaaatggagctgttgcaggtctaatctgtgatatctatacagcagaaggagaaccttttgccggagatccacgtggaaatcttaagcgtaatatgaaacgtatgcaagagatgggctataagtcatttaacttaggaccagaacctgaatttttcctatttaaaatggatgaaaatggtaacccaacacttgatgttaatgacaaaggaggctactttgacttagctccaacagacttagcagataatacacgtcgtgaaattgttaatgtcttaacacaaatgggctttgaagttgaagctagtcatcatgaagtagcagttggacagcatgaaattgactttaaatatgatgatgttttaaaagcctgtgacaacattcaattatttaaattggttgttaaaacaattgctcgtaagcatggtttatatgctacttttatggcaaaacctaagtttggtatcaatggttcaggtatgcattgtaatatgtctctttttgataatgaagggaacaatgctttctttgatccagaagatccacgtggaatgcaattatcagaggatgcctactactttttaggtgggttaatgaaacacgcttacaattacacagctatcattaatccaactgttaattcttataaacgtttggtaccaggatacgaagcaccagtttacgttgcttgggcaggtcgcaatcgttcgccacttattcgtgtacctgcatctcgaggtatgggaacacgcctagaattgcgctcggttgacccaacagcaaatccttatcttgctttatcagtacttttgggatcaggacttgagggaatcgagaataaaattgaagcaccagaaccaattgagacaaatatctatgctatgactgtagaagaacgtcgtcaagcaggtattgttgatttaccatctactcttcataatgctcttgaagcacttgaagaagatgaagtggtaaaagcggccctaggaactcatatctatactaatttcttagacgctaagcgtattgaatgggcaagttatgcgacttatgtttcacaatgggaaattgataattacctagatttatat

SEQ ID NO: 4900 - protein, 448 aa, Streptococcus agalactiae
MTITAEDIRREVKEKNVTFLRLMFTDILGVMKNVEIPATDEQLDKVLSNKAMFDGSSIEGFVRINESDMYLYPDLDTWIVFPWGDENGAVAGLICDIYTAEGEPFAGDPRGNLKRNMKRMQEMGYKSFNLGPEPEFFLFKMDENGNPTLDVNDKGGYFDLAPTDLADNTRREIVNVLTQMGFEVEASHHEVAVGQHEIDFKYDDVLKACDNIQLFKLVVKTIARKHGLYATFMAKPKFGINGSGMHCNMSLFDNEGNNAFFDPEDPRGMQLSEDAYYFLGGLMKHAYNYTAIINPTVNSYKRLVPGYEAPVYVAWAGRNRSPLIRVPASRGMGTRLELRSVDPTANPYLALSVLLGSGLEGIENKIEAPEPIETNIYAMTVEERRQAGIVDLPSTLHNALEALEEDEVVKAALGTHIYTNFLDAKRIEWASYATYVSQWEIDNYLDLY

SEQ ID NO: 4901 - DNA, 1344 bp, Streptococcus pyogenes
atggcaataacagtagctgacattcgtcgtgaagtcaaagaaaaaaatgtaacgtttcttcgcttgatgttcactgatatcatgggcgttatgaaaaatgtggagattcctgcaactaaagaacagttagacaaagtattgtctaacaaggttatgtttgatggttcatctatcgaaggttttgtacggatcaatgagtcagatatgtacctttaccccgatttagacacttggattgtttttccctggggagatgaaaatggagcagttgcaggtttaatttgtgatatttatacagcagaaggaaagccttttgcaggagatcctagaggaaatttaaaaagagccctgaaacacatgaacgagatcggctacaaatcatttaatcttggaccagaaccagaatttttcctttttaagatggatgataaaggtaatccgacacttgaagttaacgataatggtggttattttgatttagcgccaattgacttagcagacaacacgcgccgtgaaattgtgaatattttaacgaaaatgggttttgaagtggaagctagtcatcatgaagtggctgttggtcaacatgagattgattttaaatatgcagatgttttgaaagcttgtgataatattcaaatttttaagctagttgtaaaaacgattgcccgtgaacatggactttatgctactttcatggctaaaccaaaatttggaatagctggatcagggatgcactgtaacatgtctttgtttgataaccaaggtaataatgctttttatgatgaagctgataagcgagggatgcagttatcagaagatgcttattatttcttgggaggactaatgaagcatgcttataactacactgctatcactaaccctacagtgaattcttataaacgattagttccaggttatgaggcacctgtttatgtcgcttgggctggaagtaatcgttcaccgcttatccgtgttccagcatcacgtggtatgggaacgcgtttggagttacgttcggttgatccgacagctaatccttatttagccttggctgttctcttggaagctggattagatggtatcattaacaaaattgaagctccagaacccgttgaagctaacatttataccatgacaatggaagaacgaaatgaagcaggcattattgatttgccatcaacgcttcataatgccttaaaagctcttcaaaaagatgatgtggtacaaaaggcactaggttaccatatctacactaatttcttagaagcaaaacgaattgaatggtcttcctatgcaacttttgtttctcaatgggaaattgaccattatattcataattat

SEQ ID NO: 4902 - protein, 448 aa, Streptococcus agalactiae
MAITVADIRREVKEKNVTFLRLMFTDIMGVMKNVEIPATKEQLDKVLSNKVMFDGSSIEGFVRINESDMYLYPDLDTWIVFPWGDENGAVAGLICDIYTAEGKPFAGDPRGNLKRALKHMNEIGYKSFNLGPEPEFFLFKMDDKGNPTLEVNDNGGYFDLAPIDLADNTRREIVNILTKMGFEVEASHHEVAVGQHEIDFKYADVLKACDNIQIFKLVVKTIAREHGLYATFMAKPKFGIAGSGMHCNMSLFDNQGNNAFYDEADKRGMQLSEDAYYFLGGLMKHAYNYTAITNPTVNSYKRLVPGYEAPVYVAWAGSNRSPLIRVPASRGMGTRLELRSVDPTANPYLALAVLLEAGLDGIINKIEAPEPVEANIYTMTMEERNEAGIIDLPSTLHNALKALQKDDVVQKALGYHIYTNFLEAKRIEWSSYATFVSQWEIDHYIHNY

SEQ ID NO: 4903 - DNA, 507 bp, Streptococcus agalactiae
atggaggaaaacatgaacataaaacaattaaagtctaaaacaatgcttggaacagtggctttggtgtccgctttttcatttgcttcaacaaatgcagatgcgaatacatataactatgcagtagatgtagactacctagcaagtgcggaggaaattgctcaagcacatccagctagtaatacgtttccactaggtcaatgcacatggggtgtaaaggagatggcaacatgggcaggtaactggtggggaaacggtggtgattgggctgcgagcgccgcatcagctgattatacagtagggacacaaccgcgcgtgggttctatcgtatgttggactgatggtagttatggacatgtggcttatgttacagctgtagatcctgtcactaataaaattcaggttttagaatctaattatgcaggtcatcaatggattgataattatcgtggttggtttgatccacaaaatacagtaacaccaggggtagttagctacatttatccgaat

SEQ ID NO: 4904 - protein, 169 aa, Streptococcus agalactiae
MEENMNIKQLKSKTMLGTVALVSAFSFASTNADANTYNYAVDVDYLASAEEIAQAHPASNTFPLGQCTWGVKEMATWAGNWWGNGGDWAASAASADYTVGTQPRVGSIVCWTDGSYGHVAYVTAVDPVTNKIQVLESNYAGHQWIDNYRGWFDPQNTVTPGVVSYIYPN

SEQ ID NO: 4905 - DNA, 90 bp, Streptococcus agalactiae
atggtattgattaatttattgacacttgttgtattaccagggattgggcttgatgagaaaatcacagtatcaccaggctgcaaagtaact

SEQ ID NO: 4906 - protein, 30 aa, Streptococcus agalactiae
MVLINLLTLVVLPGIGLDEKITVSPGCKVT

SEQ ID NO: 4907 - DNA, 1677 bp, Streptococcus agalactiae
atgtcaaatatcaacttaaaacccgaagaagttggggtttatgcgattggtggtctcggtgaaatcggaaaaaatacttacggtatcgaatatcaagacgaaattattattgtagacgctggtattaaattccctgaagatgatcttttgggaatagattatgttatcccagactattcatatatcgttgaaaacattgaccgtatcaaggcccttgttataactcatgggcacgaggaccacatcggtggtattccttttctattaaaacaagctaatttaccgatttatgcaggtcctctcgctcttgctctaatcaaaggtaagttagaagaacatggtttacttcgtgacgctacattatacgaaatccacgctaatacagagctgacttttaaaaacttaagcgttacatttttccgcactactcactccattcctgaaccattaggtattgttattcatacccctcaaggtaaggttatttgtacaggtgacttcaaatttgactttacacctgttggggagcccgctgacttacatcgtatggctgctctaggtgaagatggtgtcctctgccttttatcagactcgacaaatgctgaagttccaaccttcactaattccgaaaaaattgttgggcaatctattatgaagattatcgaaggtatcgagggacgtattattttcgcctcttttgcttcaaacatcttccgactccaacaggctgctgaagctgctgttaaaactggtcgtaaaattgctgtttttggacggtcaatggaaaaggcaattgttaacggtattgaacttggctatattaaagttccaaaaggtaccttcattgagccaagcgaacttaaaaatcttcatgctagtgaagttttaattatgtgtacaggtagtcaaggtgagtctatggcagcacttgctcgtatcgctaatggtactcatcgtcaagttactttgcagcctggtgatactgtgattttctcatcaagcccaatccctggtaatacaacaagtgtcaataaattaatcaataccattcaagaagctggtgtcgatgttattcatggtaaaattaacaatatccatacctccggccatggtggtcaacaagaacaaaaattaatgttacgcttgattaaaccaaagtatttcatgcccgtacacggtgagtatcgcatgcaaaaagtccatgctggtttagcagttgacacaggtattcctaaagagaatatcttcattatggaaaacggtgatgttttagctttaacgagcgactctgctcgtattgctggacatttcaatgctcaagatatctacgttgatgggaatggtattggcgatattggtgcggcagttctacgtgaccgccacgacttatctgaagatggtgttgtccttgccgttgctaccgttgatttcgattcaaaaatgattttagctggaccagacatccttagccgaggctttatctatatgagagaatctggggaccttattcgcgaaagccaacatatcttattcaatgctattcgtattgcactgaaaaataaagatgcaagtatccaatcagtaaatggagctattgttaatgccttacgcccattcttatatgaaaaaactgagcgtgagcctatcattattcctatggtccttacccctgataaa

SEQ ID NO: 4908 - protein, 559 aa, Streptococcus agalactiae
MSNINLKPEEVGVYAIGGLGEIGKNTYGIEYQDEIIIVDAGIKFPEDDLLGIDYVIPDYSYIVENIDRIKALVITHGHEDHIGGIPFLLKQANLPIYAGPLALALIKGKLEEHGLLRDATLYEIHANTELTFKNLSVTFFRTTHSIPEPLGIVIHTPQGKVICTGDFKFDFTPVGEPADLHRMAALGEDGVLCLLSDSTNAEVPTFTNSEKIVGQSIMKIIEGIEGRIIFASFASNIFRLQQAAEAAVKTGRKIAVFGRSMEKAIVNGIELGYIKVPKGTFIEPSELKNLHASEVLIMCTGSQGESMAALARIANGTHRQVTLQPGDTVIFSSSPIPGNTTSVNKLINTIQEAGVDVIHGKINNIHTSGHGGQQEQKLMLRLIKPKYFMPVHGEYRMQKVHAGLAVDTGIPKENIFIMENGDVLALTSDSARIAGHFNAQDIYVDGNGIGDIGAAVLRDRHDLSEDGVVLAVATVDFDSKMILAGPDILSRGFIYMRESGDLIRESQHILFNAIRIALKNKDASIQSVNGAIVNALRPFLYEKTEREPIIIPMVLTPDK

SEQ ID NO: 4909 - DNA, 1680 bp, Streptococcus pyogenes
atgacaaatatcagtttaaaacctaatgaagttggggtgtttgccattggtggtctgggagagattgggaagaatacttatggtattgagtatcaagacgaaatcattatcgttgatgccggtatcaaattcccagaagatgatcttttgggaattgattacgttattccagactattcttacattgtcgataacttagaccgggtcaaagctcttgttattacacatggtcacgaagaccacattggtggtattccatttcttctcaaacaggctaatatccctatctacgcaggacctttagcacttgctcttatccgtggtaaattggaagaacatggtctttggcgtgaagcaactgtttacgaaatcaatcacaacaccgagttaacttttaaaaacatgagcgtcactttcttcaagactactcattccattccagaaccggtcggtattgttatccacacccctcaaggtaagattatctgtactggtgattttaaatttgacttcacgccagtaggagatcctgcagatttacaacgtatggcagcgcttggtgaagaaggtgtcctttgcttattatcagactcaactaatgctgaaatcccaacctttactaactctgaaaaagttgttggccaatccattttaaaaattatcgaaggtattcatggtcgtattatttttgcttccttcgcttcaaacatctaccgtttgcaacaggctgcagaagctgctgttaaaacgggacgtaaaattgccgtttttggtcgttctatggaaaaagcaattgttaacggtattgaacttggctatattaaagttccaaaaggtaccttcattgagccaagcgaacttaaaaatcttcatgctagtgaagttttaattatgtgtacaggtagtcaaggtgagtctatggcagcacttgctcgtatcgctaatggcactcatcgtcaagtaactttacagcctggtgatactgtgattttctcatcaagtccaatccctggtaataccacaagtgtcaataaattaatcaataccatccaagaagctggtgttgatgttattcatggaaaagtcaataatattcatacttctggtcatggaggacagcaagaacaaaagctcatgcttagtttgattaaaccaaaatatttcatgccagtacatggtgagtatcgcatgcaaaaagttcatgcaggactggcgatggatattggtattccaaaagaaaatatctttattatggaaaatggagacgttctagctttaaccagtgacagtgcgcgtattgctggtcactttaatgcccaagacatctacgtggatggtaatggcatcggggatattggagcagccgttttacgggaccgccgtgatttgtcagaagatggtgttgtcttagctgttgcaactgttgattttaacacacaaatgattttagctggaccagatattctgagccgtggtttcatttatatgcgtgagtcaggtgacttgatccgcgaaagccaacgtgtgctctttaacgctatccgtattgctttaaaaaataaggatgctagcatccaatcagttaacggtgctatcgtcaatgctcttcgtccattcttgtatgaaaagactgagcgtgaaccaattatcattccgatggtcttaacacctgataagcac

SEQ ID NO: 4910 - protein, 560 aa, Streptococcus pyogenes
MTNISLKPNEVGVFAIGGLGEIGKNTYGIEYQDEIIIVDAGIKFPEDDLLGIDYVIPDYSYIVDNLDRVKALVITHGHEDHIGGIPFLLKQANIPIYAGPLALALIRGKLEEHGLWREATVYEINHNTELTFKNMSVTFFKTTHSIPEPVGIVIHTPQGKIICTGDFKFDFTPVGDPADLQRMAALGEEGVLCLLSDSTNAEIPTFTNSEKVVGQSILKIIEGIHGRIIFASFASNIYRLQQAAEAAVKTGRKIAVFGRSMEKAIVNGIELGYIKVPKGTFIEPSELKNLHASEVLIMCTGSQGESMAALARIANGTHRQVTLQPGDTVIFSSSPIPGNTTSVNKLINTIQEAGVDVIHGKVNNIHTSGHGGQQEQKLMLSLIKPKYFMPVHGEYRMQKVHAGLAMDIGIPKENIFIMENGDVLALTSDSARIAGHFNAQDIYVDGNGIGDIGAAVLRDRRDLSEDGVVLAVATVDFNTQMILAGPDILSRGFIYMRESGDLIRESQRVLFNAIRIALKNKDASIQSVNGAIVNALRPFLYEKTEREPIIIPMVLTPDKH

SEQ ID NO: 4911 - DNA, 228 bp, Streptococcus agalactiae
atgatttataaagttttctatcaagaaacaaaagaacgcaacccacgtcgtgagcaaaccaaaacactttacgttactattgatgcagctaatgaattagaaggtcgcattgctgcacgtaaactagttgaagaaaatacagcttacaatatcgaattcatcgagttactttcagacaaacaccttgaatatgaaaaagaaactggtgttttcgagctcactgagttc

SEQ ID NO: 4912 - protein, 76 aa, Streptococcus agalactiae
MIYKVFYQETKERNPRREQTKTLYVTIDAANELEGRIAARKLVEENTAYNIEFIELLSDKHLEYEKETGVFELTEF

SEQ ID NO: 4913 - DNA, 228 bp, Streptococcus pyogenes
atgatttataaagttttctatcaagaaacaaaggatcaaagcccacgtcgtgaaagtactaaagcactctatcttaatattgatgctactgatgaactcgatggccgtatcaaggctcgtcgtctcgttgaagataacacctattataacgtggaatttatcgagctactttctgacaaacacctcgattacgaaaaagagaccggtgtttttgaattaacggagttc

SEQ ID NO: 4914 - protein, 76 aa, Streptococcus pyogenes
MIYKVFYQETKDQSPRRESTKALYLNIDATDELDGRIKARRLVEDNTYYNVEFIELLSDKHLDYEKETGVFELTEF

SEQ ID NO: 4915 - DNA, 690 bp, Streptococcus agalactiae
atgatgaaagttttagcctttgatacttcaagcaaagcactatcagtggctgtactaaacaatatggaatgtttagcgactgtcactatcaatatcaaaaagaatcatagcattaatttgatgccagccattgattttttaatgcaatcaattgatttagaacctcaagatttggaccgtatcgtagtagcagagggtccaggatcttatacgggcttacgtgtagctgttgctacagcaaaaatgctagcttatacgcttaagattgacttagttggagtatctagcctgtacgctttaacaaatggattttcagaaaatgatttattggtaccacttatagatgcacgacgtaataatgtttatgttggtttctatcaaaatggtgatactgttaaaccagactgtcacacttctcttgaagaagtcttacaagaggtggggaataaagccaatgttcattttgtcggagaggttgcagcattttttgatcagattaagaaagccttaccacatgctaaaattacagaaactttaccttgtgcagtagcaattgggcgcaaaggacaaaaaatgaaaagcgttaatgtagatgcgtttgttccacgatacttaaaacgtgttgaagctgaggaaaattggttaaaaaaccactgtgaaacgaatacagaagaatatattaagagagtt

SEQ ID NO: 4916 - protein, 230 aa, Streptococcus agalactiae
MMKVLAFDTSSKALSVAVLNNMECLATVTINIKKNHSINLMPAIDFLMQSIDLEPQDLDRIVVAEGPGSYTGLRVAVATAKMLAYTLKIDLVGVSSLYALTNGFSENDLLVPLIDARRNNVYVGFYQNGDTVKPDCHTSLEEVLQEVGNKANVHFVGEVAAFFDQIKKALPHAKITETLPCAVAIGRKGQKMKSVNVDAFVPRYLKRVEAEENWLKNHCETNTEEYIKRV

SEQ ID NO: 4917 - DNA, 729 bp, Streptococcus pyogenes
ttgatactagaacttgcagtagaaaggcataaaatgaagacacttgcatttgatacctcaaataaaaccttgtcccttgctatacttgatgatgagacacttctagcagatatgacccttaacattcagaaaaaacatagtgttagccttatgcctgctattgattttttgatgacttgtactgatcttaaacctcaagatttagaaagaatagtggttgcaaaaggccctggatcttacacaggtttacgagtggcagttgctactgcaaaaacgttagcgtacagtttaaatattgcattggtcgggatttcgagtctatatgctttggctgcgtctacttgtaaacagtatccaaatactttggtggtgccattgattgatgctagaaggcaaaatgcgtatgtaggttattatcggcaaggaaaatcagtgatgccacaagcccatgcttcactagaagttattatagaacaattagtagaagaaggacagctgatttttgttggggagactgctccttttgctgagaaaattcaaaagaaactacctcaggcgatactacttccaacccttccttctgcttacgaatgtggtcttttggggcaaagtttggcaccagaaaatgtagacgcctttgtccctcaatatctcaagagagtggaagctgaagaaaactggctcaaagataatgagataaaagatgatagtcactacgttaagcgaatc

SEQ ID NO: 4918 - protein, 243 aa, Streptococcus pyogenes
LILELAVERHKMKTLAFDTSNKTLSLAILDDETLLADMTLNIQKKHSVSLMPAIDFLMTCTDLKPQDLERIVVAKGPGSYTGLRVAVATAKTLAYSLNIALVGISSLYALAASTCKQYPNTLVVPLIDARRQNAYVGYYRQGKSVMPQAHASLEVIIEQLVEEGQLIFVGETAPFAEKIQKKLPQAILLPTLPSAYECGLLGQSLAPENVDAFVPQYLKRVEAEENWLKDNEIKDDSHYVKRI

SEQ ID NO: 4919 - DNA, 444 bp, Streptococcus agalactiae
gtgaaacgaatacagaagaatatattaagagagtttgagatggaatcatcagaacaagcactggctatatggagcgtactatctgatgtctatgacaaatctccgtggagtttatcgcagatttcagaagatttaaaaaaagattcaacagattatttttttgtttataatgacggtgaagtcattggttttttggctcttcaacaattggtaggtgaagtagaaattactaatattgctgttaaaaaaaattatcaaggtaaaggttatgcttaccagttaatgtcaatgatcgctgatatagaggtgccagtttttcttgaggttcgttattcaaatatcgtagcacaaaaactttatgagaggtgtggttttgtagttttaagaaagcgcaaaaattattaccatgatccaattgaagatgctatagtgatgcgcaaggga

SEQ ID NO: 4920 - protein, 148 aa, Streptococcus agalactiae
MKRIQKNILREFEMESSEQALAIWSVLSDVYDKSPWSLSQISEDLKKDSTDYFFVYNDGEVIGFLALQQLVGEVEITNIAVKKNYQGKGYAYQLMSMIADIEVPVFLEVRYSNIVAQKLYERCGFVVLRKRKNYYHDPIEDAIVMRKG

SEQ ID NO: 4921 - DNA, 453 bp, Streptococcus pyogenes
atgatagtcactacgttaagcgaatctaatatgaaaacagttgaagaacaagcaaaaaatatttatcagcttttggaaatggtttatggcacgtctccttggactttagaacaagtattaatcgatatacggcgggatcaaacagattatttcctactatatgatcatgataaattgctaggttttttagctattcaagatttagctggtgaagttgaaatgactcaaattgctatactacctagtcatcaagaacttgggctagcgtctcaattgatgacgcatttagatagcattgaaagtgacatctttttagaggttagagaatctaatcatagagcacagggtttatatcagaagtttggttttaaatttattggcaaaagaccagactactatagaaatcctatagaaacagctttattgatgaaacgggaaggaaaacatgacaga

SEQ ID NO: 4922 - protein, 151 aa, Streptococcus pyogenes
MIVTTLSESNMKTVEEQAKNIYQLLEMVYGTSPWTLEQVLIDIRRDQTDYFLLYDHDKLLGFLAIQDLAGEVEMTQIAILPSHQELGLASQLMTHLDSIESDIFLEVRESNHRAQGLYQKFGFKFIGKRPDYYRNPIETALLMKREGKHDR

SEQ ID NO: 4923 - DNA, 108 bp, Streptococcus agalactiae
atgtgcttcctttcaggcggctgttttggatattttattggccaaaactcaaaaagctttgctaaagtatccagtgaaaactttagtcgttgctggtggagttgcagc

SEQ ID NO: 4924 - protein, 36 aa, Streptococcus agalactiae
MCFLSGGCFGYFIGQNSKSFAKVSSENFSRCWWSCS

SEQ ID NO: 4925 - DNA, 1008 bp, Streptococcus agalactiae
atgaaagatagatatattttagcagtggaaagttcatgtgatgaaactagtgttgctattttaaaaaatgataaagagttactagctaatattattgcaagtcaagttgaaagtcacaaacgttttggtggtgttgttcctgaagtggcaagccgtcatcacgttgaagtagtaacaacctgttttgaggatgctcttcaagaagcaggtattgttgctagcgatttggatgctgttgctgtaacatatggtccgggattagtaggagccttattggtaggtatggctgcagcaaaagctttcgcttgggcaaataaattacctctaattcctataaaccacatggcaggtcatttaatggcagcacgtgacgttaaggaacttcaatacccattgttagctttgcttgtcagtgggggacatacagaattagtatatgtttctgaaccgggagattacaaaatagtaggagaaactcgggatgatgctgttggagaagcttatgataaagtaggccgtgttatgggcttaacttatccagcaggtcgcgagattgatcagttagctcataagggtcaagatacttaccattttcctagagcgatgatcaaagaagatcatcttgaattttctttttctggattaaaatctgcatttatcaatttacatcataatgcagaacaaaagggtgaagcattggttcttgaagatttatgtgcttcctttcaggcggctgttttggatattttattggccaaaactcaaaaagctttgctaaagtatccagtgaaaactttagtcgttgctggtggagttgcagctaatcaaggacttcgggaacgcttggctactgatatttctcctgatattgatgtggttattcctcctcttagattatgtggggataatgcaggaatgattgcattagcagcagcgatagagtttgaaaaagagaattttgcttctttaaaattgaatgccaaacctagtttagcttttgagagttta

SEQ ID NO: 4926 - protein, 336 aa, Streptococcus agalactiae
MKDRYILAVESSCDETSVAILKNDKELLANIIASQVESHKRFGGVVPEVASRHHVEVVTTCFEDALQEAGIVASDLDAVAVTYGPGLVGALLVGMAAAKAFAWANKLPLIPINHMAGHLMAARDVKELQYPLLALLVSGGHTELVYVSEPGDYKIVGETRDDAVGEAYDKVGRVMGLTYPAGREIDQLAHKGQDTYHFPRAMIKEDHLEFSFSGLKSAFINLHHNAEQKGEALVLEDLCASFQAAVLDILLAKTQKALLKYPVKTLVVAGGVAANQGLRERLATDISPDIDVVIPPLRLCGDNAGMIALAAAIEFEKENFASLKLNAKPSLAFESL

SEQ ID NO: 4927 - DNA, 1026 bp, Streptococcus pyogenes
atgacagataggtatattttagcagttgagagttcttgtgatgagaccagtgtagcgattttaaaaaacgaaagtaccctcttaagtaatgtcattgcaagtcaggttgagagccacaaacgctttggtggtgtggtgccagaagtagctagtagacaccatgtcgaagtgattacgacttgctttgaggatgctttgcaagaagctggcatcagtgcttcagatttatcagcagttgcggtaacttatggccctggacttgttggagccttgttagttggattagcagctgcgaaggcttttgcttgggcaaatcatttacctttgattccggttaatcatatggcaggtcacttaatggcagcgcgtgaacaaaagcctttagtttatcctttaatagcactgttggtttcaggaggacacacagaattggtttatgtcccagagccaggggattatcatattattggcgagacgcgtgacgacgctgttggtgaggcttatgataaagttgggcgtgtgatgggcttaacctatccggcaggacgtgaaattgaccagttggctcataaaggtcaagatacttatcatttccctcgtgctatgataacagaagaccacttagaattttccttttcaggactcaagtccgcttttatcaatcttcatcataatgctaagcaaaaaggcgatgaactgattctagaagatttgtgtgcatcttttcaagcagctgttctagatattttattggccaaaacaaaaaaagctctgagcagataccctgcaaagatgcttgtagtggctggtggtgtagcggcaaatcaaggattacgagatagattagcacaagaaattacacatatagaagttgtgattcctaaactaagactctgtggagataacgcgggtatgattgctttagcagcagctattgagtatgacaaacagcattttgctaatatgagcctaaacgcgaagcctagtttagcttttgaccagtttccagacagttttgtaataaac

SEQ ID NO: 4928 - protein, 342 aa, Streptococcus pyogenes
MTDRYILAVESSCDETSVAILKNESTLLSNVIASQVESHKRFGGVVPEVASRHHVEVITTCFEDALQEAGISASDLSAVAVTYGPGLVGALLVGLAAAKAFAWANHLPLIPVNHMAGHLMAAREQKPLVYPLIALLVSGGHTELVYVPEPGDYHIIGETRDDAVGEAYDKVGRVMGLTYPAGREIDQLAHKGQDTYHFPRAMITEDHLEFSFSGLKSAFINLHHNAKQKGDELILEDLCASFQAAVLDILLAKTKKALSRYPAKMLVVAGGVAANQGLRDRLAQEITHIEVVIPKLRLCGDNAGMIALAAAIEYDKQHFANMSLNAKPSLAFDQFPDSFVIN

SEQ ID NO: 4929 - DNA, 192 bp, Streptococcus agalactiae
atgaacacctataaactctcaaaagctaaactaggtttggcattcaattttaaagaagcaaaattctctttttcaaactctatcgctgctgctaatgcaatcattcctgcattatccccacataatctaagaggaggaataaccacatcaatatcaggagaaatatcagtagccaagcgttcccgaagtcct

SEQ ID NO: 4930 - protein, 64 aa, Streptococcus agalactiae
MNTYKLSKAKLGLAFNFKEAKFSFSNSIAAANAIIPALSPHNLRGGITTSISGEISVAKRSRSP

SEQ ID NO: 4931 - DNA, 120 bp, Streptococcus agalactiae
atgattgaatattcaaaaatattagcaaatgatattgtcgctatttttttaactaataaaggagttaaggaatgttacattttgaaaatgattataataaaggagctcatccagagcttt

SEQ ID NO: 4932 - protein, 40 aa, Streptococcus agalactiae
MIEYSKILANDIVAIFLTNKGVKECYILKMIIIKELIQSF

SEQ ID NO: 4933 - DNA, 849 bp, Streptococcus agalactiae
gtgggtggtactcaaacaaatcaagtagttatcagtagtatgcttgcttcttatgaaggagttattgctgcagaaacaggtcatgtgagtagtcatgaagcaggagccatagaattttcagggcataaggtattgactttaccttctcataatgggaaattactcgcaagcgaagtcgcaacttatattgagactttttatgctgatggtaattaccaacacatggtttttccaggaatggtttatatatcacatccaacagaatatggaacactttatagtaaagcagaactagaagagttatcgaagatttgtaaacattatcaaatccccttatttattgacggtgctcgtctggggtatggtttggctgcgaaagatacagatgttgatttcccaacgattgcagccttatcagatgttttttatattggtggaaccaaaatgggggctcttgctggggaagcagttgttttcacaaagaaaaatcgtccaaaacagtttactacaattgtaaagcagcatggtgcgttattagccaagggaagattgctggggcttgcttttgatcgtttctttacggataacctttacttaaaaattggaaagcatgcgatcgacttagcagaggaattaaaaatcattttagaagaaaaaggttactcattctatttaaaatcaccaactaatcaacaatttattattgtagaaaatacaaaactagcagatttagcaaagaatgtagcttatagtttttgggaaaaatatgatgaccatcatactgtaatacgtctagcaactagttggtcaactagtcgcgaagatgtaactgctttaagaaatgtcttg

SEQ ID NO: 4934 - protein, 283 aa, Streptococcus agalactiae
MGGTQTNQVVISSMLASYEGVIAAETGHVSSHEAGAIEFSGHKVLTLPSHNGKLLASEVATYIETFYADGNYQHMVFPGMVYISHPTEYGTLYSKAELEELSKICKHYQIPLFIDGARLGYGLAAKDTDVDFPTIAALSDVFYIGGTKMGALAGEAVVFTKKNRPKQFTTIVKQHGALLAKGRLLGLAFDRFFTDNLYLKIGKHAIDLAEELKIILEEKGYSFYLKSPTNQQFIIVENTKLADLAKNVAYSFWEKYDDHHTVIRLATSWSTSREDVTALRNVL

SEQ ID NO: 4935 - DNA, 114 bp, Streptococcus agalactiae
atgccaatttatttattttcaaaaagcccggtatgccaagataccgagctttttattattataaatactgataaaattcttttagttaatcccaaaaacaagactattattttg

SEQ ID NO: 4936 - protein, 38 aa, Streptococcus agalactiae
MPIYLFSKSPVCQDTELFIIINTDKILLVNPKNKTIIL

SEQ ID NO: 4937 - DNA, 267 bp, Streptococcus agalactiae
atggctaagaaatcaaaaattgctaaatttcaaaaacagcaaaaactcgtagaacaatatgctgaactacgtcgtgagttaaaagaaaagggtgattacgaagcacttcgtaaacttcctaaagattctaaccctaaccgacttaaaaatcgtgatttaatcgatggccgtcctcacgcttacatgcgtaaattcggtatgagtcgtattaacttccgtaacctagcttacaaaggccaaattcctggcattaaaaaagcaagctgg

SEQ ID NO: 4938 - protein, 89 aa, Streptococcus agalactiae
MAKKSKIAKFQKQQKLVEQYAELRRELKEKGDYEALRKLPKDSNPNRLKNRDLIDGRPHAYMRKFGMSRINFRNLAYKGQIPGIKKASW

SEQ ID NO: 4939 - DNA, 267 bp, Streptococcus pyogenes
atggcaaaaaagtcaaaaattgctaaataccaaaagcagctccaactgattgaacagtacgctgaccttcgtcgtgacttaaaagcgaagggcgattatgaatcactgcgcaaattgcctcgtgattcaaatccaaaccgcttgaagaaccgcgacaaaattgacggccgtcctcatgcttacatgcgtaagtttggtgttagccgtatcaatttccgtgacttagctcacaaaggacagcttcctggcgtcactaaagctagctgg

SEQ ID NO: 4940 - protein, 89 aa, Streptococcus pyogenes
MAKKSKIAKYQKQLQLIEQYADLRRDLKAKGDYESLRKLPRDSNPNRLKNRDKIDGRPHAYMRKFGVSRINFRDLAHKGQLPGVTKASW

SEQ ID NO: 4941 - DNA, 780 bp, Streptococcus agalactiae
atgtgttacaataacagtatgaatgaaagatatatccgatttaaccctaatatcgcgaaacaaaaacccagcaataaagacaaatgtccattttgtgataaaagccaattaggaaaaatcctagacgtgaaagacgatatgatctgggtagaaaataaatacccaactttagaagaaacctatcaaacattggtgattgaatcaaatgatcacaatggggatatttcagtttatagtgagtcaaagatgcgccaattgttagattatcttttgtcaaaatggcaattaatggaagaaagtggtcattaccgttcggtcgttctttatcgaaattttgggcccttatctggcggaagtttacgacatcctcatagccaaattgttggcttaaaaaacgtagatgcttatgaaacgttgaacttagattggtttgatggtatcgaggtttgttcggaaacgagtcaacaagcagagattagtattgccaatcgtcctatgcttgatttcacagagttcacaattaaagtatccaaattggaaaacgctattttgattgcagatagtttaccaattttgtgtcattatattttaaatgaattcttgggagggcgctgtaaatcttataatctctttttctataagcatgatgggggtcttatttgtaaaattgttcctcgttttatagtatccccttatcagattgggtatgctattcatcaggtaaatttaccagatgaattggaaaaaatcaaagaagccttaagagccaaatattatctt

SEQ ID NO: 4942 - protein, 260 aa, Streptococcus agalactiae
MCYNNSMNERYIRFNPNIAKQKPSNKDKCPFCDKSQLGKILDVKDDMIWVENKYPTLEETYQTLVIESNDHNGDISVYSESKMRQLLDYLLSKWQLMEESGHYRSVVLYRNFGPLSGGSLRHPHSQIVGLKNVDAYETLNLDWFDGIEVCSETSQQAEISIANRPMLDFTEFTIKVSKLENAILIADSLPILCHYILNEFLGGRCKSYNLFFYKHDGGLICKIVPRFIVSPYQIGYAIHQVNLPDELEKIKEALRAKYYL

SEQ ID NO: 4943 - DNA, 1170 bp, Streptococcus agalactiae
atgaagcattatgacacaataattataggtggtggacctgctggaatgatggcagctatttcctcaaatttttacggcaacaaaacacttcttattgagaaaaataaacgtttaggcaaaaaactagctggaacaggtggtggccgctgtaatgttaccaataatggaaaccttgatgagctcttagctggtatacctggaaatggccgtttcctatatagcgtcttctcacaatttgataaccatgatattattaacttctttcaagacaacggcgtcacactaaaagaagaagatcatgggcgtatgttccctactactgataaatctcgtactatcattaacgcccttgaaaataaaataaaagaacttggtggtcaaattatgactgacacagaagttgtctctgtcaaaaagataggagattcattctatatcaaaactaaagatacacagttcgcatccgataaacttatcgtaacaactggtggtaaatcctatccgtctacaggttctactggtttcggtcatgacattgctcgtcactttaaattagaagtcacagatatggaagccgccgaaagccctcttttaactgattttccccataaaaaactacaaggtatctccttagatgatgtcactttgtcatttgaaaagcatattattacacacgatcttctctttactcattttggattatcaggaccagcagccttgcgaatttctagctttgtcaaaggcggagaaactatatacctagatgttttgcccaatatctctgttaaagaattggaaatacacttccaaaatgaaagagaaaaatctttgaaaaacgctcttaaaatacttcttcctgagcgtttagctgaattttacgctgaagacttacccgaaaaagtaaaacaagtatctgtaaaagacttagaaatgttaattcaaaaacttaaaaaacttcctattttagtaactggcaagatgtctctagcaaaatcctttgtaacaaaagggggagttgatcttaaagaaataaaccccaaaacacttgaaagtaaaaaggtagctggtttacattttgctggtgaagtcctagacatcaatgctcatacgggagggtttaacattacttctgccttatgtacaggctgggtagctggtagcttacactat

SEQ ID NO: 4944 - protein, 390 aa, Streptococcus agalactiae
MKHYDTIIIGGGPAGMMAAISSNFYGNKTLLIEKNKRLGKKLAGTGGGRCNVTNNGNLDELLAGIPGNGRFLYSVFSQFDNHDIINFFQDNGVTLKEEDHGRMFPTTDKSRTIINALENKIKELGGQIMTDTEVVSVKKIGDSFYIKTKDTQFASDKLIVTTGGKSYPSTGSTGFGHDIARHFKLEVTDMEAAESPLLTDFPHKKLQGISLDDVTLSFEKHIITHDLLFTHFGLSGPAALRISSFVKGGETIYLDVLPNISVKELEIHFQNEREKSLKNALKILLPERLAEFYAEDLPEKVKQVSVKDLEMLIQKLKKLPILVTGKMSLAKSFVTKGGVDLKEINPKTLESKKVAGLHFAGEVLDINAHTGGFNITSALCTGWVAGSLHY

SEQ ID NO: 4945 - DNA, 1167 bp, Streptococcus pyogenes
atgactcaatacgatacgattattattggaggtggccctgctggcatgatggccgccatctccagcagctactatggctataaaactctcttaattgaaaaaaatcgccgcttaggcaaaaaattagcgggaaccggtggtggacgctgtaatgtcactaatagtggtaaccttgatgtccttatggctggcattcctggaaatggccgctttttatatagtgttttttcccagtttgacaaccatgacatcattgcctttttcgaggaaaacggcgtcaaactcaaagaagaagaccatggacggatgttccccacaacagataaatcaaggacaatcattgatgctctggagaaaaaaatcaaggctcttgggggtcaggtgctaaccagcactgaagtggtttccgttaaaaaacaagatgacctcttctacctcaaatctgcagaccagactttcacctgccaaaaattgattgtgaccacaggaggcaagtcctacccttcaacgggttcaacaggttttggacatgatattgcacggcattttaaactgaccgtgactgatttagaagctgctgagagccctctgttaactgattttcctcacaaagtcttgcaaggtatttccctagacgacgttactcttagttatgacaaacacgtcatcacacacgacttactcttcacccactttggcctttcaggacctgcagctcttcgtctgtcctcttttgtgaaaggtggagaaattgcagagctggactttttgccacacttatcaacagatgacttaaccgcttatctgagtgatcaacgtgataaaaacatcaaaaatgctcttaaaggcctactgcctgaacgagtagctgattttttatcagaagattaccccgaaaaggtcaaacaactctctccaaaacaagaaaaggaattgcttgataaactcaaacacctccagatacccattacaggaaaaatgtctttggctaaatcatttgtgaccaaaggaggcgtagatttaaaagaaatcaaccctaaaaccttggaaagcaagaaagttcctggcctgtatttcgctggagaggtcttagatattaatgctcataccggagggtttaatattacctcagctctttgttcaggatggatcgcagggaagtcttca

SEQ ID NO: 4946 - protein, 389 aa, Streptococcus pyogenes
MTQYDTIIIGGGPAGMMAAISSSYYGYKTLLIEKNRRLGKKLAGTGGGRCNVTNSGNLDVLMAGIPGNGRFLYSVFSQFDNHDIIAFFEENGVKLKEEDHGRMFPTTDKSRTIIDALEKKIKALGGQVLTSTEVVSVKKQDDLFYLKSADQTFTCQKLIVTTGGKSYPSTGSTGFGHDIARHFKLTVTDLEAAESPLLTDFPHKVLQGISLDDVTLSYDKHVITHDLLFTHFGLSGPAALRLSSFVKGGEIAELDFLPHLSTDDLTAYLSDQRDKNIKNALKGLLPERVADFLSEDYPEKVKQLSPKQEKELLDKLKHLQIPITGKMSLAKSFVTKGGVDLKEINPKTLESKKVPGLYFAGEVLDINAHTGGFNITSALCSGWIAGKSS

SEQ ID NO: 4947 - DNA, 576 bp, Streptococcus agalactiae
gtgatattcttttataagaaaatcagtacaaaagaggaagttatgacagttgaaaagacggttagtgaattagctgaaattttaggggttagtcgtcaagcgatgaataacagagttaaaacactccctgaagaatgtgtggaaaagaatagtaaaggcgttacagttgttaatcgtgatggcttgattaaattggaagaaatctataaaaaaactattttggaagaggaaccaattgacgaagaagcatcaagacgagaacttttagaaattctcgttgatgagaagaatactgaaatcacacgtttatatgaacagttaaaagcaaaagatattcagattgcttcaaaagacgagcagttacatgtaaaagatattcaaatagcagagaaagataagcaattagatcaacaacagcaattgactttaactgctatggaagatacgcaacgtctgcaacttgagttaaatgaagctaaagcagaggttgaggagattcaagaagccaaagaagaaaaaattcaagaattagaagctgttaaaaaaagtttctttggacgtttcttcaataaaaaa

SEQ ID NO: 4948 - protein, 192 aa, Streptococcus agalactiae
MIFFYKKISTKEEVMTVEKTVSELAEILGVSRQAMNNRVKTLPEECVEKNSKGVTVVNRDGLIKLEEIYKKTILEEEPIDEEASRRELLEILVDEKNTEITRLYEQLKAKDIQIASKDEQLHVKDIQIAEKDKQLDQQQQLTLTAMEDTQRLQLELNEAKAEVEEIQEAKEEKIQELEAVKKSFFGRFFNKK

SEQ ID NO: 4949 - DNA, 579 bp, Streptococcus pyogenes
atggtactatttttaataagaatattcagtgatagtgataaagaggaaaatatgggaattgaaaagacagttagtgaactagctgatattttgggagtgagtcgtcaggccgtcaataatcgtgttaagtctttacccgaagaagatcttgacaaaaatgaaaaaggcgttactgtggttaagcgcagtggtcttgttaagctggaagagatctataaaaaaacaatttttgacgatgagcctatcagtgaagaaacgaaacaacgtgagcttttagagattctcgtggatgagaagaacactgaaatcacgcgcctttatgagcaactcaaagccaaagatgctcaacttgcctcaaaagatgagcaaatgcgtgttaaagacgtgcagatcgctgaaaaagataaacaattggatcagcagcaacaattaactgctaaagccatggctgataaagaaaccctaaaattagaattggaagaagctaaagcagaagccaaccaagctcgcttacaagtcgaagaagttcaggctgaagttggccctaaaaaaggctttttcacccgcttgtttgcgaaa

SEQ ID NO: 4950 - protein, 193 aa, Streptococcus pyogenes
MVLFLIRIFSDSDKEENMGIEKTVSELADILGVSRQAVNNRVKSLPEEDLDKNEKGVTVVKRSGLVKLEEIYKKTIFDDEPISEETKQRELLEILVDEKNTEITRLYEQLKAKDAQLASKDEQMRVKDVQIAEKDKQLDQQQQLTAKAMADKETLKLELEEAKAEANQARLQVEEVQAEVGPKKGFFTRLFAK

SEQ ID NO: 4951 - DNA, 606 bp, Streptococcus agalactiae
ttgcgctttttaggagaaataatgaaacaattacaagaatatatagcttttgatttagagtttaacacggttggtgagcatagccatattattcaagtgtcggccgttaaatattctaatcatcaagagattgctttatttgatacttatgttcacacaaaagttccattacaaagctttattaatggtttaacaggtattacagctagagatattataggggctcctaaaattgagatagttttgacagactttcagagttttgttggagatacaccactgattggttataatgggtataaatcggatttaccccttttagttgaaaatggtttggatctaactagtcaatatcaggtggacttatatgatgaagcttttgtgagacgcagtacagatttaaatggtattgtcaaccttaaattgactactgttgctgactttttaggaataaagggtaaagcacataatagcttagaggatgcccgtatgactgcgcgtgtttatgaaaaatttctggacttggatgaaaataaaatctatttaaaacagcaaaaagaggtagcagttgatagcccatttgcgactttaggaaatttgtttgat

SEQ ID NO: 4952 - protein, 202 aa, Streptococcus agalactiae
MRFLGEIMKQLQEYIAFDLEFNTVGEHSHIIQVSAVKYSNHQEIALFDTYVHTKVPLQSFINGLTGITARDIIGAPKIEIVLTDFQSFVGDTPLIGYNGYKSDLPLLVENGLDLTSQYQVDLYDEAFVRRSTDLNGIVNLKLTTVADFLGIKGKAHNSLEDARMTARVYEKFLDLDENKIYLKQQKEVAVDSPFATLGNLFD

SEQ ID NO: 4953 - DNA, 624 bp, Streptococcus pyogenes
atgacgaaggccctatcagggtcttttttggaggaaaacatgaaacacttagatacttatattgcctttgatttagaatttaacactgtcaatgacgttagtcatatcattcaagtatcagcagtcaaatatgaccaccataaagaagttgacagctttgacacctatgtttacacagatgttcccttacagagctttatcaatggcctaacaggaatcacatctgacaagattgctgcggaaccaaaagtagaggaggttatggctgcgtttaaaaattttgtgggagagttaccactgattggttataatgctcaaaaatctgacctgcctattctagctgaaaatggcttggatttaagggaccaataccagattgacctctttgatgaagcttacgatagacgtagcgcagacttaaatgggattgctaaccttcgtctgcaaacagtggcaacctttttaggcattaagggtcgaggtcataatagcttagaagatgccagaatgacagcagtaatctataagtcttttttagaaacagatacaaacaaagcatatctcagccagcaagaagaggtaaccacagataaccctttcgcagctttgggagactttttcgac

SEQ ID NO: 4954 - protein, 208 aa, Streptococcus pyogenes
MTKALSGSFLEENMKHLDTYIAFDLEFNTVNDVSHIIQVSAVKYDHHKEVDSFDTYVYTDVPLQSFINGLTGITSDKIAAEPKVEEVMAAFKNFVGELPLIGYNAQKSDLPILAENGLDLRDQYQIDLFDEAYDRRSADLNGIANLRLQTVATFLGIKGRGHNSLEDARMTAVIYKSFLETDTNKAYLSQQEEVTTDNPFAALGDFFD

SEQ ID NO: 4955 - DNA, 723 bp, Streptococcus agalactiae
atgtcagaaaaatattccactggtgacttagctaaagaagcaggagttactgttcgtactgttcagtactatgacaaaagaggaattttatccccatcagaactatctgaaggaggtaggagggtttatagtattgctgatttagaaaagcttagacaaattatttatttacgagatttagatttttcaattgataatatcaaaaatctatttactgaagacaatgctagccagattttagagctttttttacaagtgcagataagagaattaaggctagctattgatagtaaaaaagacaaacttgacaaagctgtcaacctactaaaaactgtagaaaaacaagatagtaaaacattaggctatctttctgacattgtgcttatggaagaaaacaaaagaaaatggggtatactacaaaaaagcatagtgctacaagtcgttatgattattatggtctatattacgttaataatagcagcagtttctctaaatcaaagatggcttatgtggatagcagtaacagtattcttaatagctatgaatggtatggtttggtattttaaacaacaggttgtttatctttgtccaaattgtcatcaaacctttacaccgacatatcaagcatttaatctagcgaaacatacccctaagacgcgaaaagtattctgtccacattgtcaccaaaagtcacattgtatagagttagccagagaagaacgt

SEQ ID NO: 4956 - protein, 241 aa, Streptococcus agalactiae
MSEKYSTGDLAKEAGVTVRTVQYYDKRGILSPSELSEGGRRVYSIADLEKLRQIIYLRDLDFSIDNIKNLFTEDNASQILELFLQVQIRELRLAIDSKKDKLDKAVNLLKTVEKQDSKTLGYLSDIVLMEENKRKWGILQKSIVLQVVMIIMVYITLIIAAVSLNQRWLMWIAVTVFLIAMNGMVWYFKQQVVYLCPNCHQTFTPTYQAFNLAKHTPKTRKVFCPHCHQKSHCIELAREER

SEQ ID NO: 4957 - DNA, 1188 bp, Streptococcus agalactiae
atggttatggatagtctaatcataaaacagttgattaagagtacatttgatatacccttacaagtcacttatccaaatgggaatattgaaacttataatggtagcaatccccacgtcaaacttaaactaaacaaaaatttctccgtctcggagctatcaaaagacccttccatagtattgggtgaagctgttatggatggagacattgaaatttatggttctatacaagaattaattttatcagcttaccgctgtggagacagctttctacgtaatagtaaatttagcaaattgattcctaaacaatttcatgataaaaaacacagtaaatccgacattcaaaagcattatgacatcggaaatgatttctataaactgtggcttgatgataccatgacttattcatgcgcctattttaaacatgaaaatgatagtctagagcaagctcaactaaacaaagtacaccatattcttaataaattaaatgctcagccgggagggaaattactagacatcggttgtggctgggggacacttatcattactgctgctaaagaatatggcttaaatgcgacaggtatcaccttaagtgaagagcaggcttctttcattactaagcgtatcaaggaagaagggttggaaaataaagtaacagtcctcattaaagattatcgtgacattcgtgaaacatacgattatatcactagtgttggtatgtttgaacatgtaggaaaagaaaatttatctcaatacttccaaaccatttctaaaagactcaacatcaatggtctagctcttattcatggtattactggacaagtgggtggtaatcatggtagtggaactaattcttggattaataagtatatcttcccaggaggatatatccctcgtttaactgaaaatttaaatcatatagctagtgctggacttcaaattgctgacttagaaccgcttcgtcgtcactatcaaaagactctcgaattatggacaaaaaatttccacaatgcccttcctgaagttcagaaaactcatgataagcgttttatcaatatgtgggacctctatcttcaatcttgtgcggcctcttttgaatctggcaatattgatatttttcaatacttgctttcaaaaggtgtttcaaaagacactatgcctatgacacgcgattatatgtattctgctaat

SEQ ID NO: 4958 - protein, 396 aa, Streptococcus agalactiae
MVMDSLIIKQLIKSTFDIPLQVTYPNGNIETYNGSNPHVKLKLNKNFSVSELSKDPSIVLGEAVMDGDIEIYGSIQELILSAYRCGDSFLRNSKFSKLIPKQFHDKKHSKSDIQKHYDIGNDFYKLWLDDTMTYSCAYFKHENDSLEQAQLNKVHHILNKLNAQPGGKLLDIGCGWGTLIITAAKEYGLNATGITLSEEQASFITKRIKEEGLENKVTVLIKDYRDIRETYDYITSVGMFEHVGKENLSQYFQTISKRLNINGLALIHGITGQVGGNHGSGTNSWINKYIFPGGYIPRLTENLNHIASAGLQIADLEPLRRHYQKTLELWTKNFHNALPEVQKTHDKRFINMWDLYLQSCAASFESGNIDIFQYLLSKGVSKDTMPMTRDYMYSAN

SEQ ID NO: 4959 - DNA, 297 bp, Streptococcus agalactiae
atgatgaatatgcaaaatatgatgcgtcaagcacaaaagcttcaaaaacaaatggaacaaaagcaagctgatttagcagctagccagtttactggaaaatctgctcaagagctcgttaccgtgacatttacaggcgataaaaagctaatttcaattgattacaaagaagctgtggtagaccctgaagatattgaaacactacaagacatgacaactcaagctatcaatgacgctttaagccaagttgacgatgctacaaaaaaaattatgggagcatttgcgggtaaaatgccattc

SEQ ID NO: 4960 - protein, 99 aa, Streptococcus agalactiae
MMNMQNMMRQAQKLQKQMEQKQADLAASQFTGKSAQELVTVTFTGDKKLISIDYKEAVVDPEDIETLQDMTTQAINDALSQVDDATKKIMGAFAGKMPF

SEQ ID NO: 4961 - DNA, 297 bp, Streptococcus pyogenes
atgatgaacatgcaaaacatgatgaagcaagcacaaaagcttcagaaacaaatggagcaaaagcaggcggatttggctgctatgcaatttactggaaaatcagctcaagaccttgtcactgccactttcacgggtgataaaaaattggttgggattgacttcaaagaagctgttgtagatcctgaagatgtagaaacgcttcaagacatgaccactcaagccattaatgatgcccttacgcaaattgatgaaacaactaagaaaacattaggcgcttttgctggtaaattaccattc

SEQ ID NO: 4962 - protein, 99 aa, Streptococcus pyogenes
MMNMQNMMKQAQKLQKQMEQKQADLAAMQFTGKSAQDLVTATFTGDKKLVGIDFKEAVVDPEDVETLQDMTTQAINDALTQIDETTKKTLGAFAGKLPF

SEQ ID NO: 4963 - DNA, 90 bp, Streptococcus agalactiae
gtgaaagttgaagctgaaacaccttgtgtagaaccaagagctacgaatgctcctccagcaaacattgctgagacaagaccaagtttcaaa

SEQ ID NO: 4964 - protein, 30 aa, Streptococcus agalactiae
MKVEAETPCVEPRATNAPPANIAETRPSFK

SEQ ID NO: 4965 - DNA, 444 bp, Streptococcus agalactiae
atgaacaaacttattacagaaaaaaaagtcaacaacgtctcaactgctaactatttgaaacttggtcttgtctcagcaatgtttgctggaggagcattcgtagctcttggttctacacaaggtgtttcagcttcaactttcacagcaccgcaagcaacacctccaaaagcagaacgtcagttaacggattcagaactttatgaacgtgcccaaaaacaagtattgccaagatatatccaaggttctctctcaggtatccttaaccagcattcaacactttacaaacaacaaaatgcagcagtgacaccgcaagtatcaagccccaaatcagaacgtcagttaacagattcagaaatctatgaacgtgctcaaaaacaagtattgccaaattatattcaaggttctctctcaggtatcctcaaccaacattcaactttaaatgct

SEQ ID NO: 4966 - protein, 148 aa, Streptococcus agalactiae
MNKLITEKKVNNVSTANYLKLGLVSAMFAGGAFVALGSTQGVSASTFTAPQATPPKAERQLTDSELYERAQKQVLPRYIQGSLSGILNQHSTLYKQQNAAVTPQVSSPKSERQLTDSEIYERAQKQVLPNYIQGSLSGILNQHSTLNA

SEQ ID NO: 4967 - DNA, 114 bp, Streptococcus agalactiae
ttgtgtatatctaaacacttatcaaaacttttcgtgggatatcctcaacttaagcaaaattttcttgatttccttgccgaacaccttatggattgccaatctaatgttggcgaa

SEQ ID NO: 4968 - protein, 38 aa, Streptococcus agalactiae
MCISKHLSKLFVGYPQLKQNFLDFLAEHLMDCQSNVGE

SEQ ID NO: 4969 - DNA, 897 bp, Streptococcus agalactiae
atgacattaccaatctttctagagttggtagaaatgaaagccaaaacagctagtgttttaccatttttgattggtttgtgttttagtgcttattactacaattcagtacaccctgtatatgtcggtttattcttcgttgctatgtttttattcaatatgttcgttgacatttggaataattacaatgattatcggaatgctgtggatttggattataagaatgacactaacattattggtcgtgagaacctatccctacgccaaatagaagttattatggcaagtttagtcattacttctagtatgattggtttagttttagtttcccaagttggtctgcctcttttatggatgggacttttttgttttggaattggtgttttatattcctttggtccaagacctttatctagtctgcccttaggagaagtattttctggcttgacaatgggatttatgattagtttaatttgtgtatatctaaacacttatcaaaacttttcgtgggatatcctcaacttaagcaaaattttcttgatttccttgccgaacaccttatggattgccaatctaatgttggcgaataatctgtgcgacaaagaagaagatgaaaaaaatcatcgctatacccttgtacattatacagggataagaggtggactcttgctgtttgctatttctaatagtatagctttattggcaattgtttttgaatttctttttggacttgcgcctgttacagtactcttgagtttgttattaataccatttatttataagcagacaaaactattgtggcaaaaacaggttaagagagaaacatttgtttgtgcggtacgtattctagcactgggatctgcaacccaagtcttaacgtatctaattggaatcattttt

SEQ ID NO: 4970 - protein, 299 aa, Streptococcus agalactiae
MTLPIFLELVEMKAKTASVLPFLIGLCFSAYYYNSVHPVYVGLFFVAMFLFNMFVDIWNNYNDYRNAVDLDYKNDTNIIGRENLSLRQIEVIMASLVITSSMIGLVLVSQVGLPLLWMGLFCFGIGVLYSFGPRPLSSLPLGEVFSGLTMGFMISLICVYLNTYQNFSWDILNLSKIFLISLPNTLWIANLMLANNLCDKEEDEKNHRYTLVHYTGIRGGLLLFAISNSIALLAIVFEFLFGLAPVTVLLSLLLIPFIYKQTKLLWQKQVKRETFVCAVRILALGSATQVLTYLIGIIF

SEQ ID NO: 4971 - DNA, 1206 bp, Streptococcus agalactiae
atgaaagaaatcctagttttaggtgctggttatgccggtttgaaagcagttcgtaatttacaaaaacaatcaggtgattttcatattacccttgttgacatgaatgattatcactacgaagctacagaattacatgaagtagctgcaggctctcagccaaaagaaaaaattacattcccaattaaggatgttatcaacactaataaggttaacttcatgcaagatgaggtgcttagagtcgatgctgaaaataaaacagtaacagttaaaaataacggtgaactccattatgattatgtcgtagttgccttaggctttgtatctgaaacttttggcatcaagggtgctatggagaatgctttgcagatgaccaatatttcgcaagcagaaaacatccataatcacattgttaatacaatgaagttgtaccgtgagacaaaagatgaaaatcttctcaaactcttagtatgtggtgctggttttacaggtattgagttagccggagctatggttgatgagcgaccaaaatatgctgctttagcgggtgtaaaacctgaacaaattgaaattatttgtgtagaggcagcaactcgcatcctaccaatgtttgatgatgaattagcgcaatatggtgtcaacttaattaaggatttaggtattaatttgatgcttggaagtatgattaaggaaatcaaaccgggtgaagttgtttatggtactagtaaagaggatgaagaactcaaatctattaccgcaggtactatcatttggacaacaggtgttagtggaagtccggttatgggagaatcaggatttgatcaacgtcgtggacgtgtaatggtcaacagtgatttgcgtgatccaaaatacgataatgtttatgttatcggtgatgtgtctgcatttatggacactgagtctggtcgcccattcccaacaacagctcaaattgcaactcgtatgggagctcatgttgctaaaaaccttttacatcaaatcaaaggtgaagctacagaagacttttcgtatagtccgcaaggcacagttgcttcagtaggaaatacgcatggacttggtgttgttggaaaaactaaaattaaaaaataccctgcgtcggttatgaagaagattatcatgaacaaatcacttgttgatatgggtggacttaaagaacttctagctaagggacgttttgatttatatcat

SEQ ID NO: 4972 - protein, 402 aa, Streptococcus agalactiae
MKEILVLGAGYAGLKAVRNLQKQSGDFHITLVDMNDYHYEATELHEVAAGSQPKEKITFPIKDVINTNKVNFMQDEVLRVDAENKTVTVKNNGELHYDYVVVALGFVSETFGIKGAMENALQMTNISQAENIHNHIVNTMKLYRETKDENLLKLLVCGAGFTGIELAGAMVDERPKYAALAGVKPEQIEIICVEAATRILPMFDDELAQYGVNLIKDLGINLMLGSMIKEIKPGEVVYGTSKEDEELKSITAGTIIWTTGVSGSPVMGESGFDQRRGRVMVNSDLRDPKYDNVYVIGDVSAFMDTESGRPFPTTAQIATRMGAHVAKNLLHQIKGEATEDFSYSPQGTVASVGNTHGLGVVGKTKIKKYPASVMKKIIMNKSLVDMGGLKELLAKGRFDLYH

SEQ ID NO: 4973 - DNA, 1425 bp, Streptococcus agalactiae
atgacaattgaaactttagctcgttttcaatttgcgatgactacagttttccactttttctttgtaccatttacaattggtacatgcctagtggttgctattatggagacaatgtatgttatcacaaaaaatgaagagtataaaaaattgacaaaattttggggtaatatcatgctccttagttttgcggttggtgttgtgacaggtatcattcaagagttccaatttggaatgaactggtcagactattcacgtttcgtaggtgatatttttggagctccattggctattgaagctttattagctttctttatggaatctactttccttggtttatggatgtttacatgggataacaaaaaaattagtaaaaaattacatgtgacattcatttggctagtggtttttggctcattaatgtcagcgatgtggattcttactgctaatagcttcatgcaacatcctgttggttatgaagttgtaaacggtagagcgcaaatgactgattttcttgcacttgtaaaaaatccacagttcttctatgaatttacccatgttatttttggtgccattacgatgggtggtacagtggttgctggtatgtcagccttccgcctcttaaaatcagaacagctgaaagatacaacggttgaactttataagaaatcggttcgtattggtttagtagtagcacttcttggttcaatttcagttatgggagttggggatttacaaatgaaagccttgattcacgatcaaccaatgaaatttgctgctatggaaggtgattatgaagattcgggtgatcctgcagcttggagtgtagttgcttgggcaaatgaagcagaacacaaacaagtttttgggattaagattccttatatgttgagtattttatcttacgggaaaccatctggttctgtgaaaggtatggatacagctaataaagaattggttgctaagtatggtaaagataactactatccaatggttaacctacttttctatggtttccgtacaatggcggcgatgggaacagctattatgggtgtttctgttttaggactctttttaactcgtaagaaaaaaccaattctttataaacacaaatggatgctttggattgttgctttaacaacctttgcaccattcttagccaatacatttggttggattgtgacagaacaaggacgatacccttggactgtctatggtcttttcaagattaaggactctgtctctccaaacgtttcagttgcatcattatttgtttccaatactgtgtatttcttgttgtttggtggtttagcggtgatgatgataagcctaacaataagagaattgaagaaagggccagagtatgaagatgaacacggacatcatggtgcatatacttcaattgatccctttgaggaaggagcatac

SEQ ID NO: 4974 - protein, 475 aa, Streptococcus agalactiae
MTIETLARFQFAMTTVFHFFFVPFTIGTCLVVAIMETMYVITKNEEYKKLTKFWGNIMLLSFAVGVVTGIIQEFQFGMNWSDYSRFVGDIFGAPLAIEALLAFFMESTFLGLWMFTWDNKKISKKLHVTFIWLVVFGSLMSAMWILTANSFMQHPVGYEVVNGRAQMTDFLALVKNPQFFYEFTHVIFGAITMGGTVVAGMSAFRLLKSEQLKDTTVELYKKSVRIGLVVALLGSISVMGVGDLQMKALIHDQPMKFAAMEGDYEDSGDPAAWSVVAWANEAEHKQVFGIKIPYMLSILSYGKPSGSVKGMDTANKELVAKYGKDNYYPMVNLLFYGFRTMAAMGTAIMGVSVLGLFLTRKKKPILYKHKWMLWIVALTTFAPFLANTFGWIVTEQGRYPWTVYGLFKIKDSVSPNVSVASLFVSNTVYFLLFGGLAVMMISLTIRELKKGPEYEDEHGHHGAYTSIDPFEEGAY

SEQ ID NO: 4975 - DNA, 1017 bp, Streptococcus agalactiae
atgagtgctttacaattcttttggtttttcctaatcggcctcctattttcaggattcttcttccttgaaggattcgactttggggttgggatggctgttcaaactttaacacataatgagcatgaaaaagatcaagtagtagaaaccattggcccagtttgggatggtaatgaagtttggcttcttaccggtggtggagcaatgtttgcttcttttccatactggtatgcttcactatttagtggttactatttgattctccttacgattctctttggattaattattcgtggtgtttccttcgaatttagacataaagttcctgcagagaaaaagcagttttggaactggaccttaacaattggttccgctattgttccattcttctttgggattatgtttataagtttgattcaaggtatgccacttgatgccagtggtaacttatcagctcaattcagtgattactttaatatattctcgttggtgggtggagttgcaatggtattgctagcctatcttcatggtttaaactacattgcattgaagacagaagggccaattagagagcgtgcccgtaattatgctcagttgctttattgggtactctatcttggtttagccttgtttgcagttctcttgtatttcaagacagatttctttagcaatcatccgatagttacgacaattatggttttggttattgttgtattagctgtattagcgcatgcttcaacttttaaaggagcagagatgacagcatttttagcgagtggtctcagtcttgtttcagtggttgttctgttgttccaaggtctattcccacgagttatgatttcatcaattagccctaaatatgatttgctgattcaaaatgcatcctcaacgccatatactttaaaagtaatgtcgattgtcgcaattactctagttccctttgttctagcttatacagcatgggcatattatatctttagaaaacgtattaccttgccagtgattgtgacaggagaaaaa

SEQ ID NO: 4976 - protein, 339 aa, Streptococcus agalactiae
MSALQFFWFFLIGLLFSGFFFLEGFDFGVGMAVQTLTHNEHEKDQVVETIGPVWDGNEVWLLTGGGAMFASFPYWYASLFSGYYLILLTILFGLIIRGVSFEFRHKVPAEKKQFWNWTLTIGSAIVPFFFGIMFISLIQGMPLDASGNLSAQFSDYFNIFSLVGGVAMVLLAYLHGLNYIALKTEGPIRERARNYAQLLYWVLYLGLALFAVLLYFKTDFFSNHPIVTTIMVLVIVVLAVLAHASTFKGAEMTAFLASGLSLVSVVVLLFQGLFPRVMISSISPKYDLLIQNASSTPYTLKVMSIVAITLVPFVLAYTAWAYYIFRKRITLPVIVTGEK

SEQ ID NO: 4977 - DNA, 93 bp, Streptococcus agalactiae
atggataaagttgtaaaaaagtctaaagcaaacgttgataaaataccaattttcaaagtactcattgttgctttacgaaaagattcactagtt

SEQ ID NO: 4978 - protein, 31 aa, Streptococcus agalactiae
MDKVVKKSKANVDKIPIFKVLIVALRKDSLV

SEQ ID NO: 4979 - DNA, 1716 bp, Streptococcus agalactiae
atgctagataaagcggttatgcgcttgtcaggtattcataagttgttaggattgcttgcgggacttgatgttcttcaagcaatctttattatcggacaagcttattatttgagtctttctataactggtttgtgggaagggcaaaaactttcttctcaaacggtttatattttgttatttatggtctcatatttaggccgtcatgttattgattacatcaaaaatagaaaacttgatgacttttcaacagcacaatctagtcttttgagacgtcaattattagataagttatttgatctaggtcctaaagtcgttcaagaacaaggaactggtaatgttgttacaatggcattagatggcgtttctttagttgaaaattatttacgtttagtcttgaataagatgattaacatgtctattatcccatggattattctagcttatattttctatttagatattgaatcaggtgcaattttacttatcgtttttcctttaattatcatctttatgattattttaggctatgcggctcaagctaaagcagataaacaatatgaatcctatcaagtactttctaatcattttttagattcattacgaggcattgatactctcaaatattttggtcttagtaaacgttatggtaaaagcatttatcaaactagtgaatcttttcgtaaagcaacaatgagtactttgaaaattggtattttatcaacgtttgctttagacttttttacaactttatccattgctatcgttgctgtttttctaggtttacgattattaaatgagcagatttaccttttaccggctttaacaattttgattttatcccctgaatactttttacccgtaagagatttttctagtgattatcatgcaacgttagacgggaaaaatgcatttcaagcgattcaaaaagttctaaacaaaactggtattaaaggtgagcaattagtcatagatgattggtctaaagagagtcgtttggatttagaaaacattgctattgcgtacgaccaaaaacgtgttgttgaggatgtaaccttacgatttagaggacatcaaaaggttgctttagtaggagttagtggttcaggtaagtctagcttaattaaccttctgagtggttttttagggcctgataatggttctttaaaagtggatggtagagaagtgactaaccttgatcaagaagattggcataaacagatgatctatattcctcaaactccttatgtttttgaaatgtcattacgtgataatattaccttctatactcccaatgctagtgacgaagaggtggtaagagcgattcatatggtaggtttagatagcttgctaagcgagttacctgacggtttagaaacgcgtattggtaatggagcgcgtccgcttagtggaggacaagcccagcgtatagctctggctcgtgcttttcttgatcaaaatcgtcgtattatggtttttgatgaaccaactgctcatttagatattgaaacagagttagaattaaaagagaaaatgttgccactgatgtcagatcgtttagttatctttgcaactcatcgtcttcactggttgaaccaaatggatgttatagtcgttatggagaaggggagagttgcagaagtaggctcttatcaggaattattagctaaaaaaggatatctctatcaactgaagcatgctatgggaggaaatgatgtt

SEQ ID NO: 4980 - protein, 572 aa, Streptococcus agalactiae
MLDKAVMRLSGIHKLLGLLAGLDVLQAIFIIGQAYYLSLSITGLWEGQKLSSQTVYILLFMVSYLGRHVIDYIKNRKLDDFSTAQSSLLRRQLLDKLFDLGPKVVQEQGTGNVVTMALDGVSLVENYLRLVLNKMINMSIIPWIILAYIFYLDIESGAILLIVFPLIIIFMIILGYAAQAKADKQYESYQVLSNHFLDSLRGIDTLKYFGLSKRYGKSIYQTSESFRKATMSTLKIGILSTFALDFFTTLSIAIVAVFLGLRLLNEQIYLLPALTILILSPEYFLPVRDFSSDYHATLDGKNAFQAIQKVLNKTGIKGEQLVIDDWSKESRLDLENIAIAYDQKRVVEDVTLRFRGHQKVALVGVSGSGKSSLINLLSGFLGPDNGSLKVDGREVTNLDQEDWHKQMIYIPQTPYVFEMSLRDNITFYTPNASDEEVVRAIHMVGLDSLLSELPDGLETRIGNGARPLSGGQAQRIALARAFLDQNRRIMVFDEPTAHLDIETELELKEKMLPLMSDRLVIFATHRLHWLNQMDVIVVMEKGRVAEVGSYQELLAKKGYLYQLKHAMGGNDV

SEQ ID NO: 4981 - DNA, 1761 bp, Streptococcus pyogenes
atgatggaaacagaagatacaatatcaaggggaaaaaggaaaagactgttaaaacgattacgtgaacgaattgcaccaaaaaggtatttgctttatgtgtcagcctttttatcttggttacaatttgtgatgaggatgatcagtttttacctcattgccaaaacgttttcgacctttattttgggtcatgctattgccttaggacgcttggcaggtttactcctacttttaaatgtggtaggctttgttcttgctatattaggcaagcaactgcaagggatcgcttcacaatttgctagagattcactcaaacaatctttctttgaggcttttattgatttagacgggcaatttgatgctcatgccagtgatgctgatattttaacgttggcttcacaggggattgatagtttggatacttattatggttactatttgtctttgtctatgagaaccaagtggaactgcacaactattatgatactagtctttttaatttatccattggcaggccttgtctttttaggagttctgcctctgattccactttcaatcgttgctatgcaaaagcggtctcagccaaacatgagtcattattggtcctcttatatggatgttggtaatttatttatggatgacttaaaaggtcttaatacactgtattcttatcaagcaacagaacgttacgagcaagaattttcgggtaaggcagaacagtttcgaaaggctaccatgtctttgcttggctttcagttacaagcagttggttatatggatgcagttatgtatctgggaattggtttgtcaggttttttagccgttcaagctttggcaacaggccagttatctttttttaatttcctattttttctcttgattgctacagaattttttacaccgattcgtgagcagggttatggcatgcacttggtcatgatgaataccaaaatggctgaccgtatctttagtttcttggatagtgttccagcaagaaaagataacaagagtaaaacagcaataaactttaaccagattgacatccaaaatatttctttagcttatgagaaaaaaacagtgcttagtggggttaccatgacattaacgaagggccaactaacagctatcgcgggggtgtcaggacaaggaaaaacaagtctagctcaactcctcttgaaacgccagtctgcaacgactgggcatattttatttgacggtttagacagtgacaatttgtcgcaagaaactatcaaccagcaggttctttatgtatcggaccaatctaccttattgaaccgtagcatttacgataatttaaggttagcagcaaatctctctaaaaaagaaatcttagattggatagatcaacatggtttgttaagcttcatcaactggctaccagatggtcttgacacaatagttggtgaaaatggtaacctgttatcaccaggccaaaagcaacaggtgatttgcgcaagagctctattaagtaagaggtctctttatatctttgatgaggcaacatctagtctagatgcagaaaatgaacgtattattgacaatttaataacgagattagctaagacagcaatagttattgtgattactcataagatgtctcgactgaaaggagctaaccaagtactctttttaaacacagggcagcctgcttgtttaggcaaaccttgcgacctttatcgggaccaaccaacttatcgtcacctagttgatactcaagcaagactggaggcaagtatttatggc

SEQ ID NO: 4982 - protein, 587 aa, Streptococcus agalactiae
MMETEDTISRGKRKRLLKRLRERIAPKRYLLYVSAFLSWLQFVMRMISFYLIAKTFSTFILGHAIALGRLAGLLLLLNVVGFVLAILGKQLQGIASQFARDSLKQSFFEAFIDLDGQFDAHASDADILTLASQGIDSLDTYYGYYLSLSMRTKWNCTTIMILVFLIYPLAGLVFLGVLPLIPLSIVAMQKRSQPNMSHYWSSYMDVGNLFMDDLKGLNTLYSYQATERYEQEFSGKAEQFRKATMSLLGFQLQAVGYMDAVMYLGIGLSGFLAVQALATGQLSFFNFLFFLLIATEFFTPIREQGYGMHLVMMNTKMADRIFSFLDSVPARKDNKSKTAINFNQIDIQNISLAYEKKTVLSGVTMTLTKGQLTAIAGVSGQGKTSLAQLLLKRQSATTGHILFDGLDSDNLSQETINQQVLYVSDQSTLLNRSIYDNLRLAANLSKKEILDWIDQHGLLSFINWLPDGLDTIVGENGNLLSPGQKQQVICARALLSKRSLYIFDEATSSLDAENERIIDNLITRLAKTAIVIVITHKMSRLKGANQVLFLNTGQPACLGKPCDLYRDQPTYRHLVDTQARLEASIYG

SEQ ID NO: 4983 - DNA, 1764 bp, Streptococcus agalactiae
atgctatgggaggaaatgatgtttaaaatccctttgtttaaagaattaaagacagatcaatggataaaaccatttttcaaacaatataaagtttccttagtaattgctcttttccttggttttatgactttcttttctgccagtgctcttatgtttaattcgggctatctgattagtaagtcagcttcactaccgagtaatattcttctagtatatgttccaattgtactaacacgtgcttttggcattggacgtcctgtttttcgttatatagaacgcctaacgagtcacaattgggtattacgaatgacttcacagctgcgcttgaagctttaccattccttagaaagcaatgctatctttatgaagcgtgattttcgtttaggagatgttatggggcttttagcggaggatattaattatttgcaaaatttgtatcttaggacaatatttccaacgattatagcgtggatattatatagctttattattattgcaacaggcttcttttctctatggtttgctttaatgatgttgctttatttagctattatgatttttctttttccactttggtcgattttagctaatggtgctcgtcagactcgtgaaaaagaattaaaaaatcatctttatactgatttgacggataatgtcttaggtatttcagactggatttttagtcaacgtggtcaagagtacgtcgccttgcatgagcgttcggaaagtgaactcatggctgttcagaaaaaaattcgttcctttgataatcgtagagctcttattgtggaattagtttttggctttctagctattttggttattatttgggctagtaatcagtttattggtcacagaggtggcgaagctaactggattgcagcatttgttctaacagtatttcccttgtcagaggcatttgctggtttgtctgctgctgctcaagaaacaaataaatattctgattcaattcatcgtcttaatgaattatcagaaacgtattttgaaacaactcaaaatcagttgcctaataagccatacgatttttccgtcaagaatttaagtttccagtataagccacaagagaaatgggttttgcatcatttagatttggatattaaagaaggagaaaaaattgctattttagggcgtagtggttctggcaagagtaccttagccagtctacttcgtggcgacttgaaagcaagtcaaggggagattaccctaggcgatgctgatgtttcaatagttggtgattgcatttctaactatattggagtgatacaacaagcgccctacctttttaatacaaccctgctaaataacattcgcattggaaaccaagatgctagtgaagaagatgtatggaaagttcttgaacgagttggattgaaagagatggtcactgatttatcagatggtctctatacaatggttgatgaagctggacttaggttttcaggtggcgaaaggcatagaattgctttggctagaatcttactaaaagatgtcccaattgttatcttagatgagccaactgttggacttgatcctattactgaacaagccttactaagggtatttatgaaagaattggaaggtaagaccttagtttggattacacatcacttaaaaggtattgaacatgctgatcgtatcttatttatagaaaatgggcaattagagttggaaggttctcctcaagaattgtctcaaagtagccaacgttaccgtcagctgaaagcctctgatgatggtgatcta

SEQ ID NO: 4984 - protein, 588 aa, Streptococcus agalactiae
MLWEEMMFKIPLFKELKTDQWIKPFFKQYKVSLVIALFLGFMTFFSASALMFNSGYLISKSASLPSNILLVYVPIVLTRAFGIGRPVFRYIERLTSHNWVLRMTSQLRLKLYHSLESNAIFMKRDFRLGDVMGLLAEDINYLQNLYLRTIFPTIIAWILYSFIIIATGFFSLWFALMMLLYLAIMIFLFPLWSILANGARQTREKELKNHLYTDLTDNVLGISDWIFSQRGQEYVALHERSESELMAVQKKIRSFDNRRALIVELVFGFLAILVIIWASNQFIGHRGGEANWIAAFVLTVFPLSEAFAGLSAAAQETNKYSDSIHRLNELSETYFETTQNQLPNKPYDFSVKNLSFQYKPQEKWVLHHLDLDIKEGEKIAILGRSGSGKSTLASLLRGDLKASQGEITLGDADVSIVGDCISNYIGVIQQAPYLFNTTLLNNIRIGNQDASEEDVWKVLERVGLKEMVTDLSDGLYTMVDEAGLRFSGGERHRIALARILLKDVPIVILDEPTVGLDPITEQALLRVFMKELEGKTLVWITHHLKGIEHADRILFIENGQLELEGSPQELSQSSQRYRQLKASDDGDL

SEQ ID NO: 4985 - DNA, 1704 bp, Streptococcus pyogenes
atgcttaaagacgcaatcttacgttataaatggtatgctttaggctcattttttatggttattggggttgttgcaagtagtctcttgcaaccacattatcttaaatctgtgctaagcgctgttattcaaaataatcaagagaaaatttatgaggttgggaaaccattacttattattgcccttttagggttaatgtctggagcgattaatacggttttagctgctaaaatagctcaaggtgtatctgctgatatgagggagaagacctttcgaaaaatccaagacttttcatatgccaatattgaagcttttaatgctggtaatcttgtggttaggctaactaatgatatcaatcaaatccaaagtttagtcatgatgatgtttcaaattctctttcgtttgccgatcctttttattggcgcgtttattatggcagttcagacattccctcaattatggtgggtcattgttgtaatggttatcttaattgccctcatcatgggtttggtgatgcgtcaaatgggtcctcgttttggtaaatttcaacggttaatggataagattaatcgcatcgctaaggaaaatctccgtggcgttcgcgtggttaaatcatttgtacaagaacaacaacaatacactaaatttaaagaaacgtccaatgatcttttggcgttaaatttatctattggttatggtttttcactaatgcagccggctttaatgttggtgtcttatttggcagtttatgtttctataaatgttgtttcgaccatggtcgaaacagatccaacagtgattgggaatattgcctctttcatgacttatatgatgcaaattatgttttcaattattgtggttggttccatggggatgcaagttagtcgtgcttttgtttctatggctagaattaggcaaatattgtctacagaacctgccatgacatttgaaaatgaaaaggaagaaaccatctcaggaagcattgtatttgacgatgttagttttacatatcctaatgatgatgagccaaccttgaagcacatttcttttgctattgaacctgggcaaatggtcggcatcgttggtgcaacaggatctgggaaatcaacgcttgcacagctcatccctcgcttatttgatcctcaagatggccaaattttgttaggaggaaagccgattaaaaccctaagtcaaacaaccctgcgccaatcggtttccatcgtgttgcaaaaggctattctcttttcaggaacgatagctgataaccttcgccaaggctcagcaaaagctgatattgatgctatgcaaaaagccgctcaaatcgcgcaagcaaaagaatttattgatcgtatggatagccgttatgagagccaagttgaagagcgaggtagtaacttgtctggcggacaaaagcaacgtctgtctattgcacgtggtgtcattaatcatcccaaaattcttatattagacgattccacttcagctcttgatgcaaaatctgaaaaacgcgttcaagaagccttaagtcataaattagaaggtacaactacagttattgttgctcaaaaaatttcatcggtagttaaggcagataagatcttagtccttgaccaaggacagttaattggagaaggaacacacgcagagttggtggctaataatgcgatttatcgtgaaatttatgagacacaaaaaggaagggaggag

SEQ ID NO: 4986 - protein, 568 aa, Streptococcus pyogenes
MLKDAILRYKWYALGSFFMVIGVVASSLLQPHYLKSVLSAVIQNNQEKIYEVGKPLLIIALLGLMSGAINTVLAAKIAQGVSADMREKTFRKIQDFSYANIEAFNAGNLVVRLTNDINQIQSLVMMMFQILFRLPILFIGAFIMAVQTFPQLWWVIVVMVILIALIMGLVMRQMGPRFGKFQRLMDKINRIAKENLRGVRVVKSFVQEQQQYTKFKETSNDLLALNLSIGYGFSLMQPALMLVSYLAVYVSINVVSTMVETDPTVIGNIASFMTYMMQIMFSIIVVGSMGMQVSRAFVSMARIRQILSTEPAMTFENEKEETISGSIVFDDVSFTYPNDDEPTLKHISFAIEPGQMVGIVGATGSGKSTLAQLIPRLFDPQDGQILLGGKPIKTLSQTTLRQSVSIVLQKAILFSGTIADNLRQGSAKADIDAMQKAAQIAQAKEFIDRMDSRYESQVEERGSNLSGGQKQRLSIARGVINHPKILILDDSTSALDAKSEKRVQEALSHKLEGTTTVIVAQKISSVVKADKILVLDQGQLIGEGTHAELVANNAIYREIYETQKGREE

SEQ ID NO: 4987 - DNA, 978 bp, Streptococcus agalactiae
atgtcatcttattggaataactatcctgaacttaaaaaaaatattgatgaaaccaatcaactaattcaagaaagaatacaggtcagaaataaagatattgaagcggcgctaagccaactcacagctgcgggaggaaaacagctcagaccagcattcttttaccttttttctcaacttggtaataaggagaatcaagatactcagcaactaaagaaaatcgctgcttctttagaaatccttcacgttgctacattaatccatgatgatgtcattgatgactcaccactaagacgtggaaatatgaccattcaaagcaagtttggcaaagacatcgcagtttacactggggatttacttttcacagtctttttcgatcttattttagaatctatggctgatacaccatttatgaggattaatgcaaaatctatgcgtaaaattctcatgggagaattggaccagatgcaccttcgttacaatcaacaacaaggtatccatcactatttacgtgcgatttcaggtaagacagccgaactctttaaattagctagcaaagaaggagcttactttggtggtgcagagaaggaggttgttcgtctagcaggccatatcggctttaacattggtatgacattccaaattttggatgatatcctggattatactgcagataaaaaaacatttaacaagcctgtcttagaggatttagcacaaggcatttacagccttcctctacttcttgccattgaagaaaatcctgatattttcaaacctattttagataaaaaaacagatatggctactgaagacatggaaaaaattgcttatctcgtcgtttcccatagaggtgttgacaaagctcgccatctagctcgtaaatttactgaaaaagctattagtgacataaataagctaccccagagctctgcaaaaaaacagttgctacaattaactaattaccttttaaaacgcaaaatt

SEQ ID NO: 4988 - protein, 326 aa, Streptococcus agalactiae
MSSYWNNYPELKKNIDETNQLIQERIQVRNKDIEAALSQLTAAGGKQLRPAFFYLFSQLGNKENQDTQQLKKIAASLEILHVATLIHDDVIDDSPLRRGNMTIQSKFGKDIAVYTGDLLFTVFFDLILESMADTPFMRINAKSMRKILMGELDQMHLRYNQQQGIHHYLRAISGKTAELFKLASKEGAYFGGAEKEVVRLAGHIGFNIGMTFQILDDILDYTADKKTFNKPVLEDLAQGIYSLPLLLAIEENPDIFKPILDKKTDMATEDMEKIAYLVVSHRGVDKARHLARKFTEKAISDINKLPQSSAKKQLLQLTNYLLKRKI

SEQ ID NO: 4989 - DNA, 2283 bp, Streptococcus agalactiae
atgcgttataatcaattcagctacattccaactaaacctaacgaagcttttgaagagctcaaaggactaggttttccattaaacaaaaagaattctgataaagctaatttggaagcttttctcagacattcttttttaaatcaaactgatactgattacgctcttagtctccttatcgttgatgcaaaaaccgatgctctaaccttttttaaatcaaatagtgacttaacactagaaaatttacaatggatttatttacagttattaggctttatcccttttgtagactttaaagaccctaaagcattcttacaagatattaacttcccagtctcatatgacaatatttttcaaagtctacatcacttactcgcctgtcgtggaaaatctggcaatacattaatcgaccaattagttgctgatggtttacttcatgcagataatcactaccattttttcaatgggaagtctctggccactttcaatactaaccaattgattcgcgaagttgtctatgttgaaacatccttagatactatgtctagtggtgaacatgatttagtaaaagttaacattatcagacccactaccgagcatactatccctacgatgatgacagctagcccctatcatcaaggtatcaatgatcctgccgcagaccaaaaaacataccaaatggagggtgcgctagcagttaaacaacctaaacacatacaagttgacacaaaaccatttaaagaagaagtaaaacatccttcaaaattacccatcagccctgcaactgaaagcttcacacacattgacagttatagtctcaatgactattttctttctcggggttttgctaatatatacgtttcaggtgtgggtactgctggctctacgggtttcatgaccagtggggattaccaacaaatacaaagctttaaagcagtcattgattggttaaatggtaaggttactgcattcacaagtcataaacgagataaacaagtcaaggctaattggtcaaatggccttgtagcaaccacaggtaaatcttatcttggtaccatgtcaactggtttagcaacaactggcgttgaggggctgaaagtcattatcgctgaagccgcaatctccacatggtatgattattatcgagaaaatgggcttgtgtgtagtccaggcggctaccccggtgaagatttagacgttttaacagaattaacatactcacgaaacctcttagctggtgattacatcaaaaacaacgattgctatcaagcattgttaaatgaacaatcaaaagcaattgaccgtcaaagtggggattacaaccaatactggcatgaccgtaattacctaactcacgtcaataatgtcaaaagtcgagtagtttacactcatggactacaggattggaatgttaagccaagacatgtctataaagttttcaatgcattgcctcaaaccatcaaaaaacacctttttttacatcaaggtcaacatgtgtatatgcataattggcagtcgattgattttcgtgaaagcatgaatgccttactaagccaagaactacttggcattgacaatcatttccaattagaagaggtcatttggcaagataatactactgagcaaacttggcaagttttagatgctttcggaggaaaccatcaagagcaaattggtttaggtgatagtaaaaaacttattgataaccattatgacaaagaagcctttgatacttattgtaaagacttcaatgtgttcaaaaatgatcttttcaagggaaataataaaaccaatcaaatcactattaatcttcctctaaagaaaaattatctcctgaatggacagtgcaaactccatctacgtgttaaaactagtgacaaaaaggccattttatcagcccaaatcttagactatggtcctaaaaaacgattcaaagatacaccaaccatcaaattcttaaacagccttgataatggtaaaaattttgccagagaagctttacgtgaactcccgtttactaaagatcattatcgtgtcatcagtaaaggtgtcttgaaccttcaaaatcgtacagacttacttacaattgaggctatcgagccagaacaatggtttgatatcgagtttagcctccaaccaagtatatatcaattgagtaaaggtgataatctaaggattatcctttatacaactgattttgaacataccattcgagataatgctagttactctataacagtagatttaagtcaatcttatttaactatcccaactaatcaaggaaat

SEQ ID NO: 4990 - protein, 761 aa, Streptococcus agalactiae
MRYNQFSYIPTKPNEAFEELKGLGFPLNKKNSDKANLEAFLRHSFLNQTDTDYALSLLIVDAKTDALTFFKSNSDLTLENLQWIYLQLLGFIPFVDFKDPKAFLQDINFPVSYDNIFQSLHHLLACRGKSGNTLIDQLVADGLLHADNHYHFFNGKSLATFNTNQLIREVVYVETSLDTMSSGEHDLVKVNIIRPTTEHTIPTMMTASPYHQGINDPAADQKTYQMEGALAVKQPKHIQVDTKPFKEEVKHPSKLPISPATESFTHIDSYSLNDYFLSRGFANIYVSGVGTAGSTGFMTSGDYQQIQSFKAVIDWLNGKVTAFTSHKRDKQVKANWSNGLVATTGKSYLGTMSTGLATTGVEGLKVIIAEAAISTWYDYYRENGLVCSPGGYPGEDLDVLTELTYSRNLLAGDYIKNNDCYQALLNEQSKAIDRQSGDYNQYWHDRNYLTHVNNVKSRVVYTHGLQDWNVKPRHVYKVFNALPQTIKKHLFLHQGQHVYMHNWQSIDFRESMNALLSQELLGIDNHFQLEEVIWQDNTTEQTWQVLDAFGGNHQEQIGLGDSKKLIDNHYDKEAFDTYCKDFNVFKNDLFKGNNKTNQITINLPLKKNYLLNGQCKLHLRVKTSDKKAILSAQILDYGPKKRFKDTPTIKFLNSLDNGKNFAREALRELPFTKDHYRVISKGVLNLQNRTDLLTIEAIEPEQWFDIEFSLQPSIYQLSKGDNLRIILYTTDFEHTIRDNASYSITVDLSQSYLTIPTNQGN

SEQ ID NO: 4991 - DNA, 2280 bp, Streptococcus pyogenes
atgcgctataatcaattttcctatattccaactagtctagaaagagcggctgaagaattaaaagaattgggctttgatctggatctgcaaaaaactgccaaagctagcctagaaagctttttacgtaaactcttcttccactaccctgatagtgattatcctttaagtcatctaatcgccaaaaatgacatggacgcattgagcttttttcaatcagagcaagagttatccaaagaggtttttgatttactggccctgcaagtccttggctttattcctggagttgattttacagaggccgatgctttccttgataaactggcctttcctatccactttgacgaaacagaaattatcaagcatatccaccacttattagcgacccgttgtaagtctggcatgaccctgattgatgatttggtcagccaaggaatgcttactatggacaatgattaccacttcttcaacggtaaatcattagctacctttgacacgtcacagctgattcgagaagttgtttacgttgaagcacctcttgataccgatcaagatggccaacttgatcttattaaggttaatatcattcgtcctcaatctcaaaaaccattaccaactttgatgacacctagtccataccatcaaggtatcaatgaagtagccaacgacaaaaaactttatcgtatggaaaaagagttagtcgttaaaaaaaggagacaaatcactgtcgaagacagggattttattcctcttgagacacagccttgcaaacttcctataggtcaaaatctagaaagctttagctacattaactcctatagcctcaacgattatttcctcgcacgtgggtttgctaatatctatgtttcaggtgtgggaactgctggttccactggctttatgacgagtggaaactatgctcaaattgaaagctttaaagccgttattgattggctaaatggaagagccacagcctacaccagccactcaaaaacccaccaagtgagagctgattgggcaaatggtctagtttgtacgactggaaagtcctacttgggaactatgtctactggtttagccactacaggcgtagacggattagccatgattattgcagaatcagctatttcttcttggtacaactactaccgcgaaaatggcttagtttgtagtcctggtggctatcctggagaggatctagatgtcttaactgagctcacctactcgcgtaatttattggctggcgattatcttcgccataatgatcgttatcaagaattgctaaaccaacagtctcaggcgttagaccgacaatctggtgattataatcaattttggcacgaccgcaattacttaaaaaatgctcatcaaataaagtgtgatgtcgtttatactcatggcttacaagactggaatgtcaaaccaagacaggtctatgagattttcaatgcgcttccttccacaatcaacaagcacctctttttacatcaaggtgagcatgtttacatgcataattggcaatccattgattttcgcgaaagcatgaatgcccttttatgtcaaaaactcttaggcctagctaatgattttagccttcctgaaatgatctggcaggataacacctgcccacaaaactggcaggagcgtaaagtctttggaacctcaaccatcaaagagcttgacctcggtcaggaactgcttttaattgataatcactatggtgaagatgaatttaaagcttacggtaaagatttccgtgcgttcaaagcagctctctttaaaggcaaggccaatcaagccctgattgatattttactggaagaggacttacctattaacggtgaaattgtcctacagttaaaagtgaaatcaagtgaaaataaaggacttctatctgcacaaatccttgactatggtaagaaaaaacgcttgggcgatcttcctattgctctcacccaatcaagtattgacaatgggcaaaatttctctagggaaccccttaaagagctaccatttagagaagattcttaccgtgttatttcgaaaggtttcatgaatttacaaaatcgcaataatttgtcgtcaattgaaactattcctaataataaatggatgactgttagacttcctttgcaaccaaccatctatcatctagaaaaaggagatacccttcgagtcatcttatacacaaccgattttgaacatactgtccgtgacaacagcaactatgctttaactatcgatctcagtcagtctcaattgattgtgccaatagcatcaaat

SEQ ID NO: 4992 - protein, 760 aa, Streptococcus pyogenes
MRYNQFSYIPTSLERAAEELKELGFDLDLQKTAKASLESFLRKLFFHYPDSDYPLSHLIAKNDMDALSFFQSEQELSKEVFDLLALQVLGFIPGVDFTEADAFLDKLAFPIHFDETEIIKHIHHLLATRCKSGMTLIDDLVSQGMLTMDNDYHFFNGKSLATFDTSQLIREVVYVEAPLDTDQDGQLDLIKVNIIRPQSQKPLPTLMTPSPYHQGINEVANDKKLYRMEKELVVKKRRQITVEDRDFIPLETQPCKLPIGQNLESFSYINSYSLNDYFLARGFANIYVSGVGTAGSTGFMTSGNYAQIESFKAVIDWLNGRATAYTSHSKTHQVRADWANGLVCTTGKSYLGTMSTGLATTGVDGLAMIIAESAISSWYNYYRENGLVCSPGGYPGEDLDVLTELTYSRNLLAGDYLRHNDRYQELLNQQSQALDRQSGDYNQFWHDRNYLKNAHQIKCDVVYTHGLQDWNVKPRQVYEIFNALPSTINKHLFLHQGEHVYMHNWQSIDFRESMNALLCQKLLGLANDFSLPEMIWQDNTCPQNWQERKVFGTSTIKELDLGQELLLIDNHYGEDEFKAYGKDFRAFKAALFKGKANQALIDILLEEDLPINGEIVLQLKVKSSENKGLLSAQILDYGKKKRLGDLPIALTQSSIDNGQNFSREPLKELPFREDSYRVISKGFMNLQNRNNLSSIETIPNNKWMTVRLPLQPTIYHLEKGDTLRVILYTTDFEHTVRDNSNYALTIDLSQSQLIVPIASN

SEQ ID NO: 4993 - DNA, 669 bp, Streptococcus agalactiae
ttggaggaagtcatgaatcatcaaattttacaaaattacattaatagtcataatcttccaattatcgaaaaagactaccataaataccttacatttgaaagtttagaagaagactatacttatatcctaaaagatggtattgttaaacaaagtgttctctctaaatatggtactgagttcaatctgcgttatgtgacaggcttagaaatcacttctatcctaaatacagactactcccaacacatgggagaaccttacaacgttcgaatcgaatccgaaactgcccacttttacaaagtacgtcgctctaccttcctaaaagatatcaataatgatattgaactgcaaggatatgtgaaagatttctatcataaccgccttgaaaaatctatgaaaaaaatgcaatgtatgctcactaatggtcgaattggtgctatctccacacaattatatgacctcagtaagatgtttggtgaagaacgagataacggtgatatctatattaattttgttatcacgaacgaagaacttggtaaattttgcggaatatccacaggaagtagcgtgagccgcattttgaaacaactaaaagacgatcatattattcgtattgaaaaacaacatatcattattacaaatgttgagaaattaaaagatcatattgtattt

SEQ ID NO: 4994 - protein, 223 aa, Streptococcus agalactiae
MEEVMNHQILQNYINSHNLPIIEKDYHKYLTFESLEEDYTYILKDGIVKQSVLSKYGTEFNLRYVTGLEITSILNTDYSQHMGEPYNVRIESETAHFYKVRRSTFLKDINNDIELQGYVKDFYHNRLEKSMKKMQCMLTNGRIGAISTQLYDLSKMFGEERDNGDIYINFVITNEELGKFCGISTGSSVSRILKQLKDDHIIRIEKQHIIITNVEKLKDHIVF

SEQ ID NO: 4995 - DNA, 717 bp, Streptococcus pyogenes
atgttaatttctcttgaagatacaaattatacattggtaaaagaatatttggagaaaagcgtgaatcatcacattttgcaacggtatattgataatcataactttcctatcattgaaaaaagttatcacaagtacttgacttttgaaagtctcgaagaggacttcacttatattttaaaagacggcattgtgaaacagagtgttctttcaaaatatggaatggaatttaatttgagatatgttacaggacttgaaattacttctgttctcaacactggttattcaaaagatatgggagagccttataatgttcgcatcgagtcagagaaagctagtttttacaaggttcgccgctcagcatttttaaaagatataaacgaagatattgaactacaaggatatgtgaaggacttttaccataatcgtcttcaaaaatccatgaaaaaaatgcaatgtatgttaactaacggccgtatcggtgccatttctactcaaatatatgacttaatgaccctatttggcgaagaactaccaaatggccaaattttaattaattttgtcattactaatgaggaactcggtaaattctgtggcatttctaccgctagcagcgtcagccgtattctaaaacagttgaaagaaaaaaacatcattcgcattgataaacaacatattatcattaccaatcttgataaattaaaagataatatcgttttc

SEQ ID NO: 4996 - protein, 239 aa, Streptococcus pyogenes
MLISLEDTNYTLVKEYLEKSVNHHILQRYIDNHNFPIIEKSYHKYLTFESLEEDFTYILKDGIVKQSVLSKYGMEFNLRYVTGLEITSVLNTGYSKDMGEPYNVRIESEKASFYKVRRSAFLKDINEDIELQGYVKDFYHNRLQKSMKKMQCMLTNGRIGAISTQIYDLMTLFGEELPNGQILINFVITNEELGKFCGISTASSVSRILKQLKEKNIIRIDKQHIIITNLDKLKDNIVF

SEQ ID NO: 4997 - DNA, 1200 bp, Streptococcus agalactiae
ttggaagacaaattattcaacaaacattttataggcattactattttaaactttattgtttatatggtctattatttgtttaccgttatcatagcttttattgcgactaaagagttaggtgttagcactagccaagcaggattagcaacggggatttatattgtagggactttgattgctcgtcttatatttggcaagcaattagaagttctaggacgtaagttagttttacgtggaggggctattttttacttactaacaactttagcttatttttatatgccaagtatcggagtaatgtatttagttcgtttcctaaatggttttggttatggcgtcgtgtcaacagcaactaatactattgtaacagcctatataccagctgataaaagaggtgaggggattaacttttacggtctatcaacaagtttagccgcagctattggtccttttgtaggaacatttatgctagacaaccttcatattaactttaaaatggttattgtattatgtagtattttaattgcgattgtagtgttgggagcatttgttttcccagtcaaaaatattactttaaatccagaacagttagctaaatcaaaatcatggactattgatagtttcattgagaaaaaagcaatttttatcacaattattgcatttttgatgggtatctcctatgcttccgtgttaggtttccaaaaattatatacaacagaaattaatttgatgacagtaggagcttatttctttattgtttatgcacttgtcatcactttaaccagaccatctatgggaagattaatggacgctaagggagataagtgggtgctttatccaagttatctgttcttaactttgggacttgctttattagggagtgctatgggaagtgttacctaccttctatcaggtgctttgattggttttggttatggcacctttatgtcttgtggccaagcagcatcaatcaaaggtgttgaggaacatcgtttcaatacagccatgtcaacttacatgataggtcttgatttagggttaggtgctggaccttacattttgggacttgttaaagatggttttcttggagctggtgtgcaatcctttagagaattattctggatagcagcgattattcctgttgtttgtggtattctatatttcttaaaatcatctagacaagttgaaactaaaactata

SEQ ID NO: 4998 - protein, 400 aa, Streptococcus agalactiae
MEDKLFNKHFIGITILNFIVYMVYYLFTVIIAFIATKELGVSTSQAGLATGIYIVGTLIARLIFGKQLEVLGRKLVLRGGAIFYLLTTLAYFYMPSIGVMYLVRFLNGFGYGVVSTATNTIVTAYIPADKRGEGINFYGLSTSLAAAIGPFVGTFMLDNLHINFKMVIVLCSILIAIVVLGAFVFPVKNITLNPEQLAKSKSWTIDSFIEKKAIFITIIAFLMGISYASVLGFQKLYTTEINLMTVGAYFFIVYALVITLTRPSMGRLMDAKGDKWVLYPSYLFLTLGLALLGSAMGSVTYLLSGALIGFGYGTFMSCGQAASIKGVEEHRFNTAMSTYMIGLDLGLGAGPYILGLVKDGFLGAGVQSFRELFWIAAIIPVVCGILYFLKSSRQVETKTI

SEQ ID NO: 4999 - DNA, 1299 bp, Streptococcus pyogenes
ttgctaatgccctttgatagtaacacttatattataccattgaaatatattatattctgctttttttgtaaaatgtttatgaaaatagagaggagttcattttcaatggaagaaaaattgtttaacaaacattttgtggccatcacagtaataaactttatagtctatatggtctactatctttttacagttattattgcctttgtggcgactagagagctaggagctcagactagccaggcaggattggcaacagggatttatattctagggactttattagcccgtttgatttttggaaagcagttggaggtgtttggtcgtcgtttggttttaagaggaggtgctattttttacctcttaacgaccttagcctacttttatatgccaacgattagcatgatgtacttggttcgtttcttgaacggatttggttatggtgtagtatcaactgcgacaaataccattgtaacagcctatattccagctcgtaaaagaggagaaggaattaatttttatggcttgtcaaccagtctagcagcagctattggcccttttgtaggaacctttatgttggataatcttcatattgattttcgcatgattattgtcttatgtagcgtcttgattgggtgtgtggttgttggtgcttttgcttttccagtcaaaaacatgtctttaaatgcggagcaattggctaaaaccaaatcgtggactgtggatagtttcattgagaaaaaagccttgtttatcactgcaatcgcctttttaatggggattgcctatgcttcagttttaggatttcaaaaattatacacgtctgaaattcatttgacaacagtaggcgcttatttctttgtggtctatgccttaatcattaccatcactcgtccagcaatgggacgtttaatggatgctaaaggcgataaatgggtcttgtacccaagttatctttttttagcaatgggactcttcttgctaggtagtgtatcgtctggaggaagctatttgctttcaggagccttgattggctttggttatggcacttttatgtcttgtggtcaagccgcctccatacaaggagtggatgagcaccgctttaatacggctatgtctacttatatgattggtcttgatttaggtttaggtgctgggccttacctcttgggcttgattaaagatttggcacttggtagtggtgtggcttcctttaggcacttattctggttagctgctgtgattccactgatttgtaccttgctttacttgttaaaaacaaagacaagacaggttgtgtct

SEQ ID NO: 5000 - protein, 433 aa, Streptococcus pyogenes
LLMPFDSNTYIIPLKYIIFCFFCKMFMKIERSSFSMEEKLFNKHFVAITVINFIVYMVYYLFTVIIAFVATRELGAQTSQAGLATGIYILGTLLARLIFGKQLEVFGRRLVLRGGAIFYLLTTLAYFYMPTISMMYLVRFLNGFGYGVVSTATNTIVTAYIPARKRGEGINFYGLSTSLAAAIGPFVGTFMLDNLHIDFRMIIVLCSVLIGCVVVGAFAFPVKNMSLNAEQLAKTKSWTVDSFIEKKALFITAIAFLMGIAYASVLGFQKLYTSEIHLTTVGAYFFVVYALIITITRPAMGRLMDAKGDKWVLYPSYLFLAMGLFLLGSVSSGGSYLLSGALIGFGYGTFMSCGQAASIQGVDEHRFNTAMSTYMIGLDLGLGAGPYLLGLIKDLALGSGVASFRHLFWLAAVIPLICTLLYLLKTKTRQVVS

SEQ ID NO: 5001 - DNA, 450 bp, Streptococcus agalactiae
atgacacaaaaatatgagcgtattcttattgctattgatgggtcttacgagtcagaattggcggtagaaaaagggataaatgttgctcttcgtaatgatgctgaattactgctaacgcatgttatagatgctcacgcttaccaaagtgagggagtctttagtgactatgtttttgataggcaagaacaagagtcagcagatgtgctagcctattttgagaaattagcacattcaaaaggccttacaaagattaaaaaaattactgaaatcggaaatcctaagactcttttggcaaaggatatccccataagggaaaaagcagatttaattatggtaggcgcaacaggattaaacacttttgaaagactattgatcggctcaacttcagaatacattttacgtcattcgaaagttgatatgctagtcgttcgtgatagtaagaaaacctta

SEQ ID NO: 5002 - protein, 150 aa, Streptococcus agalactiae
MTQKYERILIAIDGSYESELAVEKGINVALRNDAELLLTHVIDAHAYQSEGVFSDYVFDRQEQESADVLAYFEKLAHSKGLTKIKKITEIGNPKTLLAKDIPIREKADLIMVGATGLNTFERLLIGSTSEYILRHSKVDMLVVRDSKKTL

SEQ ID NO: 5003 - DNA, 846 bp, Streptococcus agalactiae
ttgatcgaaatcacttggactgtgaagtatatcacagaatttatcgcaaccgcttttcttatcatcttaggaaatggggctgtagctaacgttgacttaaaaggcacaaaaggaaataattcaggttggattattattgcaattggttatggtttaggtgttatgatgccagcgcttatgtttggtaatgtctctggaaaccatattaacccagctttcacacttggattggcattttcaggtcttttcccttgggcacacgttggacaatacattcttgcacaaattttaggagcaatgtttggacagttagttgtcgttatggtttatcaaccttactttgttaagacagaaaatccaaatcatgttcttggatcattttcaactatttctgcattagatgatggacagaaatcaagtcgtaaagcggcttacattaatggtttcttaaatgaattcgttggttcttttgttcttttctttggagctttggctttaacgaagaactattttggtgtagaacttgttggtaaacttgttcaagctggttatgaccaaacgacagcagcgacaaggatttcaccatacgtaactggttcacttgctgtagctcacttaggtattggtttcttggtaatgactctagttgcttctttaggtggaccgactggacctgcattgaaccctgcgcgtgaccttggtccacgtattgttcaccgcttattaccaaaacaaattcttggacaagctaaagaagattcaaaatggtggtatgcatgggtgccagttttagcaccaatcgtagcaagtatactcgctgtagccttgttcaaactattatatctt

SEQ ID NO: 5004 - protein, 282 aa, Streptococcus agalactiae
MIEITWTVKYITEFIATAFLIILGNGAVANVDLKGTKGNNSGWIIIAIGYGLGVMMPALMFGNVSGNHINPAFTLGLAFSGLFPWAHVGQYILAQILGAMFGQLVVVMVYQPYFVKTENPNHVLGSFSTISALDDGQKSSRKAAYINGFLNEFVGSFVLFFGALALTKNYFGVELVGKLVQAGYDQTTAATRISPYVTGSLAVAHLGIGFLVMTLVASLGGPTGPALNPARDLGPRIVHRLLPKQILGQAKEDSKWWYAWVPVLAPIVASILAVALFKLLYL

SEQ ID NO: 5005 - DNA, 945 bp, Streptococcus pyogenes
atgatcattttatttattattttattacctttacattcatcaataagcctgttaaaatggtatttgttatattttattatttggaggaaaccagaaaacatggaaatgacatggactgtgaaatacatcacagaatttatcgcaacggcttttttgattattttgggaaatggagctgttgctaacgtcgacttaaaaggaacaaaaggacataactcaggttggttagtgattgcttttggctatggcttaggagttatgatgccagctttgatgtttggtaatgtatctggaaaccatattaatcctgctttcacagttggactagcagtatcaggcttgttcccatgggctcacgtcttacaatacgttgtggcacaattacttggagctatctttggtcagttggtagtggtaatggtttataaaccttactttatgaaaactgaaaatccaaatcatgttttaggctcattctcaacgatttcatctcttgataatggtcaaaaagacagtcataaagcctcttatatcaatggtttcttaaacgaatttgtaggttcatttgttcttttctttggtgctttggctttgactaaaaactactttggggtagagttagttggtaaattgattgaagcaggctacgaccaaacaactgcagcaacacaaatttcaccatacgtgacaggctcattggcggttgctcacattggtattggtttcttagttatggtcttggttacttcattaggtggaccaactgggccagcactaaacccagcgcgtgattttgggcctcgtttgttacaccacttcttaccaaaatcagttcttggtcaagccaaaggtgattcaaaatggtggtatgcatgggttcctgtagttgcacctatcttagcggcgatagtagccgtagcagcgtttaaatacctttatatcaga

SEQ ID NO: 5006 - protein, 315 aa, Streptococcus pyogenes
MIILFIILLPLHSSISLLKWYLLYFIIWRKPENMEMTWTVKYITEFIATAFLIILGNGAVANVDLKGTKGHNSGWLVIAFGYGLGVMMPALMFGNVSGNHINPAFTVGLAVSGLFPWAHVLQYVVAQLLGAIFGQLVVVMVYKPYFMKTENPNHVLGSFSTISSLDNGQKDSHKASYINGFLNEFVGSFVLFFGALALTKNYFGVELVGKLIEAGYDQTTAATQISPYVTGSLAVAHIGIGFLVMVLVTSLGGPTGPALNPARDFGPRLLHHFLPKSVLGQAKGDSKWWYAWVPVVAPILAAIVAVAAFKYLYIR

SEQ ID NO: 5007 - DNA, 957 bp, Streptococcus agalactiae
ttgtgctctcaataccataaagtcaaattgacagtttcactatttttttgtagactggatattatgaatgaaacactactattacatgggattcagcttattctgattatcgccatgattatcactttttatcagattgttagacatattaggtctcaaaaaataaatcctttcaaacgatttttcactggtttgtggatcggttttgtaactgatgctctcgatactcttggtatcggctcttttgcaacaacgaccacattttttaaactaactaagcttgttgaagacgatcgtaagatacccgcaacaatgacagctgcacacgtacttccagttttgttgcagtcactctgttttatttttgttgtaaaagtagaggctttaacactaataacaatggctggtgcagcttttattggggcttttgttggagctaaaatgactaaaaattggcacgctcctactgttcaacgtattctaggaacactgctcatcacagctgctattattatgctctatcgtatgatcactaaccctggcgctggtatttcagattcagtgcatggtctacacggcatttggttatttgttggtatcggcttcaattttattattggtgtattaatgactatgggactaggtaattatgctcccgaacttatcttcttctccctaatgggactgagtcctgcagttgctatgcctgtcatgatgctagatgcagctatgataatgacagcttctagtacacaatttatcaagagtggtcgtgttaattggaacggctttgccggtctggttactgggggaatattaggcgttattgtcgctgttctcttcttaactaaccttgatcttaacagcttgaaaacactggttgtaggtattgttttatttactggagcaatgttaatacgttcttcctttaaaaaaactatgcccaaaagtcatcat

SEQ ID NO: 5008 - protein, 319 aa, Streptococcus agalactiae
MCSQYHKVKLTVSLFFCRLDIMNETLLLHGIQLILIIAMIITFYQIVRHIRSQKINPFKRFFTGLWIGFVTDALDTLGIGSFATTTTFFKLTKLVEDDRKIPATMTAAHVLPVLLQSLCFIFVVKVEALTLITMAGAAFIGAFVGAKMTKNWHAPTVQRILGTLLITAAIIMLYRMITNPGAGISDSVHGLHGIWLFVGIGFNFIIGVLMTMGLGNYAPELIFFSLMGLSPAVAMPVMMLDAAMIMTASSTQFIKSGRVNWNGFAGLVTGGILGVIVAVLFLTNLDLNSLKTLVVGIVLFTGAMLIRSSFKKTMPKSHH

SEQ ID NO: 5009 - DNA, 930 bp, Streptococcus pyogenes
ttgacggctaaggtttttttttgtaaactagtctttatgaacgaaatgcttatccttagactgatacaagctttgctagtttcggcaatgctttttattttctttatgttagtaaaacatcttaaaaaaaataagatcaatccttttaaacgcttttggacggggttttggattggcctgctaacagatgcccttgacacccttgggatagggtcttttgctactaccacaacgtgctttaagttaactaaattagtcactgacgatagacaattgcctggcactatgaccgtagctcatgtgcttccggtgctcattcaatctctttgctttatttttgtcgtaaaagttgaggttctaactttacttgctatggctgcagcagcctttattggagcttattttgggactcatattacaaaaaactggcatgctccaactgtccaacgaatccttggtagtcttttaatcatagcagctataatcatgatcattagaataatctaccatccaggagaacacctttcagacaccattcatggcctccatggcatctggctttttgttggaattggttttaattttatcgttggagtcttgatgactatggggttaggcaattatgctccagaattgattttcttttcattaatgggtcttagcccaacagttgctatgcctgttatgatgctagatgcagctatgattatgacagcttctagtagccagtttatcaaagcaaaccgtgtcagttgggatggttttgctggaattgtttctggtggtattattggcgttttactagctgtgtttttcttaacgaatttagatattaatagcttgaaacttctggtcatcgctatcgttttcttcactggtggaatgctgattcgttcctcctttacctctcataagcaacaaacaaataga

SEQ ID NO: 5010 - protein, 310 aa, Streptococcus pyogenes
LTAKVFFCKLVFMNEMLILRLIQALLVSAMLFIFFMLVKHLKKNKINPFKRFWTGFWIGLLTDALDTLGIGSFATTTTCFKLTKLVTDDRQLPGTMTVAHVLPVLIQSLCFIFVVKVEVLTLLAMAAAAFIGAYFGTHITKNWHAPTVQRILGSLLIIAAIIMIIRIIYHPGEHLSDTIHGLHGIWLFVGIGFNFIVGVLMTMGLGNYAPELIFFSLMGLSPTVAMPVMMLDAAMIMTASSSQFIKANRVSWDGFAGIVSGGIIGVLLAVFFLTNLDINSLKLLVIAIVFFTGGMLIRSSFTSHKQQTNR

SEQ ID NO: 5011 - DNA, 753 bp, Streptococcus agalactiae
atgacgttatttcattcattgacatttaaacacccagtattacgtgttaataatagagacttgaatattgcattttatcaggagtctcttggatttaaattgataagtgaagaaaatgcaatcgcagttttctcagcatggcagaacaaagaggctagctttattattgaggaatccccaacttatcgtactcgtgcggtgaatggtactaagaagttagcaaagattattgttaagtctcaagatgcaaaagatattgaaaagcttttggcaaatggtgcgcaagccattcaagtatatcaaggtcaaaatggttatgcctatgaaacagtttcgcccgagggagaccttttcttacttcatgctgaagatgatttgtcacaattagtggcaattgagcgcccagagttagaaaaaaaagatgacactacaggtctatcaaactttgctttccaatctattagtttgaatgtacctgatgccgtgaaagctgaagctttttacgataaagtatttgctgggaagttcccaattaatttatctttcaaagaagcacagggacaagatttgcaaattgctccaaatgaaacttgggatattgagatactagaatgctgtgttaatgaagatactaatttaaatgacttgaaatcaacttttgaatcattgggacttgatgtttaccttgattctaaagaaaagattttagtcatctctgacactagtaatattgagatttggatttcaaaagaa

SEQ ID NO: 5012 - protein, 251 aa, Streptococcus agalactiae
MTLFHSLTFKHPVLRVNNRDLNIAFYQESLGFKLISEENAIAVFSAWQNKEASFIIEESPTYRTRAVNGTKKLAKIIVKSQDAKDIEKLLANGAQAIQVYQGQNGYAYETVSPEGDLFLLHAEDDLSQLVAIERPELEKKDDTTGLSNFAFQSISLNVPDAVKAEAFYDKVFAGKFPINLSFKEAQGQDLQIAPNETWDIEILECCVNEDTNLNDLKSTFESLGLDVYLDSKEKILVISDTSNIEIWISKE

SEQ ID NO: 5013 - DNA, 750 bp, Streptococcus pyogenes
atgactttaatggaaaatattacctttaaaactccagtattacgcgttaatgatcgcgaccttaatattgcattttatcaaaataatttagggcttcgtttagtatctgaagaaaatgcgattgctatcttttcatcttggggagaagggcaggaatgttttgtaattgaagagtcaccttcagttagaacgcgtgcggtagaaggccctaaaaaggttaatacgattgtcatcaaaacaaatcaacctaaagaaatcgaacaattattagctcatggagcacattatgacgctctttttaaaggtcaaaatggctatgcctttgagactatttccccagaaggagaccgattcttgttgcatgctgaacaagatattaaacatctccaaggtactgatttaccatcgcttgaaaaagatgcgacttttaaaggtttaactcaatttaagtttgatattattgttttaaatgttattagtgaagaacgctcaaaagctttttatcgggatctgtttagtgatcagttacctattactatggattttattcaagaagaaggtcccgatttggcaattgatccccatattgcttgggatttagaaattttagaatttcaagtctcaaaggactatgatatgaaggtcctaaaagcaactttagaagaagacgggcacaaggtctacattgataaaaaacacaaagtattggtcctttctgatccaagtcagatcgaagtatggtttacgaaa

SEQ ID NO: 5014 - protein, 250 aa, Streptococcus pyogenes
MTLMENITFKTPVLRVNDRDLNIAFYQNNLGLRLVSEENAIAIFSSWGEGQECFVIEESPSVRTRAVEGPKKVNTIVIKTNQPKEIEQLLAHGAHYDALFKGQNGYAFETISPEGDRFLLHAEQDIKHLQGTDLPSLEKDATFKGLTQFKFDIIVLNVISEERSKAFYRDLFSDQLPITMDFIQEEGPDLAIDPHIAWDLEILEFQVSKDYDMKVLKATLEEDGHKVYIDKKHKVLVLSDPSQIEVWFTK

SEQ ID NO: 5015 - DNA, 942 bp, Streptococcus agalactiae
ttggatttcaaaagaatgattaaaactaatactgttttagaactcattaaggagcaaatcaaagataatctttatcatggtgcaagcttagctatttatgaaaatggagagtggcacgaacattacttggggacaattgatggcaatgagaaagttaaagcgggattggtctatgatctagccagtgtatcaaaagttgtcggcgtgggaactttactagcaaagttagtttatcaagggactattgatattgataagccattaaggtattattaccctacgtttcatcatcagacgttaactgtaaggcaattagctacacatagcagtggaattgacccttttattccaaatcgtgatcagttgaatgctactcagctgaaagatgccattaatcatatcaaggttttggaagataaatcgtttaaatacactgatattaattttcttttacttggttttatgttagaagaggtattaggggatagtttggataaacttttcaaacgttatattttcactccttttcagatgaaagaaacctcttttggtcctagagtagaagctgttccaactgtagtcggtattaacgatggtattgtacacgatcctaaagctaaggtattaggaaagcatactggttctgcaggtttattttcaactattgatgatttacaaagattttctattcattatttaaaagatgattttgcgaagcctttgtggaataattatagtttgagtaaatcaagatcattagcttgggatatagataaggattggataaaccatactggttatactggtccttttattgcactaaattatcaaaagcaggcagcagctatttttttgacaaacagaaccttttcctatgatgaccgtccactttggattaagaaacgacgacatgtacaagaggcgataacatcgtactttgaa

SEQ ID NO: 5016 - protein, 314 aa, Streptococcus agalactiae
MDFKRMIKTNTVLELIKEQIKDNLYHGASLAIYENGEWHEHYLGTIDGNEKVKAGLVYDLASVSKVVGVGTLLAKLVYQGTIDIDKPLRYYYPTFHHQTLTVRQLATHSSGIDPFIPNRDQLNATQLKDAINHIKVLEDKSFKYTDINFLLLGFMLEEVLGDSLDKLFKRYIFTPFQMKETSFGPRVEAVPTVVGINDGIVHDPKAKVLGKHTGSAGLFSTIDDLQRFSIHYLKDDFAKPLWNNYSLSKSRSLAWDIDKDWINHTGYTGPFIALNYQKQAAAIFLTNRTFSYDDRPLWIKKRRHVQEAITSYFE

SEQ ID NO: 5017 - DNA, 372 bp, Streptococcus agalactiae
atgttaaatcacaaatttcttcaagttctaaaatatgagggtgtcgtttcgataacaagctggatcgaattagctcctcacgttacaaacacttggaatagctacctgactattacagatgaccagcgtatattagctcctgcagcaggaatgactcatcttgaaaatgatctcaataataattctaaaattattatgactctgggcagccgtgaagtcgagggtcgtgatggttatcaaggtacaggctttagaattgaaggaactgctaagctattagaagcaggaagcgattttgaaattgttaaagaaaaatacccttttctgcgtaaagtattggaagtaactcccataaatgttatccaactttta

SEQ ID NO: 5018 - protein, 124 aa, Streptococcus agalactiae
MLNHKFLQVLKYEGVVSITSWIELAPHVTNTWNSYLTITDDQRILAPAAGMTHLENDLNNNSKIIMTLGSREVEGRDGYQGTGFRIEGTAKLLEAGSDFEIVKEKYPFLRKVLEVTPINVIQLL

SEQ ID NO: 5019 - DNA, 114 bp, Streptococcus agalactiae
ttgttagaagggttagcacctggtgagaagaattctactttagaaaggtttacactaccatcttcattgagatatactcctttatgtaccggtgagttaccagtttgtttagag

SEQ ID NO: 5020 - protein, 38 aa, Streptococcus agalactiae
MLEGLAPGEKNSTLERFTLPSSLRYTPLCTGELPVCLE

SEQ ID NO: 5021 - DNA, 2328 bp, Streptococcus agalactiae
atgtttaaggagaaaactatggcaacagttaaaacaaacacagatatctttgaacaagcttgggaaggctttaaaggtgttgattggaaagaaaaagcaagtattgctcgcttcgttcaagcaaactatgcaccttacgatggagatgaaagcttcttagctggagcaactgaacgttcacttcacatcaaaaaagtgattgaagaaacaaaagctcactatgaagaaactcgcttcccaatggatactcgtgttgcttcaatttctgaattaccagctggttttatcgacaaagataacgagcttatctttggtattcaaaacgacgagcttttcaaattgaacttcatgcctaaaggtggtatccgtatggcggaaactacacttaaagaaaatggttatgaacctgatccagctgttcacgaaatcttcactaagtacgctacaacagtaaatgatggtatcttccgcgcttatacttctaacattcgtcgtgctcgccatgcacacactgttactggtcttccagacgcttattcacgcggacgtatcattggtgtatatgctcgtctagctgtttacggtgctgactacttgatgcaagaaaaagttaatgactggaatgcattgaatgatattgatgaagagtcaattcgtcttcgtgaagaaatcaaccttcaataccaagctcttggtgaagttgtaaaacttggtgacctttacggcgtagatgttcgtaaaccagccatgaacactaaagaagccattcaatgggtgaacattgctttcatggctgtatgtcgtgttatcaatggtgctgcaacatcacttggacgtgttcctattgtccttgatatctttgcagaacgtgacctcgctcgcggtacattcacagaatcagaaatccaagaatttgttgatgattttgtccttaaactccgtactgtaaaatttgctcgtactaaagcttatgatgccctttactcaggtgacccaacctttatcacaacttcaatggcaggtatgggagctgatggacgtcatcgtgttaccaaaatggactatcgtttcttaaatacacttgacaatatcggtaactcaccagaaccaaacttaactgttctttggtcagatcaattaccatatgctttccgtcgctactgtatgtcaatgagtcataaacactcttcaatccaatatgaaggtgtatcaacaatggctaaagaaggctacggtgaaatgtcatgtatttcatgttgtgtatctccacttgatccagaaaacgaagacaaacgtcacaaccttcaatattttggtgctcgtgttaacgttatgaaagcacttcttactggtcttaacggtggttatgatgatgttcataaagattacaaagtatttgacatcgacccaattcgtgacgaagtactcaactttgacactgtaaaagctaactttgaaaaatctcttgactggttgactgatacttatgttgatgcgatgaatatcatccactacatgactgataaatacaactatgaagctgtacaaatggcattcttaccttcacatgtacgtgctaatatgggatttggtatctgtggttttgcaaatactgtcgattcattatctgcgattaaatacgctactgttaaaccaatccgtgacgaagatggttacatctacgactacgaaacagttggtgacttcccacgttatggtgaagatgatgatcgtgttgactcaatcgctgaatggttacttgaagccttccatggacgccttgctaaacacaaactttataaagatgctgaagcaactgtttctcttcttacaatcacatcaaacgttgcttactctaaacaaactggtaactcaccggtacataaaggagtatatctcaatgaagatggtagtgtaaacctttctaaagtagaattcttctcaccaggtgctaacccttctaacaaagctaaaggtggctggttacaaaacttgaattcactttctaaacttgatttcgctcatgcaaatgatggtatttcattgacaactcaagtttctccacgcgctcttggtaaaacatttgatgaacaagttgataacttggtaacagtccttgatggttactttgaaaacggtggtcaacacgttaacttgaatgtcatggaccttaaagatgtctatgacaagattatgaatggtgaagatgttatcgttcgtatctcaggttactgtgtcaatactaaatatctaactcctgagcaaaaaactgagttgacacaacgtgtcttccatgaagtactttcaatggacgatgcattaactaac

SEQ ID NO: 5022 - protein, 776 aa, Streptococcus agalactiae
MFKEKTMATVKTNTDIFEQAWEGFKGVDWKEKASIARFVQANYAPYDGDESFLAGATERSLHIKKVIEETKAHYEETRFPMDTRVASISELPAGFIDKDNELIFGIQNDELFKLNFMPKGGIRMAETTLKENGYEPDPAVHEIFTKYATTVNDGIFRAYTSNIRRARHAHTVTGLPDAYSRGRIIGVYARLAVYGADYLMQEKVNDWNALNDIDEESIRLREEINLQYQALGEVVKLGDLYGVDVRKPAMNTKEAIQWVNIAFMAVCRVINGAATSLGRVPIVLDIFAERDLARGTFTESEIQEFVDDFVLKLRTVKFARTKAYDALYSGDPTFITTSMAGMGADGRHRVTKMDYRFLNTLDNIGNSPEPNLTVLWSDQLPYAFRRYCMSMSHKHSSIQYEGVSTMAKEGYGEMSCISCCVSPLDPENEDKRHNLQYFGARVNVMKALLTGLNGGYDDVHKDYKVFDIDPIRDEVLNFDTVKANFEKSLDWLTDTYVDAMNIIHYMTDKYNYEAVQMAFLPSHVRANMGFGICGFANTVDSLSAIKYATVKPIRDEDGYIYDYETVGDFPRYGEDDDRVDSIAEWLLEAFHGRLAKHKLYKDAEATVSLLTITSNVAYSKQTGNSPVHKGVYLNEDGSVNLSKVEFFSPGANPSNKAKGGWLQNLNSLSKLDFAHANDGISLTTQVSPRALGKTFDEQVDNLVTVLDGYFENGGQHVNLNVMDLKDVYDKIMNGEDVIVRISGYCVNTKYLTPEQKTELTQRVFHEVLSMDDALTN

SEQ ID NO: 5023 - DNA, 2352 bp, Streptococcus pyogenes
ttgttactagaatttaaggagaaatttatggcaactgttaaaaccaatacagatgttttcgaaaaagcttgggaaggctttaaaggaactgactggaaagaaaaagcaagtgtctcacgttttgtacaagctaactacaccccatacgatggcgatgaatctttcttggctggtgctactgaacgttcacttcacatcaaaaaagttatcgaagaaacaaaagcacactatgaagctacacgtttcccatacgatactcgtccaacttcaattgctgacattcctgctggtttcatcgataaagaaaatgaattaatttatggtattcaaaacgatgaattgttcaaattgaacttcatgccaaaaggtggtatccgtatggcggaaacgacccttaaagaaaacggctatgaaccagacccagcagtacatgaaatctttactaagtatgtgacaactgttaacgacggtatcttccgcgcttatacttcaaatattcgtcgcgctcgtcatgcccacactgtaactggtcttccagatgcttactcacgtggacgtatcatcggtgtttacgctcgtcttgctctttacggtgctgactacttgatgcaagaaaaagtcaatgactggaatgctatcactgaaatcgatgaagaatccattcgtcttcgcgaagaagttaaccttcaataccaagctcttggtgaagtggttaaacttggtgacctttacggagttgatgttcgtcgcccagcacaaaacgttaaagaagctatccaatgggtaaacatcgctttcatggctgtatgtcgtgtgatcaacggtgctgctacttctcttggacgtgtgccaatcgttcttgatatctttgcagaacgtgaccttgctcgcggtacctttacagaatcagaaatccaagaatttgttgatgattttgtccttaaactccgtaccgtaaaatttggtcgtacgaaagcttacgatgcgctttactcaggtgacccaacattcatcacaacttctatggctggtatgggtaacgatggtcgtcaccgtgtaactaagatggactaccgtttcttgaacacgcttgataatattggtaactctccagaaccaaacttgactgttctttggactgaccaactgccagaaacattccgtcgctactgtatgaaaatgagccacaagcactcttctatccaatatgaaggtgtgacaacaatggctaaagaaggttatggtgaaatgtcatgtatttcatgttgtgtgtcaccacttgacccagaaaatgaagaacaacgtcataacatccaatacttcggtgctcgtgtaaacgttcttaaagcccttcttactggtcttaacggtggttacgatgatgttcacagagactacaaagtgtttaacgttgttgaaccaatcacatcagaagttcttgagtacgacgaagttatggctaactttgagaaatctcttgactggttgacagatacttatgtagatgcgcttaacatcatccactacatgactgataaatacaactacgaagcagttcaaatggccttcttgccaacacaccaacgtgctaacatgggattcggtatctgtggtttcgctaacacagttgataccttgtcagctattaaatacgcaactgttaaaactatccgcgatgaaaatggctacatctatgactacgaagtaacaggtgacttccctcgttacggtgaagatgacgaccgtgttgatgacatcgcgaaatggttgatggaagcttaccacacacgtcttgcaagccacaaactttacaagaatgctgaggcttcagtatcacttcttaccatcacttcaaacgttgcttactctaaacaaactggtaactctccagttcaccgcggcgtcttcttaaacgaagatggtacagttaacactagccaagtggaattcttctcaccaggtgctaacccatctaacaaagcaaaaggtggctggttacaaaaccttaactcacttgctaaactggaattctcacatgctaacgatggtatctcattgactactcaagtatcacctcgtgctcttggtaaaacatttgacgaacaagttgacaacttggtaacagtgcttgacggttactttgaaaatggtggtcagcacgttaacttgaacgttatggaccttaacgatgtttatgacaaaatcatgaacggcgaagacgttatcgtacgtatctctggttactgtgtcaacaccaaataccttacaccagaacaaaaaactgaattgacacaacgtgtcttccacgaagtgctttccatggacgatgctgctgaagctatttcaagtaaa

SEQ ID NO: 5024 - protein, 784 aa, Streptococcus pyogenes
LLLEFKEKFMATVKTNTDVFEKAWEGFKGTDWKEKASVSRFVQANYTPYDGDESFLAGATERSLHIKKVIEETKAHYEATRFPYDTRPTSIADIPAGFIDKENELIYGIQNDELFKLNFMPKGGIRMAETTLKENGYEPDPAVHEIFTKYVTTVNDGIFRAYTSNIRRARHAHTVTGLPDAYSRGRIIGVYARLALYGADYLMQEKVNDWNAITEIDEESIRLREEVNLQYQALGEVVKLGDLYGVDVRRPAQNVKEAIQWVNIAFMAVCRVINGAATSLGRVPIVLDIFAERDLARGTFTESEIQEFVDDFVLKLRTVKFGRTKAYDALYSGDPTFITTSMAGMGNDGRHRVTKMDYRFLNTLDNIGNSPEPNLTVLWTDQLPETFRRYCMKMSHKHSSIQYEGVTTMAKEGYGEMSCISCCVSPLDPENEEQRHNIQYFGARVNVLKALLTGLNGGYDDVHRDYKVFNVVEPITSEVLEYDEVMANFEKSLDWLTDTYVDALNIIHYMTDKYNYEAVQMAFLPTHQRANMGFGICGFANTVDTLSAIKYATVKTIRDENGYIYDYEVTGDFPRYGEDDDRVDDIAKWLMEAYHTRLASHKLYKNAEASVSLLTITSNVAYSKQTGNSPVHRGVFLNEDGTVNTSQVEFFSPGANPSNKAKGGWLQNLNSLAKLEFSHANDGISLTTQVSPRALGKTFDEQVDNLVTVLDGYFENGGQHVNLNVMDLNDVYDKIMNGEDVIVRISGYCVNTKYLTPEQKTELTQRVFHEVLSMDDAAEAISSK

SEQ ID NO: 5025 - DNA, 1107 bp, Streptococcus agalactiae
atgggggagagaacaatgttaatttttcctttaataaatgatacgtcgcgtaaaattatccacattgatatggatgctttttttgcatctgtggaagagcgtgacaatccctctcttaaaggaaagcctgttattattggttctgatcccagaaaaaccggcggcagaggggttgtttctacttgtaattatgaggctcgaaagtttggagttcattcagctatgtcttcaaaagaagcgtatgaacgatgccctcaagctatctttatttcgggaaattaccaaaaatatcgccaagtaggaatggaagtacgagatatatttaaaaagtatacggatttggttgaaccgatgagtatagacgaagcttatttagatgtaactgaaaataaaatgggaataaaatcagctgttaaacttgctaaaatgatacaatacgatatttggaatgatgtccatttgacctgttcagcgggtatttcctacaataaatttttggcaaaattggcttctgactttgagaaaccaaaaggacttaccctcatcctaccagatcaagctcaagatttcttgaagcccttaccaatagagaaatttcatggtgttggtaaacgctccgtcgaaaaattacatgctttaggggtttatactggtgaggacctcctttccttatctgaaatttctttaattgatatgtttggtcgtttcgggtatgacctttatcgtaaggcaagagggattaatgcttccccggtaaaacctgatagagttcgtaaatcaataggaagtgagaaaacctatgggaaattactatataacgaagcagatatcaaagctgagatttcaaagaacgttcagagagttgttgcttctctggagaaaaataagaaagttggtaagacaatcgttttaaaagttagatatgcggattttgaaacattgacgaaacgtatgacattagaagagtatactcaagattttcaaatcattgatcaagttgctaaagcgatatttgataccttagaagagtcagtttttggcatacgactcttaggtgttacagtaacgaccctggaaaatgaacatgaagctatctatttagatttt

SEQ ID NO: 5026 - protein, 369 aa, Streptococcus agalactiae
MGERTMLIFPLINDTSRKIIHIDMDAFFASVEERDNPSLKGKPVIIGSDPRKTGGRGVVSTCNYEARKFGVHSAMSSKEAYERCPQAIFISGNYQKYRQVGMEVRDIFKKYTDLVEPMSIDEAYLDVTENKMGIKSAVKLAKMIQYDIWNDVHLTCSAGISYNKFLAKLASDFEKPKGLTLILPDQAQDFLKPLPIEKFHGVGKRSVEKLHALGVYTGEDLLSLSEISLIDMFGRFGYDLYRKARGINASPVKPDRVRKSIGSEKTYGKLLYNEADIKAEISKNVQRVVASLEKNKKVGKTIVLKVRYADFETLTKRMTLEEYTQDFQIIDQVAKAIFDTLEESVFGIRLLGVTVTTLENEHEAIYLDF

SEQ ID NO: 5027 - DNA, 1092 bp, Streptococcus pyogenes
atgcttatttttccactgattaatgacacgtcacgaaaaatcatccatattgacatggatgccttttttgctgcagttgaggaaagggataaccctgctttaaaaggaaagcctgttgtgattgggaaagatccaagagaaacaggtggtcgcggagttgtttccacttgtaattacgaagcgagaaaatatggcattcattcggccatgagctctaaggaagcttatgagcgttgtcccaaagccatttttatttcaggaaattatgaaaagtatcgaacagttggagaccagatccgccgtatttttaagcgttatactgatgtggtagagcctatgtccattgacgaggcttaccttgatgtgactgataataagttggggattaagtcagccgtcaaaatagccaagctgattcagcatgatatctggaaagaagtaggattgacctgttcagcaggtgtgtcttataacaaatttttggctaaattggctagtgattttgaaaaacctcatggcctcactctagtcttgaaagaagatgccctgtgctttttagccaaactccccattgaaaagtttcatggtgttggtaaaaaatcagttaaaaaactgcatgacatggggatttatacaggacaggatttgttggcagttcctgaaatgaccttgattgatcattttggtcggtttggttttgacctttaccgtaaagcgagaggcatcagcaattctcctgtcaagtatgatcggatacgcaagtcaattggcagtgagagaacctacgctaaactgctttatcaagaaacagacatcaaggcagagatcagtaaaaatgttaagcgcgtggccgctctcttacaagaccataaaaagttaggcaagaccattgtgctcaaagtgcgttatgctgattttaccaccttgacaaaacgtgtcaccttgccagaattaaccagaaatgccgcacaaattgagcaagtagctggggatatttttgacagcttaagcgaaaatcctgctggtatccgcctgttaggggtaaccatgaccaatttggaggataaggtagctgatatttccttggaccta

SEQ ID NO: 5028 - protein, 364 aa, Streptococcus pyogenes
MLIFPLINDTSRKIIHIDMDAFFAAVEERDNPALKGKPVVIGKDPRETGGRGVVSTCNYEARKYGIHSAMSSKEAYERCPKAIFISGNYEKYRTVGDQIRRIFKRYTDVVEPMSIDEAYLDVTDNKLGIKSAVKIAKLIQHDIWKEVGLTCSAGVSYNKFLAKLASDFEKPHGLTLVLKEDALCFLAKLPIEKFHGVGKKSVKKLHDMGIYTGQDLLAVPEMTLIDHFGRFGFDLYRKARGISNSPVKYDRIRKSIGSERTYAKLLYQETDIKAEISKNVKRVAALLQDHKKLGKTIVLKVRYADFTTLTKRVTLPELTRNAAQIEQVAGDIFDSLSENPAGIRLLGVTMTNLEDKVADISLDL

SEQ ID NO: 5029 - DNA, 480 bp, Streptococcus agalactiae
atggtttcatatgaaaaagtccgccgctctctgcgcacagctacaatcactatcattgtattaaatagtttgtctttagtattcagattgtttacaggaatttcagtgcagctagccaaaactgaaattaataaagggaacacaggtaatcttcctaaagaacatatcgaagcagtcttgagcgccacaacaccatttatgctatttgtcactgctttaatagtattagtcaacattgccattgttattttctgtattaaaaatttaagagcaattaaaagaaatcaaacggttaattaccttccttattaccttggcttcgccattactgtaggacttgttattttgggttttctaactactaaagcaccatgggcaatagctataaatatcgtcttccaagctattttcggtcttctttatttccatgcttatcaaaaagcacaaaaactcaacgaacgtgatcttgaagagactaac

SEQ ID NO: 5030 - protein, 160 aa, Streptococcus agalactiae
MVSYEKVRRSLRTATITIIVLNSLSLVFRLFTGISVQLAKTEINKGNTGNLPKEHIEAVLSATTPFMLFVTALIVLVNIAIVIFCIKNLRAIKRNQTVNYLPYYLGFAITVGLVILGFLTTKAPWAIAINIVFQAIFGLLYFHAYQKAQKLNERDLEETN

SEQ ID NO: 5031 - DNA, 480 bp, Streptococcus pyogenes
atgatttcttatgaaaaagtgcgtcaggcactcaaaacgtctactattgccattattattctaaacgggcttggagttgtactgtcattaatgggatttgcagggattttctacttacaaagccaactcaagaatgaagcatttcgggcccaattaacaactgagcaattggcacagctacaaagcagcatgacaccatttatgattttcttatctgtcttaaatgtccttgctattattgctatcattgtcttttgtgctcaaaacttatctaaattaaaacaaggtctaacggttagttatattccttatatcttaggccttatcctttctgttatcggcttggttaaccagttcacaacaaccatgtcaatggttggaactatccttatccttatacaagctgctctttatggctttgctttttacaaggctaaaacccttaacgaaaaaggtgatgatacagaccaagctatgctg

SEQ ID NO: 5032 - protein, 160 aa, Streptococcus pyogenes
MISYEKVRQALKTSTIAIIILNGLGVVLSLMGFAGIFYLQSQLKNEAFRAQLTTEQLAQLQSSMTPFMIFLSVLNVLAIIAIIVFCAQNLSKLKQGLTVSYIPYILGLILSVIGLVNQFTTTMSMVGTILILIQAALYGFAFYKAKTLNEKGDDTDQAML

SEQ ID NO: 5033 - DNA, 2418 bp, Streptococcus agalactiae
atggaagtattttttacaggaaccattgaacgcattatatttgaaaatgccagcaatttttttaaaatattacttctggaaatcgaagatacggatagcgattttgatgatgtagaagtaattattactggtactatggccgacgttatagagggagaagaatatactttttggggaacactaacccaacatccaaaatacggcgagcaactacaaagtgtacgctatgaaagagccaagcctacttcaggtggccttgtgaaatacttttctagcgaacaatttaaaggaattggtaaaaagactgcccaacgcatcgtagaactctatggagataataccattgataaaatccttgaatcccctgaacagttaagtacaatctcaggactatcaaaaattaatagagaagcattcatcgctaaactgaaactcaattatggaacagagcaagttttagctaaactcgctgaatatgggttaagcaatcgtgctgctattcaaatatttgatcactataaagaagaatcacttgaagtgataaacgaaaatccttatcaacttgttgaggatatccaaggtatcggttttaaaatagctgaccaacttgctgaacaagtcggtattgaaagtgattctcctaaacgctttcgtgctgctattattcatactttagttgagtcttctatggagcaaggagatacctatattgaggctcgtactctcttggaaaaaaccattactctccttgaagaagctcgtcaaatcgaactagatccttcaattgttgctaaggaattgacaaatttaattgcagaagataaagtgcaacatattggaactaaaatttttagtaatactctattttttgccgaagaaggcatcaaaaaaaacttacaacgaatactaaatcagcctcttgataaacaactaaatcacaaagatattgaccgtgaaatcagagatattcaaaaatctttaaatatccactacgataatatccaagaaaaagctattagagaagctttactaagtaaggtatttatcttgactggtggcccaggaacaggtaaaacaacagttataaatggtattattgaagcctattccgagttacatcatattgatttaaacaaaaatgatattcctattgtacttgctgctcctacaggtcgtgctgctagacgcatgaatgaacttaccggtttaccgagtgctactattcataggcatttgggattaaacggagatagtgactatcaaagtctagatgactatctagattgttccttaattatcattgatgaattttcaatggttgacacttggcttgctaatcaattatttgacgctttggactcgcacacacaagttattattgtcggagatagtgatcaattaccgtctgtaggtccaggacaagttctagcagatcttttaaatataaatgcacttccacacgttaaacttgaaaagatttttagacaatcagaagaatcaactattgtgactttagctaatcaaatgagacagggctttttgccagaggactttacagctaaaaaagccgatcgctcatactttgaagcatctgctaatatcatcccaaatatgatttctaaaattgttcaatctgcacttaagagcggtattgaagctcatgaaattcaaattttagctcctatgtatcgcggccaagcaggtattaataatcttaaccttatcatgcaaaatctcctcaatccattaaaagataataaccaatttacttttaatgatataaatttccgaataggagataaagtgttacatttagtcaacgatacagagcttaatgtttttaatggggatattggttacataacggaccttataccagccaaatatactgagagcaagcaagatgagatttatatgacttttgacggtcaagaagttatctatcaacgcaaagaatggcttaaaataacactagcctatgctatgagtattcataaatcacagggttctgaatttcaagttgttattctgccaataacgagacagagtggtcgaatgttacagcgaaaccttatttatacagctattacgagatctaaaagtaaactaatacttttaggagaaattggtgcatttgatttcgctgttaaaaacgagggggcaaagcgcaatacttatctgatagaaagatttgaaaacaagcaagaaatagctaattctcaaaaaattgaagatagctcaatagatcaaaagattgacaacacaataattaatacgtccattccaaaaacagcaacaccaattgagcagactaatctttcaaaaataacttatcgcctaactgaagaaaattatttaacaatcgatccaatgattggtattaatcaacaagatataagtgcaatttttgatagtaaa

SEQ ID NO: 5034 - protein, 806 aa, Streptococcus agalactiae
MEVFFTGTIERIIFENASNFFKILLLEIEDTDSDFDDVEVIITGTMADVIEGEEYTFWGTLTQHPKYGEQLQSVRYERAKPTSGGLVKYFSSEQFKGIGKKTAQRIVELYGDNTIDKILESPEQLSTISGLSKINREAFIAKLKLNYGTEQVLAKLAEYGLSNRAAIQIFDHYKEESLEVINENPYQLVEDIQGIGFKIADQLAEQVGIESDSPKRFRAAIIHTLVESSMEQGDTYIEARTLLEKTITLLEEARQIELDPSIVAKELTNLIAEDKVQHIGTKIFSNTLFFAEEGIKKNLQRILNQPLDKQLNHKDIDREIRDIQKSLNIHYDNIQEKAIREALLSKVFILTGGPGTGKTTVINGIIEAYSELHHIDLNKNDIPIVLAAPTGRAARRMNELTGLPSATIHRHLGLNGDSDYQSLDDYLDCSLIIIDEFSMVDTWLANQLFDALDSHTQVIIVGDSDQLPSVGPGQVLADLLNINALPHVKLEKIFRQSEESTIVTLANQMRQGFLPEDFTAKKADRSYFEASANIIPNMISKIVQSALKSGIEAHEIQILAPMYRGQAGINNLNLIMQNLLNPLKDNNQFTFNDINFRIGDKVLHLVNDTELNVFNGDIGYITDLIPAKYTESKQDEIYMTFDGQEVIYQRKEWLKITLAYAMSIHKSQGSEFQVVILPITRQSGRMLQRNLIYTAITRSKSKLILLGEIGAFDFAVKNEGAKRNTYLIERFENKQEIANSQKIEDSSIDQKIDNTIINTSIPKTATPIEQTNLSKITYRLTEENYLTIDPMIGINQQDISAIFDSK

SEQ ID NO: 5035 - DNA, 2451 bp, Streptococcus pyogenes
atggaatacgtttttacaggtactgttgatcgtatcatttttgaaaaccaggctaatttctttaaaattctcctccttgccattgaggatacagacagtgacattgacgactttgaaatcattatcacaggaacgatggctgacattattgaaggagatgactacaccttttggggggaattgacccagcaccctaaatatggacagcaactcaaactaagccgttaccaaaaaatcaaacctagttcatctggtttggttaattatttctctagcgaccattttaaggggattggtaaaaaaacagcggagaaaatcattgcgctatatggtcataataccattgaccatattttagaagacccaagcaaattagaaactatctctggcctatctaaggctaatcgtcaagcctttgtcgctaaactaaaattgaattacggcacagagcaactgattgctggtctcgtcgaacttggccttagcaaccgttttgcccttcaagcgtttgaaaagtataaagaagaggctcttgaccttgttaaagaaaatccctatcagttagtcgaagatctacaaggttttgggtttaaaatggcagatgctctcgctgaaaacttagggattgaaagcgactctccgaaacgttttcgtgcagccctccttcactgtctcttggaagaatccatcaatcgaggagatacttatgtccaagcacgacaattattagactttgccatcacactccttgaagatgcacgtcaagtagaatgtgatcctgctgctgtggctgaacaactaagcgagttaatcatagagggcaaaatcaaaaacagtgacaccaaactgtttgatgctagcctttattttgctgaagaagggattgctaacaacatctctcgtctcttagatactcctttaagtcagtcatttagtcatgataccattcaaacaaccatccaagccgttcaaaaagactttgccatcacctatgaccaagtgcagcaagaagccattactaaggctttaaccagcaaggtctttctcctaacaggtggtcccggaacaggaaaaacaactgttattcgaggcattttgcaggcttacgcgaacctgcatcagattgatttggataaaaaagaccttcctatcttgttagcagctccaacaggtcgggctgcacgtcgcatgaatgagttgactggacttcctagcgcaaccatccacaggcacttaggcctcaatggcgacaacgattaccaagccatggaggattatctagactgcgacctgctgattgtcgatgaattttcaatggtggatacctggcttgccaaccagttgttaggagctattaactcaacaactcaagtgattattgtcggagatagtgaccagcttccttcggttggacccggtcaagtcctgtcagatcttttaaaagtcaatagcctgccccaaatcgccttgcaaaagatatttcgtcaatcccaagaatctactattgtcaatttggcagaccagatgcgtcgaggaatcttagctgctgactttcgtgataaaaaagctgaccgttcttattttgaagcccaagcagcctttatccctgacatgattcaaaaaattgtcctatctgctattaaaagtggcatccctgctgaggaaattcaaattttagcacctatgtacaaaggacaagctggcatcaatcatcttaatcaactcatgcaagaacttctcaatcccttgcaaggacaaacagaatttctgttcaatgatacgcattttcgtaaaggtgataaagtcctccacttagtcaacgatgctcagttgaatgtctttaacggagatattggttatattacagatttgattcctgctaaatacaccgaatctaagcaagacgaattaatcttagattttgacggtagcgaagtcacgtaccctagaaatgaatggctaaaattaaccctggcctatgccatgagcattcataaatcgcaagggagtgagtttcaagtggtgattttacctatcacacgccaaagcggccgactcttgcaacgaaatgtgatttacacggccattactcggtctaaaagtaagttaattctgttgggagaatatactgcctttgagtatgctattaaacacgaaggcgataaacgccaaacctacttgatcgaacgcttccaagaacaatccgacttagcctcctctcaacctaaccaagagctaaaatcaaaagagcagacctcccttttttctaatacggcaacccttgaggacgactctcaaaaatcttcctctcaatcaacaaactctaaccccactgagaactctcagtcagataatgatgattttaggttaacacctgagaattattcgactatcgattcgatgatagggcttacagaatcagatattgccctctttttccagaaaaaatcc

SEQ ID NO: 5036 - protein, 817 aa, Streptococcus pyogenes
MEYVFTGTVDRIIFENQANFFKILLLAIEDTDSDIDDFEIIITGTMADIIEGDDYTFWGELTQHPKYGQQLKLSRYQKIKPSSSGLVNYFSSDHFKGIGKKTAEKIIALYGHNTIDHILEDPSKLETISGLSKANRQAFVAKLKLNYGTEQLIAGLVELGLSNRFALQAFEKYKEEALDLVKENPYQLVEDLQGFGFKMADALAENLGIESDSPKRFRAALLHCLLEESINRGDTYVQARQLLDFAITLLEDARQVECDPAAVAEQLSELIIEGKIKNSDTKLFDASLYFAEEGIANNISRLLDTPLSQSFSHDTIQTTIQAVQKDFAITYDQVQQEAITKALTSKVFLLTGGPGTGKTTVIRGILQAYANLHQIDLDKKDLPILLAAPTGRAARRMNELTGLPSATIHRHLGLNGDNDYQAMEDYLDCDLLIVDEFSMVDTWLANQLLGAINSTTQVIIVGDSDQLPSVGPGQVLSDLLKVNSLPQIALQKIFRQSQESTIVNLADQMRRGILAADFRDKKADRSYFEAQAAFIPDMIQKIVLSAIKSGIPAEEIQILAPMYKGQAGINHLNQLMQELLNPLQGQTEFLFNDTHFRKGDKVLHLVNDAQLNVFNGDIGYITDLIPAKYTESKQDELILDFDGSEVTYPRNEWLKLTLAYAMSIHKSQGSEFQVVILPITRQSGRLLQRNVIYTAITRSKSKLILLGEYTAFEYAIKHEGDKRQTYLIERFQEQSDLASSQPNQELKSKEQTSLFSNTATLEDDSQKSSSQSTNSNPTENSQSDNDDFRLTPENYSTIDSMIGLTESDIALFFQKKS

SEQ ID NO: 5037 - DNA, 591 bp, Streptococcus agalactiae
atgaaagaatttattaaagaatggggtgtctttatcctcatcctctcactttttttactatcgcgtatctttttatggcaattcgttaaagttgacggacactccatggatccaactttagctgacaaggaacagctagtagttctcaaacaaacaaaaatcaatcgattcgatattgtagtggctaacgaagaagaaggcggccaaaagaaaaaaattgttaaacgtgtcattggtatgccaggtgatgtcatcaaatataaaaatgacaccttaactattaacaataaaaaaacagaagaaccttacctcaaggaatatactaaattatttaaaaaggataaattacaggaaaaatattcgtataacccacttttccaagacctagcacaaagctctaccgctttcaccactgacagcaatggcagcagcgaatttactactgtcgtgcctaaaggccactactatcttgttggtgatgaccgaattgtctctaaagatagtcgtgccgtcggtcccttcaaaaaatcaacgattgtgggagaggttaaattccgcttctggccaattcgtcgttttggaactatcaac

SEQ ID NO: 5038 - protein, 197 aa, Streptococcus agalactiae
MKEFIKEWGVFILILSLFLLSRIFLWQFVKVDGHSMDPTLADKEQLVVLKQTKINRFDIVVANEEEGGQKKKIVKRVIGMPGDVIKYKNDTLTINNKKTEEPYLKEYTKLFKKDKLQEKYSYNPLFQDLAQSSTAFTTDSNGSSEFTTVVPKGHYYLVGDDRIVSKDSRAVGPFKKSTIVGEVKFRFWPIRRFGTIN

SEQ ID NO: 5039 - DNA, 657 bp, Streptococcus pyogenes
gtgctaaacttcacttcgccaacactcacaaagcgcaagcgcttctcactaaataaaaggaatcatatgaaacagtttattaaagaatggggcccattcactctctttttaattctctttggtctatctcgtctttttttgtggcaggctgttaaagtagacggccattctatggacccaactctagctcatggcgaacgccttatcgtttttaatcaagctagaattgatcgctttgatattgtagttgctcaggaagaagaaaacggacaaaagaaagaaatcgtaaaaagagttattggattgccaggcgataccatttcttataatgatgacacactttatattaatggtaaaaaaacagttgagccgtatttggctgagtatctaaaacaatttaaaaacgataaactccaaaaaacttacgcctataataccctattccaacagttagcagaaacatctgatgcttttacaactaattctgagggacaaacacgctttgagatgagtgttccaaaaggagaataccttcttcttggtgatgatcgtattgtttccagggatagtcgcgaagttggtagtttcaaaaaagaaaaccttatcggtgaagtgaaagctcgtttttggccactcaataaaatgaccgtttttaat

SEQ ID NO: 5040 - protein, 219 aa, Streptococcus pyogenes
VLNFTSPTLTKRKRFSLNKRNHMKQFIKEWGPFTLFLILFGLSRLFLWQAVKVDGHSMDPTLAHGERLIVFNQARIDRFDIVVAQEEENGQKKEIVKRVIGLPGDTISYNDDTLYINGKKTVEPYLAEYLKQFKNDKLQKTYAYNTLFQQLAETSDAFTTNSEGQTRFEMSVPKGEYLLLGDDRIVSRDSREVGSFKKENLIGEVKARFWPLNKMTVFN

SEQ ID NO: 5041 - DNA, 897 bp, Streptococcus agalactiae
ttgtctatgaacacaatcgtcatgcaagcagataaaaaattgcaagaaaagataagaaccgatttagctcaacatcatataagtaataacaatccttatgtggtattttcagctaaaatatcaggagctactgttcttttatatacttctggaaaacttgtcttccagggttctaacgcttcacatatcgcccaaaagtatggttttattgagcaaaaagaaagttgttcctctgagagtcaagatattcccataattggtactgatgaagtgggaaatggctcttactttggtggactggcagtggtagctagttttgtaactcctaaggaccatgcttacctcaaaaaattaggtgttggtgattcaaaaacacttactgatcaaaaaattaagcaaatcgcgcctcttttggaaaaagcaattccacacaaagcattattgttatcgcctcaaaaatataatcaagtggttagtccaaataacaaacataatgctgtctccgtaaaagttgctttacacaatcaagctatcttccttcttcttcaagatggttttgaaccagaaaaaatcgttattgatgcttttactagctccaaaaactatcaaaattatttgaaaaatgaaaagaatcaatttaaacaaacgattactctggaagaaaaagctgaaaataaatatctagctgtagcggtcagttctattattgcacgtaatctattcttagaaaaccttaacaaattaagcgacgacgtaggatataaacttccaagtggagctggtcaccaatctgataaggtcgctagccaattactcaaagcttatggtatctcttcgcttgaacactgcgcaaaacttcattttgccaacaccaaaaaagcacaagcattattaaaa

SEQ ID NO: 5042 - protein, 299 aa, Streptococcus agalactiae
MSMNTIVMQADKKLQEKIRTDLAQHHISNNNPYVVFSAKISGATVLLYTSGKLVFQGSNASHIAQKYGFIEQKESCSSESQDIPIIGTDEVGNGSYFGGLAVVASFVTPKDHAYLKKLGVGDSKTLTDQKIKQIAPLLEKAIPHKALLLSPQKYNQVVSPNNKHNAVSVKVALHNQAIFLLLQDGFEPEKIVIDAFTSSKNYQNYLKNEKNQFKQTITLEEKAENKYLAVAVSSIIARNLFLENLNKLSDDVGYKLPSGAGHQSDKVASQLLKAYGISSLEHCAKLHFANTKKAQALLK

SEQ ID NO: 5043 - DNA, 900 bp, Streptococcus pyogenes
atgaataccttagttttgaaaatagatgctatactgagtaaacatttaaaaaaacagctagccccctacaccatcagtagccaaaatacctatgtagcctttgctgctaaaaaaaatggggttactgttttgctgtacaaatccggaaaattagttctccagggaaacggtgcaaatgctttagctcaagagcttaatcttccagtagctaagacagtttttgaagcaagcaacaatagccaagatatacctataatcggcagtgatgaggtgggtaatggctcttattttggtgggattgctgttgtggcaagttttgtcgatcctaaagatcattccttcctgaaaaagcttggggttgatgattctaaaaaattatcggataaaaccattcaacagattgcgcctctgttagagaaacaaatacctcatcaatcacttctcctatcacctaaaaaatataacgaattggttggtaaaagtaaaccatataatgccatttctatcaaagttgctcttcataaccaagctatttttttgttgttacaaaaaggcattcaacctaaacaaattgttattgatgctttcactagccaatcaaattatgaaaagcatctaaaaaaggaaaaaaaccatttcccaaatcctctaacctttcaagaaaaggcagaaagtcactatttggctgtggctgttagctctatcattgctagaaatctatttttagacaatctcgatcaattaggtcaagatttaggttaccaactcccaagcggtgctggttcagcttcagataaagttgctagccaactcttagccgcttatggtatgtctagcttagaatatagtgctaaacttcacttcgccaacactcacaaagcgcaagcgcttctcactaaa

SEQ ID NO: 5044 - protein, 300 aa, Streptococcus pyogenes
MNTLVLKIDAILSKHLKKQLAPYTISSQNTYVAFAAKKNGVTVLLYKSGKLVLQGNGANALAQELNLPVAKTVFEASNNSQDIPIIGSDEVGNGSYFGGIAVVASFVDPKDHSFLKKLGVDDSKKLSDKTIQQIAPLLEKQIPHQSLLLSPKKYNELVGKSKPYNAISIKVALHNQAIFLLLQKGIQPKQIVIDAFTSQSNYEKHLKKEKNHFPNPLTFQEKAESHYLAVAVSSIIARNLFLDNLDQLGQDLGYQLPSGAGSASDKVASQLLAAYGMSSLEYSAKLHFANTHKAQALLTK

SEQ ID NO: 5045 - DNA, 309 bp, Streptococcus agalactiae
atggaaacaaaaataaataatagtcagaaaaatcgttataaatttgtctttggagataagcctctcacattgacgacagataaagacaacctttttatggaagagattgagcgtgtagctacagaaaagtatgaagctattaaagaaaaattacctaatgctgataatgaaacgattgctattctcatggcaattaatgctttatcagtgcaactaagtcgagaaattgacattgaaaaaatggaagatgagctcaataagttacgctccaaaacgatttcggacattaaagaaaaagtgagtgaggat

SEQ ID NO: 5046 - protein, 103 aa, Streptococcus agalactiae
METKINNSQKNRYKFVFGDKPLTLTTDKDNLFMEEIERVATEKYEAIKEKLPNADNETIAILMAINALSVQLSREIDIEKMEDELNKLRSKTISDIKEKVSED

SEQ ID NO: 5047 - DNA, 306 bp, Streptococcus pyogenes
atgaaaagtattaatcgctataaattcacctttggtgaaaaaacattaacattgacaactgacaaagacaatctctttatggaagaagttgagcgggtagctaaagaaaagtatcaggctcttaaaaatcatttaccagaagctgatgacgagactatcgctattttaatggctatcaataccttgtcaacacaattaagcagagagattgccattgaaaaaatggaagctgaaattttagatttacgtcaaaaaaccttggttggtcttcaagaaaaagctaatcaaatagatgtgaatgaggtt

SEQ ID NO: 5048 - protein, 102 aa, Streptococcus pyogenes
MKSINRYKFTFGEKTLTLTTDKDNLFMEEVERVAKEKYQALKNHLPEADDETIAILMAINTLSTQLSREIAIEKMEAEILDLRQKTLVGLQEKANQIDVNEV

SEQ ID NO: 5049 - DNA, 540 bp, Streptococcus agalactiae
atgctatcattgcttttgctgattattgttatttggcatttttatattggctacagtagaggtatttttttacaagtcttttacgtgttaatgtcaatggtatctttgatgattgctagtcaattttaccaagaattagctagtcagattacgttatgggtaccgtattctaatcctgtacaaggagtagaagtttacttttttaaagatattagcaaatttcaattgagtcatgtttattatgcaggtgttgcctttgtttttatctacagtttatcttacttagtaggtcgcttgttaggtgttttactacatttagcaccagttgaacattttgatagcttgcaaaataatattattagtggttttttagccgttctggtttgtctcttatttatgagtatgtgtttgactattctggcaacagtccctatgtcatttgttcaagaaaagttatggaatagtctgtttgttagatttttaattaacgacttaccattcttctcacagtttttggtaaggacttgggcggtaggtctt

SEQ ID NO: 5050 - protein, 180 aa, Streptococcus agalactiae
MLSLLLLIIVIWHFYIGYSRGIFLQVFYVLMSMVSLMIASQFYQELASQITLWVPYSNPVQGVEVYFFKDISKFQLSHVYYAGVAFVFIYSLSYLVGRLLGVLLHLAPVEHFDSLQNNIISGFLAVLVCLLFMSMCLTILATVPMSFVQEKLWNSLFVRFLINDLPFFSQFLVRTWAVGL

SEQ ID NO: 5051 - DNA, 543 bp, Streptococcus pyogenes
atgttatctttattgatagtgcttattttaacttggaatttttatattggttatagtagaggtattattcttcaatcgttttatgtcttaggagccctactttctcttttggtagctaatcgattttatattggattagcccataagctaacgctttggattccttattctaacccggtagaaggaacatcagtctttttctttaaatcagttgatatctttgttttagataaggtttattatgcaggccttgccttttttatcattttcttattggggtatgcattgagtcgctttcttgggatttttgttcatttccttttgctaaattattttgataaccagtggacaaaatgtttgagtggcggactagcgtttctagtatcgcttctttttttgaacatgttactgtctatttttgcaacggtccctatgccttttttacagcactatttgcactctagttttcttgctcgtttggtgatcgaacaccttccaccattgacaataattattcaaaaattgtggattcaagccattatt

SEQ ID NO: 5052 - protein, 181 aa, Streptococcus pyogenes
MLSLLIVLILTWNFYIGYSRGIILQSFYVLGALLSLLVANRFYIGLAHKLTLWIPYSNPVEGTSVFFFKSVDIFVLDKVYYAGLAFFIIFLLGYALSRFLGIFVHFLLLNYFDNQWTKCLSGGLAFLVSLLFLNMLLSIFATVPMPFLQHYLHSSFLARLVIEHLPPLTIIIQKLWIQAII

SEQ ID NO: 5053 - DNA, 2364 bp, Streptococcus agalactiae
gtgataaatttaggtataatgaagagtatgaataacaagattttagaacagttagaatttaacaaagttaaggaattgatattaccttatctcaagacagaacaatcacaagaagaattatcagagctggagccgatgacggaggctcctaaaatagaaaaaagttttaatgaaatttctgacatggaacagatttttgttgaacatcactcatttggcatagtcagcctaagttcaatctctgagagtttaaaacgcttagagctttcagctgatcttaatattcaagaacttttggctatcaaaaaagttttacagagttcttcggatatgattcacttttattctgatttggataatgtttctttccaatctttggatcgtttgtttgaaaatttggaacaattccctaatctgcaagggtcttttcaagctatcaatgatggtggttttttagaacattttgcgagtccagaattagagcgtatccgtcgtcaattaacaaacagtgaacgacgggttcgtcagattttacaggatatgcttaaggaaaaagcagagcttttatcagagaatctaatcgctagtcgtagtggacgaagtgtcctaccagtaaaaaatacttatcggaatcgtatttctggtgtggttcatgacatctcttcttcaggaagtactgtttatattgagcctcgtgctgtagttacactaaacgaagagataacgcagcttagagctgacgaacgtcatgaagaaagtcgtattttacacgcattttcagacttgttaagaccccatgtcgccactattagaaataatgcatggattcttgggcatcttgattttgtaagggctaaatatctttttatgtctgataataaggcgacgatacctgagatttctaatgacagcacgttagcattaatcaatgttcgtcatcctctgttaagtaaccctgtggctaatgacttacattttgatcaagatttaactgcaattgtcatcactggtcccaatactggtggtaagacgattatgctaaaaacactcggtttagcacaattaatgggacagtctggtttgccagtattagcggataaaggtagtaaaattgcagtatttaacaatatctttgcagatattggcgatgagcaatctattgaacaaagtctatcaactttttctagtcatatgacgcacatagtcagtattttaaacgaggctgaccacaatagtttagtcctctttgatgaactgggagcaggaacggatcctcaagaaggtgctagtttggctatggctattttagaacaccttaggttaagtaatatcaaaacgatggcgaccacgcactatccagaattaaaagcttatgggattgagacaaattttgtagagaatgcgagcatggaatttgatgccgaaacgcttagccctacgtatcgctttatgcaaggagttcctggacgatcaaatgcatttgaaattgcttctcgccttggtttagctccatttattgttaaacaagctaagcagatgacagattctgactcagatgttaaccgtattattgaacagttagaggcacagacacttgagacacgtagaagactggatcatattaaagaagttgaacaagaaaacctcaaattcaatcgtgcggttaagaaactctataatgaattttcacatgagcgcgataaagagttagaaaaaatctatcaagaagctcaagaaattgtagatatggctttgaatgagagtgatactatcttaaaaaaactcaatgataagagccaattaaaacctcacgaaattatagatgctaaggcacaaataaaaaaattagcacctcaagttgatttatcaaaaaataaagtcttaaataaggctaaaaaaattaaagcagctcgtgctcctagaattggtgatgatattatagtgactagctatggacagcgaggtaccttaactagtcaattaaaagatggacgttgggaagcacaagtgggaattatcaaaatgacattaacacaagatgaatttacccttgttagagtccaagaagaacagaaagtcaaaagtaaacagattaatgtggttaaaaaggctgatagttctggaccaagagctcgacttgatcttagaggtaaaagatacgaagaagctatgcaagagttagataattttattgatcaagcattgcttaacaatatgggacaagttgatatcattcatggtattggtacaggcgttatccgtgagggagtgacaaaatatcttcgtcgtaataagcacgttaagcattttgcttatgccccacaaaatgcagggggatctggcgccacaattgtaacgttaggg

SEQ ID NO: 5054 - protein, 788 aa, Streptococcus agalactiae
MINLGIMKSMNNKILEQLEFNKVKELILPYLKTEQSQEELSELEPMTEAPKIEKSFNEISDMEQIFVEHHSFGIVSLSSISESLKRLELSADLNIQELLAIKKVLQSSSDMIHFYSDLDNVSFQSLDRLFENLEQFPNLQGSFQAINDGGFLEHFASPELERIRRQLTNSERRVRQILQDMLKEKAELLSENLIASRSGRSVLPVKNTYRNRISGVVHDISSSGSTVYIEPRAVVTLNEEITQLRADERHEESRILHAFSDLLRPHVATIRNNAWILGHLDFVRAKYLFMSDNKATIPEISNDSTLALINVRHPLLSNPVANDLHFDQDLTAIVITGPNTGGKTIMLKTLGLAQLMGQSGLPVLADKGSKIAVFNNIFADIGDEQSIEQSLSTFSSHMTHIVSILNEADHNSLVLFDELGAGTDPQEGASLAMAILEHLRLSNIKTMATTHYPELKAYGIETNFVENASMEFDAETLSPTYRFMQGVPGRSNAFEIASRLGLAPFIVKQAKQMTDSDSDVNRIIEQLEAQTLETRRRLDHIKEVEQENLKFNRAVKKLYNEFSHERDKELEKIYQEAQEIVDMALNESDTILKKLNDKSQLKPHEIIDAKAQIKKLAPQVDLSKNKVLNKAKKIKAARAPRIGDDIIVTSYGQRGTLTSQLKDGRWEAQVGIIKMTLTQDEFTLVRVQEEQKVKSKQINVVKKADSSGPRARLDLRGKRYEEAMQELDNFIDQALLNNMGQVDIIHGIGTGVIREGVTKYLRRNKHVKHFAYAPQNAGGSGATIVTLG

SEQ ID NO: 5055 - DNA, 2454 bp, Streptococcus pyogenes
gtgagtttcacctttaggttctttatttacgagaaactgtttagaaataaagagaacgcatgggaacttagtgactttcttgccccattttccatcattttaggtataatgaagagtatgaataacaagattttagagcagttagaatttaacaaagttaaggaattgctattaccttatctcaagacagaacaatcacaagaagaattattagagctggagccgatgacggaggctcctaaaatagaaaaaagttttaatgaaatttctgacatggaacagatttttgttgaacatcactcatttggcatagtcagcctaagttcaatctctgagagtttaaaacgcttagagctttcaactgatcttaatattcaagaacttttggctatcaaaaaagttttacagagttcttcggatatgattcacttttattctgatttggataatgtttctttccaatctttggatcgtttgtttgaaaatttggaacaattccctaatctgcaagggtcttttcaagctatcaatgatggtggttttttagaacattttgcgagtccagaattagagcgtatccgtcgtcaattaacaaatagtgaacgacgggttcgtcagattttacaggatatgcttaaggaaaaagcagagcttttatcagagaatctaatcgctagtcgtagtggacgaagtgtcctaccagtaaaaaatacttatcggaatcgtatttctggtgtggttcatgacatctcttcttcaggaagtactgtttatattgagcctcgtgctgtagttacactaaacgaagagataacgcagcttagagctgacgaacgccacgaagaaggtcgtattttacacgcattttcagacttgttaagacctcatgtcgccactattagaaataatgcatggattcttgggcatcttgattttgtaagggctaaatatctttttatgtctgataataaggcgacgatacctaagatttctaatgacagcacgttagcattaatcaatgttcgtcatcctctgttaagtaatcctgtggctaatgacttacattttgatcacgatttaactgcaattgtcatcactggtcccaatactggtggtaagacgattatgctaaaaacactcggtttagcacaattaatgggacagtctggtttgccagtattagcggataaaggtagtaaaattgcagtatttaacaatatctttgcagatattggcgatgagcaatctattgaacaaagtctatcaactttttctagtcatatgacgcacatagtcagtattttaaacgaggctgaccacaatagtttagttctctttgatgaactaggagcaggaacggatcctcaagaaggtgctagtttggccatggctattttagaacaccttaggttaagtcatatcaaaacgatggcgaccacgcactatccagaattaaaagcttatgggattgagacaaattttgtagagaatgcgagcatggaatttgatgcagaaacgcttagccccacatatcgctttatgcaaggagttcctggacgctcaaatgcatttgaaattgcttctcgccttggtttagctccatttattgttaaacaagctaagcagatgacagattctgactcagatgttaaccgtattattgaacagttagaggcacagacacttgagacacgtagaagactggatcatattaaagaagttgaacaagaaaacctcaaattcaatcgtgcggttaagaaactctataatgaattttcacatgaacgcgataaagagttagaaaaaatctatcaagaagctcaagaaattgtagatatggctttgaatgagagtgatactatcttaaaaaaactcaatgataagagccaattaaaacctcacgaaattatagatgctaaggcacaaataaaaaaattagcacctcaagttgatttatcaaaaaataaagtcttaaataaggctaaaaaaatcaaagcagctcgtgcccctagaattggtgatgatattatagtgactagttatggacagcgaggtaccttaactagtcaattaaaagatggccgttgggaagcacaagtgggaattatcaaaatgacattaacacaagatgaatttagcctcgttagagtccaagaagaacagaaagtcaaaaataaacagattaatgtggttaaaaaggctgatggttctggaccaagagctcgacttgatcttagaggtaaaagatacgaagaagcaatgcaagagttagatcattttattgatcaagcattgcttaacaatatgggacaagttgatatcattcatggtattggtacaggcgttattcgtgagggagtgacaaaatatcttcgtcgtaataagcatgttaagcattttgcttatgccccacaaaatgcagggggatctggtgccacaattgtaacgttaggg

SEQ ID NO: 5056 - protein, 818 aa, Streptococcus pyogenes
VSFTFRFFIYEKLFRNKENAWELSDFLAPFSIILGIMKSMNNKILEQLEFNKVKELLLPYLKTEQSQEELLELEPMTEAPKIEKSFNEISDMEQIFVEHHSFGIVSLSSISESLKRLELSTDLNIQELLAIKKVLQSSSDMIHFYSDLDNVSFQSLDRLFENLEQFPNLQGSFQAINDGGFLEHFASPELERIRRQLTNSERRVRQILQDMLKEKAELLSENLIASRSGRSVLPVKNTYRNRISGVVHDISSSGSTVYIEPRAVVTLNEEITQLRADERHEEGRILHAFSDLLRPHVATIRNNAWILGHLDFVRAKYLFMSDNKATIPKISNDSTLALINVRHPLLSNPVANDLHFDHDLTAIVITGPNTGGKTIMLKTLGLAQLMGQSGLPVLADKGSKIAVFNNIFADIGDEQSIEQSLSTFSSHMTHIVSILNEADHNSLVLFDELGAGTDPQEGASLAMAILEHLRLSHIKTMATTHYPELKAYGIETNFVENASMEFDAETLSPTYRFMQGVPGRSNAFEIASRLGLAPFIVKQAKQMTDSDSDVNRIIEQLEAQTLETRRRLDHIKEVEQENLKFNRAVKKLYNEFSHERDKELEKIYQEAQEIVDMALNESDTILKKLNDKSQLKPHEIIDAKAQIKKLAPQVDLSKNKVLNKAKKIKAARAPRIGDDIIVTSYGQRGTLTSQLKDGRWEAQVGIIKMTLTQDEFSLVRVQEEQKVKNKQINVVKKADGSGPRARLDLRGKRYEEAMQELDHFIDQALLNNMGQVDIIHGIGTGVIREGVTKYLRRNKHVKHFAYAPQNAGGSGATIVTLG

SEQ ID NO: 5057 - DNA, 354 bp, Streptococcus agalactiae
ttgtacaataggcttatcattaagatgaaatggagaaaaaagatggcattagaagtaacagatgctacatttgtagaagaaactaaagaaggtttagtactcattgatttttgggcaacttggtgtggtccatgtcgtatgcaagcaccaatcttagaacagttatctcaagaaatcgatgaagatgaactcaaaattttgaaaatggatgttgatgagaatccggaaactgcccgtcagtttggtattatgtcaattccaacattgatgtttaaaaaagacggagaagtggttaaacaagttgcaggtgttcatactaaagaccaactgaaagctattattgctgaattgagt

SEQ ID NO: 5058 - protein, 118 aa, Streptococcus agalactiae
MYNRLIIKMKWRKKMALEVTDATFVEETKEGLVLIDFWATWCGPCRMQAPILEQLSQEIDEDELKILKMDVDENPETARQFGIMSIPTLMFKKDGEVVKQVAGVHTKDQLKAIIAELS

SEQ ID NO: 5059 - DNA, 354 bp, Streptococcus pyogenes
ttgtacaataggcttatcattaagatgaaatggagaaaaaagatggcattagaagtaacagatgctacatttgtagaagaaactaaagaaggtttagtactcattgatttttgggcaacttggtgtggtccatgtcgtatgcaagcaccaatcttagaacagttatctcaagaaatcgatgaagatgaactcaaaattttgaaaatggatgttgatgaaaatccggaaactgctcgtcagtttggtattatgtcaattccaacattgatgtttaaaaaagacggagaagtggttaaacaagttgcaggtgttcatactaaagaccaattgaaagctattattgctgaattgagt

SEQ ID NO: 5060 - protein, 118 aa, Streptococcus pyogenes
LYNRLIIKMKWRKKMALEVTDATFVEETKEGLVLIDFWATWCGPCRMQAPILEQLSQEIDEDELKILKMDVDENPETARQFGIMSIPTLMFKKDGEVVKQVAGVHTKDQLKAIIAELS

SEQ ID NO: 5061 - DNA, 591 bp, Streptococcus agalactiae
atggaaattggtcagcaaattattcgctaccgtaaacaacaagcgctctcgcaagaagaattagccgagaaagtctatgtaagccgtcagagcatatctaactgggaaaatgacaaaacttacccagacatccatagcctcttactcctaagtcaaatttttcaagtgagcttagaccaactaattaaaggagacattgagaaaatgaaatataccatcactcaggttgataaaaagaattttgaacgagataccaaagtaatggtgacattgatgatactattaatgatttcaagttatccattagtctatttcttagagtggctaggacttggcatttttgttttattatcgataattactatgacttatgctaatcgtgtggaacgttttaagaaaaaatatgatgtgcaaacttataaggaaatcctagctgtttcaagtggaaaattattagacgaaatcgaaaaacgggaagaaagagcaaaacttccttatcagaaaccccttattgtcactgtatttttcctcattactgttgccaccttttttgcaagtcgttttattttcacatggttgttccatttaagt

SEQ ID NO: 5062 - protein, 197 aa, Streptococcus agalactiae
MEIGQQIIRYRKQQALSQEELAEKVYVSRQSISNWENDKTYPDIHSLLLLSQIFQVSLDQLIKGDIEKMKYTITQVDKKNFERDTKVMVTLMILLMISSYPLVYFLEWLGLGIFVLLSIITMTYANRVERFKKKYDVQTYKEILAVSSGKLLDEIEKREERAKLPYQKPLIVTVFFLITVATFFASRFIFTWLFHLS

SEQ ID NO: 5063 - DNA, 999 bp, Streptococcus agalactiae
atgttgcaacaaacacaagttaatacagttatcccttattataaacgttttctagagtggtttcctcaaataaaagatttggcagacgctcctgaagaacaattactaaaggcatgggagggactaggctattattctcgggtgcgtaatatgcaaaaggctgcacagcaagtgatggttgattttggtggcatatttcctcacacttatgatgatattgcttcattaaaagggattggtccttatactgcaggtgctatcgccagcatctcattcaacttaccagagcctgctgttgatggcaatgtgatgcgtgtcatggctcgtttgtttgaagttaattatgacatcggtgaccctaaaaatcgtaaaatttttcaagctattatggaaatactaattgaccctgacagacccggtgattttaaccaagcacttatggatctgggtacagacatcgaatccgctaagacacctagacctgatgaaagccctattcgtttctttaatgctgcttatttgaatggtacttatagtaaatatcccataaaaaatactaagaaaaagcctaaaccaatgcgaattcaggcttttgtcattcgtaaccaaaatggtcaatatctactggagaaaaatactaaagggagacttctagggggtttttggtcatttcctattatcgaaacgtcacctctttctcaacaattagatttatttgatgacaatcaatccaaccccataatctggcaaacccaaaatgaaactttccaaagagaatatcaattaaagccccaatggactgataatcactttccaaatattaagcacacttttagtcaccagaagtggacaatagaactcatagagggggtggtcaaagcaacagatttacctaatgctcctcacctaaagtgggtagcaattgaggacttttctctgtatccctttgcaacaccacaaaagaaaatgctagagacctacttaaaacagaaaaatgct

SEQ ID NO: 5064 - protein, 333 aa, Streptococcus agalactiae
MLQQTQVNTVIPYYKRFLEWFPQIKDLADAPEEQLLKAWEGLGYYSRVRNMQKAAQQVMVDFGGIFPHTYDDIASLKGIGPYTAGAIASISFNLPEPAVDGNVMRVMARLFEVNYDIGDPKNRKIFQAIMEILIDPDRPGDFNQALMDLGTDIESAKTPRPDESPIRFFNAAYLNGTYSKYPIKNTKKKPKPMRIQAFVIRNQNGQYLLEKNTKGRLLGGFWSFPIIETSPLSQQLDLFDDNQSNPIIWQTQNETFQREYQLKPQWTDNHFPNIKHTFSHQKWTIELIEGVVKATDLPNAPHLKWVAIEDFSLYPFATPQKKMLETYLKQKNA

SEQ ID NO: 5065 - DNA, 1152 bp, Streptococcus pyogenes
atgattgaattaaaagattatggtattaatatgtgggataatgagacaatcgcttcttttcgtcgcacacttttagagtggtatgaccaagaaaaacgtgatctcccttggcgaagaactactaatccatattatatttgggtttctgaaatcatgttgcaacaaacacaagttaatacggtaatcccttattataaacgttttctagagtggtttcctcaaataaaagatttggcagacgctcctgaagaacaattactaaaggcatgggagggactaggctattattctcgggtgcgtaatatgcaaaaggctgcacagcaagtgatggttgattttggtggcatatttcctcacacttatgatgatattgcttcattaaaagggattggtccttatactgcaggtgctatcgccagcatctcattcaacttaccagagcctgctgttgatggcaatgtgatgcgtgtcatggctcgtttgtttgaagttaattatgatatcggtgaccctaaaaatcgtaaaatttttcaagctattatggaaatactaattgaccctgacagacccggtgattttaaccaggcacttatggatctaggtacagacatcgaatccgctaagacacctaggcctgatgaaagccctattcgtttctttaacgctgcttatttgaatggtacttatggtaaataccccataaaaaatccaaagaaaaagcctaaaccaatgcgaattcaggcttttgtcattcgtaaccaaaatggccagtatctactggagaaaaatactaaagggagacttctaggaggattttggtcatttcctattatcgaaacatcacctctttctcaacaattagatttatttgatgacaatcaatccaaccccataatctggcaaacccaaaatgaaactttcgaaagagaatatcaattaaagccacaatggactgataatcactttccaaatattaagcacacttttagtcaccagaagtggacaatagaactcatagagggggtggtcaaagcaacagatttacctaatgctcctcacctaaagtgggtagcaattgaggacttttctctttatccctttgcaacaccacaaaagaaaatgctagagacctacttaaaacagaaaaatgct

SEQ ID NO: 5066 - protein, 384 aa, Streptococcus pyogenes
MIELKDYGINMWDNETIASFRRTLLEWYDQEKRDLPWRRTTNPYYIWVSEIMLQQTQVNTVIPYYKRFLEWFPQIKDLADAPEEQLLKAWEGLGYYSRVRNMQKAAQQVMVDFGGIFPHTYDDIASLKGIGPYTAGAIASISFNLPEPAVDGNVMRVMARLFEVNYDIGDPKNRKIFQAIMEILIDPDRPGDFNQALMDLGTDIESAKTPRPDESPIRFFNAAYLNGTYGKYPIKNPKKKPKPMRIQAFVIRNQNGQYLLEKNTKGRLLGGFWSFPIIETSPLSQQLDLFDDNQSNPIIWQTQNETFEREYQLKPQWTDNHFPNIKHTFSHQKWTIELIEGVVKATDLPNAPHLKWVAIEDFSLYPFATPQKKMLETYLKQKNA

SEQ ID NO: 5067 - DNA, 834 bp, Streptococcus agalactiae
atgaataagaaaaaacgtcttaaccttacttttgtttatattttattgatagtactatcaattatgtggctctttcccattgtttgggtcgttctcacaagcttccgtggtgaaggaagtgcctttgtcaactactttattcctaaaacttggacattagacaactacgctaaactcttcacccaaaacacattcccatttggtcaatggttcttaaatacattatttgtcgctacatgtacttgtatactatcaactttaatcactgtagcaatggcttattctctcagcagaatcaaattcaaacaccgtaatggtttcctaaagctagctttagtcttgaatatgtttcctgggttcatgtcaatgattgcagtttactacatcctaaaagctctaaatctagaccaaacattaaccgctttaatatttgtctattctgcaggagcagcattaaccttctacatcgcaaaaggtttctttgatactattccatactctttggatgagtctgctatgattgatggggcgacccgtttggatattttccttaaaatcaccctaccattgtcaaaacccattatcgtttatactgcattaatcgcttttatgggcccttggatggactttatctttgcaaaagttattttaggtgatgctacgagcaagtacacagtcgctattggtctcttttcaatgttgcaacaagataccatcaaccagtggttcatgtcatttacagcaggatctgttattattgcaattccaatcacaatacttttcatgttcatgcaaaaatactatgttgaaggtattacaggtggatctgtaaaa

SEQ ID NO: 5068 - protein, 278 aa, Streptococcus agalactiae
MNKKKRLNLTFVYILLIVLSIMWLFPIVWVVLTSFRGEGSAFVNYFIPKTWTLDNYAKLFTQNTFPFGQWFLNTLFVATCTCILSTLITVAMAYSLSRIKFKHRNGFLKLALVLNMFPGFMSMIAVYYILKALNLDQTLTALIFVYSAGAALTFYIAKGFFDTIPYSLDESAMIDGATRLDIFLKITLPLSKPIIVYTALIAFMGPWMDFIFAKVILGDATSKYTVAIGLFSMLQQDTINQWFMSFTAGSVIIAIPITILFMFMQKYYVEGITGGSVK

SEQ ID NO: 5069 - DNA, 834 bp, Streptococcus pyogenes
atgaaaaacaaacgtcgatttcaacttggacttgtttatgctactttaatcatcctctcaatcatttggctcttcccaatcgcttgggttattcttactagcttccgtagcgaaggaactgcttacgtcaattattttattcctaagacttttacattaaatcactacattaatctttttactaatgaaacctttccttttggaaaatggtttatgaatactcttattgtagccacttttacatgtattatttcaaccttcataactgttgccatagcctactctcttagccgaattaagtttaagtttcgcaatggctttttaaaactagcccttattttaaatatgttccctggtttcatgagcatgattgccatctactatatcttaaaggccttaggtttgacgcaaaccctaacagcacttgtccttgtttattcctcaggtgcagcccttggtttttacattgcaaaaggattttttgataccattccttattcacttgatgaatcagctatgattgatggcgctactcgtatggatattttctttaaaataacccttcctttagcaaaaccaatcattgtctatactgcccttcttgcttttatggggccttggattgactttatctttgcacaagttattttaggtgatgctacaagtaaatataccgttgctattggactattttcaatgcttcagccagataccattaacaactggtttatggccttcactgctggttctgtcttaattgccgtcccaatcactctcctcttcatgtttatgcaaaaatactatgttgaaggcatcacaggtggttctgttaaa

SEQ ID NO: 5070 - protein, 278 aa, Streptococcus pyogenes
MKNKRRFQLGLVYATLIILSIIWLFPIAWVILTSFRSEGTAYVNYFIPKTFTLNHYINLFTNETFPFGKWFMNTLIVATFTCIISTFITVAIAYSLSRIKFKFRNGFLKLALILNMFPGFMSMIAIYYILKALGLTQTLTALVLVYSSGAALGFYIAKGFFDTIPYSLDESAMIDGATRMDIFFKITLPLAKPIIVYTALLAFMGPWIDFIFAQVILGDATSKYTVAIGLFSMLQPDTINNWFMAFTAGSVLIAVPITLLFMFMQKYYVEGITGGSVK

SEQ ID NO: 5071 - DNA, 1368 bp, Streptococcus agalactiae
atgaataaaaaactgatctcacttgatggtatgtccctaaaagaggtctttcaaaaaggtgatttagcaactaaactatcattcttaattatgggacttgctaacctcaaaaataaacaaattgtcaagggacttttatttttaatcagtgaaattctgtttttaattacctttgtttaccaagttatcccagctgtaaaaggtcttatttccttagggacccaagaacaaggtatgacaactaaaactgtggatggtattaaaatccaagttgcgacacaaggtgataactctatgttaatgctaatttttggattagcttcgcttatcttctgttgcgtatttgcctatatttactggtcaaacattaaaagcgcagcacatttattgaccttgaaagaagaaggaagagaaattccatccttcaaaaaagatattaaaagcttgacagatggacgcttccatatgactttaatgtctattcctttaataggggtgcttctatttacaatccttccgttagtttatatgatttgtttggcatttactaactatgatcataaccacttaccgccaaaaagtttatttgactgggttggttttgctaacttcggtaatatctttagcgggcgtatggccagtactttcttccctgttctatcttggacattaatttgggctgttttcgctactgtaacgaatttcttctttggtattattcttgccttactaattaatacaaaaggtttgaaattcaaaaagatgtggcgtactatttttgttattaccatggctgtccctcaatttatctctctcttaatcatgagaaacctcttaagtgacgctggaccggttaacgccttgttaataaaatggggacttatttcttcagcacatccccttccattcctttctgatccggtctgggcgaaattctcaatcatctttgttaatatgtgggttggtattcctgtaacaatgcttgttgctactggtatcatcatgaatttacctgcagaacaaattgaagctgctgaaattgatggggcgaataagttccaagtctttcaatcaattactttcccacaaattttgttgattatgactcctactttaattcaacaatttatcggaaatattaacaacttcaacgttatctacctactcactcaaggtggaccaacaaactcaacatactaccaagcaggtagcaccgatttacttgtcacttggctatacaatttgacagtaactgctgcagattataacttagcatctgttgttggtatcttaatctttattctttcagcagtatttagtttactagcttacacaagaacaaattcttacaaggaaggggcagctaaa

SEQ ID NO: 5072 - protein, 456 aa, Streptococcus agalactiae
MNKKLISLDGMSLKEVFQKGDLATKLSFLIMGLANLKNKQIVKGLLFLISEILFLITFVYQVIPAVKGLISLGTQEQGMTTKTVDGIKIQVATQGDNSMLMLIFGLASLIFCCVFAYIYWSNIKSAAHLLTLKEEGREIPSFKKDIKSLTDGRFHMTLMSIPLIGVLLFTILPLVYMICLAFTNYDHNHLPPKSLFDWVGFANFGNIFSGRMASTFFPVLSWTLIWAVFATVTNFFFGIILALLINTKGLKFKKMWRTIFVITMAVPQFISLLIMRNLLSDAGPVNALLIKWGLISSAHPLPFLSDPVWAKFSIIFVNMWVGIPVTMLVATGIIMNLPAEQIEAAEIDGANKFQVFQSITFPQILLIMTPTLIQQFIGNINNFNVIYLLTQGGPTNSTYYQAGSTDLLVTWLYNLTVTAADYNLASVVGILIFILSAVFSLLAYTRTNSYKEGAAK

SEQ ID NO: 5073 - DNA, 1359 bp, Streptococcus pyogenes
atgactcagtcaaacttgacaccaaatatatctgtaatagaagccttaaaaagaggcagttgggatattaaactttcgagtattatcatgggatttgccaactttgctaacaaacagtttatcaaaggaatcttatttttaataagtgaacttatctttctagtagcttttgtctcccaaatcatccctgctatccgtggccttgtcactcttggtactcaaactcagggaatgactacaaaaactattgatgggattaacatccaagttgctgttgatggcgataactctatgttaatgcttatttttggtttagcatcactcattttctgcctagtctttgcttacatttactggtgtaatctcaaaagtgctcgtaacctttatcttttcaaacaaaaaggtcagaagataccaagcttcaaagaagatcttgccacacttacaaatggtcgctttcatatgactttaatggctatcccactgattggtgtgcttttattcaccattcttcctttgatttacatgatctgtttggcctttaccaattttgatcataatcacttgcctccaaaatctttatttgattgggtgggacttgctaactttggaaatgttttaagcggccgtatggcaggaaccttttttcctatcttctcatggactttgatttgggctgtttttgccacagtaactaatttcttctttggtattattcttgctttgttaatcaataccaaaggattaaagtggaaaaaaatgtggcgaaccatctttgttatcaccattgcagttccacaattcatctcattattgattatgcggaacttactcaatgacgaaggcccactaaatgctcttctcaataaaatcggcttgattaatggctcactgccatttttatctgatcctctttgggcaaaattctcaatcatttttgtcaacatgtggatcggtattccatttaccatgctgattgcgactggtattatcatgaaccttccaagtgaacaaattgaggctgctgaaattgatggcgctagcaaattccaagtcttcaagtctatcacgttccctcaaattctcttgatcatgacaccaaacttgattcaacaatttatcggaaatatcaataactttaacgtcatttacctccttactggtggtggtccaacaaattcagaatactatcaggcaggaacaacagacttgctggtcacttggctttataaattaaccgtcacagctgctgactacaatttagcttctgttatcggtatcttaatctttacagtttcagctatctttagcttacttgcttatacaaggacagcatcctacaaggaaggagcggctaaa

SEQ ID NO: 5074 - protein, 453 aa, Streptococcus pyogenes
MTQSNLTPNISVIEALKRGSWDIKLSSIIMGFANFANKQFIKGILFLISELIFLVAFVSQIIPAIRGLVTLGTQTQGMTTKTIDGINIQVAVDGDNSMLMLIFGLASLIFCLVFAYIYWCNLKSARNLYLFKQKGQKIPSFKEDLATLTNGRFHMTLMAIPLIGVLLFTILPLIYMICLAFTNFDHNHLPPKSLFDWVGLANFGNVLSGRMAGTFFPIFSWTLIWAVFATVTNFFFGIILALLINTKGLKWKKMWRTIFVITIAVPQFISLLIMRNLLNDEGPLNALLNKIGLINGSLPFLSDPLWAKFSIIFVNMWIGIPFTMLIATGIIMNLPSEQIEAAEIDGASKFQVFKSITFPQILLIMTPNLIQQFIGNINNFNVIYLLTGGGPTNSEYYQAGTTDLLVTWLYKLTVTAADYNLASVIGILIFTVSAIFSLLAYTRTASYKEGAAK

SEQ ID NO: 5075 - DNA, 1293 bp, Streptococcus agalactiae
ttgcataatataggtgtaattaaaatattctctaggaggagaaccaaaatggaaaaaaatacttggaaaaaattacttgttagtactgctgctctttcagtagttgcaggaggagcaattgctgctactcactctaactcagttgatgctgcttcaaaaacaactatcaaactttgggtcccaacagattcaaaagcgtcttataaagcaattgttaaaaaattcsagaaggaaaacaaaggcgttactgtaaaaatgattgagtctaatgactccaaagctcaagaaaacgtaaaaaaagacccaagcaaggcagccgatgtattctcacttccacatgaccaacttggtcaattagtagaatctggtgttatccaagaaattccagagcaatactcaaaagaaattgctaaaaacgacactaaacaatcacttactggtgcacaatataaagggaaaacttatgcattcccatttggtattgaatctcaagttctttattataataaaacaaagttaactgctgacgacgttaaatcatacgaaacaattacaagcaaagggaaattcggtcracagcttaaagcagctaactcatatgtaacaggtcctmttttcctttctgtaggcgacactttatttggtaaatctggtgaagatgctaaaggcactaactggggtaatgaagcaggtgtttctgtccttaaatggattgcagatcaaaagaaaaatgatggttttgtcaacttgacagctgaaaatacaatgtctaaatttggcgatggttctgttcatgcttttgaaagtggaccatgggattacgacgctgctaaaaaagctgtcggtgaagataaaatcggtgttgctgtttacccaacaatgaaaatcggtgacaaagaagttcaacaaaaagcattcttgggcgttaaactttatgccgttaaccaagcacctgctggttcaaacactaaacgaatctcagctagctacaaactcgctgcatatctaactaatgctgaaagtcaaaaaattcaattcgaaaaacgtcatatcgttcctgctaactcatcaattcaatcttctgatagcgtccaaaaagatgaacttgcaaaagcagttatcgaaatgggtagctcagataaatatacaacggttatgcctaagttgagtcaaatgtcaaccttctggacagaaagtgctgctattcttagcgatacttacagtggtaaaatcaaatctagcgattaccttaaacgtctaaaacaattcgataaagacatcgctaaaacaaaa

SEQ ID NO: 5076 - protein, 431 aa, Streptococcus agalactiae
  MISC_FEATURE (1)..(431): Xaa = Any Amino Acid
MHNIGVIKIFSRRRTKMEKNTWKKLLVSTAALSVVAGGAIAATHSNSVDAASKTTIKLWVPTDSKASYKAIVKKFZKENKGVTVKMIESNDSKAQENVKKDPSKAADVFSLPHDQLGQLVESGVIQEIPEQYSKEIAKNDTKQSLTGAQYKGKTYAFPFGIESQVLYYNKTKLTADDVKSYETITSKGKFGXQLKAANSYVTGPXFLSVGDTLFGKSGEDAKGTNWGNEAGVSVLKWIADQKKNDGFVNLTAENTMSKFGDGSVHAFESGPWDYDAAKKAVGEDKIGVAVYPTMKIGDKEVQQKAFLGVKLYAVNQAPAGSNTKRISASYKLAAYLTNAESQKIQFEKRHIVPANSSIQSSDSVQKDELAKAVIEMGSSDKYTTVMPKLSQMSTFWTESAAILSDTYSGKIKSSDYLKRLKQFDKDIAKTK

SEQ ID NO: 5077 - DNA, 1245 bp, Streptococcus pyogenes
atgaaatcatggcaaaaagttatcgtcggcggagcaagtttgacacttgcaagtaccttgttagtgggatgtggatcaggttcaaaagataaaaaggaagctggcgctgactcaaagactattaaactttgggtaccgactggctctaaaaaatcatatgcagataccattgcaaaatttgaaaaagattctggttacaccgttaaagtggttgaatcagaagatccaaaagcacaagaaaaaatcaaaaaagatgcctcaactgctgccgatgtcttttcacttcctcatgatcaacttggtcaacttgtagaatctggtactattcaagaagttccagaaaagtacaataaagaaattgctgctacttctactgatcaggcgctcgtcggtgcacagtacaaagggaaaacatatgctttcccatttggtattgaatcacaagttcttttctacaataaatcaaaattagctgctgaagacgttacttcatatgatacaattactacaaaagcaacttttggtggtacctttaaacaagctaacacttacgctactggtccattattcatgtcagttggtaacactttatttggggaaaacggtgaagatgtaaaaggtactaactggggcaatgaaaaaggcgctgctgttcttaaatggatcgcagaccaagcttcaaataaaggttttgttagcttagatgctaacaacgttatgtctaaatttggtgacggttcagtagcttcctttgaatcaggaccgtgggactatgaagctgctcaaaaagctatcggtaaagaaaaccttggtgttgctatttatccaaaagtaactattggaggcgaaacggttcaacaaaaagcattcttgggtgtaaaactttacgcagtcaaccaagcaccagctaaaggtgatacaaaacgtatcgcagctagctacaaattggcatcctacttgactaatgctgaaagccaagaaaaccaattcaaaactcgtaacattgtcccagccaacaaagaagttcaatcttcagaagctgttcaatcaaacgaacttgctaaaaccgttatcactatgggttcttcttcagactacactgtcgtaatgccaaaacttagccaaatgggcacattctggactgaaagtgctgctattcttagtgatgccttcaacggtaaaatcaaagaaaacgactaccttactaagttgcaacaattcgacaaagatatcgctgcaacaaaa

SEQ ID NO: 5078 - protein, 415 aa, Streptococcus pyogenes
MKSWQKVIVGGASLTLASTLLVGCGSGSKDKKEAGADSKTIKLWVPTGSKKSYADTIAKFEKDSGYTVKVVESEDPKAQEKIKKDASTAADVFSLPHDQLGQLVESGTIQEVPEKYNKEIAATSTDQALVGAQYKGKTYAFPFGIESQVLFYNKSKLAAEDVTSYDTITTKATFGGTFKQANTYATGPLFMSVGNTLFGENGEDVKGTNWGNEKGAAVLKWIADQASNKGFVSLDANNVMSKFGDGSVASFESGPWDYEAAQKAIGKENLGVAIYPKVTIGGETVQQKAFLGVKLYAVNQAPAKGDTKRIAASYKLASYLTNAESQENQFKTRNIVPANKEVQSSEAVQSNELAKTVITMGSSSDYTVVMPKLSQMGTFWTESAAILSDAFNGKIKENDYLTKLQQFDKDIAATK

SEQ ID NO: 5079 - DNA, 192 bp, Streptococcus agalactiae
  misc_feature (1)..(192): n = a, c, g, or t
atggtaactataaaagatgttgctgccaaagctggtgttaatccatcgacagtaagtcgtgtactaaaagataatgcatctatttcaagtaagacgaaagagcgcgtgaaaaaagctatggaagagctgggctatgttcctaatgttgcagcacaaatgttggctagtggtttaacgcaaaatattnnnnnt

SEQ ID NO: 5080 - protein, 64 aa, Streptococcus agalactiae
  MISC_FEATURE (1)..(64): Xaa = Any Amino Acid
MVTIKDVAAKAGVNPSTVSRVLKDNASISSKTKERVKKAMEELGYVPNVAAQMLASGLTQNIXX

SEQ ID NO: 5081 - DNA, 1092 bp, Streptococcus pyogenes
ttgtataatggaaacgaaatacatgacaaacccatgataaggtttatctttggtaaatatagtaacgaggttaatatggtaacaataaaagatgtcgctcaaaaggcaggtgttaacccttcgacggtgagtagggtattaaaagataatcgatctatttctatgaagacaaaagagaaggttagaaaagcgatggcagatttgggatatgttccaaatgtcgcagcacagattctagcgagtggtttgacacacaatataggacttgtttttcctcctattacaactagcgatagattaagtgaacctttctttatggaaattttgtcgactattactaacgaagctaaagaatctcattttactgtgtcgattgctacaggtatatctcttgatgacctgatagagcaagtgaaactgatgcatcttcaaaaacgagttgatggttttattattctttattctgatcaagatgatcctgtcaaaaaatatttgatgacaaataacttaccatttgtcattgtaggtgctccacaaggtgacactaataaaaccacttatattgataatgataatcagctaatggctaaaacagcagtagaacacctttatcaaaaaggccatcacaacatattatttataacagatgatttactatcagaagtaacttctgagcgttatcttggctatttgaagggttgttttaagcgatctttaaaaacaaagccaatgctgttatttgatcgtaaggatcctgttagcgtagaaatattgatggaaactatatcttcctttaaagcaactgccttggttgttgttggtgatgttctggctattcgtatggtacagttattatctttttatgatataaaagtgccagatgatatgtcaattatcacttttaataattctaattacgctaaattaattcacccttatttaacgacatttgatataaatgttgaaaatcttggaaaaatgtcttttaagcaattacttgatattatcaattccaatgaacagaatcttagtcagactatttttgttccttttagtttaaaacaaagagaaagcgtccgtgatattagtcat

SEQ ID NO: 5082 - protein, 364 aa, Streptococcus pyogenes
LYNGNEIHDKPMIRFIFGKYSNEVNMVTIKDVAQKAGVNPSTVSRVLKDNRSISMKTKEKVRKAMADLGYVPNVAAQILASGLTHNIGLVFPPITTSDRLSEPFFMEILSTITNEAKESHFTVSIATGISLDDLIEQVKLMHLQKRVDGFIILYSDQDDPVKKYLMTNNLPFVIVGAPQGDTNKTTYIDNDNQLMAKTAVEHLYQKGHHNILFITDDLLSEVTSERYLGYLKGCFKRSLKTKPMLLFDRKDPVSVEILMETISSFKATALVVVGDVLAIRMVQLLSFYDIKVPDDMSIITFNNSNYAKLIHPYLTTFDINVENLGKMSFKQLLDIINSNEQNLSQTIFVPFSLKQRESVRDISH

SEQ ID NO: 5083 - DNA, 756 bp, Streptococcus agalactiae
ttggcagttagttttcatgaagtatttggttgggattctgctttttttattatgattatcaatattccattgctccttctttgctactttggcttaggtaaacaaacctttttaaaaactgtctatggttcttggatttttcctgtttttattaagttaacacaaagtgtaccaactttgacccacaacccactcctcgcagcactttttggaggtgttattgtaggatgtggtttggggattgttttttggagcgactcttcaactggtggaacggggattatcattcaattcttaggaaaatatactcctataagccttggacaaggggttatattgattgatggacttgttacaattgttggtttcctagcttttgacagtgatacggttatgttttctattattgggttgataactattagttatattattaatgctatccaaactggatttacaaccttaagcactgtcttaatcgtttctcaagagcaccaaaaaattaagacatatatcaatactgtcgcagatagaggagtaacagaaattcccgttaaagggggatattctggaactaatcaaatcatgcttatgacaactattgctggttatgagtttgctaaattacaagaggcaatagcagaaattgacgaaacagccttcataacagtaactccaacatcacaagcttctggacgtggatttagtcttcaaaaaaatcatggacgtcttgatgaagacattcttatgccaatg

SEQ ID NO: 5084 - protein, 252 aa, Streptococcus agalactiae
MAVSFHEVFGWDSAFFIMIINIPLLLLCYFGLGKQTFLKTVYGSWIFPVFIKLTQSVPTLTHNPLLAALFGGVIVGCGLGIVFWSDSSTGGTGIIIQFLGKYTPISLGQGVILIDGLVTIVGFLAFDSDTVMFSIIGLITISYIINAIQTGFTTLSTVLIVSQEHQKIKTYINTVADRGVTEIPVKGGYSGTNQIMLMTTIAGYEFAKLQEAIAEIDETAFITVTPTSQASGRGFSLQKNHGRLDEDILMPM

SEQ ID NO: 5085 - DNA, 870 bp, Streptococcus pyogenes
atgaaaaaacgagggattgatttactacttgtcacaattggctcattcataacagctattggtttcaatacaatgtttgtcgacaatcatattgcatcagggggtatggttggtattgcagttgttataaaagctctatttggcattagtccgtcgctttttttaatggctagtaatattcccttattattaatgtgttacttctttcttggaaaacaaaattttattaaaacactttatggttcttggatatatcctattgccatccgttcaaccaattcattacctactctgacacacaatcagttgttagcagctatttttggtggtattatctgtggcattggtttaggaatggttttttggggaaactcttcgacaggaggaactggaattctaacacaaatacttcataaatactctcctttatctcttggagttgcaatgacaattgtagatggtattagtgtccttatgggatttattgcactttctgcagatgacgtgatgtattctacgattggacttttcgtaattggttatgtgattagcgttatggaaaatggctttgactcatccaaaaatgttatgattatttccaaagattatcaagctattcgagaatatatcacaactgttatggatcgtggagtgactaaacttcctattcgcggtggttatactacttctgataaaattatgttaatggctattgtatcaagtcacgaattacctactctccaagaaaaaatcctcgaaattgacgatacagcctttattgttgtcatgccagcagctcaagttatgggaagaggatttagtttgactaaacaatacaaacgtgaagacaaagacgttttattgcctatg

SEQ ID NO: 5086 - protein, 290 aa, Streptococcus pyogenes
MKKRGIDLLLVTIGSFITAIGFNTMFVDNHIASGGMVGIAVVIKALFGISPSLFLMASNIPLLLMCYFFLGKQNFIKTLYGSWIYPIAIRSTNSLPTLTHNQLLAAIFGGIICGIGLGMVFWGNSSTGGTGILTQILHKYSPLSLGVAMTIVDGISVLMGFIALSADDVMYSTIGLFVIGYVISVMENGFDSSKNVMIISKDYQAIREYITTVMDRGVTKLPIRGGYTTSDKIMLMAIVSSHELPTLQEKILEIDDTAFIVVMPAAQVMGRGFSLTKQYKREDKDVLLPM

SEQ ID NO: 5087 - DNA, 1617 bp, Streptococcus agalactiae
ttgcttacagtttcagatgtttcactacgttttagtgatcgcaaattatttgatgaagttaacattaactttacagcaggaaatacctatggtcttatcggagcaaatggcgctggtaaatcaactttccttaaaattttagctggtgatattgaaccaacaacaggacatattgcacttggcccagatgaacgcctttctgtacttcgccaaaatcattttgattatgaagatgagcgcgtcattgatgtcgttatcatgggtaatgaaacactttatagtatcatgaaagaaaaggatgctatctacatgaaagaagatttttctgatgaagatggtgttcgcgctgcggaattagaaggagaatttgctgaactcggtggatgggaggctgaaagtgaggcttctcaattactccaaaatctaaatatttcagaagagcttcattatcaaaatatgagtgaactagctaatggagacaaagttaaagttctccttgcaaaagctctctttggtaaaccagatgtacttctccttgacgagcctaccaatggacttgatatccagtctattacttggttagaagatttcttgattgactttgaaaatacagttattgtagtttcccacgaccgtcatttcttgaataaagtatgtacacatatggctgaccttgattttggaaaaattaaactgttcgtcggtaactatgatttctggaaagaatcatcagaattagcagctcgtttacaagctgatcgtaatgctaaagcagaagaaaaaattaaacaacttcaagaattcgttgcacgattttcagcgaatgcttcaaaatcaaaacaagcaacttctcgtaaaaaaatgcttgataaaattgaacttgaagagattgtaccatcaagccgtaaatacccattcgttaactttaaagccgaacgcgaaatgggaaatgatttattgaccgttgaaaatctctctgtcactattgatggggaaaaaatccttgataatatcagtttcattcttcgtcctggtgataaaactgcacttattggacaaaatgatatccaaactactgcacttattcgagcattgatgggggatatcgaatatgaaggaacaatcaaatggggagtaacaactagtcgttcttaccttccaaaagacaattcacgagattttgcttctggcgagtcaatcttagaatggcttcgtcaatttgctagtaaagaagaagacgataataccttcttacgtggtttcctaggtcgtatgcttttctctggagatgaggttaacaaatctgttaatgtcttatctgggggtgaaaaagtacgcgttatgctttcgaaattaatgctattaaaatctaatgttcttgttcttgatgatccaacaaaccacttagatttggaatctatttcaagtctcaacgatggactaaaagatttcaaagaatctattatttttgcaagtcatgaccacgagtttattcaaactttagcgaaccatattattgttctttctaaaaacggagttatcgatcgtatcgatgaaacttacgatgaatttcttgaaaataccgaagtacaagctaaggtcgctcaactctggaaa

SEQ ID NO: 5088 - protein, 539 aa, Streptococcus agalactiae
MLTVSDVSLRFSDRKLFDEVNINFTAGNTYGLIGANGAGKSTFLKILAGDIEPTTGHIALGPDERLSVLRQNHFDYEDERVIDVVIMGNETLYSIMKEKDAIYMKEDFSDEDGVRAAELEGEFAELGGWEAESEASQLLQNLNISEELHYQNMSELANGDKVKVLLAKALFGKPDVLLLDEPTNGLDIQSITWLEDFLIDFENTVIVVSHDRHFLNKVCTHMADLDFGKIKLFVGNYDFWKESSELAARLQADRNAKAEEKIKQLQEFVARFSANASKSKQATSRKKMLDKIELEEIVPSSRKYPFVNFKAEREMGNDLLTVENLSVTIDGEKILDNISFILRPGDKTALIGQNDIQTTALIRALMGDIEYEGTIKWGVTTSRSYLPKDNSRDFASGESILEWLRQFASKEEDDNTFLRGFLGRMLFSGDEVNKSVNVLSGGEKVRVMLSKLMLLKSNVLVLDDPTNHLDLESISSLNDGLKDFKESIIFASHDHEFIQTLANHIIVLSKNGVIDRIDETYDEFLENTEVQAKVAQLWK

SEQ ID NO: 5089 - DNA, 1617 bp, Streptococcus pyogenes
ttgcttacagtttctgatgtatcactacgctttagtgatcgaaaactatttgatgatgttaatatcaaattcacagccggcaatacttacggcttaatcggtgccaatggtgccggaaaatcaacttttcttaaaatccttgcaggagatattgaaccaagtactggtcatatctctttaggacctgacgaacgcttatctgttcttcgccaaaatcattttgattatgaagaagaacgtgcgattgatgttgtaatcatgggtaatgaacaactctacaatatcatgaaagaaaaagacgctatctatatgaaagcagatttttcagaagaagatggggttcgtgccgctgagctagaaggtatctttgctgaattaggtggctgggaggcagaaagtgaagcttctcaacttctccaaaatctaaatattccagaagaccttcactaccaaaatatgagtgaactggctaatggagataaagtgaaagtccttcttgctaaagcgctctttggtaagcctgacgttttattacttgacgagccaaccaatggtcttgatattcaatctatttcatggttggaagatttcttgattgattttgaaaatacagtcatcgttgtttcccatgaccgtcacttcttgaataaagtatgtactcacatggccgaccttgactttggtaaaatcaaactctttgtgggtaactacgatttctggaaacaatcttctgagctggccgctcgtttacaagctgaccgcaatgctaaagcagaagagaaaatcaaagaattacaagaattcgttgcccgtttctcagcaaacgcatctaaatcaaaacaagcaacctctcgtaaaaaaatgcttgataagattgaattagaagaaattgttccctcaagccgtaaatacccatttattaattttaaagcagagcgtgaaatgggaaatgacttcctcactgttgaaaatctttctgtaacgatcgatggagagaaaatcattgataatatcagtttcattttacgtccaggtgacaaagctgctattattggtcaaaatgatattcagacaactgctcttatgcgtgctttagcagatgatattgactacgaaggaaccattaaatggggagtgacaacaagtcgttcttacttgcctaaagacaattcaaaagattttgccacggaagaatctattcttgaatggttacgtcaatttgcctcaaaaggtgaagatgatgatacctttttacgtgggttcttaggacggatgcttttctctggagacgaagttaaaaaatctgttaacgttctttccggtggcgaaaaagtgcgtgtcatgctttctaagttgatgctattgaaatcaaacgttcttattcttgatgacccaactaatcacttagatttggaatctatttcaagtcttaatgatggaatcaaagacttcaaagaatctgttatctttgccagtcatgaccatgaatttattcaaacgattgctaaccacatcgttgttatttcaaaaaatggtgttatcgaccgtatagatgaaacttatgacgaattccttgacaatccagaagtccaagcccgagttgctgaactttggaaa

SEQ ID NO: 5090 - protein, 539 aa, Streptococcus pyogenes
LLTVSDVSLRFSDRKLFDDVNIKFTAGNTYGLIGANGAGKSTFLKILAGDIEPSTGHISLGPDERLSVLRQNHFDYEEERAIDVVIMGNEQLYNIMKEKDAIYMKADFSEEDGVRAAELEGIFAELGGWEAESEASQLLQNLNIPEDLHYQNMSELANGDKVKVLLAKALFGKPDVLLLDEPTNGLDIQSISWLEDFLIDFENTVIVVSHDRHFLNKVCTHMADLDFGKIKLFVGNYDFWKQSSELAARLQADRNAKAEEKIKELQEFVARFSANASKSKQATSRKKMLDKIELEEIVPSSRKYPFINFKAEREMGNDFLTVENLSVTIDGEKIIDNISFILRPGDKAAIIGQNDIQTTALMRALADDIDYEGTIKWGVTTSRSYLPKDNSKDFATEESILEWLRQFASKGEDDDTFLRGFLGRMLFSGDEVKKSVNVLSGGEKVRVMLSKLMLLKSNVLILDDPTNHLDLESISSLNDGIKDFKESVIFASHDHEFIQTIANHIVVISKNGVIDRIDETYDEFLDNPEVQARVAELWK

SEQ ID NO: 5091 - DNA, 2577 bp, Streptococcus agalactiae
atgacaattaaccactataagcttcgtataccttactatacaataagctttctacttcccttcataatcatagtctgtatcctctttactaagaatatttattggggaagtccaacaaccatattagcaagcgatggctttcatcaatatgttatctttaatcaagcattaagaaatattcttcatggttcaaacagcttattctatacctttacaagcggtttaggtttaaatttttatgctctgagtagttactatttgggaagttttttatccccaatagtttatttctttaacctaaaaaatatgcctgatgctatctaccttttaacaatatgtaaaatagggttgataggtttgtcaatgtttgtcactctttgtaaacgtcattgtaaagttaatcgtgtcttacttttagtaatttctacttgctatagcttaatgagtttctcaattagccaaattgaaattaatatgtggctagatgtatttattctaattccccttgttgttttaggagttgatcagctactatgggaaagaaaacctatactttatttcctctctctgacagccttattcatccaaaactattattttggttttatgactgccatctttactagcctttacttcatcgtacaaataacccgtaatactgatagtaaggttgcatttaaacaatttcttcattttacctttttatctcttttagctggtatgactagtagcattatgattttgccaacttattttgatttaactactcatggtgaaaagttgacaaaggtatcgaagatgtttacagaaaattcttggtacatggatttgtttgctaaaaatatgattggagcctatgatacaacaaaatttggctctattcctatgatttatgtaggtttacttcctttactcctttctttactttactttacaataaaggaagttcctcgaaggactagattagcatatggatttttaataatatttgttattgctagtttttatataacacctctagatttattttggcaagggatgcatgctccaaatatgtttctccatcgctactcttgggtactttcagtacttatctgtctgctagctgctgaatgccttgagtatttagacaacatttcttggaaaaagattttaggggtcaatttaattttagtaagtggtttcataatcacgtttttatttaaaaagcattatcattaccttaatcttgaattacttcttttaaccttaactttcctctcagcttatattattctaactattagttttgtcagtaagcaaatccctaaattagttttttatccctttcttattggttttgttgtattagagatgacattaaacaccttttaccaactaaatagtcttaacgatgaatggatatttccatctaggcaaggatatgctaaatataatcacagcattagcaaacttgtcagaaagactgagagaaataactctacattcttccgtacagagcgctggttaggacaaaccggcaacgactctatgaaatataattataatggtatttcacaattttcatctattagaaatcgttcttcaagtcaagtgcttgatagacttggctttaaatcagatggtacaaatttaaatttacgttatcaaaataatactttgatcgcagatagtctatttggtgtgaagtataaccttacagaatatccttttgataaatttggttttatcaaaaaagctcaagataaacaaaccattctttacaaaaatcagtttgccagtcaattagctatactaacgaatcaagtatatcaagataaaccatttactgtgaatactttggataatcagacaactcttttaaatcaattaagtggtttgaaagagacgtattttgagcatcttattccaaatagcgtttctgggcaaaccactcttaataaacaagtatttgttaaaaagaataaacaagggaatactgaaattacctataacataactatccctaaaaacagtcagttatatgttagtatgccgtttataaattttaataatgaggaaaataaaattgttcaaatctccgttaataatggaccatttgtacctaatactcttgataatgcttattcattttttaatattggttcctttgctgaaaacagtcgtatcaaagtaaaatttcaatttccacacaatgatcaagtttctttcccaattcctcacttttatgggctcaagttagaagcttatcaaaaagctatgactgttattaataaacgaaaagtaaaagtaagaactgatcacaataaagttattgctaattatacaagtcctaatagaagttctcttttcttcactattccctatgataggggttggaaagcttatcaaaataataaagaaataaaaattttcaaagctcagaaaggttttatgaaaataaatattcctaaaggaaaaggcaaagtaacattaatttttatcccttacggctttaaatttggggtaggcctatctattactggaatagtattatttactgtctattattttaaatttggaaaaaataaaatagga

SEQ ID NO: 5092 - protein, 859 aa, Streptococcus agalactiae
MTINHYKLRIPYYTISFLLPFIIIVCILFTKNIYWGSPTTILASDGFHQYVIFNQALRNILHGSNSLFYTFTSGLGLNFYALSSYYLGSFLSPIVYFFNLKNMPDAIYLLTICKIGLIGLSMFVTLCKRHCKVNRVLLLVISTCYSLMSFSISQIEINMWLDVFILIPLVVLGVDQLLWERKPILYFLSLTALFIQNYYFGFMTAIFTSLYFIVQITRNTDSKVAFKQFLHFTFLSLLAGMTSSIMILPTYFDLTTHGEKLTKVSKMFTENSWYMDLFAKNMIGAYDTTKFGSIPMIYVGLLPLLLSLLYFTIKEVPRRTRLAYGFLIIFVIASFYITPLDLFWQGMHAPNMFLHRYSWVLSVLICLLAAECLEYLDNISWKKILGVNLILVSGFIITFLFKKHYHYLNLELLLLTLTFLSAYIILTISFVSKQIPKLVFYPFLIGFVVLEMTLNTFYQLNSLNDEWIFPSRQGYAKYNHSISKLVRKTERNNSTFFRTERWLGQTGNDSMKYNYNGISQFSSIRNRSSSQVLDRLGFKSDGTNLNLRYQNNTLIADSLFGVKYNLTEYPFDKFGFIKKAQDKQTILYKNQFASQLAILTNQVYQDKPFTVNTLDNQTTLLNQLSGLKETYFEHLIPNSVSGQTTLNKQVFVKKNKQGNTEITYNITIPKNSQLYVSMPFINFNNEENKIVQISVNNGPFVPNTLDNAYSFFNIGSFAENSRIKVKFQFPHNDQVSFPIPHFYGLKLEAYQKAMTVINKRKVKVRTDHNKVIANYTSPNRSSLFFTIPYDRGWKAYQNNKEIKIFKAQKGFMKINIPKGKGKVTLIFIPYGFKFGVGLSITGIVLFTVYYFKFGKNKIG

SEQ ID NO: 5093 - DNA, 2574 bp, Streptococcus pyogenes
atgaaaaataataataaatggataattgctggacttgctagttttttgttccctcttagtattatatttatcatccttctatcgatgggcatttattataatagtgataaaacaattctagctagtgatgcttttcatcagtatgttatttttgcgcagaactttcgtaacatcatgcacggttctgatagttttttttatacctttacaagcggactagggataaatttttatgctttaatgtgttattatcttggcagtttcttttctccattacttttcttttttaatttaacctctatgccagatgctatctatttgtttaccttgataaaatttgggttaataggattagctgcatgctattcttttcatagattatatccaaaaatcagtgctttcttgatgatttccatctcagttttttatagcttaatgagcttcttgacaagtcaaatggaactaaattcttggttagatgttttcattcttcttccacttgttatacttggattaaataaacttatcacagaaaataaaaccagaacttattatctttcgatatcattattattcattcaaaattactactttggctacatgattgctcttttttgtattctttacgccttagtttgtcttttacgtctcaatgattttaacaaaatgtttatcgcttttgttaggtttacagctgtgtcaatatgtgctgctttaacaagtgctctagtaatacttcctacctatctagatttgtcaacttatggagagaatctatccccgataaaacagttagttacgaacaatgcttggtttttggatatacctgctaagctctcaataggagtgtacgatactaccaagtttaatgctctgcctatgatttacgtaggattatttcccctaatgcttagtgttatttattttactttagaaagtatccctttaaaaataaaattagccaatgcctgcttgttaacttttattataataagtttttacctacagccacttgatcttttttggcaggggatgcactcaccaaatatgtttttgcatcgctacgcttggtctttttccatagttatcctattactcgcatgtgagactctctctcgactaaaagaagtgactcaaataaaagcaggttttgcttttattttcctcattatactgacatctcttccttatagcttttctcaacaatataattttctacctttaactctttttttacttagtgtttttttattattaggttatactatttcactattttcgtttagaaattctcaaatcccatctacttttatttctgctttcatacttatctttagccttcttgaatcagggttaaacacctactaccagcttcaaggaattaataaggagtggggattcccatcacgacagatatataatagtcaattaaaggatattaacaaccttgtcaactctgtgtcaaaaaatagtcaacctttttttagaatggaaaggctacttccccaaacagggaacgatagcatgaaatttaattattacggcatttcacaattttcctctgtaagaaatagactatctagttctttattggatcgattgggatttcagtctaaaggcacaaatttaaaccttagataccaaaacaatactattattatggacagtctacttggtataaaatataatcttagcgaaggacctccaaataaatttggatttacaaaactaaaaactagcgggaatactactctttatcaaaatcactatagtagccctttagctatattaacacgtaatgtttacaaagatgtcaacctaaatgtcaatacccttgataaccaaaccaaattacttaaccaactaagtgggaaatctttaacctattttaacttacagccagctcaacttatttctggtgctaatcaatttaacggacaaatatctgcacaagcttctgattatcaaaactccgttacccttaattatcaaattaacatccctaaacatagtcaactctatgttagcatacccaatattatattttcaaatcctgatgctaaagagatgcgtattcagacagataatcataatttcatatatactacagataacgcttactctttttttgatttaggatatttcgccgatgccaaagttgctacattttcgtttgtttttccaaaaaataaacaaattagttttaaggaacctcatttttatagtttgtctattgaatcttaccttgaagcaatgaatagcattaaacaaaaaaatgttcatacttacgctaaaagtaatacggtaatcactgattataattcaaaaacgaaaggttctcttatttttacacttccttacgataaaggttggtcagcacaaaaagatgggaaaaatcttccagtcaaaaaagcacaaggaggatttctatcagttactattcctaaaggaaagggacgtgttatccttacctttattcctaatggttttaaattagggttatctctatcttgtgtaggaattatcgcttatatgcttttgtataagtacatagatataaagtctaaattactt

SEQ ID NO: 5094 - protein, 858 aa, Streptococcus pyogenes
MKNNNKWIIAGLASFLFPLSIIFIILLSMGIYYNSDKTILASDAFHQYVIFAQNFRNIMHGSDSFFYTFTSGLGINFYALMCYYLGSFFSPLLFFFNLTSMPDAIYLFTLIKFGLIGLAACYSFHRLYPKISAFLMISISVFYSLMSFLTSQMELNSWLDVFILLPLVILGLNKLITENKTRTYYLSISLLFIQNYYFGYMIALFCILYALVCLLRLNDFNKMFIAFVRFTAVSICAALTSALVILPTYLDLSTYGENLSPIKQLVTNNAWFLDIPAKLSIGVYDTTKFNALPMIYVGLFPLMLSVIYFTLESIPLKIKLANACLLTFIIISFYLQPLDLFWQGMHSPNMFLHRYAWSFSIVILLLACETLSRLKEVTQIKAGFAFIFLIILTSLPYSFSQQYNFLPLTLFLLSVFLLLGYTISLFSFRNSQIPSTFISAFILIFSLLESGLNTYYQLQGINKEWGFPSRQIYNSQLKDINNLVNSVSKNSQPFFRMERLLPQTGNDSMKFNYYGISQFSSVRNRLSSSLLDRLGFQSKGTNLNLRYQNNTIIMDSLLGIKYNLSEGPPNKFGFTKLKTSGNTTLYQNHYSSPLAILTRNVYKDVNLNVNTLDNQTKLLNQLSGKSLTYFNLQPAQLISGANQFNGQISAQASDYQNSVTLNYQINIPKHSQLYVSIPNIIFSNPDAKEMRIQTDNHNFIYTTDNAYSFFDLGYFADAKVATFSFVFPKNKQISFKEPHFYSLSIESYLEAMNSIKQKNVHTYAKSNTVITDYNSKTKGSLIFTLPYDKGWSAQKDGKNLPVKKAQGGFLSVTIPKGKGRVILTFIPNGFKLGLSLSCVGIIAYMLLYKYIDIKSKLL

SEQ ID NO: 5095 - DNA, 477 bp, Streptococcus agalactiae
atgaaattaaaaataattacagttggaaaattgaaagagaaataccttaaagaaggtgttgcagagtatcagaaacgtctgaatcgcttttctaaaattgagacaattgagctagctgatgaaaagacacctgataaagctagtatatctgaaaatcaaagaattttagatatagaaggggaacgtattttgagtaaaataggtgagagggattatgtcattggtttagctatagaagggaaacaattgccatctgaatcatttagccatctaatcgatcaaaaaatgatatccggctactctactattacttttgttattggtggtagtttgggtttatctcaaaaagtgaaaaaacgtgctgattatttaatgagttttggactgttaaccttacctcatcaacttatgaaattagtcttgatggaacaaatttatcgtgcttttatgattcgtcaaggcactccttaccacaaa

SEQ ID NO: 5096 - protein, 159 aa, Streptococcus agalactiae
MKLKIITVGKLKEKYLKEGVAEYQKRLNRFSKIETIELADEKTPDKASISENQRILDIEGERILSKIGERDYVIGLAIEGKQLPSESFSHLIDQKMISGYSTITFVIGGSLGLSQKVKKRADYLMSFGLLTLPHQLMKLVLMEQIYRAFMIRQGTPYHK

SEQ ID NO: 5097 - DNA, 477 bp, Streptococcus pyogenes
atgaaagtgaaactaatttgtgttggaaaactaaaagaaagatacctcaaagatggtatttcagaatatcaaaaaagactttcccgtttttgtcaattcgaaatgattgagttaactgatgaaagaacaccagataaagcaagttttgctgataatcaattgattatgagtaaagaagctcagcgaatccataaaaaaattggggaacgtgattttgtaattgcattagctattgaaggaaaacagtttccttcagagacatttagtgaattaatatcaggggttactgttaagggatattcaactatcacgtttattattggtgggagtcttggattagattcaattattaaaaaaagagctaatatgctaatgagttttggattgttaaccttacctcatcagttaatgcgtctagtccttactgagcaaatttatcgtgcttttatgattacacaaggcagtccttatcataag

SEQ ID NO: 5098 - protein, 159 aa, Streptococcus pyogenes
MKVKLICVGKLKERYLKDGISEYQKRLSRFCQFEMIELTDERTPDKASFADNQLIMSKEAQRIHKKIGERDFVIALAIEGKQFPSETFSELISGVTVKGYSTITFIIGGSLGLDSIIKKRANMLMSFGLLTLPHQLMRLVLTEQIYRAFMITQGSPYHK

SEQ ID NO: 5099 - DNA, 117 bp, Streptococcus agalactiae
atgacaaaactagcaaatgctccaccagcaaagctaacaataatgattagagaacactttagaagtgatgagactaatttttttttcacaaatagctacctccgtaaatttttatac

SEQ ID NO: 5100 - protein, 39 aa, Streptococcus agalactiae
MTKLANAPPAKLTIMIREHFRSDETNFFFTNSYLRKFLY

SEQ ID NO: 5101 - DNA, 1140 bp, Streptococcus agalactiae
atgaatcataatgacaatattccaaatggtggtgtcactaaaactagtaaagtaaattataataacataacgcctacaacaaaagctgttaaaaaggtacaaaatagtgttgtttctgttatcaattataaacaacaagagagtcgttctgacctatcagacttctatagtcatttttttggtaatcaggggggcaacactgataagggcttacaagtttacggtgaaggctctggagtcatctataaaaaagatggtaaaaatgcctatgttgtcactaataaccacgtcattgatggggctaaacaaattgaaattcaactagctgatggctcaaaagcagttgggaaacttgttgggtcagatacctactctgatttagccgtcgtcaaaattccatcagataaggtttcaaatattgcagaatttgctgattcatcaaaactcaacattggtgaaactgctatagcgatcggaagccctcttggaactgagtatgcaaattctgtaactcaaggtattgtatctagtttaaaaagaactgtaacaatgactaatgaagaaggacaaacagtttctacaaatgctatccagactgatgctgctatcaatcctggtaattcaggtggagcacttatcaatattgaaggacaggttattggaattaattctagtaaaatttcttctacatcaaatcaaacctcaggacaatcgtcaggaaatagcgttgaaggtatgggatttgccattccttcaaatgatgttgttaagattatcaatcaacttgagagtaacggacaagtagagagacctgctctaggtatttctatggctggattaagtaatttaccatccgatgttattagtaaactgaaaatcccaagtaatgttactaatggtattgtagtagcatctatccaatctggcatgccagctcaaggcaaactaaagaaatacgatgtcattactaaagttgacgataaagaagtagtatctccaagtgatttacaaagtttactctatggccaccaggtaggggattccataacagtaaccttttatcgtggtgaaaataaacaaacagtcactataaaacttactaaaactagtaaagatttagctaaacaacgagcaaataac

SEQ ID NO: 5102 - protein, 380 aa, Streptococcus agalactiae
MNHNDNIPNGGVTKTSKVNYNNITPTTKAVKKVQNSVVSVINYKQQESRSDLSDFYSHFFGNQGGNTDKGLQVYGEGSGVIYKKDGKNAYVVTNNHVIDGAKQIEIQLADGSKAVGKLVGSDTYSDLAVVKIPSDKVSNIAEFADSSKLNIGETAIAIGSPLGTEYANSVTQGIVSSLKRTVTMTNEEGQTVSTNAIQTDAAINPGNSGGALINIEGQVIGINSSKISSTSNQTSGQSSGNSVEGMGFAIPSNDVVKIINQLESNGQVERPALGISMAGLSNLPSDVISKLKIPSNVTNGIVVASIQSGMPAQGKLKKYDVITKVDDKEVVSPSDLQSLLYGHQVGDSITVTFYRGENKQTVTIKLTKTSKDLAKQRANN

SEQ ID NO: 5103 - DNA, 1221 bp, Streptococcus pyogenes
atgccaagtatgaaacatatcttaaaatccttaagtattttactaattggatttttaggaggattaatagcaattattacattcaataatctctacccacattctccatcaaaaataaattcaggtaaggcaacaactagtaatatggtttttaacaacacaaccaatactactaaagctgtcaaagctgttcaaaatgcagttgtatcagttattaattatcaagataacccttcttcatccctttctaacccttatacaaaactctttggagaagggcgttcaaaagagaataaggatgctgaattatctatttttagtgaaggatctggggtcatttatcgaaaagatggcaactccgcttacgttgttactaataaccatgttatcgacggagctaaacgaattgaaattcttatggcagacggatctaaagttgttggtgaattagttggagctgatacttattcggatttagctgttgttaagatctcttcagataagataaaaacagtagctgaatttgcagattctacaaaactaaatgttggagaagttgctattgctatcggcagcccactaggaacacaatacgctaattctgttactcaaggaatcgtctctagtttaagtcgtactgtaactttaaaaaacgagaatggtgagactgtctcaacaaatgctattcagacagatgctgctattaaccctggaaactctggtggaccactaattaatattgaggggcaagtaatcggaattaattcaagtaaaatttcttctaccccaactggtagcaacggtaatagtggtgctgttgaaggaattggttttgctatcccatctactgatgttattaaaattattaaacaactagaaactaatggtgaagttatcagacctgctcttggaatatccatggtcaatttaaatgacttatccacaaatgctcttagtcaaattaatattccaactagtgtaactggtggtattgtagtagcagaagttaaggaaggaatgccggcatctggcaaacttgctcagtacgatgtgattacagaaattgatggcaaaacagttaattcaattagtgatttacaaagtagtctatacggacacgatattaatgatactattaaagtaactttttatagaggaactacaaagaaaaaagcagatatcaaattaacaaaaactactcaagatttgactaaaacgcag

SEQ ID NO: 5104 - protein, 407 aa, Streptococcus pyogenes
MPSMKHILKSLSILLIGFLGGLIAIITFNNLYPHSPSKINSGKATTSNMVFNNTTNTTKAVKAVQNAVVSVINYQDNPSSSLSNPYTKLFGEGRSKENKDAELSIFSEGSGVIYRKDGNSAYVVTNNHVIDGAKRIEILMADGSKVVGELVGADTYSDLAVVKISSDKIKTVAEFADSTKLNVGEVAIAIGSPLGTQYANSVTQGIVSSLSRTVTLKNENGETVSTNAIQTDAAINPGNSGGPLINIEGQVIGINSSKISSTPTGSNGNSGAVEGIGFAIPSTDVIKIIKQLETNGEVIRPALGISMVNLNDLSTNALSQINIPTSVTGGIVVAEVKEGMPASGKLAQYDVITEIDGKTVNSISDLQSSLYGHDINDTIKVTFYRGTTKKKADIKLTKTTQDLTKTQ

SEQ ID NO: 5105 - DNA, 771 bp, Streptococcus agalactiae
atggaatatttagaaacgatcaacatcaatcatattgctccaaatccgtatcaacctcgcctagaatttaatacaaaagaactagaagaattagccaactctattaaaattaatggccttatccaacccattattgtaagaccgtcagcagtctttggttacgaactggtagccggagaacgacggctaagagccgcaaagttagctaaattggaaagtatacctgcaattataaaatcctataataatgatgatagtatgcaattagctattgtcgaaaatttacaacgatctaatttgtcacctattgaagaggctaaagcctactctcaacttctacaaaagaaaagtatgacacatgaagagttagcaaaatatatgggaaaatctcgtccctatatatcaaatacgatacgactactaaatttaccgccactaattacttcagctattgaagaaggaaaactttcctctggtcatgcgcgtgcactactcagtctaccagatgctagtcaacagaaagattggtatcagagaatcctcactgaagatattagtgtaagacgactagagaagttattaaaacaagaaaagaaaacaaatcataagtcacttcaaaataaagatgtctttctaaaacatcaagaaaatgagttagctcaatttctaggtagcaaagtgaaacttactattaataaagatggtgctggcaatataaagattgctttcgctaaccaagaagaattaaacagaattatcaacactctaaaa

SEQ ID NO: 5106 - protein, 257 aa, Streptococcus agalactiae
MEYLETININHIAPNPYQPRLEFNTKELEELANSIKINGLIQPIIVRPSAVFGYELVAGERRLRAAKLAKLESIPAIIKSYNNDDSMQLAIVENLQRSNLSPIEEAKAYSQLLQKKSMTHEELAKYMGKSRPYISNTIRLLNLPPLITSAIEEGKLSSGHARALLSLPDASQQKDWYQRILTEDISVRRLEKLLKQEKKTNHKSLQNKDVFLKHQENELAQFLGSKVKLTINKDGAGNIKIAFANQEELNRIINTLK

SEQ ID NO: 5107 - DNA, 804 bp, Streptococcus pyogenes
atgtttcttattctatccaggaactcccttatgacaaaagaattattgatagacctaccaattgaagatattgttacaaatccctatcagccaaggatacaatttaatcaaagagaactccaagacctagcaacttctattaaatcaaacggcctcattcaacctattattgttcgaaaatctgacatttttggctatgagttagttgctggagaacgacgacttaaagcttcaaaaatggctggtctaaaaaaagttccagctatcatcaagaagatctccacactcgagagcatgcaacaagctatagttgaaaatttacaacgttctaaccttaacgctatcgaagaagctaaagcctatcagttattggttgaaaaaaaacacatgactcacgatgagattgctaaatatatgggaaaatcaagaccttatattagcaataccttacgtctgttacaactcccagcacctatcattaaagcaattgaagaaggaaaaattagtgcgggacacgcgcgtgctcttttaactttgagtgatgataagcaacaactgtacctcactcataaaatacaaaatgaaggcctaagtgttaggcaaattgagcaactggttacttctactccaagttcgaagctatctaaaaaaactaaaaatatttttgccacttctttagagaaacaattggctaaatcattgggactctctgtcaatatgaagctgacagcaaaccatagtgggtaccttcagatatctttttccaatgatgatgaattaaacagaattatcaacaagctaaag

SEQ ID NO: 5108 - protein, 268 aa, Streptococcus pyogenes
MFLILSRNSLMTKELLIDLPIEDIVTNPYQPRIQFNQRELQDLATSIKSNGLIQPIIVRKSDIFGYELVAGERRLKASKMAGLKKVPAIIKKISTLESMQQAIVENLQRSNLNAIEEAKAYQLLVEKKHMTHDEIAKYMGKSRPYISNTLRLLQLPAPIIKAIEEGKISAGHARALLTLSDDKQQLYLTHKIQNEGLSVRQIEQLVTSTPSSKLSKKTKNIFATSLEKQLAKSLGLSVNMKLTANHSGYLQISFSNDDELNRIINKLK

SEQ ID NO: 5109 - DNA, 1452 bp, Streptococcus agalactiae
ttgttgattttattcttcaacatctgtggaaaactttatttttttatggtacaatataacaataattatccacaagacaataaggaagaagctatgacggaaaacgaacaactattttggaatagagtactagagctatctcgttctcaaatagcaccagcagcttatgaattttttgttctagaggctagactcctcaaaattgaacatcaaactgcagttattactttagataacattgaaatgaaaaagctattctgggaacaaaatttggggcctgttatcctaacagctggttttgaaattttcaatgctgaaattacagctaactatgtctcaaacgatttacatttacaagaaactagtttttctaactaccagcaatctagcaatgaagtaaatactttaccaattagaaaaatcgactctaaccttaaagagaaatatacttttgctaattttgttcaaggagatgaaaatagatgggctgtttcagcatcaattgctgtagctgatagtcctggcacgacttataatcctctatttatctgggggggacctggtctaggaaagacgcatctactaaatgctattggaaatcaagtcttaagagataatccaaacgcgagggttttatacatcactgctgagaattttattaatgaatttgtcagtcatattcgtttagattcgatggaagaattaaaagaaaagtttcgcaacttagacttactcctgattgatgatattcagtcgcttgctaagaaaaccttaggggggacccaagaggagttcttcaatactttcaatgctttacatacaaacgataaacaaatcgtattgaccagtgaccgaaatccaaatcaattaaatgatctagaagaacgtctagtcacgcgctttagttggggactcccagtaaatatcacaccacctgattttgaaacacgagttgctattttaaccaataaaattcaagaatatccttatgattttcctcaagataccattgaatacttagcaggagaatttgattccaacgtacgtgaattagaaggagccttgaaaaatattagtctagttgctgactttaagcatgctaaaactattacagtagatatagctgcagaagctatcagagcacgtaaaaatgatggtcctattgttactgtcattcctatagaagaaattcaaatacaagttggtaaattctatggcgtaactgtaaaagagataaaagcaactaaaagaacacaagatattgtccttgcaagacaggtagccatgtacttagctcgtgagatgacagataacagtctcccaaaaataggtaaagaatttgggggacgagatcactcaactgttctccacgcttataataaaataaaaaatatggttgctcaagatgacaacttacgaattgagatagaaactatcaaaaataaaatcaga

SEQ ID NO: 5110 - protein, 484 aa, Streptococcus agalactiae
MLILFFNICGKLYFFMVQYNNNYPQDNKEEAMTENEQLFWNRVLELSRSQIAPAAYEFFVLEARLLKIEHQTAVITLDNIEMKKLFWEQNLGPVILTAGFEIFNAEITANYVSNDLHLQETSFSNYQQSSNEVNTLPIRKIDSNLKEKYTFANFVQGDENRWAVSASIAVADSPGTTYNPLFIWGGPGLGKTHLLNAIGNQVLRDNPNARVLYITAENFINEFVSHIRLDSMEELKEKFRNLDLLLIDDIQSLAKKTLGGTQEEFFNTFNALHTNDKQIVLTSDRNPNQLNDLEERLVTRFSWGLPVNITPPDFETRVAILTNKIQEYPYDFPQDTIEYLAGEFDSNVRELEGALKNISLVADFKHAKTITVDIAAEAIRARKNDGPIVTVIPIEEIQIQVGKFYGVTVKEIKATKRTQDIVLARQVAMYLAREMTDNSLPKIGKEFGGRDHSTVLHAYNKIKNMVAQDDNLRIEIETIKNKIR

SEQ ID NO: 5111 - DNA, 1353 bp, Streptococcus pyogenes
atgactgaaaatgaacaaattttttggaacagggtcttggaattagctcagagtcaattaaaacaggcaacttatgaattttttgttcatgatgcccgtctattaaaggtcgataagcatattgcaactatttacttagatcaaatgaaagagctcttttgggaaaaaaatcttaaagatgttattcttactgctggttttgaagtttataacgctcaaatttctgttgactatgttttcgaagaagacctaatgattgagcaaaatcagaccaaaatcaaccaaaaacctaagcagcaagccttaaattctttgcctactgttacttcagatttaaactcgaaatatagttttgaaaactttattcaaggagatgaaaatcgttgggctgttgctgcttcaatagcagtagctaatactcctggaactacctataatcctttgtttatttggggtggccctgggcttggaaaaacccatttattaaatgctattggtaattctgtactattagaaaatccaaatgctcgaattaaatatatcacagctgaaaactttattaatgagtttgttatccatattcgccttgataccatggatgaattgaaagaaaaatttcgtaatttagatttactccttattgatgatatccaatctttagctaaaaaaacgctctctggaacacaagaagagttctttaatacttttaatgcacttcataataataacaaacaaattgtcctaacaagcgaccgtacaccagatcatctcaatgatttagaagatcgattagttactcgttttaaatggggattaacagtcaatatcacacctcctgattttgaaacacgagtggctattttgacaaataaaattcaagaatataactttatttttcctcaagataccattgagtatttggctggtcaatttgattctaatgtcagagatttagaaggtgccttaaaagatattagtctggttgctaatttcaaacaaattgacacgattactgttgacattgctgccgaagctattcgcgccagaaagcaagatggacctaaaatgacagttattcccatcgaagaaattcaagcgcaagttggaaaattttacggtgttaccgtcaaagaaattaaagctactaaacgaacacaaaatattgttttagcaagacaagtagctatgtttttagcacgtgaaatgacagataacagtcttcctaaaattggaaaagaatttggtggcagagaccattcaacagtactccatgcctataataaaatcaaaaacatgatcagccaggacgaaagccttaggatcgaaattgaaaccataaaaaacaaaattaaa

SEQ ID NO: 5112 - protein, 451 aa, Streptococcus pyogenes
MTENEQIFWNRVLELAQSQLKQATYEFFVHDARLLKVDKHIATIYLDQMKELFWEKNLKDVILTAGFEVYNAQISVDYVFEEDLMIEQNQTKINQKPKQQALNSLPTVTSDLNSKYSFENFIQGDENRWAVAASIAVANTPGTTYNPLFIWGGPGLGKTHLLNAIGNSVLLENPNARIKYITAENFINEFVIHIRLDTMDELKEKFRNLDLLLIDDIQSLAKKTLSGTQEEFFNTFNALHNNNKQIVLTSDRTPDHLNDLEDRLVTRFKWGLTVNITPPDFETRVAILTNKIQEYNFIFPQDTIEYLAGQFDSNVRDLEGALKDISLVANFKQIDTITVDIAAEAIRARKQDGPKMTVIPIEEIQAQVGKFYGVTVKEIKATKRTQNIVLARQVAMFLAREMTDNSLPKIGKEFGGRDHSTVLHAYNKIKNMISQDESLRIEIETIKNKIK

SEQ ID NO: 5113 - DNA, 1134 bp, Streptococcus agalactiae
atgattcatttttcaataaataaaaatttcttcttgcatgctctaacggtaaccaaacgagctattagtcataaaaatgcgattccaatcctttcaactgttaaaatagaagtgactagggatgctatcattttaacggggtcaaatggacaaatttcaattgaaaatactattcctgcttcaaatgaaaatgcaggtttactagtaacgaatccaggctctattttgttagaagctggtttctttattaatattatttcaagtttaccagatgtaactttagaatttacagagattgaacaacatcaaattgttcttactagtggaaaatcagagattactttgaaaggtaaggatgtcgatcaataccctcgtctgcaggaaatgacaacagatactccattaacattagaaactaaactgttaaaatcaattattaatgaaactgcttttgctgctagccaacaagaaagccgtccaatcttaacaggtgttcatttggttatcagtcaaaataaatactttaaggctgttgcgacagattcacaccgtatgagtcaacgcactttccaattagagaaatcggctaataattttgatttggttgttccaagtaaatcccttcgagaattttcggctgtttttacagatgatattgaaactgtagaggttttcttctcagatagtcaaatgttatttagaagtgaaaatatcagcttctatacacgtttgcttgaaggaaactaccctgatactgatcgcctcctaactaatcagtttgaaaccgaaattatctttaatacaaatgctttacgccatgctatggaacgtgcttatttaatttcgaatgcaactcagaacggtactgttcgtttagaaattcaaaatgagacagtctcagctcatgtaaactctccagaagttggtaaagttaatgaggaattggatactgttagtcttaaaggtgatagtttaaatattagctttaatccaacttacctaattgaatctttaaaagcagtaaaaagcgaaacagttacgattcgatttatttctccagtacgtccatttactttgacacctggtgaagatactgaagatttcatccaattaataactcctgttcgtactaac

SEQ ID NO: 5114 - protein, 378 aa, Streptococcus agalactiae
MIHFSINKNFFLHALTVTKRAISHKNAIPILSTVKIEVTRDAIILTGSNGQISIENTIPASNENAGLLVTNPGSILLEAGFFINIISSLPDVTLEFTEIEQHQIVLTSGKSEITLKGKDVDQYPRLQEMTTDTPLTLETKLLKSIINETAFAASQQESRPILTGVHLVISQNKYFKAVATDSHRMSQRTFQLEKSANNFDLVVPSKSLREFSAVFTDDIETVEVFFSDSQMLFRSENISFYTRLLEGNYPDTDRLLTNQFETEIIFNTNALRHAMERAYLISNATQNGTVRLEIQNETVSAHVNSPEVGKVNEELDTVSLKGDSLNISFNPTYLIESLKAVKSETVTIRFISPVRPFTLTPGEDTEDFIQLITPVRTN

SEQ ID NO: 5115 - DNA, 1134 bp, Streptococcus pyogenes
atgattcaattttcaattaatcgcacattatttattcatgctttaaatacaactaaacgtgctattagcactaaaaatgccattcctattctttcatcaataaaaattgaagtcacttctacaggagtaactttaacagggtctaacggtcaaatatcaattgaaaacactattcctgtaagtaatgaaaatgctggtttgctaattacctctccaggagctattttattagaagctagtttttttattaatattatttcaagtttgccagatattagtataaatgttaaagaaattgaacaacaccaagttgttttaaccagtggtaaatcagagattaccttaaaaggaaaagatgttgaccagtatcctcgtctacaagaagtatcaacagaaaatcctttgattttaaaaacaaaattattgaagtctattattgctgaaacagcttttgcagccagtttacaagaaagtcgtcctattttaacaggagttcatattgtattaagtaatcataaagattttaaagcagtagcgactgactctcatcgtatgagccaacgtttaatcactttggacaatacttcagcagattttgatgtagttattccaagtaaatctttgagagaattttcagcagtatttacagatgatattgagaccgttgaggtatttttctcaccaagccaaatcttgttcagaagtgaacacatttctttttatacacgcctcttagaaggaaattatcccgatacagaccgtttattaatgacagaatttgagacggaggttgttttcaatacccaatcccttcgccacgctatggaacgtgccttcttgatttctaatgctactcaaaatggtactgttaagcttgagattactcaaaatcatatttcagctcatgttaactcacctgaggttggtaaggtaaacgaggatttagatattgttagtcagtctggtagtgatttaactatcagcttcaatccaacttaccttattgagtctttaaaagctattaaaagtgaaacagtaaaaattcatttcttatcaccagttcgaccattcaccctaacaccaggcgatgaggaagaaagttttatccaattaattacaccagtacgaacaaac

SEQ ID NO: 5116 - protein, 378 aa, Streptococcus pyogenes
MIQFSINRTLFIHALNTTKRAISTKNAIPILSSIKIEVTSTGVTLTGSNGQISIENTIPVSNENAGLLITSPGAILLEASFFINIISSLPDISINVKEIEQHQVVLTSGKSEITLKGKDVDQYPRLQEVSTENPLILKTKLLKSIIAETAFAASLQESRPILTGVHIVLSNHKDFKAVATDSHRMSQRLITLDNTSADFDVVIPSKSLREFSAVFTDDIETVEVFFSPSQILFRSEHISFYTRLLEGNYPDTDRLLMTEFETEVVFNTQSLRHAMERAFLISNATQNGTVKLEITQNHISAHVNSPEVGKVNEDLDIVSQSGSDLTISFNPTYLIESLKAIKSETVKIHFLSPVRPFTLTPGDEEESFIQLITPVRTN

SEQ ID NO: 5117 - DNA, 924 bp, Streptococcus agalactiae
ttgggtagttttcttattctaagatatgctataatgatgagtaatatgactctatatataatagctaacccccatgctggtaataaaaatgcctccactattgttggtaaaattcaggagctttatcatactgaagatatttctgtgttctatacagaacagaaagatgatgaaaaaaaacaagtcattaatatactaaggtcttttaaagaaagtgatcatctaatgattataggaggagatggtaccttatcaaaagtaatgacttatctcccccaacatattccgtgcacttattatcctgttggttcgggaaatgattttgccagagctttgaaaattcctaacctcaaagaaacccttaccgctattcagacagaaagattaaaggaaattaattgctttatttatgataaagggctgattttgaatagtttagatttaggttttgcagcctatgtcgtttggaaagcatctaactctaaaataaaaaatattttgaatagatatcgtctaggaaaaataacttacattgttatagctatcaaatcattattacattcttctaaagtacaagtattagtggaaggagagacaggacagcagataaaactaaatgacctttattttttcgcattagcaaataacacttattttggaggtggcattactatttggcctaaagcaagtgctttaactgcagagttagatatggtttacgctaaagggcatacttttctaaaacgattaagtattttattatctttggtttttaaaaggcatactacctctaaaagtataaaacaccagactttcaaagctatgaccgtatattttcctaaaaatagtttgattgaaatagatggcgaaatagttgagttagatcagattagtttaaaatgtcaaaaaaggtatttatatatg

SEQ ID NO: 5118 - protein, 308 aa, Streptococcus agalactiae
MGSFLILRYAIMMSNMTLYIIANPHAGNKNASTIVGKIQELYHTEDISVFYTEQKDDEKKQVINILRSFKESDHLMIIGGDGTLSKVMTYLPQHIPCTYYPVGSGNDFARALKIPNLKETLTAIQTERLKEINCFIYDKGLILNSLDLGFAAYVVWKASNSKIKNILNRYRLGKITYIVIAIKSLLHSSKVQVLVEGETGQQIKLNDLYFFALANNTYFGGGITIWPKASALTAELDMVYAKGHTFLKRLSILLSLVFKRHTTSKSIKHQTFKAMTVYFPKNSLIEIDGEIVELDQISLKCQKRYLYM

SEQ ID NO: 5119 - DNA, 909 bp, Streptococcus pyogenes
atgaaaaccgttcggattttttacaatcctaattctggaaagaaagaaagccaacttgctaggcaagtcaaagactatttttgccaacatggtttttccgaagattctgtaaaagttattacccctaaagatgctgaccaggcttttcaattagcaaaacaagctgctaaggacaagattgacttggttatccctcttggtggcgatgggacactaaataaaatcatcggtggcatctatgaaggaggagctcattgtttaataggcttagtgccctcagggacagtcaataattttgccaaggctatgcatatccctttacaaattactgaggcgttggatactatcttgactggacaaatcaagcaagttgatatttgcaaagctaaccagcaatacatgatttccagtttaactttaggattactggctgatattgctgccgacgtaacggctgaggaaaaacgacgctttggtcctctagcatttttaaaagatagtattcgaatactgaaacgaaatcgcagctatgccatctctttaattagccacaaccatcgtattcacctgaaaacgaagtttctcttaatcacgatgacaaataccattgctggttttccttctttttctcctggtgctcaagctgacgatggctatttccaagtttataccatgaaaaaagtctctttctttaaatttttatggcatattaatgattttaaacagggtgatttttccaaagcagaggaaatcagtcattttcaagccaatacgcttagcttactaccacaagctaaaaaacaagcgatattaccacgtaccaggattgatggggataaaagtgactatctgcccattcaattagatatcattccaaaagccgtttcgattattgttccaacagaagat

SEQ ID NO: 5120 - protein, 303 aa, Streptococcus pyogenes
MKTVRIFYNPNSGKKESQLARQVKDYFCQHGFSEDSVKVITPKDADQAFQLAKQAAKDKIDLVIPLGGDGTLNKIIGGIYEGGAHCLIGLVPSGTVNNFAKAMHIPLQITEALDTILTGQIKQVDICKANQQYMISSLTLGLLADIAADVTAEEKRRFGPLAFLKDSIRILKRNRSYAISLISHNHRIHLKTKFLLITMTNTIAGFPSFSPGAQADDGYFQVYTMKKVSFFKFLWHINDFKQGDFSKAEEISHFQANTLSLLPQAKKQAILPRTRIDGDKSDYLPIQLDIIPKAVSIIVPTED

SEQ ID NO: 5121 - DNA, 195 bp, Streptococcus agalactiae
atgtatcaagttggatcacttgttgaaatgaaaaaacctcatgcttgtgtaattaaagaaactggtaaaaaggctaatcaatggaaggtactgagagtaggagctgatattaaaattcagtgtactaactgtcagcatgtgattatgatgagtcgttatgattttgagcgaaaattaaaaaaagtactgcaacca

SEQ ID NO: 5122 - protein, 65 aa, Streptococcus agalactiae
MYQVGSLVEMKKPHACVIKETGKKANQWKVLRVGADIKIQCTNCQHVIMMSRYDFERKLKKVLQP

SEQ ID NO: 5123 - DNA, 195 bp, Streptococcus pyogenes
atgtatcaaattggatcatttgttgaaatgaaaaaacctcatgcttgtgtaattaaagaaactggtaaaaaggctaatcaatggaaggtactgagagtaggagctgatattaaaattcagtgtactaactgtcagcatgtgattatgatgagtcgttatgattttgagcgaaaattaaaaaaagtactgcaacca

SEQ ID NO: 5124 - protein, 65 aa, Streptococcus pyogenes
MYQIGSFVEMKKPHACVIKETGKKANQWKVLRVGADIKIQCTNCQHVIMMSRYDFERKLKKVLQP

SEQ ID NO: 5125 - DNA, 201 bp, Streptococcus agalactiae
ttggataatttaatcaggttagctgagatttttgacgtgagcttagatgaacatgttttagctaaaacaaatgaagttaaagttgaacgtatttatgaaaataaaccccttgatctacgaaaatacaataaaatttattggtttatttttcgaaatattattcgatctctactaattattttagctatattaactttctta

SEQ ID NO: 5126 - protein, 67 aa, Streptococcus agalactiae
MDNLIRLAEIFDVSLDEHVLAKTNEVKVERIYENKPLDLRKYNKIYWFIFRNIIRSLLIILAILTFL

SEQ ID NO: 5127 - DNA, 99 bp, Streptococcus agalactiae
ttggtaagcctacaatacctgctgttaaagccatttagtgagtctccattcaaatttcaatcaagactattatatcaaaaaatagaagaaaaagcggta

SEQ ID NO: 5128 - protein, 33 aa, Streptococcus agalactiae
MVSLQYLLLKPFSESPFKFQSRLLYQKIEEKAV

SEQ ID NO: 5129 - DNA, 987 bp, Streptococcus agalactiae
atggtagaagtaccagatgagcgtctacaaaaattgacagaattgattacgcctaaaaaaacagttccgacaacctttgaatttactgatattgcaggtattgttaaaggtgcttcgaagggggaaggtctaggtaataaatttttagctaatattcgtgaagtggatgctattgttcatgtggtacgtgcgtttgatgatgaaaatgttatgcgtgaacaaggtcgtgaggatgctttcgttgatcctatagcagatattgatactattaatcttgaattaatcttagctgatttagagtcaatcaataaacgttatgcgcgtgttgaaaaaatggcacgaactcaaaaagataaagaatcagtagcagagttcaatgttttacaaaagattaaacctgttttggaagatgggaaatcagctcgtaccattgagtttacagaagaggaagcaaaagttgttaaaggtctttttttattaacaactaaacctgttttatatgttgctaatgttgatgaggacaaagtagctgatcctgatgatatcgactatgttaatcaaattcgtgcatttgcagaaacagagaatgcagaagtagtcgtgatttctgctcgagctgaagaagaaatatctgaacttgatgatgaagataagttagaatttttagaagctattggattaacagaatctggtgttgataaattaacacgagctgcttatcatcttttaggccttggaacttactttactgctggtgaaaaagaggttcgcgcttggacgtttaagcgtggtataaaagctccacaagctgctagtattatccattcagattttgaaagaggttttattcgtgcagtaacgatgtcatatgatgaccttattcaatatggatctgaaaaagcagtaaaagaagctggccggttacgtgaagaaggaaaagagtatattgttcaagatggcgatatcatggaattccgtttcaatgtc

SEQ ID NO: 5130 - protein, 329 aa, Streptococcus agalactiae
MVEVPDERLQKLTELITPKKTVPTTFEFTDIAGIVKGASKGEGLGNKFLANIREVDAIVHVVRAFDDENVMREQGREDAFVDPIADIDTINLELILADLESINKRYARVEKMARTQKDKESVAEFNVLQKIKPVLEDGKSARTIEFTEEEAKVVKGLFLLTTKPVLYVANVDEDKVADPDDIDYVNQIRAFAETENAEVVVISARAEEEISELDDEDKLEFLEAIGLTESGVDKLTRAAYHLLGLGTYFTAGEKEVRAWTFKRGIKAPQAASIIHSDFERGFIRAVTMSYDDLIQYGSEKAVKEAGRLREEGKEYIVQDGDIMEFRFNV

SEQ ID NO: 5131 - DNA, 1113 bp, Streptococcus pyogenes
atggctttaacagcaggtattgtaggcttaccaaatgttggtaaatcaaccttatttaacgcaattacaaaagcaggagcagaagctgctaattatccttttgcgactattgatcccaatgttggtatggtagaggttccagatgagcgtctgcaaaaattgacagaattgattacacctaaaaaaacagttccgacaacctttgaatttactgatattgcaggtatcgttaaaggtgcttctagaggggaaggtctaggaaataaatttttagctaatattcgtgaaatcgatgctattgttcatgtggtacgtgcttttgatgatgaaaatgtcatgcgtgaacaaggtcgtgaggatgctttcgttgatcctatagcagatattgacactattaatcttgaattaatcttagctgatttagagtcaatcaataaacgttatgcgcgtgttgaaaaaatggcacgaactcaaaaagataaagaatcagtagcagagtttaatgttttgcaaaagattaaacctgttttggaagatgggaaatcagctaggacaattgagtttacagaagatgaagcaaaagttgttaaaggtctctttttattaacaactaaacctgttttatatgtagctaatgtcgatgaagataaagttgctaatccagatggtattgattatgtcaaacaaattcgtgactttgcagctactgaaaatgctgaagtagttgttatctcagcgcgtgcagaagaagaaatttcagagcttgacgatgaggataaagaagaatttttggaagctatcggtcttactgaatcaggcgttgataaattaaccagagcagcttatcatctcttaggccttggaacctattttacagcaggtgaaaaagaggttcgtgcttggacgtttaagcgtggtataaaagctccacaagctgctggtattatccattcagattttgaaagaggttttattcgtgcagtaaccatgtcttatgatgatctaatgacctacggttcagaaaaagccgtcaaagaagctggacgcttgcgtgaagaaggaaaagaatatgttgtccaagatggggacatcatggaattcagatttaatgtg

SEQ ID NO: 5132 - protein, 371 aa, Streptococcus pyogenes
MALTAGIVGLPNVGKSTLFNAITKAGAEAANYPFATIDPNVGMVEVPDERLQKLTELITPKKTVPTTFEFTDIAGIVKGASRGEGLGNKFLANIREIDAIVHVVRAFDDENVMREQGREDAFVDPIADIDTINLELILADLESINKRYARVEKMARTQKDKESVAEFNVLQKIKPVLEDGKSARTIEFTEDEAKVVKGLFLLTTKPVLYVANVDEDKVANPDGIDYVKQIRDFAATENAEVVVISARAEEEISELDDEDKEEFLEAIGLTESGVDKLTRAAYHLLGLGTYFTAGEKEVRAWTFKRGIKAPQAAGIIHSDFERGFIRAVTMSYDDLMTYGSEKAVKEAGRLREEGKEYVVQDGDIMEFRFNV

SEQ ID NO: 5133 - DNA, 585 bp, Streptococcus agalactiae
atggagaagataatggtaaaaatgattgttggattaggaaatccaggaagtaaatataatgatacaaaacataatattggatttatggctgttgacagaattgtaaaagaccttgacgtcaactttacagaagataaaaattttaaagcagagataggtagtgattttatcaacggtgaaaaaatttattttatcaaaccgactacttttatgaataacagtggtattgctgtaaaagccctgcttacttactacaacatttctattaaggatatgattatcatatatgatgatttagacatggaagtcggtaaaatacgttttcgtcaaaaaggatctgctgggggacataatggtatcaagtctattattgctcatttaggtactcaagaatttgatcgtattaaagtaggtataggacgtccgaatggacgtatgacagttattaatcatgttctagggaaatttgataaaaatgatgaaattatgatattaaatacccttgataaggttgacaatgctgtcaattattatttacagacgaatgattttcaaaaaacaatgcagaaatacaacggtttaaaa

SEQ ID NO: 5134 - protein, 195 aa, Streptococcus agalactiae
MEKIMVKMIVGLGNPGSKYNDTKHNIGFMAVDRIVKDLDVNFTEDKNFKAEIGSDFINGEKIYFIKPTTFMNNSGIAVKALLTYYNISIKDMIIIYDDLDMEVGKIRFRQKGSAGGHNGIKSIIAHLGTQEFDRIKVGIGRPNGRMTVINHVLGKFDKNDEIMILNTLDKVDNAVNYYLQTNDFQKTMQKYNGLK

SEQ ID NO: 5135 - DNA, 612 bp, Streptococcus pyogenes
ttggaagaacattccagcccttttggcattttagaaagagaaaatatggtaaaaatgattgttggtctgggaaatccaggctctaaatatgaaaaaacaaagcacaatattggttttatggctattgacaatattgtcaagaaccttgacgttacctttacagatgataaaaattttaaagcacagataggaagtacttttattaatcatgaaaaagtttactttgtgaaacctactacttttatgaataatagcggcatagcagtaaaagcattactaacctactataatattgacataacagatttaattgttatctatgatgatttagacatggaagtcagtaaattacgtttacgtagtaagggttcagcaggaggacataatggcattaagtcaatcattgcccacattggaactcaggaatttaaccgaatcaaagttggtattggacgacctttaaaaggtatgactgttattaaccatgtgatgggccaattcaataccgaagataatattgctatttcgttaactcttgacagagttgtcaatgctgtcaagttttatttacaagaaaatgattttgaaaaaacaatgcagaaatttaatgga

SEQ ID NO: 5136 - protein, 204 aa, Streptococcus pyogenes
LEEHSSPFGILERENMVKMIVGLGNPGSKYEKTKHNIGFMAIDNIVKNLDVTFTDDKNFKAQIGSTFINHEKVYFVKPTTFMNNSGIAVKALLTYYNIDITDLIVIYDDLDMEVSKLRLRSKGSAGGHNGIKSIIAHIGTQEFNRIKVGIGRPLKGMTVINHVMGQFNTEDNIAISLTLDRVVNAVKFYLQENDFEKTMQKFNG

SEQ ID NO: 5137 - DNA, 3495 bp, Streptococcus agalactiae
atgaatattatagaattatttagccaaaataaagtggtgcggacatggcactctggattagtaactaatagtcgccaattagttatggggttttcaggagcaagtaaagctattgccatagcatcagcctacgagaagttatctaaaaaaattatggtagtcactgccactcaaaccgattctgataaattatcaagtgatatatcaagtttaattggagaagataacgtttatcaattttttgctgatgacgttcctgcagcagagtttattttctcttcattagataaatcaatttcacgactcagtgccctgaggtttctaaaagatccagaaaaaaacggtgttttgattactagtatcagtggtttaaggttactattaccaaatccggaagttttctcgaaaagtcaatataagtttgaaatcggtcaagaatgttatttagataaattgtgtaagaacctagtcaatttaggttatcagaaagtttctcaagtatttagtcctggtgaatttagccaaagaggagatattttagatatttttgagatgacacaagaatatccttatcgcttggaattcttcggagatgaaatagatggcatcaggcagtttgatattgacactcaaaagtctcttaaacaattagagtcagtacagatttcgccagcagatgatattattttacaagatgcagatttcgagcgtgcaaagaaaaaacttgagggctatctagtaacagctagtgaggtacaacgcacctatttgagcgaggttttatctacaactgagaatcattttaagcactcagatattcgtcgttttctaagtatcttttatgaaaaagaatggggaatattagactatattcctgagggaactccactttttgttgatgattttcaaaaaattgtagatcgaaatgctaagttagatttagaaatagctagccttctgacggaagatttacaacaaggcaagtctcattctagtttgaactatttttcagatccttataagcaattaagacaataccaaccagcaaccttcttttcaaatttccacaaaggattaggaaatctgaaatttgataaacttcatcattttactcaatatggaatgcaagaattttttaatcaatttccattgttggtcgatgaaatcaatcgttataagaaatctggagcgacagtactgttgcaagtagattctcaaaaaggtttaaatctccttcaagaaaatttaaaagaatatgggttagatttaatcatttcagataaaaacgatatcgttcaaaaggagtcacaacttattgttgggcatctttcaaatggtttttattttgcagatgagaaaattgttctgattactgaacgtgagatttatcataggcgtgttaaaaggaaaattagacgcagtaatattagtaatgcagaacgtctaaaagattataatgaactttcagttggcgattatgttgttcataatgttcatggcgtaggaaaatttttaggtattgaaacaattgagatacaaggtattcatcgtgattatctgactattcaatatcaaaatgctgatcgtatctctatccccgtagaacaaattgaacttctaacaaaatatgtctctgcagatggcaaagagcctaaaattaatacgttaaatgatggtcgcttcaaaaaagcaaaacagagagttgcaaagcaagtagaagatattgctgatgatttgttgaaactttatgcagagcgtagtcaattacaaggatttgcattttctcctgacgataatatgcaaaatgactttgataatgattttgcatatgtagagacagaggatcaattgcggtctataaaagaaattaaacaggatatggaaggtaatcgtccgatggatcgattattggttggagacgttggttttggtaagacagaggttgctatgcgtgcggctttcaaagctgtcaatgaccataaacaagttgttgttttagtcccaacaacagttctagcccagcagcattttgaaaattttaaagaacgttttagcaattatcctgttacagttgatgtacttagtcgttttcgtagcaaaaaagaacaaacagatacactaaaaagattatctaagggccaagttgatattattattggaacacatcgacttctctctcaagatgttgtattttcggatttagggttaatagttattgatgaggaacagcgatttggtgtaaagcataaagaaaagttaaaagaattaaaaacaaaagttgatgtattaactttgacagcgaccccaatacctagaacattacatatgtcaatgcttggcattagagacttatcagtcattgaaacacctccaactaatcgttatcctgtgcagacttacgttttggagacaaatcctggtttagttagagaagctattattcgtgagatagacagaggaggacaggttttttatgtttacaataaagttgacactattgatcagaaagtttcagaacttcaggagttagtaccagaagctagtattggttttgttcatggtcaaatgtctgaaattcaattagaaaatacattaatagactttatcaatggagattacgatgttttagttgcaacgacaataattgagacaggagtcgatatttcaaatgttaataccctctttgttgaaaatgcagatcatatgggcttgtcaaccctttatcaattaagaggccgtgtgggtagaagtaatcgcattgcttatgcttaccttatgtacagacctgataaagttttaacagaaatttctgagaaaagactagatgcaatcaaagggtttacagaattgggatctggttttaaaatagcgatgcgtgatttatctatacgtggtgcaggaaatattttaggagcttcacaaagtggttttattgattcggttggattcgagatgtattcacagcttctagagcaagcgattgccaccaaacaagggaaatcattaattcgtcaaaaaggtaatgctgaattagccttacaaattgacgcctatttaccagcagaatatatatcagatgagcgccaaaaaatagaaatatataagcgtattcgtgaattagaaactagggctgattatgaagccttacaagatgagttaatagatcgttttggagaatatcctgatcaagttgcataccttttagaaataggacttttaaaagcttatctggaccttgcctttactgaattagtagaaagaaaaggtaatgaaataagcatcctatttgaaaaagcatctttgaagtattttttaactcaagattattttgaagcactatcaaaaactcaacttaaggctagaattagcgaaacaaatggtaagatggaagttgtttttaatatcaaacataagaaaaattatgaaattattgaagaacttctaaaatttgccgaatgttttatcgagattaagtcacgtaaaccagtagaagaa

SEQ ID NO: 5138 - protein, 1165 aa, Streptococcus agalactiae
MNIIELFSQNKVVRTWHSGLVTNSRQLVMGFSGASKAIAIASAYEKLSKKIMVVTATQTDSDKLSSDISSLIGEDNVYQFFADDVPAAEFIFSSLDKSISRLSALRFLKDPEKNGVLITSISGLRLLLPNPEVFSKSQYKFEIGQECYLDKLCKNLVNLGYQKVSQVFSPGEFSQRGDILDIFEMTQEYPYRLEFFGDEIDGIRQFDIDTQKSLKQLESVQISPADDIILQDADFERAKKKLEGYLVTASEVQRTYLSEVLSTTENHFKHSDIRRFLSIFYEKEWGILDYIPEGTPLFVDDFQKIVDRNAKLDLEIASLLTEDLQQGKSHSSLNYFSDPYKQLRQYQPATFFSNFHKGLGNLKFDKLHHFTQYGMQEFFNQFPLLVDEINRYKKSGATVLLQVDSQKGLNLLQENLKEYGLDLIISDKNDIVQKESQLIVGHLSNGFYFADEKIVLITEREIYHRRVKRKIRRSNISNAERLKDYNELSVGDYVVHNVHGVGKFLGIETIEIQGIHRDYLTIQYQNADRISIPVEQIELLTKYVSADGKEPKINTLNDGRFKKAKQRVAKQVEDIADDLLKLYAERSQLQGFAFSPDDNMQNDFDNDFAYVETEDQLRSIKEIKQDMEGNRPMDRLLVGDVGFGKTEVAMRAAFKAVNDHKQVVVLVPTTVLAQQHFENFKERFSNYPVTVDVLSRFRSKKEQTDTLKRLSKGQVDIIIGTHRLLSQDVVFSDLGLIVIDEEQRFGVKHKEKLKELKTKVDVLTLTATPIPRTLHMSMLGIRDLSVIETPPTNRYPVQTYVLETNPGLVREAIIREIDRGGQVFYVYNKVDTIDQKVSELQELVPEASIGFVHGQMSEIQLENTLIDFINGDYDVLVATTIIETGVDISNVNTLFVENADHMGLSTLYQLRGRVGRSNRIAYAYLMYRPDKVLTEISEKRLDAIKGFTELGSGFKIAMRDLSIRGAGNILGASQSGFIDSVGFEMYSQLLEQAIATKQGKSLIRQKGNAELALQIDAYLPAEYISDERQKIEIYKRIRELETRADYEALQDELIDRFGEYPDQVAYLLEIGLLKAYLDLAFTELVERKGNEISILFEKASLKYFLTQDYFEALSKTQLKARISETNGKMEVVFNIKHKKNYEIIEELLKFAECFIEIKSRKPVEE

SEQ ID NO: 5139 - DNA, 3501 bp, Streptococcus pyogenes
atggatattttagaattatttagtcagaataagaaagtccaatcctggcactctggattaaccaccttaggaagacaactggtaatggggttatcgggttcaagtaaaacattggctatagcttccgcttatttagatgatcaaaaaaaaatagttgtggttacatcaactcaaaatgaggttgaaaaattagccagcgatttatctagtttacttgatgaagaacttgttttccaattttttgcagacgatgtggctgcagcggaatttatctttgcgtcaatggataaagctctatcaagaatagaaaccctgcaatttttaaggaatcctaaatctcagggcgttttaattgttagtttatcaggcttaagaattttattgccaaacccagatgtttttacaaagagtcagattcaactaacagttggagaagattatgatagtgatactcttactaaacaactgatgacaattggctatcagaaggtctcacaggttattagtccaggagaatttagccgtcgaggggatattttagatatctatgagattacacaagaattgccttatcgattggaattttttggcgatgatattgatagtattaggcaatttcatccagaaactcaaaaatcttttgaacaactagaaggtatttttattaatccagcaagtgatcttatttttgaggttagtgattttcaacgtggcattgagcaattagaaaaggctctacaaacagcacaagatgataaaaaatcttatttagaagatgtattagctgtttcaaaaaacggttttaaacataaggatatccgtaaatttcaatcattattttatgaaaaagagtggtcattattagattatattcctaagggaacgccaatcttttttgatgattttcaaaaactagttgataaaaatgcaagatttgatttagagattgctaatctcttgacagaagatttacagcaaggaaaggctctttccaatcttaactactttacagataattatcgagagcttaggcactataagccagcgaccttcttttcaaattttcataagggacttggaaatatcaaatttgatcagatgcatcagctaactcagtatgccatgcaggaattttttaatcaatttcctttgttgattgatgagattaaacggtatcaaaaaaatcaaacaacggttattgtacaggtagagtctcagtatgcttacgaacgacttgaaaaatcttttcaagattaccaatttcgccttcctttagtgagtgctaatcaaattgtttcacgtgaatcacaaattgtaattggagctatctccagtggtttttattttgctgatgaaaagttagcgttaatcacagagcatgaaatttatcataaaaagatcaaacgacgcgctagacgatctaatattagcaatgctgagcgtttgaaagattacaatgagttagcagtaggtgattacgtggttcataatgtccatggtatcggtcgctttcttggaattgaaacgattcagattcagggaatccatcgagattatgttactattcaatatcaaaattcagaccgtatttctcttccaattgaccaaattagtagcttatcaaagtacgtttctgctgatggaaaagaacctaaaattaataaactcaatgatggtcgttttcaaaagacaaagcaaaaggtcgctagacaagtagaggatattgctgatgaccttctaaaattatatgctgaaagaagtcagcaaaaaggattttcattttcaccagatgatgacttgcagcgcgcttttgatgatgattttgcttttgtagaaacagaagatcaacttaggtctataaaggaaattaaagctgatatggagagcatgcagcctatggatcgtcttttagtaggcgatgtaggatttggtaagacagaagtagctatgagggcagcctttaaagcggtgaatgatcacaaacaagtagctgtcttagttccaaccacagtcttggcccagcagcattatgaaaacttcaaagcacgctttgaaaattaccctgttgaggttgacgtcttaagtcgtttccgtagtaaaaaagagcaagctgaaacactagaacgtgtacgaaaaggtcaaattgacattattatcggaacccatcgactcctatcaaaagatgtggtcttttctgatttaggattgattgtgattgatgaggaacaacggtttggtgttaagcataaagaaactttaaaggaattaaaaactaaggttgacgtcttaaccttaacagctactccgattcctagaaccttacacatgtctatgttaggtatccgagatttatcggttattgagaccccaccaaccaatcgttatcctgttcaaacctatgttttggaaaataatccaggtctcgttagagaagctatcattcgtgaaatggatcgcggaggacaaattttttacgtttacaataaagttgacactattgaaaagaaagttgcagagctacaagaattagtcccagaagcttctataggttttgttcatgggcaaatgagtgaaattcaacttgaaaataccttgattgactttataaatggtgattatgatgtccttgtggctacaacaatcatcgaaacaggagttgacatttctaatgtaaacactttgtttattgagaatgctgatcatatgggattgtcaactttatatcaactacgagggcgcgtcggaagaagtaatcgtattgcttatgcttacctgatgtatcgtcctgataaggtcctaacagaggtttctgaaaagcgtttagaggctattaaaggctttactgaattaggttcaggcttcaagattgctatgcgagatttgtctatacgaggagcaggtaatattttaggggcttctcagagtggctttattgattcggtcggttttgaaatgtattctcagttattggaacaggctattgctagcaagcagggaaaaacgactgttcgtcaaaaaggcaatactgaaatcaatcttcagattgatgcctatttaccagatgattatattgcagatgagcgccaaaaaattgacatttacaagcgtattcgagaaattcaatcaagagaagattatctcaatttgcaagatgagcttatggatcgttttggagagtatcctgatcaagttgcctatttgttagagatagctctgctaaaacattatatggacaatgcctttgcggaattagttgaacgcaaaaataatcaggtcattgttcgatttgaagtaacttctttaacttatttcttgactcaggattatttcgaagccttatcgaaaacccatcttaaagctaaaattagtgaacatcaggggaaaatcgatatcgtctttgacgttcgccatcaaaaagattatagaattttagaagaattgatgttatttggagaaaggcttagtgagataaaaatcagaaaaaacaattcagtttttaaa

SEQ ID NO: 5140 - protein, 1167 aa, Streptococcus pyogenes
MDILELFSQNKKVQSWHSGLTTLGRQLVMGLSGSSKTLAIASAYLDDQKKIVVVTSTQNEVEKLASDLSSLLDEELVFQFFADDVAAAEFIFASMDKALSRIETLQFLRNPKSQGVLIVSLSGLRILLPNPDVFTKSQIQLTVGEDYDSDTLTKQLMTIGYQKVSQVISPGEFSRRGDILDIYEITQELPYRLEFFGDDIDSIRQFHPETQKSFEQLEGIFINPASDLIFEVSDFQRGIEQLEKALQTAQDDKKSYLEDVLAVSKNGFKHKDIRKFQSLFYEKEWSLLDYIPKGTPIFFDDFQKLVDKNARFDLEIANLLTEDLQQGKALSNLNYFTDNYRELRHYKPATFFSNFHKGLGNIKFDQMHQLTQYAMQEFFNQFPLLIDEIKRYQKNQTTVIVQVESQYAYERLEKSFQDYQFRLPLVSANQIVSRESQIVIGAISSGFYFADEKLALITEHEIYHKKIKRRARRSNISNAERLKDYNELAVGDYVVHNVHGIGRFLGIETIQIQGIHRDYVTIQYQNSDRISLPIDQISSLSKYVSADGKEPKINKLNDGRFQKTKQKVARQVEDIADDLLKLYAERSQQKGFSFSPDDDLQRAFDDDFAFVETEDQLRSIKEIKADMESMQPMDRLLVGDVGFGKTEVAMRAAFKAVNDHKQVAVLVPTTVLAQQHYENFKARFENYPVEVDVLSRFRSKKEQAETLERVRKGQIDIIIGTHRLLSKDVVFSDLGLIVIDEEQRFGVKHKETLKELKTKVDVLTLTATPIPRTLHMSMLGIRDLSVIETPPTNRYPVQTYVLENNPGLVREAIIREMDRGGQIFYVYNKVDTIEKKVAELQELVPEASIGFVHGQMSEIQLENTLIDFINGDYDVLVATTIIETGVDISNVNTLFIENADHMGLSTLYQLRGRVGRSNRIAYAYLMYRPDKVLTEVSEKRLEAIKGFTELGSGFKIAMRDLSIRGAGNILGASQSGFIDSVGFEMYSQLLEQAIASKQGKTTVRQKGNTEINLQIDAYLPDDYIADERQKIDIYKRIREIQSREDYLNLQDELMDRFGEYPDQVAYLLEIALLKHYMDNAFAELVERKNNQVIVRFEVTSLTYFLTQDYFEALSKTHLKAKISEHQGKIDIVFDVRHQKDYRILEELMLFGERLSEIKIRKNNSVFK

SEQ ID NO: 5141 - DNA, 270 bp, Streptococcus agalactiae
gtgagattagacaagtatctaaaagtgtcgcgtatcattaagcgtcgtcccgttgctaaagaagttgcagacaaaggacgtgtcaaggtgaatggcgtattagcaaagtcatcaactgacctaaagcttaatgaccaagttgaaattcgttttggtaataaattgttgaccgttaaagtattagaaatgaaagatagcactaagaaagaagatgctatcaaaatgtatgaaattattaatgaaacaaggatagaaacagatgagcaagcc

SEQ ID NO: 5142 - protein, 90 aa, Streptococcus agalactiae
MRLDKYLKVSRIIKRRPVAKEVADKGRVKVNGVLAKSSTDLKLNDQVEIRFGNKLLTVKVLEMKDSTKKEDAIKMYEIINETRIETDEQA

SEQ ID NO: 5143 - DNA, 294 bp, Streptococcus pyogenes
atgaagaggattgtaggagaaattatgagactagataaatatctaaaggtatcgcgccttattaaacgtcgttcagtagcaaaagaagttgcggataagggacgaattaaagttaatgggatacttgctaaaagttcaacgaatataaaactaaatgatcacattgaaattagttttggaaataaattactgacagtaagagtcattgaaataaaagatagtacaaaaaaagaagatgctcttaagatgtatgagataatcagtgaaacaaggataacattaaatgaagaagcc

SEQ ID NO: 5144 - protein, 98 aa, Streptococcus pyogenes
MKRIVGEIMRLDKYLKVSRLIKRRSVAKEVADKGRIKVNGILAKSSTNIKLNDHIEISFGNKLLTVRVIEIKDSTKKEDALKMYEIISETRITLNEEA

SEQ ID NO: 5145 - DNA, 369 bp, Streptococcus agalactiae
atgagcaagcctaatgttgttcagttaaataatcaatatattaacgatgagaatctaaaaaaacgttacgaagctgaggagttacgccgaaaaaatcgtttaatgggttgggttcttatttttgtcatgcttttatttattttacccacttataatttagttaagagttacagaactttacaagaacgtcgtcaagaagttgtaaaattaacgaaagactatcagacattaactaatagaactgagaaccagaagttgctagcaaaacaactaaaaaatccagattacgttcaaaaatatgctcgagctaagtattatttctctaagaccggcgaaatgatttacccattaccagaccttttaccaaaa

SEQ ID NO: 5146 - protein, 123 aa, Streptococcus agalactiae
MSKPNVVQLNNQYINDENLKKRYEAEELRRKNRLMGWVLIFVMLLFILPTYNLVKSYRTLQERRQEVVKLTKDYQTLTNRTENQKLLAKQLKNPDYVQKYARAKYYFSKTGEMIYPLPDLLPK

SEQ ID NO: 5147 - DNA, 369 bp, Streptococcus pyogenes
atgaagaagcctagtattgttcaattaaataatcattatattaagaaagagaatctcaaaaaaaaatttgaagaagaagaatctcaaaaaagaaatcgttttatgggatggatccttgtaagtatgatgtttttatttattttgccaacttataatcttgtcaaaagttatgttgattttgaaaagcaaaatcaacaggtggttaaattaaaaaaagagtataatgaattgtcagagagtacaaaaaaagaaaaacaattagcagaacgactaaaagatgataattttgtcaaaaaatatgctagggcaaaatactatttatcgcgtgaaggagaaatgatttatcctattccaggactattaccaaaa

SEQ ID NO: 5148 - protein, 123 aa, Streptococcus pyogenes
MKKPSIVQLNNHYIKKENLKKKFEEEESQKRNRFMGWILVSMMFLFILPTYNLVKSYVDFEKQNQQVVKLKKEYNELSESTKKEKQLAERLKDDNFVKKYARAKYYLSREGEMIYPIPGLLPK

SEQ ID NO: 5149 - DNA, 132 bp, Streptococcus agalactiae
atgaataatttaattgaaacaatagaacattttctagcctactcggatgacaaactagaagaattagctgataagaactatcaacttaggcaaacaattgtagaaaaagaaaagattgagagcagagaaaag

SEQ ID NO: 5150 - protein, 44 aa, Streptococcus agalactiae
MNNLIETIEHFLAYSDDKLEELADKNYQLRQTIVEKEKIESREK

SEQ ID NO: 5151 - DNA, 1284 bp, Streptococcus agalactiae
atgaagaaagttttaaccttcttattatgtagcttatattttgtatcaatcccagctataagtaccgaggagccattaacgctttctcaaaatagacgatacgccttaactcagacagttgtggataaggaaatgtattttgatgctattccagagagaccaactacaaaaattgaaataagcagttttcaagatgaagctttaaccataacaggagagactttagttccaaatactttattgtcgattgtttctcttacaattaattcaaatggaattccagtatttactttgtccaatggacagttcataaaggctagtcgtgaagctatttttaatgatttagtttctaagcagcaatctgtctcattggattattggttaaaaccttcttttgtgacttatgaagcaccttacacaaatggtgttagtgaagttaaaaataatttaaaaccttattccagagtgcatttagtagaacaagcagaaacagaacatggtatttattataaaacggacagtggtttttggatatcagtagaagatctatcggttgctgataatcgtatggctaaggttcaagaagtattattggaaaaatataataaagataaatatggtatatacatcaaacaattaaatacacagacagtagctggtattaatattgataggtcaatgtactctgcaagtattgcaaaattagcaacactttatgctagccaagagcaagtaaaattaggaaaactgtcattggacagcaaatttgaatacaaagataatgttaatcaatttcctaatagctatgatccaagtggtagtgggaaattagagaaaaaagctgatcataaattatataccgttaaggagttacttgaagcaactgccaaggaatcagataatgttgcaacaaatatgctaggttattatgtcaataatcaatatgattcaatgtttcaaacacaagtagacacaatttctggtatgcactgggatatgaaaaaacgccagatttctccacaagctgcgggtaaaatgatggaagcaatttattatcaaaatggagatattgttaattacctatcaaagactgattttgataatacaagaatccctaaaaatataccagttaaagtagcacataaaattggagatgcttatgactacaaacatgatgcggctattgtttatgcagaacaaccttttattatgattatctttacggataaatcatcttacgatgatatcactaagattgctgacgacgtttaccaggttttaaaa

SEQ ID NO: 5152 - protein, 428 aa, Streptococcus agalactiae
MKKVLTFLLCSLYFVSIPAISTEEPLTLSQNRRYALTQTVVDKEMYFDAIPERPTTKIEISSFQDEALTITGETLVPNTLLSIVSLTINSNGIPVFTLSNGQFIKASREAIFNDLVSKQQSVSLDYWLKPSFVTYEAPYTNGVSEVKNNLKPYSRVHLVEQAETEHGIYYKTDSGFWISVEDLSVADNRMAKVQEVLLEKYNKDKYGIYIKQLNTQTVAGINIDRSMYSASIAKLATLYASQEQVKLGKLSLDSKFEYKDNVNQFPNSYDPSGSGKLEKKADHKLYTVKELLEATAKESDNVATNMLGYYVNNQYDSMFQTQVDTISGMHWDMKKRQISPQAAGKMMEAIYYQNGDIVNYLSKTDFDNTRIPKNIPVKVAHKIGDAYDYKHDAAIVYAEQPFIMIIFTDKSSYDDITKIADDVYQVLK

SEQ ID NO: 5153 - DNA, 1284 bp, Streptococcus pyogenes
atgagaaaattattagcggctatgttaatgactttttttctgactcctttaccagtgattagtacagaaaaaaaacttatattttcaaaaaatgctgtttatcaattgaaacaagatgtcgttcaatcaacacaattctataatcaaataccctctaatccaaatctttatcaagaaacgtgtgcctataaagacagtgatttaactctaccagcaggaagattaggtgtaaatcaaccattacttattaaatcgcttgtgcttaacaaagaatctttaccggtttttgagttagctgatggtacctatgttgaggctaatcgacaattgatttatgacgatattgtacttaatcaagtagatatagatagctatttttggacacaaaagaaacttaggctttattcagccccttatgttttaggtacgcaaacaattccttcttcttttttatttgctcaaaaagttcatgccactcaaatggcacaaacaaaccatggaacttattatcttattgatgataagggctgggcatcacaagaagatctagttcaatttgataaccgcatgttaaaagtccaggaaatgctcttacaaaaatataataacccaaattattcaatttttgtaaagcaactcaacacacaaacaagtgctggtattaatgctgataaaaaaatgtatgctgcaagtatctcgaagttagcaccactttatattgttcaaaaacaattacaaaaaaagaaattagcagagaataaaactttgacttatactaaagatgttaatcatttttatggagactatgatccattgggaagtggtaaaattagtaaaatagctgataataaagattatcgtgttgaagacctactgaaagctgtagcacaacaatcggataatgtagcaactaatattttaggttattatctatgtcatcagtatgataaagctttccgctcagagataaaagctttatcaggtatcgattgggatatggagcagcgcttattaacttctcgttcagctgcaaatatgatggaagctatttatcatcaaaaaggccaaattatttcttacctttcaaataccgaatttgatcaacaacgtatcacaaaaaatattactgttccagttgcacataaaattggtgatgcttatgattataaacatgacgttgctattgtttacggtaatactccatttattttgtctatttttacaaataaatcaacctatgaagatattacggctattgcagatgacgtttatggtattttaaaa

SEQ ID NO: 5154 - protein, 428 aa, Streptococcus pyogenes
MRKLLAAMLMTFFLTPLPVISTEKKLIFSKNAVYQLKQDVVQSTQFYNQIPSNPNLYQETCAYKDSDLTLPAGRLGVNQPLLIKSLVLNKESLPVFELADGTYVEANRQLIYDDIVLNQVDIDSYFWTQKKLRLYSAPYVLGTQTIPSSFLFAQKVHATQMAQTNHGTYYLIDDKGWASQEDLVQFDNRMLKVQEMLLQKYNNPNYSIFVKQLNTQTSAGINADKKMYAASISKLAPLYIVQKQLQKKKLAENKTLTYTKDVNHFYGDYDPLGSGKISKIADNKDYRVEDLLKAVAQQSDNVATNILGYYLCHQYDKAFRSEIKALSGIDWDMEQRLLTSRSAANMMEAIYHQKGQIISYLSNTEFDQQRITKNITVPVAHKIGDAYDYKHDVAIVYGNTPFILSIFTNKSTYEDITAIADDVYGILK

SEQ ID NO: 5155 - DNA, 1272 bp, Streptococcus agalactiae
atgtataacactattttgaaagataccttatccaaagggttatttaccgctcatcagaaagttctaattgctgtttctggtggcattgattcaataaatttgttgcaatttttataccagtatcaaaaagagttatcgattagtattggtattgcacacataaatcatggacagcgaaaagaatcagaaaaagaagaagaatatatcagacagtggggacagatacatgatgtccctgtctttatctcttattttcaaggaatattttcagaagatagagcacgtaaccatcgctacaattttttttcaaaagttatgcgtgaagaaggttacacggctttagtaacagctcaccatgctgatgatcaagctgaaactgtatttatgagaattttaagaggaagcaggctacgctatttatcagggattaagcaagtgagtgcttttgcaaacggtcaattgattagaccatttcttccatataaaaaggagttattaccaaatatttttcattttgaagatgctagcaacgcttcgtctgattatttaagaaatcgaataagaaacgtctactttcctgctttggaaagagaaaataatcaattgaaagattctctcataactctctctgaggaaacagagtgtttattcacggctttaacagacctaacaaggagcatcgaagtaacaaactgctatgattttttaaggcaaactcattctgtccaagaatttttattgcaagattacattagcaaatttccagatttacaagtgagtaaagaacagttcagagtaatattaaaattgattagaactaaagccaatattgactatactattaaatcgggctattttcttcataaggattacgagagttttcatattacaaaaatccatcctaagacggatagttttaaggttgaaaaaagattagaattgcataatatacaaatattctcacaatatttattttcctatggaaaattcatttctcaagcagacattactattcctatttatgatacttctccgattattttaagaagaagaaaagaaggggataggatatttttaggaaatcacactaaaaaaattcgccgtctatttattgatgagaaaataactctaaaagagagagaagaagctgttattggggagcaaaataaagagttgatatttgtgattgttgcaggtagaacatatttgagaaaaccttctgaacatgatataatgaagggcaaactttatattgaaaatttagaaaaaagg

SEQ ID NO: 5156 - protein, 424 aa, Streptococcus agalactiae
MYNTILKDTLSKGLFTAHQKVLIAVSGGIDSINLLQFLYQYQKELSISIGIAHINHGQRKESEKEEEYIRQWGQIHDVPVFISYFQGIFSEDRARNHRYNFFSKVMREEGYTALVTAHHADDQAETVFMRILRGSRLRYLSGIKQVSAFANGQLIRPFLPYKKELLPNIFHFEDASNASSDYLRNRIRNVYFPALERENNQLKDSLITLSEETECLFTALTDLTRSIEVTNCYDFLRQTHSVQEFLLQDYISKFPDLQVSKEQFRVILKLIRTKANIDYTIKSGYFLHKDYESFHITKIHPKTDSFKVEKRLELHNIQIFSQYLFSYGKFISQADITIPIYDTSPIILRRRKEGDRIFLGNHTKKIRRLFIDEKITLKEREEAVIGEQNKELIFVIVAGRTYLRKPSEHDIMKGKLYIENLEKR

SEQ ID NO: 5157 - DNA, 1284 bp, Streptococcus pyogenes
atgatgacctatcaagaaatttttaatgaaataaaaaataaagcctactttaaaaatcatagacatgtgttaatagccgtatctggtggagtagattcaatgaatttattgcactttttatacctgtttcaagacaaattgaaaattcgtattggtattgctcatgttaatcacaaacaaagatcagaatcagattcagaagaagcttatttaaagtgttgggctaaaaaacatgacatacctatttatgtttctaattttgaaggaatattttcagaaaaagcagcacgtgattggcgctatgctttttttaagagtattatgttaaaaaataactattcagctttagtaacagctcaccattcagatgatcaagcagaaactattttgatgaggctaattagaggaagccgattgaggcacttgtcgggtataaaaagcgtgcaaccatttgccaatggtcaacttataagaccttttttaactttctcaaaaaaggacttgccagaaatttttcattttgaagattcttcaaatagagaattatcatttttaagaaatagagttagaaataattatttaccactgttaaagcaggaaaatcctaggttcattcagggattaaatcaattagcacttgaaaatagcttactttttcaagcttttaaggagctaacaaatcatattactaccactgatttaacagaatttaatgagcaatctaagtcaattcaatactttttgttacaagattatttagaaggttttccagatttagatttaaaaaaatctcaatttactcaattattgcaaattatccaaactgctaaacaaggctattattatctcaaaaaagactattatatattcattgataaattctcttttaaaattacaaaaatcgttcctaagactgagttagttaaagaagaaaaaatgttagaatacgatagtaacttatgctacagagattattatttttcatttatgccaaaaagtaacgaagatcaaggacaggtaagtatacctttatttagtttatcgtctattaaattaagaagtcgccaatctggagattatatttcttttggtcacttttcaaaaaaaataagacgtttatttatagatgaaaaattcacaatagctgaacgtcaaaatgctattattggagagcaagatgagcagattatatttgtattgataggtaataaaacttatttgagaaaagcttgtaaacatgatataatgttggctaaactgtatattgataaattagaaaaaggg

SEQ ID NO: 5158 - protein, 428 aa, Streptococcus pyogenes
MMTYQEIFNEIKNKAYFKNHRHVLIAVSGGVDSMNLLHFLYLFQDKLKIRIGIAHVNHKQRSESDSEEAYLKCWAKKHDIPIYVSNFEGIFSEKAARDWRYAFFKSIMLKNNYSALVTAHHSDDQAETILMRLIRGSRLRHLSGIKSVQPFANGQLIRPFLTFSKKDLPEIFHFEDSSNRELSFLRNRVRNNYLPLLKQENPRFIQGLNQLALENSLLFQAFKELTNHITTTDLTEFNEQSKSIQYFLLQDYLEGFPDLDLKKSQFTQLLQIIQTAKQGYYYLKKDYYIFIDKFSFKITKIVPKTELVKEEKMLEYDSNLCYRDYYFSFMPKSNEDQGQVSIPLFSLSSIKLRSRQSGDYISFGHFSKKIRRLFIDEKFTIAERQNAIIGEQDEQIIFVLIGNKTYLRKACKHDIMLAKLYIDKLEKG

SEQ ID NO: 5159 - DNA, 540 bp, Streptococcus agalactiae
atgcttgaaaatgatataaaaaaagttttatattcagaagaagatattattctgaaaacgaaagaattaggagctaaattaactgcagattatgcaggtaagaatccattattagtaggtgtattaaaggggtcagtgccttttatggctgagctattaaagcatattgatacacatgttgaaattgattttatggttgtttcaagctatcatggtggtacaactagtagtggagaagttaaaattttaaaagatgttgatactaacattgaaggaagagatgtaatctttattgaagacatcattgatactggacgtacattaaaataccttcgagatatgtttaagtatcgccaagctaactctgtcaaagttgcaaccctttttgataagccagaagggcgattggtagatattgatgctgattacgtttgttacgatatcccaaatgaatttattgtgggattcggtttagactatgctgaaaactatcgtaacttaccttatgttggtgtgttaaaagaagaaatttactcaaaa

SEQ ID NO: 5160 - protein, 180 aa, Streptococcus agalactiae
MLENDIKKVLYSEEDIILKTKELGAKLTADYAGKNPLLVGVLKGSVPFMAELLKHIDTHVEIDFMVVSSYHGGTTSSGEVKILKDVDTNIEGRDVIFIEDIIDTGRTLKYLRDMFKYRQANSVKVATLFDKPEGRLVDIDADYVCYDIPNEFIVGFGLDYAENYRNLPYVGVLKEEIYSK

SEQ ID NO: 5161 - DNA, 540 bp, Streptococcus pyogenes
atgctcgagcaagatattcaaaaaattctttactctgaaaatgatattattcggaaaactaaaaaattaggagaacaattaacaaaagattatcaagaaaaaaatccgcttatgattggtgtattaaaaggatcagttccttttatggcagaactaatgaaacacatcgatactcatgttgaaattgattttatggtagtatcaagttatcatggcggtacatctagcagtggtgaagttaaaattttaaaagatgtagataccaatattgaaggaagagatatcataattgttgaagatattattgacaccggtcgcaccttaaaatatttacgagatatgtttaagtaccgtaaagctaatactatcaaaattgcaacactgtttgataaacctgaaggtcgtgttgttaaaattgaagcagattatgtttgttacaatattccaaatgaatttatcgtaggctttggtttagattacgcagaaaattatcgcaatcttccttacgtaggtgtattaaaagaagaagtctattcaaaa

SEQ ID NO: 5162 - protein, 180 aa, Streptococcus pyogenes
MLEQDIQKILYSENDIIRKTKKLGEQLTKDYQEKNPLMIGVLKGSVPFMAELMKHIDTHVEIDFMVVSSYHGGTSSSGEVKILKDVDTNIEGRDIIIVEDIIDTGRTLKYLRDMFKYRKANTIKIATLFDKPEGRVVKIEADYVCYNIPNEFIVGFGLDYAENYRNLPYVGVLKEEVYSK

SEQ ID NO: 5163 - DNA, 1974 bp, Streptococcus agalactiae
atgaaaaataataaaaataatggttttctgaaaaattcctttatttacatattattgattattgcggttattacaacctttcaatactatttaaaaggaactagctctcaaaaccagcaaatttcttatacaaaacttgttaaacaattaaaagctggagaaattaagtctatctcataccagccaagtggtggtgttgttgaagttagtgggacatataagaaagccaaaacaattaaatcagctaatagttttacttttttaggtggtagtgttgctactaaagttacaggatttaattctgttatactaccaaatgactcttcaataaaatctcttgttagcgctgctgaagaaaataacactaatattcaggtcaaacatgaaagttcaagtgggacatggatttcttatattgccagttttttacctttagttatcatgattggtttcttcatgatgatgatgaaccaaggcggtggcggtggcgctcgtggtgccatgagctttggtaaaaataaagcaagatcatctagtaaagatgaggttaaagttcgattttcggatgttgctggagcagaggaagaaaagcaagaattaatagaagtcgttgacttccttaaagatcctaaacgatataaatctctaggtgcccgaattccagcaggggttctattagaaggacctccagggacaggtaaaaccctattagcaaaagctgttgccggtgaagcaggggttccattctttagtatttccggttcagattttgttgaaatgtttgtcggtgttggagctagtcgagtacgctctttgtttgaagatgctaaaaaagctgaacgtgctattattttcattgatgaaattgatgctgttggacgtcgacgtggagctggtatgggtggcggaaacgatgaacgtgaacaaacgctcaaccaacttttaattgaaatggatggttttgaaggaaacgaaagtattatcgttatcgctgctaccaaccgtagtgatgtgttagatcccgcattactgcgtccaggacgttttgatagaaaagttctagttggacaacctgatgtaaaaggtcgtgaagcaattctgagagtacatgctaaaaataaaccattagcagataatgttgacttaaaagtagtagctcaacaaaccccaggatttgttggtgctgatttggagaatgttctcaatgaagctgctttagttgctgcgcgacgaaataaaaaagttattgatgcttcagatattgatgaagcagaagaccgtgtaattgctggtccttctaaaaaagatcgtactatttctgaaagagaaagagctatggttgcttaccatgaagctgggcacacaattgtcggtttgattctttcaaatgcgcgagttgttcataaagttactatcgtaccacgtggtcgtgcaggtggatatatgattgctttacctaaagaagatcaaatgcttctttcaaaagatgatatgaaagagcaattagcaggtcttatgggaggacgtgtagcggaagaaattattttcaacgctcagacaacaggtgcctcaaatgacttcgaacaagccactgctatggcccgcgctatggtaactgaatatggtatgagcgagaaacttggaccagttcaatacgaaggcaaccacgcaatgatggctggtcaaatgtcacctgaaaaatcatattctgctcaaactgcacaacttattgatgatgaagttcgtcaccttcttaatgaagcacgtaataaggcagctgatattatcaacgaaaaccgtgatactcataaattaattgcagaagccctcttaaaatatgagactcttgatgctgctcagattaaatcgatttttgagacaggtaaaatgcctgagacagaaaatgatgaagataaagcaagagcgttatcatacgatgaaatcaaagaaaaaatgcaagaagaagataaaaaa

SEQ ID NO: 5164 - protein, 658 aa, Streptococcus agalactiae
MKNNKNNGFLKNSFIYILLIIAVITTFQYYLKGTSSQNQQISYTKLVKQLKAGEIKSISYQPSGGVVEVSGTYKKAKTIKSANSFTFLGGSVATKVTGFNSVILPNDSSIKSLVSAAEENNTNIQVKHESSSGTWISYIASFLPLVIMIGFFMMMMNQGGGGGARGAMSFGKNKARSSSKDEVKVRFSDVAGAEEEKQELIEVVDFLKDPKRYKSLGARIPAGVLLEGPPGTGKTLLAKAVAGEAGVPFFSISGSDFVEMFVGVGASRVRSLFEDAKKAERAIIFIDEIDAVGRRRGAGMGGGNDEREQTLNQLLIEMDGFEGNESIIVIAATNRSDVLDPALLRPGRFDRKVLVGQPDVKGREAILRVHAKNKPLADNVDLKVVAQQTPGFVGADLENVLNEAALVAARRNKKVIDASDIDEAEDRVIAGPSKKDRTISERERAMVAYHEAGHTIVGLILSNARVVHKVTIVPRGRAGGYMIALPKEDQMLLSKDDMKEQLAGLMGGRVAEEIIFNAQTTGASNDFEQATAMARAMVTEYGMSEKLGPVQYEGNHAMMAGQMSPEKSYSAQTAQLIDDEVRHLLNEARNKAADIINENRDTHKLIAEALLKYETLDAAQIKSIFETGKMPETENDEDKARALSYDEIKEKMQEEDKK

SEQ ID NO: 5165 - DNA, 1977 bp, Streptococcus pyogenes
atgaaaaataataaaaataatggttttgttaaaaattcttttatatatatattgatgattattgttgtcatcacaggatttcaattttatcttaagggaaccagcacacaaagccaacagattagttattccaaattaattaaacatcttaaggctggagatataaaatctttaagttatcagcctagcggtagtattattgaagttaaagggaaatatgagaaacctcaaaaagtgacagttaattcaggactatcatttttaggtggaagagcttcaacacaggtaacagagttctcatctttagtattacctagtgataccatcttgaaagaaatgacagcagcagctgataaaaatggaacagagcttacagttaagcaggaaagttcaagtggtacttggattaccttcttaatgagctttttacctattgttatttttgctgctttcatgatgatgatgatgaatcaaggtggtggaggagctcgtggtgctatgagtttcggcaaaaataaggcaaaatctcaatcaaaaggtaatgttaaagtgagatttacagacgttgctggtgccgaagaagaaaaacaagaattagtagaagttgttgattttttgaaaaatcctaaaaaatataaatcactaggagcacggattccagcgggagttcttctagaggggcctccaggtactggtaaaacattactagctaaagctgtagcaggtgaagctggagtgccatttttcagtatttcaggttcggattttgtcgaaatgtttgtcggtgtaggtgctagtcgtgttcgttctttatttgaggatgctaaaaaagctgagcgtgcgatcatctttatcgatgaaattgacgctgtaggtcgtcgtcgtggtgctggcatgggaggcggtaacgatgaacgagaacagacccttaaccaattactcattgaaatggatggttttgagggtaatgagaacattatcgttattgctgcaactaaccgtagtgatgttttagatccagctttactaagaccaggtcgttttgatcgtaaggttttagttggtcgccctgatgttaaaggacgtgaagccattttacgtgttcatgctaaaaataaaccacttgcaaatgacgttaatttgaaagtagtagcccaacagactccaggttttgtaggtgctgatcttgaaaatgttttaaatgaagctgcgttggttgctgctcgcagaaataaaattaaaattgatgctagtgatattgatgaagctgaagatcgtgttattgctggaccatcaaagaaagatcgcactatttcgcaaaaagagcgagaaatggttgcttatcacgaagctggtcatactattgttggtttagttttatctaatgcgcgtgtagttcacaaggtaactattgtacctcgtggacgagcaggtggttatatgatcgctcttccaaaagaagatcaaatgcttctttctaaagaagatctgaaagagcaattagcaggattgatgggtggtcgtgttgctgaagaaattgtttttaatgctcaaacatcaggtgcgtcaaatgactttgagcaagctactcagatagcaagggccatggttacggaatatggtatgagtgaaaagcttggaccagttcaatatgaaggtaaccatgcgatgatgccaggacagatctctcctgaaaaagcttactctgcccaaacagctcaaatgattgatgatgaggttcgtgaactcttaaatcaagctcgtaatcaagcagctgatatcatcaatgagaatcgagatactcataaattgattgctgaagctcttctcaaatatgaaactctagacgctgcacaaattaaatcaatttatgaaactggtaaaatgccagttgatttagaaactgatgataatgaagctcatgcgttatcttatgacgaaattaaaaataaaatgacagaatctgaatctgcagaa

SEQ ID NO: 5166 - protein, 659 aa, Streptococcus pyogenes
MKNNKNNGFVKNSFIYILMIIVVITGFQFYLKGTSTQSQQISYSKLIKHLKAGDIKSLSYQPSGSIIEVKGKYEKPQKVTVNSGLSFLGGRASTQVTEFSSLVLPSDTILKEMTAAADKNGTELTVKQESSSGTWITFLMSFLPIVIFAAFMMMMMNQGGGGARGAMSFGKNKAKSQSKGNVKVRFTDVAGAEEEKQELVEVVDFLKNPKKYKSLGARIPAGVLLEGPPGTGKTLLAKAVAGEAGVPFFSISGSDFVEMFVGVGASRVRSLFEDAKKAERAIIFIDEIDAVGRRRGAGMGGGNDEREQTLNQLLIEMDGFEGNENIIVIAATNRSDVLDPALLRPGRFDRKVLVGRPDVKGREAILRVHAKNKPLANDVNLKVVAQQTPGFVGADLENVLNEAALVAARRNKIKIDASDIDEAEDRVIAGPSKKDRTISQKEREMVAYHEAGHTIVGLVLSNARVVHKVTIVPRGRAGGYMIALPKEDQMLLSKEDLKEQLAGLMGGRVAEEIVFNAQTSGASNDFEQATQIARAMVTEYGMSEKLGPVQYEGNHAMMPGQISPEKAYSAQTAQMIDDEVRELLNQARNQAADIINENRDTHKLIAEALLKYETLDAAQIKSIYETGKMPVDLETDDNEAHALSYDEIKNKMTESESAE

SEQ ID NO: 5167 - DNA, 138 bp, Streptococcus agalactiae
atgcctgctgcaattagggatccagtaatgtcagatccccctcttgaaaaggtacaaatttggttatcttctgtgactccaaaaaatccagggataacaagaacctcattgtatagacataagttctcaatcttatca

SEQ ID NO: 5168 - protein, 46 aa, Streptococcus agalactiae
MPAAIRDPVMSDPPLEKVQIWLSSVTPKNPGITRTSLYRHKFSILS

SEQ ID NO: 5169 - DNA, 1350 bp, Streptococcus agalactiae
atgaaagtagtcaaatttggaggaagttctttagcatcttcccaacaattatacaaagtactaaatattatcaaatcagactacactagacggtttgttgtcgtttcagctccagggaaacgctacgaagaagacttaaaaatgacagatgctttgatacaatattatcaaaattatattaacggtaaagatattgttaaagaccaaacttggattatcaatcgttatcaagaaattattagtgatttgtctttaggaagcactattgcagaagaaattactcgctctatagagcagctagcttcacttcccatagaaaataatcagtttttatatgattgttttttagcagccggtgaagataacaacgcaaagttagttgcaacgttttttaatcaaaatgacattcctgcaagatatgttcatccaaacgaagcaggaattattgtaactaaagaaccatgtaatgcacgaattattccaggaagttatgataagattgagaacttatgtctatacaatgaggttcttgttatccctggattttttggagtcacagaagataaccaaatttgtaccttttcaagagggggatctgacattactggatccctaattgcagcaggcataaaagcagacctttatgagaacttcacagatgttgatggtatatttgcagcacatccaggtgtagttaagaaccctcacgctatccctgagcttacttataaagaaatgcgtgaattagcctatgcgggtttttcggttttacatgatgaagctttacttcctgcctatcgtggcagaatccctcttgttattaaaaatacaaataatccccaacagcctggtacaaaaatagttttaaagcatactcgtagtaacatagcagtaactgggatcgcttctgatagccgttttgctagcataaacgtatctaaatacttaatgaatagagaagtaggtttcggccgaaaagtactacaaattttagaggatttaaatattagttttgaacatatgccaactggcatagatgatctatccattgtcttacgtgaaaaagaattgacaccaatcaaagaacaagaaatcttaaattacctaactcgtaaactagaagtagattacgttgacatccaacacaatctatctacaatcgtaattgtaggtgaaaatatgaaaagtcagattggagtcactgcaacagcgacacaagccttatcaagagaaaaaatcaatatcaccatgatatcacaaggttcaagcgaagtctccattatgttcgttataaacagtaaggatgaaaaaagagctattaaagcactatatgaaacattcttccaaaaa

SEQ ID NO: 5170 - protein, 450 aa, Streptococcus agalactiae
MKVVKFGGSSLASSQQLYKVLNIIKSDYTRRFVVVSAPGKRYEEDLKMTDALIQYYQNYINGKDIVKDQTWIINRYQEIISDLSLGSTIAEEITRSIEQLASLPIENNQFLYDCFLAAGEDNNAKLVATFFNQNDIPARYVHPNEAGIIVTKEPCNARIIPGSYDKIENLCLYNEVLVIPGFFGVTEDNQICTFSRGGSDITGSLIAAGIKADLYENFTDVDGIFAAHPGVVKNPHAIPELTYKEMRELAYAGFSVLHDEALLPAYRGRIPLVIKNTNNPQQPGTKIVLKHTRSNIAVTGIASDSRFASINVSKYLMNREVGFGRKVLQILEDLNISFEHMPTGIDDLSIVLREKELTPIKEQEILNYLTRKLEVDYVDIQHNLSTIVIVGENMKSQIGVTATATQALSREKINITMISQGSSEVSIMFVINSKDEKRAIKALYETFFQK

SEQ ID NO: 5171 - DNA, 648 bp, Streptococcus agalactiae
atgtgtaaatataaagcaataatatttgatatggatggtgttctatttgacactgaattattttattataaaaggcgagagcgttttttaaaacaacatggaattacaattgaccatttaccaatgaatttttttattggaggaaatatgaagcaggtttggaaatctgttttaggtgatcaatatgatacctgggatattgataagctccaacaagattatagtcgctataaagaggataatcccttgccatacaaagatttaatttttcaggattgtaaaagagtcattgaaaagcttcatcacaaaggctatcttttgggtctagcttcaagttctactagacatgatatcatgttagcattagaaagttttaatctggatacatattttaaggtaattctgtctggtgaggaattttcagaaagtaaacctaatccagctatttataatagagcagcagaacttttagatattcctaaacagcaaattcttattgtagaagacagtgagaaggggattacagctggtattgcagccggtattgatgtgtgggctattgaagataaatactttggaatgaatcagtcgcaggctaatgtattagtgagcgatctgagtcaattttttgtgaaattagataactat

SEQ ID NO: 5172 - protein, 216 aa, Streptococcus agalactiae
MCKYKAIIFDMDGVLFDTELFYYKRRERFLKQHGITIDHLPMNFFIGGNMKQVWKSVLGDQYDTWDIDKLQQDYSRYKEDNPLPYKDLIFQDCKRVIEKLHHKGYLLGLASSSTRHDIMLALESFNLDTYFKVILSGEEFSESKPNPAIYNRAAELLDIPKQQILIVEDSEKGITAGIAAGIDVWAIEDKYFGMNQSQANVLVSDLSQFFVKLDNY

SEQ ID NO: 5173 - DNA, 843 bp, Streptococcus agalactiae
ttgataatcaaattattttttatttttctttcactcttaaagagaggagacattttgaagttcgaaaatataatatatggtattgatggcaacgtggccactattatgcttaatcgaccagatatttcaaatggttttaacatcccaatgtgtcaagaaattattgatgcaataaggcttgtgtctgaaaataaagatgtcatgtttttagtgattgaagcacaaggaccaatcttttcaatcggaggagatttaaaagtgatgaaagctgctgttgagagcgatgatattagctcattaactaaaattgctgagttagttaatcagatatcgtatgatttactacagctagagaaacctgttgttatgtgtgtagatggggctgtagctggtgccgcagctaatattgcattagcagctgattttgttatcgcaagcaagaagagtaaatttatccaggcttttgtgggtgtcggtttagctccagatgcaggaggtttattgttacttagtaaatcaatcggtataactcgtgcagtgcaactagctttaactggagaaagcttatctgctgaaaaagctgaagctttgggaattgtttataaactttgtgaatcagataaaataggtaaaattaaggatcaactattaaagcgtttaagtagacattctataaactcatatcaagccataaaatcattagcttgggaagctgcttttaaagattgggaacaatataaaaagcttgaattacaactgcaagaatcattagcctttaagcaagattttaaagaaggtgttcgggcacacgctgatagaaggcgtcctaattttttaggcaaa

SEQ ID NO: 5174 - protein, 281 aa, Streptococcus agalactiae
MIIKLFFIFLSLLKRGDILKFENIIYGIDGNVATIMLNRPDISNGFNIPMCQEIIDAIRLVSENKDVMFLVIEAQGPIFSIGGDLKVMKAAVESDDISSLTKIAELVNQISYDLLQLEKPVVMCVDGAVAGAAANIALAADFVIASKKSKFIQAFVGVGLAPDAGGLLLLSKSIGITRAVQLALTGESLSAEKAEALGIVYKLCESDKIGKIKDQLLKRLSRHSINSYQAIKSLAWEAAFKDWEQYKKLELQLQESLAFKQDFKEGVRAHADRRRPNFLGK

SEQ ID NO: 5175 - DNA, 789 bp, Streptococcus pyogenes
atgcagtttaaacacatcatctttgatgttgtagatgatcttgcgacattgactttaaaccgtccagaggtttcaaacggttttaatattccaatttgtcaagagattctggtagcattagcagaagttaaacgcgatacatctgtgcgttttttattaattaaagccgttggaaaagtgttttcagttggtggtgacctagttgaaatgcaagaagctgttgcaaaagataatgtgcagtcgctagtcaagattgctgaactggtacaagaaatttcttttgcaataaagcatttgccaaaaccagtcatcctttgcgccgatggagctgtagctggagcggcttttaatatagctttagctgttgacttttgtatcgctagtactcaaacaaaatttatccaagcttttgtaaatgttggactagcaccggatgccggtggtttatttctattgactcgtgcagtaggacttaatcgtgcaactcaccttgtgatgacaggtgaaggaattactgctgataaaggtctcgattatgggtttgtctaccgtacggcagaatctgataaactagacaaagtttgtcttcaacttttaaagcgattgagacgtggctcttcaaattcttatgctggaatgaaatcattggtctggcaaagttttttcacaggatgggaagattatgctaaggcagagcttgctattcaagaggagctagctttcaaggaagattttaaagaaggtgtcatagcttttggagaaaggcgccgaccaaattttcaaggtaag

SEQ ID NO: 5176 - protein, 263 aa, Streptococcus pyogenes
MQFKHIIFDVVDDLATLTLNRPEVSNGFNIPICQEILVALAEVKRDTSVRFLLIKAVGKVFSVGGDLVEMQEAVAKDNVQSLVKIAELVQEISFAIKHLPKPVILCADGAVAGAAFNIALAVDFCIASTQTKFIQAFVNVGLAPDAGGLFLLTRAVGLNRATHLVMTGEGITADKGLDYGFVYRTAESDKLDKVCLQLLKRLRRGSSNSYAGMKSLVWQSFFTGWEDYAKAELAIQEELAFKEDFKEGVIAFGERRRPNFQGK

SEQ ID NO: 5177 - DNA, 432 bp, Streptococcus agalactiae
ttggaatacgatcagattaatagttatttagttgacatttttaatagaatcatgattattgaggaaatgagtttaaagactagccaatttagcgatgtatctttaaaagaaatgcatactattgaaattattgggaaacattctgaggtaactcctagcgatgtcgctcgagaattaatgttaactttgggaactgtaacaaccagccttaataagttagaaaaaaaaggctacattgagcgtaaacggtcaagtattgatcgtcgagttgttcacttgagtcttactaagagaggtaggttattagatcgattgcatagtaaatttcataaatctatggtatctcatattattgaagacctaggtgaagaagacataaaaatgttgacgagcgctttagggaatcttcataaatttttggaggacttagtc

SEQ ID NO: 5178 - protein, 144 aa, Streptococcus agalactiae
MEYDQINSYLVDIFNRIMIIEEMSLKTSQFSDVSLKEMHTIEIIGKHSEVTPSDVARELMLTLGTVTTSLNKLEKKGYIERKRSSIDRRVVHLSLTKRGRLLDRLHSKFHKSMVSHIIEDLGEEDIKMLTSALGNLHKFLEDLV

SEQ ID NO: 5179 - DNA, 450 bp, Streptococcus pyogenes
ttgctaggaggtgtttacttggaatatgacaaaatttacccatacttagttgatattttcaaccggattttggttattgaagaaatgagcttaaagacgagtcagtttagtgatgtctctttaaaagagatgcacactattgaaattatcggcaaatatgatcaggtgactccaagtgatatcgccagagaattaatggtaacgttagggacagtaaccactagcttaaataaattagaagcaaaaggttatatcgcaagaacgcgatcacgctcagataggcgagttgtttacctgtcattaacaaaaaggggtcgacttttggaccgcctccatgcaaagttccataaaaatatggttggacatgtcattgctgatatgagtgatgaagagatgcaggcattggtgcgtggactagggaatctacatcaatttttggaggatttggtt

SEQ ID NO: 5180 - protein, 150 aa, Streptococcus pyogenes
LLGGVYLEYDKIYPYLVDIFNRILVIEEMSLKTSQFSDVSLKEMHTIEIIGKYDQVTPSDIARELMVTLGTVTTSLNKLEAKGYIARTRSRSDRRVVYLSLTKRGRLLDRLHAKFHKNMVGHVIADMSDEEMQALVRGLGNLHQFLEDLV

SEQ ID NO: 5181 - DNA, 969 bp, Streptococcus agalactiae
gtggtttttgctaaaattagtcaacttgcacattatgcaccttctcaaattattaaaaatgaggatttatcattaatcatggataccagtgatgactggatttcgtcacgtactggtataaaacaacgtcatattagtaaaaatgaaacaacagctgatttggcaaataaggtcgcagaacaacttattgaaaaatccggttattccgctagtcaaattgactttattattgttgcaacgatgacaccagactctatgatgccttctactgctgcaagagtgcaagctcatattggagcgagtaatgcttttgcctttgacttgagtgcagcatgtagtggttttgtttttgccttgtctaccgccgaaaaattgatatcatcaggtagctatcaaaaaggtttagtaataggagcagaaactgtttctaaagtattagactggactgatagagggacagcagttttatttggagatggagctggaggtgtcttgctagaagcttctaaggaaaaacattttcttgcagagtctctcaatacagatggtagtcgtcagggacttcaatccagtcaagtcgggttaaattcacctttctcagatgaagtacttgatgataaatttttgaaaatggatggtagagcaatctttgattttgctatcaaagaagtttcaaaaagtatcaatcatcttatagaaacatcttatttggaaaaagaagatattgattatcttttcttacaccaagcgaatcgaaggattttagataagatgtctcgaaaaattgatatagcacgtgataaatttccagagaatatgatggattatggtaatactagtgcagctagtatccctattttactttcagaatcttatgagaacggtttgttgaaactagatggtaaccaaacaatcctcttatcgggtttcggtggaggtttgacatggggaagtctaattgttaaaatt

SEQ ID NO: 5182 - protein, 323 aa, Streptococcus agalactiae
MVFAKISQLAHYAPSQIIKNEDLSLIMDTSDDWISSRTGIKQRHISKNETTADLANKVAEQLIEKSGYSASQIDFIIVATMTPDSMMPSTAARVQAHIGASNAFAFDLSAACSGFVFALSTAEKLISSGSYQKGLVIGAETVSKVLDWTDRGTAVLFGDGAGGVLLEASKEKHFLAESLNTDGSRQGLQSSQVGLNSPFSDEVLDDKFLKMDGRAIFDFAIKEVSKSINHLIETSYLEKEDIDYLFLHQANRRILDKMSRKIDIARDKFPENMMDYGNTSAASIPILLSESYENGLLKLDGNQTILLSGFGGGLTWGSLIVKI

SEQ ID NO: 5183 - DNA, 972 bp, Streptococcus pyogenes
atgattttttctaaaatcagtcaggtagcccactatgttccacagcagttagtgactaataatgatttagctagcataatggacactagtcatgagtggatcttttctcgaacaggaatagcagaacgccatatttctagagatgaaatgactagtgacctagctattcaggttgctgatcagcttttaactcagtctgggttaaaagctgatgctattgattttattattgttgcaactatcagccctgatgccactatgccatcaacagctgcgaaagttcaagcagctattgcggctacaagtgcttttgcttttgatatgactgctgcttgtagtggctttgtctttgccttggctatggcagataagcttattgcatcaggtgcctaccaaaacggaatggtaataggtgcagagactttatctaagttagtaaactggcaggatcgagcgacagccgttctttttggagacggagctggtggcgtgctactggaagccagtaaagataagcatgttttagcggaaacattacacacagatggtgcgagatgtcagagtttgatttcaggagaaactagtctttcatctccttactcaattggcaaaaaagccatagcgactattcagatggatggacgtgccatatttgattttgcgattagggatgtgtcaaaaagcatcctcacactaatggcgcaatcagatattacaaaagatgacatagactattgtttattgcatcaagctaatcgtcgtatacttgataaaatagcacgcaagattgatgttcctcgggaaaaattccttgaaaacatgatgcgttatggtaatactagtgctgctagtatcccaatcctcttgtcagaggctgttcaaaagggacagattaggttagatggtacccaaaaaatcttactttccggttttggtggaggtttgacatggggaagtctaattgttagaatc

SEQ ID NO: 5184 - protein, 324 aa, Streptococcus pyogenes
MIFSKISQVAHYVPQQLVTNNDLASIMDTSHEWIFSRTGIAERHISRDEMTSDLAIQVADQLLTQSGLKADAIDFIIVATISPDATMPSTAAKVQAAIAATSAFAFDMTAACSGFVFALAMADKLIASGAYQNGMVIGAETLSKLVNWQDRATAVLFGDGAGGVLLEASKDKHVLAETLHTDGARCQSLISGETSLSSPYSIGKKAIATIQMDGRAIFDFAIRDVSKSILTLMAQSDITKDDIDYCLLHQANRRILDKIARKIDVPREKFLENMMRYGNTSAASIPILLSEAVQKGQIRLDGTQKILLSGFGGGLTWGSLIVRI

SEQ ID NO: 5185 - DNA, 270 bp, Streptococcus agalactiae
gtgcatagcacatttataaaagattatttaaaatttaaggagctaaaaatggcagtatttgaaaaagtacaagaaattattgttgaagaacttggtaaagatgcagaagaagtaacgttgaacactacttttgacgatcttgatgctgattcgcttgatgttttccaagtgatttcagaaattgaagatgcatttgatatccaaattgagacagaagaaggactaaatactgttggtgatttagttgcttatgttgaagaaaaagtaaaa

SEQ ID NO: 5186 - protein, 90 aa, Streptococcus agalactiae
MHSTFIKDYLKFKELKMAVFEKVQEIIVEELGKDAEEVTLNTTFDDLDADSLDVFQVISEIEDAFDIQIETEEGLNTVGDLVAYVEEKVK

SEQ ID NO: 5187 - DNA, 222 bp, Streptococcus pyogenes
atggcagtatttgaaaaagtacaagaaattattgttgaagaacttggtaaggagacagaagaagtaacactagaaactacatttgatgatttagatgcagattcacttgatgttttccaagttatttcagaaattgaagatgcttttgatattcaaattgaaacagaagaaggattaaatactgttggtgaccttgttgcttacgttgaagaaaagtcaaaa

SEQ ID NO: 5188 - protein, 74 aa, Streptococcus pyogenes
MAVFEKVQEIIVEELGKETEEVTLETTFDDLDADSLDVFQVISEIEDAFDIQIETEEGLNTVGDLVAYVEEKSK

SEQ ID NO: 5189 - DNA, 957 bp, Streptococcus agalactiae
atgaaaacacgtataacagaattactaaatataaaatatccaatttttcaagggggtatggcgtgggtcgctgatggagatcttgcaggagcagtttctaaggcaggtggtctaggtattattggtggaggaaatgcccctaaagaggttgtcaaagcaaatattgataaaataaaatctatgactgataaaccctttggtgtgaatattatgcttttatcaccttttgtagatgatattgttgatttggttattgaagaaggtgtaaaagttgtaacgacgggtgcaggtaatcctggtaagtacatggagcgctttcatgaagcaggtataacagtaatccctgttgttcctagtgttgcattagcaaaacgtatggagaaattaggggctgatgctatcattacagaaggaatggaagcgggtggtcacatcggaaaactgaccacgatgacattagtacgacaggttgttgatgctgttacaattccagtcattgccgcaggtggtatagcagatgggcgtggggctgctgcgggtttcatgttaggagctgatgctgttcaggtaggaactcgttttgttgttgctaaagaatctaatgctcaccctaattacaaagcaaaaatcttaaaagcaaaagatatcgacactgctgtttctgctcaggtagtaggtcatccagttcgtgccttaaaaaataaactagtaacaacctatagccaagcagaaaaagattatttagctggccgtatttcaatcaatgagattgaagaattaggagcgggagctcttcgcaatgcagttgttgatggggatgttattaatggttcagttatggcaggacaaattgcaggattaattaaatcagaagagacttgtcaagagattcttgaagatatttattcaggagcgcgtcaagttattctttctgaggcaagccgctggtcagattta

SEQ ID NO: 5190 - protein, 319 aa, Streptococcus agalactiae
MKTRITELLNIKYPIFQGGMAWVADGDLAGAVSKAGGLGIIGGGNAPKEVVKANIDKIKSMTDKPFGVNIMLLSPFVDDIVDLVIEEGVKVVTTGAGNPGKYMERFHEAGITVIPVVPSVALAKRMEKLGADAIITEGMEAGGHIGKLTTMTLVRQVVDAVTIPVIAAGGIADGRGAAAGFMLGADAVQVGTRFVVAKESNAHPNYKAKILKAKDIDTAVSAQVVGHPVRALKNKLVTTYSQAEKDYLAGRISINEIEELGAGALRNAVVDGDVINGSVMAGQIAGLIKSEETCQEILEDIYSGARQVILSEASRWSDL

SEQ ID NO: 5191 - DNA, 969 bp, Streptococcus pyogenes
atgaaaacacgtattacagaattacttaatattgattaccccatttttcaaggaggaatggcttgggttgctgatggtgatttagcaggtgcagtttctaatgctggtggtttaggcattataggtggtggcaatgctcccaaagaagtcgttaaagctaatattgatcgtgtcaaagctattactgatagaccttttggggttaatatcatgcttttatctccttttgctgatgatatcgttgatctggtcattgaagaaggtgttaaagtagtaacaacaggcgcaggaaatccaggaaagtatatggaaagactgcaccaggcgggtataatcgttgttcctgttgtcccaagcgttgcgctagccaaacgtatggaaaagcttggggtagatgctgttattgctgagggtatggaagctggaggacatattggcaagttaacgactatgtctttagtaagacaagttgttgaagcggtttcgattcctgtcattgcggcaggtggtatagctgatggtcatggtgcagcagcagcatttatgttaggagcagaggctgttcaaattggaactcgctttgttgttgctaaagaatccaatgctcaccaaaattttaaagataaaatcttagcagcaaaagatattgatacggtgatttctgcgcaggttgtgggccaccctgtccgttctattaaaaataaattgacctcagcttacgctaaagcagaaaaagcatttttaattggtcaaaaaacagctactgatattgaagaaatgggagcaggatcgcttcgacacgctgttattgaaggcgatgtagtcaatggatctgttatggctggccaaattgcagggcttgtgagaaaagaagaaagctgtgaaacgattttaaaagatatttattatggtgcagctcgtgttattcaaaatgaagctaagcgctggcaatctgtttcaatagaaaag

SEQ ID NO: 5192 - protein, 323 aa, Streptococcus pyogenes
MKTRITELLNIDYPIFQGGMAWVADGDLAGAVSNAGGLGIIGGGNAPKEVVKANIDRVKAITDRPFGVNIMLLSPFADDIVDLVIEEGVKVVTTGAGNPGKYMERLHQAGIIVVPVVPSVALAKRMEKLGVDAVIAEGMEAGGHIGKLTTMSLVRQVVEAVSIPVIAAGGIADGHGAAAAFMLGAEAVQIGTRFVVAKESNAHQNFKDKILAAKDIDTVISAQVVGHPVRSIKNKLTSAYAKAEKAFLIGQKTATDIEEMGAGSLRHAVIEGDVVNGSVMAGQIAGLVRKEESCETILKDIYYGAARVIQNEAKRWQSVSIEK

SEQ ID NO: 5193 - DNA, 924 bp, Streptococcus agalactiae
atgaataaagtttcatttctatttgctggtcaaggtgctcaaaagttaggaatggctagagatttatatgaaactttcccgattgttaaagaaacttttgataaggcaagtcatgttttaggatatgatttgagagaattgattgataaagacttagacaaattaaatcagacgaaatatacgcaaccagctattctaacgacttcgactgctatttatcgtttaattcttaaagaaattgaacttagaccagatatggttgcaggactttctttgggagaatacagtgctttagttgcttcaggtgctataagatttgaagatgctgtagtacttgttgctagacgaggccaactaatggaagcagcagcacctgctggtagtggcaaaatggtagcagttttaaatgctgatcgtcaaataattgaagatgcttgtaagaaggcttctcagtttggtattgttagtcctgcaaattataatactccaaagcaaattgttatagggggagagtcaatcgctgtaaatgcagctgtagaagaattaaaacaacaaggagtaaaacgtttaattcctctgaatgtttcaggtccttttcacactgctttattgaaacctgcaagtcagaaattgagcgatgttttagataaagttcatttttcagtttctgaaatccctgtaattggaaatacagaggcgcagataatgaaaaaagacgatatcaaatctttattggcacgccaagttatggaacctgtacgctttgatgagtctattgaaaccatgaaaaaaatgggaatgacacaggttgttgaaattggtccagggaaggtactctcaggtttcttgaaaaaaatagatagctcattatcagtacattctgttgaagataaaattggatttaataatcttaaggaattaaac

SEQ ID NO: 5194 - protein, 308 aa, Streptococcus agalactiae
MNKVSFLFAGQGAQKLGMARDLYETFPIVKETFDKASHVLGYDLRELIDKDLDKLNQTKYTQPAILTTSTAIYRLILKEIELRPDMVAGLSLGEYSALVASGAIRFEDAVVLVARRGQLMEAAAPAGSGKMVAVLNADRQIIEDACKKASQFGIVSPANYNTPKQIVIGGESIAVNAAVEELKQQGVKRLIPLNVSGPFHTALLKPASQKLSDVLDKVHFSVSEIPVIGNTEAQIMKKDDIKSLLARQVMEPVRFDESIETMKKMGMTQVVEIGPGKVLSGFLKKIDSSLSVHSVEDKIGFNNLKELN

SEQ ID NO: 5195 - DNA, 942 bp, Streptococcus pyogenes
atgataatgacaaagacagcctttttatttgccggtcaaggtgctcaaaaattagggatggcaagggatttttatgataactttgctattgtaagaaaaacctttgatcaagctagtcaagtattgggatacgatttgcgccgtttgattgatagtgacgagttaaaacttaatcaaactagctatacgcaaccagctattttgacatcatcaattgctatttaccgtgttttgggcttacatcacgttaaaccggatatggtagctggtctttccttaggagaatactcagctttggtagcatcaggggcactctcttttgaagataccctatccttagtagctaagagaggccgcttgatggaggaagcagcaccacaaggatctggaaagatggttgccgttatgaatacagacgtgcaagtcatcgaagaagtctgtcaaatagctgctaaacatggagtggttgctccagcaaactataatactcctagtcaaattgtaattggtggtcagacagatgctgtgaacgtggcagttgaacttttaaaggaaaggggagttaagcgtttaatccctttaaacgtgtcaggtcctttccacactgctttgttagaaccagctagccgcttgttggctaaagagttggaaagatacaacttcagtgacttcaagattcctttggttggtaataccgaagctaatattatggaaaaagaccgtatcccagaactattagcccgtcaagtcatggagcctgttcgtttttatgacagtgttgcgactttagtagaaagtggcataacacaattcattgaggtaggaccaggtaaggttttgacaggttttgtgaagaaaattgataaaaatttactatgtactagtgttgaaaacatggtaagcttacgtttatttttagatagagaggacattcatggaaat

SEQ ID NO: 5196 - protein, 314 aa, Streptococcus pyogenes
MIMTKTAFLFAGQGAQKLGMARDFYDNFAIVRKTFDQASQVLGYDLRRLIDSDELKLNQTSYTQPAILTSSIAIYRVLGLHHVKPDMVAGLSLGEYSALVASGALSFEDTLSLVAKRGRLMEEAAPQGSGKMVAVMNTDVQVIEEVCQIAAKHGVVAPANYNTPSQIVIGGQTDAVNVAVELLKERGVKRLIPLNVSGPFHTALLEPASRLLAKELERYNFSDFKIPLVGNTEANIMEKDRIPELLARQVMEPVRFYDSVATLVESGITQFIEVGPGKVLTGFVKKIDKNLLCTSVENMVSLRLFLDREDIHGN

SEQ ID NO: 5197 - DNA, 732 bp, Streptococcus agalactiae
atgcaattaaaagataagaacatttttattacgggttcaagtagaggaatcggccttgcaattgcccatcaatttgcacaattaggtgctaatattgttttaaatggacgttctgaaatatcagaagacttaatagctgaatttgctgattatggtgtaaaagttattgctatttcaggagatgtttcttcttttgaagatgctaatcgcatgattaaagaagctattgcaagtctaggtagcgtggatgtgctcgttaacaacgctggtattactaatgataaattgatgcttaaaatgactgttgaagattttgagagcgttcttaaaattaatttaacaggtgcatttaatatgacacaatcagtcttgaaaccgatgacaaaagcgcgtcaaggtgctattattaatatctctagcgtcgttggattaactggaaatgtagggcaagctaattacgcagcctctaaagcaggtttaattggctttacaaaatcagttgccagagaagtagcagcacgaggcattcgtgtcaatgccattgctccaggctttatcgaatctgatatgacagatgttatcccagaaaaaatgcaagaagctattttagctcaaattccaatgaaacgtattggaaaaggtaaagaagtagcgcaggtagcgtctttcttagcagaacaagaataccttacaggacaagttattgccattgatggcggtatgacgatgcaa

SEQ ID NO: 5198 - protein, 244 aa, Streptococcus agalactiae
MQLKDKNIFITGSSRGIGLAIAHQFAQLGANIVLNGRSEISEDLIAEFADYGVKVIAISGDVSSFEDANRMIKEAIASLGSVDVLVNNAGITNDKLMLKMTVEDFESVLKINLTGAFNMTQSVLKPMTKARQGAIINISSVVGLTGNVGQANYAASKAGLIGFTKSVAREVAARGIRVNAIAPGFIESDMTDVIPEKMQEAILAQIPMKRIGKGKEVAQVASFLAEQEYLTGQVIAIDGGMTMQ

SEQ ID NO: 5199 - DNA, 1230 bp, Streptococcus agalactiae
atgacattacagcgagtagtagtaacaggttacggtgtaacctcacctattggaaacacaccagaagaattttggaatagtcttaaagaaggaaatgttggtattggacctatcactaaatttgattcaagtgatttcatggtcaaaaatgctgctgaaattcatgattttccatttgataaatattttgtcaaaaaagatctgaacagatttgatatgtattccctttatgccttatatgcttcaagtgaagctattcaacatgctaatttaaatttagatgaaattgatgcagatcgatttggtgtcatcgttgcatcaggtattggagggattcaagagattgaagaacaagtgattcgtcttcatgaaaaagggccaaaacgcgtaaaaccaatgacgcttccaaaagctctaccaaatatggcagctggaaatgttgcgatgaggttaggcgctcatggtgtatgtaaatcaattaatacagcttgtgcttcttctaatgatgctattggagatgctttccgtaatataaaatttggtattcaagatattatggtagtcggtggtgcagaagctgctattacaaaatttgccattgctggattccaaagtcttacagcattatcaacaactgaagatccatcaagagcatctattccatttgataaagatcgcaatggatttatcatgggagaaggttctggaatgttggtcttagaaagtttagaacacgctgaaaaacgaggagctactattcttgcagaagttgttggttatggtaacacttgtgacgcatatcatatgacttcaccacatccagaaggtttaggagccactaaagctattcaacttgcactggttgaagctaatattaaacctgaagaagttaactatgtaaatgctcatggaacttcaacacctgctaacgaaaaaggagagagtcaagctattgttgctgcacttgggacagacgttccagtttcttcgactaaatcttttactggtcatcttttgggtgccgcgggagctgttgaggcaattgcaactattgaagcgatacgtcatagttatgttccaatgactgctggaacgacagaattatcagaagatattacagcgaatgttatttttggtcaagggcaagacgctgatattcgttatgccatttcaaatacatttggttttggaggacacaatgcagttctggccttcaaacgctgggaggat

SEQ ID NO: 5200 - protein, 410 aa, Streptococcus agalactiae
MTLQRVVVTGYGVTSPIGNTPEEFWNSLKEGNVGIGPITKFDSSDFMVKNAAEIHDFPFDKYFVKKDLNRFDMYSLYALYASSEAIQHANLNLDEIDADRFGVIVASGIGGIQEIEEQVIRLHEKGPKRVKPMTLPKALPNMAAGNVAMRLGAHGVCKSINTACASSNDAIGDAFRNIKFGIQDIMVVGGAEAAITKFAIAGFQSLTALSTTEDPSRASIPFDKDRNGFIMGEGSGMLVLESLEHAEKRGATILAEVVGYGNTCDAYHMTSPHPEGLGATKAIQLALVEANIKPEEVNYVNAHGTSTPANEKGESQAIVAALGTDVPVSSTKSFTGHLLGAAGAVEAIATIEAIRHSYVPMTAGTTELSEDITANVIFGQGQDADIRYAISNTFGFGGHNAVLAFKRWED

SEQ ID NO: 5201 - DNA, 552 bp, Streptococcus agalactiae
ttggttttggaggacacaatgcagttctggccttcaaacgctgggaggattaaattggatattcaagagattaaggatttaatgactcaatttgatgagtcaagtctgagagaattttcattcaaaacaagtgacggtgagctgtcttttagtaaaaatgagggaaaagctccacttgtcccaactatgtctcctatgagtcatcaacctgaagcgactccaactatagcaactcctgtctctaatgaagcaggtgagcaaacgaaacaagctactgaagtagtttcagaaatcccagagtcgactgtgactgttgcagaaggtgacgttgtcgaaagtcctttagttggggttgcttatttagcttctggaccagataaacctaactttgtttcagtaggtgatagcgtgaagaagggacaaactttgatgattattgaggcaatgaaggtgatgaatgaagtgcctgccccccatgatggtgtagttactgaaattcttgtagccaatgaagaagttattgaatttggtaaaggattggtacgaatcaaa

SEQ ID NO: 5202 - protein, 184 aa, Streptococcus agalactiae
MVLEDTMQFWPSNAGRIKLDIQEIKDLMTQFDESSLREFSFKTSDGELSFSKNEGKAPLVPTMSPMSHQPEATPTIATPVSNEAGEQTKQATEVVSEIPESTVTVAEGDVVESPLVGVAYLASGPDKPNFVSVGDSVKKGQTLMIIEAMKVMNEVPAPHDGVVTEILVANEEVIEFGKGLVRIK

SEQ ID NO: 5203 - DNA, 498 bp, Streptococcus pyogenes
ttgaatattcaagaaatcaaagatttgatggctcagtttgatacctcaagcctacgtgaatttttattcaaaacaaatgaaggtgagctaatctttagtaaaaacgaacaacacctcaatgcatcgacatcaaatcaagaacatgctgtgcctgtaccacaggtacaacttgttccgaatccaactgcttcggaagcgtccagtccagcatcagttaaggatgttcctgtagaggagcaaccacaagcagaatcttttgtagcagaaggtgatattgttgaaagtcctttagtcggtgtagcctatcttgcagctagccctgacaagccaccatttgtggcagtcggagatactgtaaaaaaaggacaaacccttgtgattatcgaagccatgaaggtgatgaacgaagtgccagcgccatgtgatggtgtgattacagaaattttggtatcaaatgaagatgtcattgaatttggacaaggattggtgcggatcaaa

SEQ ID NO: 5204 - protein, 166 aa, Streptococcus pyogenes
LNIQEIKDLMAQFDTSSLREFLFKTNEGELIFSKNEQHLNASTSNQEHAVPVPQVQLVPNPTASEASSPASVKDVPVEEQPQAESFVAEGDIVESPLVGVAYLAASPDKPPFVAVGDTVKKGQTLVIIEAMKVMNEVPAPCDGVITEILVSNEDVIEFGQGLVRIK

SEQ ID NO: 5205 - DNA, 420 bp, Streptococcus agalactiae
atgattgatataaaagaaattcgtgaggctttacctcaccgctatccaatgttattagtggatcgtgttttagaggtatcagaagatgagatagtcgctatcaaaaatgttagtatcaatgagccttttttcaatggtcattttccagaatatcctgtaatgccaggcgttttaattatggaagctttggctcaaactgcaggtgttttagaattatctaaagaagaaaacaaaggaaagcttgttttttatgcaggtatggataaagtgaaatttaaaaagcaagttgttccaggagatcaattagttatgactgctaagtttgtcaaacgtagaggaactatagccgttgttgaagcaatagcagaagttgatgggaaattagctgccagtggaacgttaacatttgcaataggcaat

SEQ ID NO: 5206 - protein, 140 aa, Streptococcus agalactiae
MIDIKEIREALPHRYPMLLVDRVLEVSEDEIVAIKNVSINEPFFNGHFPEYPVMPGVLIMEALAQTAGVLELSKEENKGKLVFYAGMDKVKFKKQVVPGDQLVMTAKFVKRRGTIAVVEAIAEVDGKLAASGTLTFAIGN

SEQ ID NO: 5207 - DNA, 420 bp, Streptococcus pyogenes
atgatggatattagagaaattcaagcggctttgcctcatcgctacccaatgttattggttgatcgtgtgttagaagtgtcagacgaccatatcgttgccattaaaaatgtgactattaatgagcctttctttaacgggcattttcctcactatcctgtgatgccaggtgttctgattatggaagctttggctcaaacagctggtgtcttagaattgtcaaaagaagaaaataaaggcaagttggtcttttacgctggaatggataaagtgaagttcaaaaaacaagtcgtccctggtgatcaacttgtgatgacagcaacctttatcaagcgtcgcggtaccattgctgtcgttgaagccagggcagaagttgatggcaagctagcagcaagtggaacattaacctttgcctgtgggcaa

SEQ ID NO: 5208 - protein, 140 aa, Streptococcus pyogenes
MMDIREIQAALPHRYPMLLVDRVLEVSDDHIVAIKNVTINEPFFNGHFPHYPVMPGVLIMEALAQTAGVLELSKEENKGKLVFYAGMDKVKFKKQVVPGDQLVMTATFIKRRGTIAVVEARAEVDGKLAASGTLTFACGQ

SEQ ID NO: 5209 - DNA, 1368 bp, Streptococcus agalactiae
atgtttaagaaaatattgattgctaatcgcggagaaattgcagtacgtatcattcgtgcagcccgtgaaatgggaatttcgacagttgctatctattcggaggctgacaaggaatcattgcacacaattttagcagatgaagctatttgtgttggaccagccaaatcagcagaatcttatttaaacgttaatgctatattatctgctgctattgtgactggagcggaagctgttcatccaggttttgggtttttgagtgaaaattctaaatttgctactatgtgtgaagagatgaacttaaaattcattggtccatctggagaagttatggataaaatgggtgataaaatcaatgctcgtacagagatgataaaagctgatgttccggttatcccaggatcagatggtcaagttacaagtgtagaagaagctgtatcaattgctgaggaaatcggctatccattgatgttaaaagcctcagccggtggcggtggaaaaggaattaggaaggtcaaatcagcagatgaattgaagcctgcttttgagtctgcttcacaggaggctttggctgcgttcggtaatggtgctatgtatattgaaaaagttatatacccagctagacatattgaagtacaaatacttggagatagctttggtaagatagttcacctaggagaacgtgattgttctctgcagcgtaacaatcagaaggtattggaagaaagtccgtctgtggcaataggtaacactctgcgtcaacaaattggtgaagcagctgttcgtgcagctgaggctgtatcttatgaaaatgcaggaacaattgagtttttgttagatgagaatagcggacagttctatttcatggaaatgaatactcgtgttcaagtagaacaccctgttacagaatttgtaacgggtgttgacatcgttaaagagcagattcgtatcgctgctggaattcctttatcagtttctcaaaatgatattaagttaactggtcatgcgattgaatgtcgtattaacgcagagaatccacaatttaattttgcgccatgtccaggtaccattaatgggttacatctacctgctggcggtatgggcttacgtgtcgattcagcggtttacacaggctacactattcctccttattacgatagtatgattgcgaaagtaattgttcacggagaaaatcgttttgatgcacttatgaaaatgcaacgtgccttatatgagcttgaaattgatggtattgtaacaaatacagaatttcaaatggatctcatttctgataaaaaagtcttggctggggattatgatacttcattcctgatggaagactttttaccaaggtattatggtaacaatcaa

SEQ ID NO: 5210 - protein, 456 aa, Streptococcus agalactiae
MFKKILIANRGEIAVRIIRAAREMGISTVAIYSEADKESLHTILADEAICVGPAKSAESYLNVNAILSAAIVTGAEAVHPGFGFLSENSKFATMCEEMNLKFIGPSGEVMDKMGDKINARTEMIKADVPVIPGSDGQVTSVEEAVSIAEEIGYPLMLKASAGGGGKGIRKVKSADELKPAFESASQEALAAFGNGAMYIEKVIYPARHIEVQILGDSFGKIVHLGERDCSLQRNNQKVLEESPSVAIGNTLRQQIGEAAVRAAEAVSYENAGTIEFLLDENSGQFYFMEMNTRVQVEHPVTEFVTGVDIVKEQIRIAAGIPLSVSQNDIKLTGHAIECRINAENPQFNFAPCPGTINGLHLPAGGMGLRVDSAVYTGYTIPPYYDSMIAKVIVHGENRFDALMKMQRALYELEIDGIVTNTEFQMDLISDKKVLAGDYDTSFLMEDFLPRYYGNNQ

SEQ ID NO: 5211 - DNA, 1410 bp, Streptococcus pyogenes
ttgcctgtgggcaatgagaatgattgttctgcggaggaagaaacccttatgtttaaaaaaatcttaattgctaatcgtggtgaaattgcagtgcgtatcattcgtgctgcacgagaattagggatttccacagttgcagtttattcggaagcggataaggaagctctgcacacgatcttggcggacgaggctatctgtattggtcctgcccgttccaaggaatcctatcttaatatgaattccgtcttgtcagcagctattgtgacaggagcccaagcgattcacccagggtttggctttttaagtgaaaactcaaagtttgcgaccatgtgtgaagagatgaatattaaatttatcggtccatccgcatcggttatggataaaatgggtgataaaatcaatgctcgttctgaaatgattaaggcaggagtgcccgttattccagggtcagatggtgaagtttataacgctcaagaagccttagctattgccaataagattggttatcctgtcatgctaaaagcatcggcaggtggtggaggtaaagggattcgtaaagtggagacagaagcagatttggaggcggctttcaatgctgccagtcaagaagctttgggagctttcggaaatggcgccatgtatttggaaaaagtaatttatccagctagacatattgaggtgcaaattttaggagacgcttacggtaacatcattcacttgggagaacgggattgctccttgcaacggaataatcaaaaagtcttggaagaaagtccatccattgctattggcaataccctcagacacgaaatggggcaagcagcggttagagcagctgaagctgtagcctatgaaaatgcgggaaccattgagtttttgttggacgaagacagcgagaaattctatttcatggaaatgaatacccgtatccaagttgagcatcctgtcaccgaatttgtgacaggagtggatattgtcaaagagcaaatcaaaattgcagcaggtcagcctttggcgattaatcaagaagacatcactatcacgggacatgctattgaatgtcgtatcaatgctgaaaatactgcttttaactttgcaccgagtccaggaaagattacagacttgtatatgccaagtggtggtgtaggactacgagttgattcagcagtttacaatggctatgccattcctccttattatgacagcatgattgctaaaatcatcgttcatggaagcaatcgatttgacgctttgatgaaaatgcaacgtgccttagttgaattggaaattgaaggcattatcaccaatacagacttccagctcgatttgatttcagataagcgagtgattgcaggagattatgatacctctttcttgatggaaacgttcctgccacattacaataaagat

SEQ ID NO: 5212 - protein, 470 aa, Streptococcus pyogenes
LPVGNENDCSAEEETLMFKKILIANRGEIAVRIIRAARELGISTVAVYSEADKEALHTILADEAICIGPARSKESYLNMNSVLSAAIVTGAQAIHPGFGFLSENSKFATMCEEMNIKFIGPSASVMDKMGDKINARSEMIKAGVPVIPGSDGEVYNAQEALAIANKIGYPVMLKASAGGGGKGIRKVETEADLEAAFNAASQEALGAFGNGAMYLEKVIYPARHIEVQILGDAYGNIIHLGERDCSLQRNNQKVLEESPSIAIGNTLRHEMGQAAVRAAEAVAYENAGTIEFLLDEDSEKFYFMEMNTRIQVEHPVTEFVTGVDIVKEQIKIAAGQPLAINQEDITITGHAIECRINAENTAFNFAPSPGKITDLYMPSGGVGLRVDSAVYNGYAIPPYYDSMIAKIIVHGSNRFDALMKMQRALVELEIEGIITNTDFQLDLISDKRVIAGDYDTSFLMETFLPHYNKD

SEQ ID NO: 5213 - DNA, 873 bp, Streptococcus agalactiae
atggctttatttagtaaaaaggataaatatatccgtattagtccaaacaaagcattagggtcttctgataaacgtagtcttcctgaggttcctgatgaactctttgctaagtgtccttcttgtaaacatatgatttatcagaaagatttaggattagcaaagatttgtccagcttgttcttacaactttagaatttcagcgcaagaacgtctgttgctaacagttgacgaagatagttttgaggaattatttacaggaattgaaactaaggatcctttgaattttccaaactaccgtgaaaaactggctgctacacgtcaaaagactaacttagatgaagcggtggtgacaggtttagctaaaataaaaggacaaactacggccttagctattatggattctcattttataatggcgtctatgggaacggtcgtaggcgaaaagttgacaagattatttgagctagcaactgaaaagaaattacctattgttatttttacagcgtcagggggcgccagaatgcaagaaggtattatgagtttgatgcaaatggcaaaagtatcggcagcagttaaacgccattctaaccagggattgttttatttaacaattttaacagacccaacaaccggcggcgttactgcgagttttgctatggaaggtgatattattctggctgagccacaagcgttggttggttttgctggtcgtcgtgttatcgaaacaacagtgagagaagatttacctgaaggctttcaaaaggcagagtttttgttagaacatggttttgtcgatgctattataaatcgaacagaattacgcgactgcattgctcaactaattgctttccatggaaatgaggttggtcatgaa

SEQ ID NO: 5214 - protein, 291 aa, Streptococcus agalactiae
MALFSKKDKYIRISPNKALGSSDKRSLPEVPDELFAKCPSCKHMIYQKDLGLAKICPACSYNFRISAQERLLLTVDEDSFEELFTGIETKDPLNFPNYREKLAATRQKTNLDEAVVTGLAKIKGQTTALAIMDSHFIMASMGTVVGEKLTRLFELATEKKLPIVIFTASGGARMQEGIMSLMQMAKVSAAVKRHSNQGLFYLTILTDPTTGGVTASFAMEGDIILAEPQALVGFAGRRVIETTVREDLPEGFQKAEFLLEHGFVDAIINRTELRDCIAQLIAFHGNEVGHE

SEQ ID NO: 5215 - DNA, 864 bp, Streptococcus pyogenes
atggctttatttcgtaaaaaagataaatacatccgtattactcccaataattccctcaaaggatctgtcagccataatgtcccagaagttccagatgaactctttgcgaaatgcccagcttgtaagcacatgatttataagaaagatttgggattggcaaagatttgcccaacctgttcttacaattttaggatttctgcccaagagcggctgaccttaacagttgatgaaggctctttccaagaattatttacaagtattgaaaccaaggatccgttacgttttccaggttatcaggaaaaattacaaaaagccaaggaaacgacaggtctgcatgaagctgttttgacagggaaagctatggttaaggagcaaaagattgctcttgctattatggattctcactttattatggctagtatgggaactgttgttggggaaaaaattacccgattgtttgaattggctatcgaagaaaacctgccggtggtgatttttacggcttcaggaggcgcccgtatgcaagagggtatcatgagcctcatgcaaatggccaaggtctctgcagctgtgaaaagacattctaatgcaggcctcttttacctcactattttgacagatccaactactggtggggtaacagctagttttgccatggaaggggatattattttggcagaacctcaatccttggttggctttgcaggtcgtcgtgtcattgagaccacagttcgtgaaaacttgccagatgatttccaaaaagcagaatttttacaagaccatggttttgtggatgctattgtgaaacgaacagagttgcgagacaagattgcccacttagtagcatttcatggaggtggccaa

SEQ ID NO: 5216 - protein, 288 aa, Streptococcus pyogenes
MALFRKKDKYIRITPNNSLKGSVSHNVPEVPDELFAKCPACKHMIYKKDLGLAKICPTCSYNFRISAQERLTLTVDEGSFQELFTSIETKDPLRFPGYQEKLQKAKETTGLHEAVLTGKAMVKEQKIALAIMDSHFIMASMGTVVGEKITRLFELAIEENLPVVIFTASGGARMQEGIMSLMQMAKVSAAVKRHSNAGLFYLTILTDPTTGGVTASFAMEGDIILAEPQSLVGFAGRRVIETTVRENLPDDFQKAEFLQDHGFVDAIVKRTELRDKIAHLVAFHGGGQ

SEQ ID NO: 5217 - DNA, 798 bp, Streptococcus agalactiae
ttgctttccatggaaatgaggttggtcatgaataatgatgtgacaagaattttaaaagatgcgcgtgatcaagggaggctaactgctcttgactacgctgaattgatttttgataattttatggaacttcatggtgatcgccagttcgcagatgacaaatcaattataggaggtttggggtacttggcagggcgtcctgtgacgattgtcggtattcaaaaaggtaagaaccttcaagataatttagaccgtcattttggtcaaccacatcctgaaggttatcgtaaggctttacgtttaatgaaacaagctgagaagtttggaagacctgttataaccttcatcaatactgctggagcatatcctggggtaggtgctgaggagcgaggtcagggtgaagcaattgctagaaacctcttagaaatgagtgatttaaaagtccctattatagctattattattggtgaagggggttctggaggagcattagctttagctgttgccgataaggtttggatgttggaacatactgtttattctattttaagtcctgagggctttgcctctattttatggaaagatggtacaagaacaacagaagcagcacaattaatgaagatgactgctggagaactttaccatatggaagttgtagacaaagtaatccctgaacatggttatttttcaagtgagattgtcgatatgattaagacaagtttaatttcagagttagaagtgctctcacaattatctcttgaggatttattggaacaacgttaccaacgttttagaaaatat

SEQ ID NO: 5218 - protein, 266 aa, Streptococcus agalactiae
MLSMEMRLVMNNDVTRILKDARDQGRLTALDYAELIFDNFMELHGDRQFADDKSIIGGLGYLAGRPVTIVGIQKGKNLQDNLDRHFGQPHPEGYRKALRLMKQAEKFGRPVITFINTAGAYPGVGAEERGQGEAIARNLLEMSDLKVPIIAIIIGEGGSGGALALAVADKVWMLEHTVYSILSPEGFASILWKDGTRTTEAAQLMKMTAGELYHMEVVDKVIPEHGYFSSEIVDMIKTSLISELEVLSQLSLEDLLEQRYQRFRKY

SEQ ID NO: 5219 - DNA, 768 bp, Streptococcus pyogenes
atgacagatgtatcaagaattttaaaagaagcgcgtgatcaagggcgtttaacaactttggattacgccaaccttattttcgatgactttatggaactgcatggcgatcgccatttttcagatgatggtgccattgtaggtggcctagcttatttggcgggacaacctgttacggtcattggtattcaaaaaggtaagaatttacaggataatttggcaaggaattttggccagcccaatccagaaggttatcgtaaagctttgcgccttatgaaacaggcagaaaaatttggacgaccagttgttacgtttatcaatactgcaggagcctatccaggtgtcggtgcggaagaacgaggacagggtgaggccattgctaaaaatttgatggaaatgagtgatctcaaggttcccattatcgccatcattattggtgaaggaggctctggtggtgcattagccttagcggttgccgatcaggtctggatgcttgaaaatactatgtatgcggttcttagcccagaaggctttgcttctattttatggaaggatggttcaagggcgaccgaggccgctgaattgatgaaaatcacagcgggtgaactctacaaaatgggaatagtagaccgtattattccagaacatggttatttttcaagtgaaatcgttgacatcatcaaagctaacctcatcgaacaaataaccagtttgcaagctaagccattagaccaattattagatgagcgctaccaacgctttcgtaaatat

SEQ ID NO: 5220 - protein, 256 aa, Streptococcus pyogenes
MTDVSRILKEARDQGRLTTLDYANLIFDDFMELHGDRHFSDDGAIVGGLAYLAGQPVTVIGIQKGKNLQDNLARNFGQPNPEGYRKALRLMKQAEKFGRPVVTFINTAGAYPGVGAEERGQGEAIAKNLMEMSDLKVPIIAIIIGEGGSGGALALAVADQVWMLENTMYAVLSPEGFASILWKDGSRATEAAELMKITAGELYKMGIVDRIIPEHGYFSSEIVDIIKANLIEQITSLQAKPLDQLLDERYQRFRKY

SEQ ID NO: 5221 - DNA, 651 bp, Streptococcus agalactiae
ttgtttacatggagaaaaagaatgtatcaagaattaaatgattatttagaattccaatcaatgaagtatattatgcctgagaaggcaggcgctttaaaggacgatatgcaaacttttaaggcaaagggccaacttgctaggaatagctttacagagttatcaagagccttagaacaacgtatggatggctttaaaatgcaaagagtgagtaattgggctaatcaagctcaagtagggcgtccacatttttgggtttattatcgaaaggatacagaccaattagatgatgtggctgttgcgctaagggtttatggtgtaaaagatagttttggggttagccttgaggtaagctttgtagagaggcaaaaatctgataagacactcgagaagcaggctagagtgttatcgattccgattgcctctccattgtattttatggtccaaaggcaaggtgaaactcatcgagaagaaggcaatgaggaaaatcgtcaacgtttaatgcaagaaattaagtcagggaaggtaaggaaagtattggtaaaatatgacgttcttttgactgaaaaccagagcttagaaaatattctgcaacgattgttagaaggctttgagaaagtgttaccttactatcaagtttgtcaaactattagc

SEQ ID NO: 5222 - protein, 217 aa, Streptococcus agalactiae
MFTWRKRMYQELNDYLEFQSMKYIMPEKAGALKDDMQTFKAKGQLARNSFTELSRALEQRMDGFKMQRVSNWANQAQVGRPHFWVYYRKDTDQLDDVAVALRVYGVKDSFGVSLEVSFVERQKSDKTLEKQARVLSIPIASPLYFMVQRQGETHREEGNEENRQRLMQEIKSGKVRKVLVKYDVLLTENQSLENILQRLLEGFEKVLPYYQVCQTIS

SEQ ID NO: 5223 - DNA, 1275 bp, Streptococcus agalactiae
atgttagacttaaaacgtattcgtacagattttgatgttgtcgctaaaaaattggccacgcgtggtgttgaccaagaaacattaacaacccttaaagaacttgatataaaacgccgtgaactacttatcaaagctgaagaggcgaaagcgcaacgtaatgttgcttctgctgccattgctcaagcaaaacgaaataaagagaatgcagacgagcaaatcgcagctatgcaaacactttccgctgatatcaaagcaattgatgcggaattggcagatgtggatgctaatttacaatcaatggtgaccgtacttcctaatacaccagctgatgatgtgccgcttggagcagacgaggatgaaaatgttgaagttcgtcgctggggaactcctcgtgaatttgattttgagaccaaagctcactgggatttaggtgaaagccttggaattctcgattgggaacgtggtgcaaaagttactggctctcgcttcctcttctacaaaggtctaggtgctcgtttagagcgtgctatctacagcttcatgctggatgaacacgctaaggaggggtacactgaagtgatccctccttatatggttaaccacgattcaatgttcggtacgggacaatatccaaagttcaaggaagatactttcgaattagcagatagcccattcgtacttatcccaacagctgaagttcctttaacaaactattatcgtgatgaaattatcgatgggaaagaattacctatatactttactgccatgagtccatcattccgttcagaagcaggctctgcaggacgtgacacacgtggattaattcgccttcatcaattccataaagtagaaatggtgaaatttgccaagcctgaggaatcataccaagaattagaaaaaatgacagcaaatgctgaaaatattcttcaaaaacttaatctcccataccgtgtcattaccttgtgtacaggagatatgggattctcagcagctaaaacgtatgacttagaggtatggattcccgctcaaaatacttatcgagaaatttcttcatgttctaatactgaagatttccaagcacgtcgtgctcaaattcgttaccgtgacgaagttgatggcaaagttaggttgcttcatactttaaatggttcaggacttgcagttggacgtactgtagcagcaatcctcgaaaattatcaaaatgaagatggttctgtgactatcccagaagttcttcgtccatatatgggtaatatcgatattattaaaccaaat

SEQ ID NO: 5224 - protein, 425 aa, Streptococcus agalactiae
MLDLKRIRTDFDVVAKKLATRGVDQETLTTLKELDIKRRELLIKAEEAKAQRNVASAAIAQAKRNKENADEQIAAMQTLSADIKAIDAELADVDANLQSMVTVLPNTPADDVPLGADEDENVEVRRWGTPREFDFETKAHWDLGESLGILDWERGAKVTGSRFLFYKGLGARLERAIYSFMLDEHAKEGYTEVIPPYMVNHDSMFGTGQYPKFKEDTFELADSPFVLIPTAEVPLTNYYRDEIIDGKELPIYFTAMSPSFRSEAGSAGRDTRGLIRLHQFHKVEMVKFAKPEESYQELEKMTANAENILQKLNLPYRVITLCTGDMGFSAAKTYDLEVWIPAQNTYREISSCSNTEDFQARRAQIRYRDEVDGKVRLLHTLNGSGLAVGRTVAAILENYQNEDGSVTIPEVLRPYMGNIDIIKPN

SEQ ID NO: 5225 - DNA, 1275 bp, Streptococcus pyogenes
atgctagatcttaaacgtatccgtaccgattttgacactgtcgctgccaaattaaaaaaccgcggtgtttctgaagacaccctgacccatcttaaagaacttgatgaaaaacgtcgtgctctattagtgcaatcagaagaattaaaagcagagcgtaatattgcttctgcagccatcgcccaagcaaaacgtcaaaaagaagatgccactcaacaaattgccgatatgcaaaaagtctctgcagatatcaaaactattgacaatcaactagtagctatcgaccagcaagttactgacatcatcactgttttacctaatactcctcacgattctgtccctgttggagctgacgaagaagacaatgtcgaaattcgccgttggggaacgcctcgtgactttgacttcgaagttaaggctcattgggatctaggcgaagatcttgatattttagactgggaacgtggggcaaaggtaactggtgctcgtttcttattctataaaaatcttggtgctcgtttggagcgtgctctttataacttcatgctggatgaacatatcaaagaaggttatcaagaaatcatcacaccttacatggttaaccacgattccatgtttggtacaggacaatatccaaaattcaaagaggacacctttgaattagctgataccaactttgtcctgattccaactgctgaagtgcctttgaccaattattaccgtggggaaatcctagacggcaaagaattgccaatttactttactgcaatgagcccatcttttcgttctgaagcgggttctgcgggtcgtgacacacgtggccttatccgcctacaccaattccacaaagttgaaatggttaaatttgctaaaccagaagaatcttaccaagaactagaaaaaatgactgctaatgctgaaaatattcttcaaaaacttggtttgccatatcgcgtcatttccctttgtactggagacatgggcttctcagctgctaaaacctatgaccttgaagtctggattccagctcaaaatacctatcgtgaaatttcatcatgttcaaatacagaagatttccaagcacgtcgtgctcaaatccgttaccgtgatgaggctgacggtaaggtcaaacttctccacacccttaatgggtcaggacttgctgtcggtcgtaccgtagcagccattttagaaaactaccaaaatgaagatggttctgttaccatccctgaagtactccgcccttacatgggtggcgaaaccgtcatttcacctaaa

SEQ ID NO: 5226 - protein, 425 aa, Streptococcus pyogenes
MLDLKRIRTDFDTVAAKLKNRGVSEDTLTHLKELDEKRRALLVQSEELKAERNIASAAIAQAKRQKEDATQQIADMQKVSADIKTIDNQLVAIDQQVTDIITVLPNTPHDSVPVGADEEDNVEIRRWGTPRDFDFEVKAHWDLGEDLDILDWERGAKVTGARFLFYKNLGARLERALYNFMLDEHIKEGYQEIITPYMVNHDSMFGTGQYPKFKEDTFELADTNFVLIPTAEVPLTNYYRGEILDGKELPIYFTAMSPSFRSEAGSAGRDTRGLIRLHQFHKVEMVKFAKPEESYQELEKMTANAENILQKLGLPYRVISLCTGDMGFSAAKTYDLEVWIPAQNTYREISSCSNTEDFQARRAQIRYRDEADGKVKLLHTLNGSGLAVGRTVAAILENYQNEDGSVTIPEVLRPYMGGETVISPK

SEQ ID NO: 5227 - DNA, 1065 bp, Streptococcus agalactiae
atgattatggaaaagtatacaagtattaaacaatcaggtcgtcattacggcttagaccttttaaggattatttccatgttcatgattgttattacgcatgttcttggaaaaggtggtctgagatcttcggttgagggacacgcagactcctattttatagtaacgtggattatccaagtcttagtttatggggccgttaactgttacgcactaataagtggttatgtgggaattaattcgcgttatcgttactcaaaattactgtctatctgggcacaggtttttttctacacctttacaataacagcactttttgcaatcacaggtcatgaagtgaccttgcttaattggagagatgcttttttccctattgtcagtgggcagtattggtacattactgcttactttggtctattggtttttatgcctgttattaataatggattaaatgccttgactgataaacaattaaaacaattggttttgttaatgtttattattttttcaattttaccagctgttttaaataatcgtgttccagaattttcattgagcaagggttttgaaatgacttggctactgattttatatattattggtgcctatttgaaacgtattgatttaaatatatttaaaacgtcatatttacttataatttatctattatcattggttgctacttatgccatgaagtttagcgttggtgatatttggtattggtatgtttcgcctactttaactttaggggcggtaagtttgtttatattatttgctagagcaagcattaagccctcgggattcttaaagaaaataattgttgtattagccccttcaaccttgggagtttatctctgtcatctccacccactaatagtaaaatattttgtaagagattttgcagagacgtttgtttatgagtccatttatctttacccatttttaattttaggagcagggattttaatttatttgttggcttttattgtagaacgtattagattacgaatatttaaagcaatccatttttctaactttttgagatggtttgatgacaagttcccatat

SEQ ID NO: 5228 - protein, 355 aa, Streptococcus agalactiae
MIMEKYTSIKQSGRHYGLDLLRIISMFMIVITHVLGKGGLRSSVEGHADSYFIVTWIIQVLVYGAVNCYALISGYVGINSRYRYSKLLSIWAQVFFYTFTITALFAITGHEVTLLNWRDAFFPIVSGQYWYITAYFGLLVFMPVINNGLNALTDKQLKQLVLLMFIIFSILPAVLNNRVPEFSLSKGFEMTWLLILYIIGAYLKRIDLNIFKTSYLLIIYLLSLVATYAMKFSVGDIWYWYVSPTLTLGAVSLFILFARASIKPSGFLKKIIVVLAPSTLGVYLCHLHPLIVKYFVRDFAETFVYESIYLYPFLILGAGILIYLLAFIVERIRLRIFKAIHFSNFLRWFDDKFPY

SEQ ID NO: 5229 - DNA, 360 bp, Streptococcus agalactiae
atggcacaatcattaaacaaaactgttgaatttcaaacaacaggagtttcgtatttaggtatggggaataaagttggaaaatttttagttggtgaccaggcattagaattctataacgataaaaatgtcaacgactatattcaaattccatggacatcaatcaatcaaattggagctaatgttagtcgaaaaaaaattagtcgtcactttgaggtctttacagaccaaggaaaatttttattcgcctctaaagactctggaacgatattaaagcatgcgagacgacatattggagacgataaagttgttaagcttcctaccctcatccagaccattttaaaaatattcaagtttaaaaaa

SEQ ID NO: 5230 - protein, 120 aa, Streptococcus agalactiae
MAQSLNKTVEFQTTGVSYLGMGNKVGKFLVGDQALEFYNDKNVNDYIQIPWTSINQIGANVSRKKISRHFEVFTDQGKFLFASKDSGTILKHARRHIGDDKVVKLPTLIQTILKIFKFKK

SEQ ID NO: 5231 - DNA, 357 bp, Streptococcus pyogenes
atggctcaatctttaaacactagtgtcgaatacaagacaaaagctgtctcctaccttggaatgggaggcaaagttggtcatattttactcggtgacaaggcccttgaattttacaacgataaaaatgtgaatgattatattcaaattccttggacagctatcaatcacatcggggctaatgtttcaagaaaaaaagttagccgccactttgaaatttttacggaccaaggcaagtttttatttgcttctggagactctggaaaaatcttaaaaatcactcgtcaacatattggtaatgagaaagtgattacattaccaaccttgatgcaaacctttattaacaaattttttcgacat

SEQ ID NO: 5232 - protein, 119 aa, Streptococcus pyogenes
MAQSLNTSVEYKTKAVSYLGMGGKVGHILLGDKALEFYNDKNVNDYIQIPWTAINHIGANVSRKKVSRHFEIFTDQGKFLFASGDSGKILKITRQHIGNEKVITLPTLMQTFINKFFRH

SEQ ID NO: 5233 - DNA, 909 bp, Streptococcus agalactiae
atgactgaacaaattaaattatcaaaatcagatcgtcaaaaagtttggtggcgttcacaattccttcaaggttcttggaactatgagcgtatgcaaaatatggggtgggcctatgctcttatcccagcattgaaaaaactttacactactaaagaagatcgtgctgctgcgcttgagcgccatatggaattctttaacacacatccatacgttgctgctccaattatcggtgtaacccttgctcttgaggaagaaaaagcaagcggtacacctgtcgaagacaaagcaattcaaggggttaaaatcggtatgatgggacctcttgctggtattggtgatccagtattctggtttactgtacgtcctatcttaggtgctcttggtgcttcacttgcctctgctggtaatatcctcggaccaatcatcttctttgttggttggaacctcattcgtatgtcattcttatggtacacacaagagttaggttacaaatcaggtaaagaaattactaaagatatgtctggtggtatcctccaagatattactaaaggtgcttcaatccttggtatgttcatccttgctgtccttgttaagcgttgggtagcaattaactttactgtagaccttcctaaaaagacattgtcagaaggggcatacatcaatttccctaaagaccatgttagtggacaacaattgcatgatatcctaggacaagttcagagtggcttaagccttgataaaatgcaaccacaaacacttcaaggacaacttgactcacttattcctggtttagctggattacttcttacattcttctgtatgtggttacttaagaagaaagtatcaccaattacaattatcatcggtttgtttatcgttggtattctagctcgccttgcaggtgtgatg

SEQ ID NO: 5234 - protein, 303 aa, Streptococcus agalactiae
MTEQIKLSKSDRQKVWWRSQFLQGSWNYERMQNMGWAYALIPALKKLYTTKEDRAAALERHMEFFNTHPYVAAPIIGVTLALEEEKASGTPVEDKAIQGVKIGMMGPLAGIGDPVFWFTVRPILGALGASLASAGNILGPIIFFVGWNLIRMSFLWYTQELGYKSGKEITKDMSGGILQDITKGASILGMFILAVLVKRWVAINFTVDLPKKTLSEGAYINFPKDHVSGQQLHDILGQVQSGLSLDKMQPQTLQGQLDSLIPGLAGLLLTFFCMWLLKKKVSPITIIIGLFIVGILARLAGVM

SEQ ID NO: 5235 - DNA, 909 bp, Streptococcus pyogenes
atgactgaacaaattaaattaactaaatcagaccgtcaacgtgtttggtggcgttcacaattcttacaaggttcttggaactacgaacgtatgcaaaacatgggctgggcttatgcacttatccctgctcttaaaaaattgtatacgtctcctgaagaccgtgcagctgctcttgagcgccacatggaattctttaacactcacccatacgttgcagctccaatcattggtgtaacacttgcccttgaagaagaacgcgcaaatggtacgccaattgatgacaaggctatccaaggggttaaaatcggtatgatgggacctcttgctggtatcggtgacccagtattctggtttacgattcgtcctatccttggggcacttggtgcttctttggcttcaacaggtaacatcgttggtccacttctgttcttctttggatggaaccttatccgtatggccttcttatggtatactcaagaatttggttacaaagctggttctgaaattactaaagacatgtcaggcggtatcctccaagacattactaaaggtgcttcaatccttggaatgtttatccttgcagtgcttgttcaacgttgggtatctatcaactttactatcgaccttcctggaaaacaattgtcagatggtgcctatgtggtcttcccagatggcgctgttaaaggtgctgaattgaaaactatccttgccaacgctattggtggtatgagccttgataaagtccaagctcaaacccttcaaggacaattggactctcttatcccaggtttagctggattactccttacattcctttgcatgtggttattgaagaaaaaagtttctccaatcgcaatcatcatcggcttgtttgcatttggtatccttgctcaccttgcaggtattatg

SEQ ID NO: 5236 - protein, 303 aa, Streptococcus pyogenes
MTEQIKLTKSDRQRVWWRSQFLQGSWNYERMQNMGWAYALIPALKKLYTSPEDRAAALERHMEFFNTHPYVAAPIIGVTLALEEERANGTPIDDKAIQGVKIGMMGPLAGIGDPVFWFTIRPILGALGASLASTGNIVGPLLFFFGWNLIRMAFLWYTQEFGYKAGSEITKDMSGGILQDITKGASILGMFILAVLVQRWVSINFTIDLPGKQLSDGAYVVFPDGAVKGAELKTILANAIGGMSLDKVQAQTLQGQLDSLIPGLAGLLLTFLCMWLLKKKVSPIAIIIGLFAFGILAHLAGIM

SEQ ID NO: 5237 - DNA, 141 bp, Streptococcus agalactiae
atggcaccaccaacttgcataccaccatttaaccaatcaggcattgcttcaagaatactttgtactgaagaagatggaatagctaaaagaagcgcagctgggaatgcaatacgtaatccttggagaaggagggcgataaag

SEQ ID NO: 5238 - protein, 47 aa, Streptococcus agalactiae
MAPPTCIPPFNQSGIASRILCTEEDGIAKRSAAGNAIRNPWRRRAIK

SEQ ID NO: 5239 - DNA, 555 bp, Streptococcus agalactiae
ttggttaaaagtggtgacttcactcaaaaaggtatcaactttgccttctctactgctgtacctctagctattgctggacttttccttacaatgattgttcgtacaatctcaactgcacttgttcacgctggtgacaaagctgcttctgaaggaaacttcgcagcaattgaacgttttcactttatcgccctccttctccaaggattacgtattgcattcccagctgcgcttcttttagctattccatcttcttcagtacaaagtattcttgaagcaatgcctgattggttaaatggtggtatgcaagttggtggtgccatggttgttgccgttggttacgctatggttatcaatatgatggctactcgcgaagtttggcctttctttgctcttggatttgctctagcagctttgaaccagttaactcttattgcaatgggtactattggtgttgctatcgccctcatctacatcagtttatcaaaaatgggtggaagcaaaggtacttctaacgcaggttctaacgatcctatcggcgatatcttagaggactac

SEQ ID NO: 5240 - protein, 185 aa, Streptococcus agalactiae
MVKSGDFTQKGINFAFSTAVPLAIAGLFLTMIVRTISTALVHAGDKAASEGNFAAIERFHFIALLLQGLRIAFPAALLLAIPSSSVQSILEAMPDWLNGGMQVGGAMVVAVGYAMVINMMATREVWPFFALGFALAALNQLTLIAMGTIGVAIALIYISLSKMGGSKGTSNAGSNDPIGDILEDY

SEQ ID NO: 5241 - DNA, 807 bp, Streptococcus pyogenes
atgtcagatatttcgattatttctgcaattttggtcgttatcattgccttcttcgctggtcttgaaggtatcctcgaccaatttcaaatgcaccaaccacttgttgcctgtactttgattggacttgtaactggacaccttgaagctggtgtcatccttggtggtacacttcaaatgcttgctcttggttgggcaaacatcggtgctgccgttgcccctgatgctgcccttgcctctgttgcagctgctatcatcatggtcaaaagtggcgactttactcaaaaaggaattacctttgcttactcaacagctatcccacttgctgttgctggtcttttccttacaatgatcgttcgtactttgtcaactgcccttgtacacgctggtgacaaagctgccgctgaaggtaatttcgcaggtattgaacgcttccactttattgcccttcttcttcaaggattgcgtatcgctgtccctgcagctcttcttgttgctgttcctacttcagccgtacaatctgttttgaatgctatgccaaactggttgaacgaaggtatgcaaatcggtggtgcgatggttgttgctgtaggttatgctatggttatcaacatgatggctactcgtgaagtatggccattcttcgccctaggttttgctcttgcagctatcagccaattaacccttatcgctatgggtgttatcggtgtagcaattgccttcatctaccttaatctttctaaaaaaggtggtaacggtggtaatgcagcaggttcagctgatccaatcggcgacatcttagaagactac

SEQ ID NO: 5242 - protein, 269 aa, Streptococcus pyogenes
MSDISIISAILVVIIAFFAGLEGILDQFQMHQPLVACTLIGLVTGHLEAGVILGGTLQMLALGWANIGAAVAPDAALASVAAAIIMVKSGDFTQKGITFAYSTAIPLAVAGLFLTMIVRTLSTALVHAGDKAAAEGNFAGIERFHFIALLLQGLRIAVPAALLVAVPTSAVQSVLNAMPNWLNEGMQIGGAMVVAVGYAMVINMMATREVWPFFALGFALAAISQLTLIAMGVIGVAIAFIYLNLSKKGGNGGNAAGSADPIGDILEDY

SEQ ID NO: 5243 - DNA, 120 bp, Streptococcus agalactiae
ttgacagcgttatcatggaattacattaatttagaaatagaaggttttatatatatgcgttccttatttggtggtttaagagaaaaagttgcaagtgattatgttaagattgtttttccc

SEQ ID NO: 5244 - protein, 40 aa, Streptococcus agalactiae
MTALSWNYINLEIEGFIYMRSLFGGLREKVASDYVKIVFP

SEQ ID NO: 5245 - DNA, 882 bp, Streptococcus agalactiae
ttgaaatttgaatacgtagcaaaagaaaggtgcaaagttaaaacacttttgaaaagtcatgatgtttcaagggggttattagcaaagattaagtacagaggtggtaagatttttgttaatggtgaagagcagaacgctattttcttattagagattggcgatgttgttacaatagatattcctgacgagccttctcacgaaactttggaaccagtgcctcacgatttagatattatttatgaggatgatcattttttgattttaaataaaccttttggtttcgctagtattcctagctctattcattcaaatacaattgctaattttataaaacactattatgtgtctaataactatgccaatcagcaggtccatattgtgacccggttggatcgagatacaagtggattaatgttattcgccaagcatggttatgcccatgctcgtctagataaacaacttcaggctaaagcaattgaaaaaaggtattatgcattagtatcagggagtggtgatttagcagatagtggtgatattatagctcctattgcacgagatgttgatagtattattacgaggcgcgtccatgaatcaggcaaatatgcacatactagttatcaagtagttgctcgttatggtgatgttagattagtggatatcaaattacatacagggcgtactcatcaaattagagttcactttgctcatatcggctttcctcttttgggagatgatttgtacggaggacgtatggatctaggaataaacaggcaagcattgcattgtcattctttgtctttttacgacccttttatgggaaaaataaataaacagacgctagacttgacagatgactttgacagcgttatcatggaattacat

SEQ ID NO: 5246 - protein, 294 aa, Streptococcus agalactiae
MKFEYVAKERCKVKTLLKSHDVSRGLLAKIKYRGGKIFVNGEEQNAIFLLEIGDVVTIDIPDEPSHETLEPVPHDLDIIYEDDHFLILNKPFGFASIPSSIHSNTIANFIKHYYVSNNYANQQVHIVTRLDRDTSGLMLFAKHGYAHARLDKQLQAKAIEKRYYALVSGSGDLADSGDIIAPIARDVDSIITRRVHESGKYAHTSYQVVARYGDVRLVDIKLHTGRTHQIRVHFAHIGFPLLGDDLYGGRMDLGINRQALHCHSLSFYDPFMGKINKQTLDLTDDFDSVIMELH

SEQ ID NO: 5247 - DNA, 903 bp, Streptococcus pyogenes
atgagatttgaatttgtagcagacaaacgaataaaagtaaaaacccttttaaaaagttatgatgtctctaaaggactattggctaaaatcaaatataagggcggtaatatattagtgaatggtattgaacaaaatgccatttatttattgcaagtgggagatgttgtcaccattgacattccaaacgaagagccctttgaaaagcttgaagccatcccttttgatttggatattgttcacgaggatgatcattttttggtgattaataaacccattggctttgccagtattccaagtgccatccactccaataccattgctaactttatcaaggcatattatgtggacaatcattacctagaccaacaagtgcatatcgtgactcgtttagacagagatacgagtggcttgatgttatttgctaagcatggttatgctcatgcaaggttggacaagcaactccaaactcgctcaatagagaaacgttattttgctctggtttctggaaatgggatgttgccagatgaaggagatattattgctccaattgggcgttcaaaagatagtattattaccagggcagttgaccctatgggcaaatatgccaagactagctataaggttgtggcgcgctattcagaaaatgtgcatttagtggatatcaaattgcatacaggacgtacccatcaaatcagagttcattttgcccatattggttttccacttttaggggatgacctttacggaggtcgtttggacttaggaataacaaggcaagctttacattgtcattatttgaatttcaaagatccatttacagaaagtgattgtagctatgcaatacacttgacagatgactttgatagcgttatcataggtttacagaaaaaagatagaggttat

SEQ ID NO: 5248 - protein, 301 aa, Streptococcus pyogenes
MRFEFVADKRIKVKTLLKSYDVSKGLLAKIKYKGGNILVNGIEQNAIYLLQVGDVVTIDIPNEEPFEKLEAIPFDLDIVHEDDHFLVINKPIGFASIPSAIHSNTIANFIKAYYVDNHYLDQQVHIVTRLDRDTSGLMLFAKHGYAHARLDKQLQTRSIEKRYFALVSGNGMLPDEGDIIAPIGRSKDSIITRAVDPMGKYAKTSYKVVARYSENVHLVDIKLHTGRTHQIRVHFAHIGFPLLGDDLYGGRLDLGITRQALHCHYLNFKDPFTESDCSYAIHLTDDFDSVIIGLQKKDRGY

SEQ ID NO: 5249 - DNA, 837 bp, Streptococcus agalactiae
gtgatgacacagatgaattttacagatagagcaacacgtgttgctataattgctaacgggaaatatcaaagcaagcgtgtagcctcaaagctctttgctgcttttaaacatgatcctgatttttatttatcaaaaaaggatcctgatattgtcatttctattggtggagatggtatgcttttgtcagccttccacatgtacgaaaaacaactggataaagtaaggtttgtcggtgttcatacaggacatttagggttttatacagactatcgagattttgaagttgacacattaattaataatttgaaaaatgataaaggtgaacaaatctcctatcccattttgaaagtaactattacccttgaagatggtcgagttattcgtgcgcgtgctttaaatgagtctactattaagcgtattgaaaaaacaatggtagcggatgttgttattaatcaagtggtatttgaaaggtttaggggagatggcattttagtttctacaccaaccggtagtactgcttacaataaatcactagggggggcagtactccacccaacgatagaagccttgcaactaacagaaatttctagtcttaataatcgcgtctatcgtaccttggggtcatcggttatcatccccaaaaaagatgctatagagatagttcctaaacgagttggtgtctatacaatttctatagataacaaaacagtccattacaagaatgttaccaaaatagaatatagtattgacgaaaaaagtattaactttgtttcaactccaagtcacactagtttttgggaacgtgttaacgatgcttttatcggagaacctgaacat

SEQ ID NO: 5250 - protein, 279 aa, Streptococcus agalactiae
MMTQMNFTDRATRVAIIANGKYQSKRVASKLFAAFKHDPDFYLSKKDPDIVISIGGDGMLLSAFHMYEKQLDKVRFVGVHTGHLGFYTDYRDFEVDTLINNLKNDKGEQISYPILKVTITLEDGRVIRARALNESTIKRIEKTMVADVVINQVVFERFRGDGILVSTPTGSTAYNKSLGGAVLHPTIEALQLTEISSLNNRVYRTLGSSVIIPKKDAIEIVPKRVGVYTISIDNKTVHYKNVTKIEYSIDEKSINFVSTPSHTSFWERVNDAFIGEPEH

SEQ ID NO: 5251 - DNA, 837 bp, Streptococcus pyogenes
gtgatgacacagatgaattatacaggtaaggtaaaacgagttgctattattgcaaatggtaagtaccaaagtaaacgcgtcgcctccaaacttttctccgtatttaaagatgatcctgatttctatctttcaaagaaaaatccggatattgtgatttctattggcggagatgggatgctcttatctgcctttcacatgtatgaaaaagaattagataaggtacgttttgtaggaatccacaccggtcatcttggcttttataccgattatagggattttgaagttgataaattaattgataatttaagaaaagacaagggagaacaaatctcttatccgattttaaaagttgctattactttagatgatggtcgtgtggttaaagcgcgtgctttgaatgaagcgacggttaagcgtattgaaaaaacgatggtagcagatgttattattaaccatgtcaaatttgaaagcttccgaggtgatgggatttcagtatcgaccccgacagggagcacagcctacaataaatctttaggtggtgctgtcttgcatccgacgattgaagcgctgcaattgacggaaatttccagtcttaataaccgtgtctttagaaccttgggctcatcaatcattattcccaaaaaagataagattgagttagtgccaaaacgattaggaatttataccatttccattgataataaaacctatcagttaaaaaatgtgacgaaggtggagtattttatcgacgatgagaaaattcattttgtttcctctccgagtcatacgagcttttgggaaagggtcaaggatgcctttattggagagattgactca

SEQ ID NO: 5252 - protein, 279 aa, Streptococcus pyogenes
VMTQMNYTGKVKRVAIIANGKYQSKRVASKLFSVFKDDPDFYLSKKNPDIVISIGGDGMLLSAFHMYEKELDKVRFVGIHTGHLGFYTDYRDFEVDKLIDNLRKDKGEQISYPILKVAITLDDGRVVKARALNEATVKRIEKTMVADVIINHVKFESFRGDGISVSTPTGSTAYNKSLGGAVLHPTIEALQLTEISSLNNRVFRTLGSSIIIPKKDKIELVPKRLGIYTISIDNKTYQLKNVTKVEYFIDDEKIHFVSSPSHTSFWERVKDAFIGEIDS

SEQ ID NO: 5253 - DNA, 669 bp, Streptococcus agalactiae
atgtcaatggattgggaaacatttctagacccttatattcaaacggttggtgaattaaaaataaagcttcgtggtattcgtaaacaatttagaaagcaaaatcgtcactctccaatagaatttgttactggacgcgtaaagtcggttgaaagtattcaagaaaagatggttttacgtggtatttcagaagaaaatcttgctcaggacttgcaagatattgcagggcttcgtatcatggtacaatttgtagatgacgttgatgaagtccttgctttattgagaaaacgtcatgacatgacagtggttcaggagcgagattatattacccatatgaaatctagtggatatcgttcatatcatgtcgttgtagagtatcctgtagacacaatagatggacaaaagaaagttttagcagaaatacaaatcagaactctggctatgaatttttgggcaaccatcgaacattcattaaattacaagtatcagggggacttccctgaagaaattaaacaaagactggagaaaacagcaaaaatcgctttagaattggatgaagaaatgcgtaagattcgcgaagatattcgtgaagcacagcttttatttgatcctttaaatcgaaaattgagcgatggtgtaggaaatagtgatgacacagatgaattttacaga

SEQ ID NO: 5254 - protein, 223 aa, Streptococcus agalactiae
MSMDWETFLDPYIQTVGELKIKLRGIRKQFRKQNRHSPIEFVTGRVKSVESIQEKMVLRGISEENLAQDLQDIAGLRIMVQFVDDVDEVLALLRKRHDMTVVQERDYITHMKSSGYRSYHVVVEYPVDTIDGQKKVLAEIQIRTLAMNFWATIEHSLNYKYQGDFPEEIKQRLEKTAKIALELDEEMRKIREDIREAQLLFDPLNRKLSDGVGNSDDTDEFYR

SEQ ID NO: 5255 - DNA, 669 bp, Streptococcus pyogenes
atgaccttagattgggaagaatttttagatccttatatccaaacagttggtgaattaaaaataaaactacggggtattcgcaagcaatatcgtaagcaaaatcgttattctccgattgaatttgttacgggacgtgttaagtcaattgaaagtattaaagaaaaaatgattttacgtggtgttattgaagaaaatatagcacaagatattcaagatattgctggactacgtattatggttcagtttgttgatgatgtggaagaagtcttagctctattgcgtcaacgacaagacatgacaattgtttatgaacgagattatattcgcaatatgaagtccagtggctacaggtcttatcatgtggtggttgagtaccctgttgacaccattgaaggtcaaaaaaaggtcttagcggagattcagattcgtactttggcaatgaacttttgggcgaccattgagcattctttaaattataaatatggtggagacttcccagaagaaattaaaaagcgtcttgaagtgactgctaaaattgctttagaattagacgaagaaatgcgtaagattcgagaagatattcgggaggctcaattattgtttgaccccgtgacacgaaatttaagtgatggtgtaggaaatagtgatgacacagatgaattatacagg

SEQ ID NO: 5256 - protein, 223 aa, Streptococcus pyogenes
MTLDWEEFLDPYIQTVGELKIKLRGIRKQYRKQNRYSPIEFVTGRVKSIESIKEKMILRGVIEENIAQDIQDIAGLRIMVQFVDDVEEVLALLRQRQDMTIVYERDYIRNMKSSGYRSYHVVVEYPVDTIEGQKKVLAEIQIRTLAMNFWATIEHSLNYKYGGDFPEEIKKRLEVTAKIALELDEEMRKIREDIREAQLLFDPVTRNLSDGVGNSDDTDELYR

SEQ ID NO: 5257 - DNA, 570 bp, Streptococcus agalactiae
atgacacacctagaaattgaatacaaaactctattgaataaagacgaatttaatcgtctaacaagcttattttctcatgttcaacctattactcaaaccaattactattttgacacagaaacatttgaaatgaaagcacaccgaatgtcacttcgtattagaacgttacctaaccgtgccgaactaacactaaaaatccctagagaagtgggaaatttagaacacaatcatgaccttactttagaagaagctaaatatatcgttaaaaatggccaattccctgaagatactgagattgcttctttaatccttgaaaagggagttgatccaaccaaattagctgtctttggacaacttacaacaacaagacgagagatggaaacttcaatcggcttaatggctctagacagcaatatatatgctgatattaaagattatgaacttgagttagaagtcaaacaacctaaacaagggaaaagagatttcgaccagtttttaaaagaaaataatattaattttaaatacgccaaaagtaaggtggctagattctctgctactttaaaaaataac

SEQ ID NO: 5258 - protein, 190 aa, Streptococcus agalactiae
MTHLEIEYKTLLNKDEFNRLTSLFSHVQPITQTNYYFDTETFEMKAHRMSLRIRTLPNRAELTLKIPREVGNLEHNHDLTLEEAKYIVKNGQFPEDTEIASLILEKGVDPTKLAVFGQLTTTRREMETSIGLMALDSNIYADIKDYELELEVKQPKQGKRDFDQFLKENNINFKYAKSKVARFSATLKNN

SEQ ID NO: 5259 - DNA, 576 bp, Streptococcus pyogenes
atgactaacctagaaatcgaatataaaactctacttacaaaaaatgagtataaccgtcttttatctcaaatgaaacatgtgacgcctgttacacaaactaattactatattgatacaaaagcatttgatttaaaagctaacaaaatgtcattacgtattcgaacatttgtaaatagcgccgaattaaccctaaaagtgccagaaaaagtggggaatcgtgagtacaatgtccctctttttcttgaacaagcaaaagatatgattaaacatgggaatcttcctgaatcaactgctcttgatattattatttcaaaaggtatcaaaccatctgcactggtaacttttggcaatttaactaccgttcgtcgcgagacagtgataccgataggtaaattggccttagactataacctatatgccaataccaaagactatgaattagaattagaagtaagtgacgctcttcaaggaaagattgattttgattcttttttatctgaatatcacattactttcaaatatgctaaaagcaaagtagctcggtgtattaataccttaaaaaagttcaacgataaa

SEQ ID NO: 5260 - protein, 192 aa, Streptococcus pyogenes
MTNLEIEYKTLLTKNEYNRLLSQMKHVTPVTQTNYYIDTKAFDLKANKMSLRIRTFVNSAELTLKVPEKVGNREYNVPLFLEQAKDMIKHGNLPESTALDIIISKGIKPSALVTFGNLTTVRRETVIPIGKLALDYNLYANTKDYELELEVSDALQGKIDFDSFLSEYHITFKYAKSKVARCINTLKKFNDK

SEQ ID NO: 5261 - DNA, 105 bp, Streptococcus agalactiae
atgatagcaattggagagtcaaggtattctgccaaactacgagcacgcttgattccagaatttttaggactaacaacgacgacatcttcaccagagagaccgagt

SEQ ID NO: 5262 - protein, 35 aa, Streptococcus agalactiae
MIAIGESRYSAKLRARLIPEFLGLTTTTSSPERPS

SEQ ID NO: 5263 - DNA, 132 bp, Streptococcus agalactiae
atgagatggctagctgtcagatatttaatattgctaggaatacgctctttagataaaacagagtctgttacgataatttctctaattggtgcagactctaaaatatcagctgcgccgccagcaaaaagccca

SEQ ID NO: 5264 - protein, 44 aa, Streptococcus agalactiae
MRWLAVRYLILLGIRSLDKTESVTIISLIGADSKISAAPPAKSP

SEQ ID NO: 5265 - DNA, 972 bp, Streptococcus agalactiae
atggcagaacaatacgccgataaacaaatcaaacttttctcattaaccgctaatagagaaattgctgaaaaaatttcccaagcttcaggaattcctttgggtaagatgtcatcacgtcaattctctgatggcgaaattatgattaatattgaggaaacggtgcgcggtgacgatatctatatcatccaatctacaagcttcccagtcaatgataatctctgggaattactcattatgattgacgcttgcaaacgtgcaagtgctaatactgttaacatcgtagtcccttattttggatactctcgtcaggaccgcatcgctgcatctcgtgaacctattactgcaaaattggtcgctaatatgttagttaaagctggagttgatcgagttcttaccctcgacttacatgcagtgcaagtacaagggttcttcgatatcccagttgacaatctttttactgtcccactatttgctgaacactataatcaactcggtctctctggtgaagatgtcgtcgttgttagtcctaaaaattctggaatcaagcgtgctcgtagtttggcagaataccttgactctccaattgctatcattgattatgcacaagatgattctgaacgtgaagaaggctatattattggtgaggtagaaggtaagaaagctattattattgatgatattttaaatacaggaaaaacctttgccgaagctgcaaaaattttagaacgtggtggagcaactgagatttatgctgttgctagtcatgggctttttgctggcggcgcagctgatattttagagtctgcaccaattagagaaattatcgtaacagactctgttttatctaaagagcgtattcctagcaatattaaatatctgacagctagccatctcattgcagatgctattatccgtatccatgaaagaaaacctctaagtccattattttcatatcgttcagataagaaggat

SEQ ID NO: 5266 - protein, 324 aa, Streptococcus agalactiae
MAEQYADKQIKLFSLTANREIAEKISQASGIPLGKMSSRQFSDGEIMINIEETVRGDDIYIIQSTSFPVNDNLWELLIMIDACKRASANTVNIVVPYFGYSRQDRIAASREPITAKLVANMLVKAGVDRVLTLDLHAVQVQGFFDIPVDNLFTVPLFAEHYNQLGLSGEDVVVVSPKNSGIKRARSLAEYLDSPIAIIDYAQDDSEREEGYIIGEVEGKKAIIIDDILNTGKTFAEAAKILERGGATEIYAVASHGLFAGGAADILESAPIREIIVTDSVLSKERIPSNIKYLTASHLIADAIIRIHERKPLSPLFSYRSDKKD

SEQ ID NO: 5267 - DNA, 978 bp, Streptococcus pyogenes
atgactgaacgatatgctgacaagcaaatcaaactgttctcactcacatcaaatcttccaattgctgaaaaaattgctaaagctgctggaatccctcttggaaaaatgtcttcacgtcaattttccaatggagaaattatgatcaatattgaagaaacagtgcgtggagatgatatctatattattcaatccactagttttcctgtcaatgataatctttgggaattactcatcatgattgatgcttgtaaacgtgcaagtgctaataccgtcaatattgtattgccatactttggttactctcgtcaagaccgtgtcgctaagccccgcgaaccgattactgctaaactagtagctaatatgctgactaaagctggtattgatcgtgtagtgacgcttgacttacatgctgttcaggtacaaggtttttttgatattccagtggataacctctttacagtccctctttttgcagaacgttacagtaaattaggcttatcaggttctgatgttgttgtcgttagccctaaaaattctggaattaaacgtgctagaagcttggctgaatatcttgattccccgattgctattatcgactatgcacaagatgattctgaacgtgaacaaggttatattattggtgatgtttctggtaaaaaagccattttaattgatgatattttaaatactgggaaaacctttgcagaagctgctaaaattcttgaacgctcaggcgctactgatacttacgcggtcgctagccatggcttatttgctggtggagctgctgatgtattagaaacagctccaatcaaagaaattatcgttacagattctgttaaaactaaaaatcgtgtgccagaaaacgttacttatcttagcgccagtgatttaatcgcagaagctattattcgtatccatgaaagaagacccttaagtccgcttttttcttatcaacctaaaggcaaaaataacgca

SEQ ID NO: 5268 - protein, 326 aa, Streptococcus pyogenes
MTERYADKQIKLFSLTSNLPIAEKIAKAAGIPLGKMSSRQFSNGEIMINIEETVRGDDIYIIQSTSFPVNDNLWELLIMIDACKRASANTVNIVLPYFGYSRQDRVAKPREPITAKLVANMLTKAGIDRVVTLDLHAVQVQGFFDIPVDNLFTVPLFAERYSKLGLSGSDVVVVSPKNSGIKRARSLAEYLDSPIAIIDYAQDDSEREQGYIIGDVSGKKAILIDDILNTGKTFAEAAKILERSGATDTYAVASHGLFAGGAADVLETAPIKEIIVTDSVKTKNRVPENVTYLSASDLIAEAIIRIHERRPLSPLFSYQPKGKNNA

SEQ ID NO: 5269 - DNA, 1116 bp, Streptococcus agalactiae
ttgatgatttatttagacaatgctgctactaccgctctaaccccatctgttattgagaaaatgaccaatgtcatgacaagtaactatggtaatccatctagtatacatacctttgggcgtcaagcaaatcaacttttacgtgaatgtcgacaaattattgctgaatatctaaatgttaattcacgtgaaattattttcacttctgggggaactgagagcaacaatacagctatcaaagggtatgctcttgcaaatcagctaaaaggtaaacatattattacctctgaaattgaacatcattcagtcctacatactatgacttacttatcagagcgatttggttttgatattacttacttaaaaccaaatcatggacaaataactgcaaaagacgtgcaagaagctttacgagatgatactattatggtatctctcatgtttgttaataatgaaaccggggactttttaccaattcaagagattggtcagcttctcaggaaccaccaagctgtttttcacgttgatgccgttcaagtctttagcaaaatggaacttgatcctcattctttaggaattgactttttagctgcttctgcccataaatttcacggtccaaaaggtgttgggatactttactgtgctccccatcactttgatagtctacttcatggtggagaccaagaggaaaaaagacgtgcttcaactgaaaatataattggtattgctggaatgtctcaagctcttactgatgctacgactaacacccttaaaaattggactcacattagtcagctgagaacgacctttttagatgctatttcagaccttgacttctatcttaataacggtcaagactgcttacctcatgtacttaatataggttttcctggacagaataatggcttgttattgacacaattagatttagctggattcgcagtttcaacaggttctgcatgtactgcaggaacagtcgaacctagccatgtcttaacaagcttgtacggagccaactcaccacgtctaaatgaatcaatacgtattagtttttcagaactaaatacccaagaagaaattcttgaattagctaaaaccttaagaaaaattataggagat

SEQ ID NO: 5270 - protein, 372 aa, Streptococcus agalactiae
MMIYLDNAATTALTPSVIEKMTNVMTSNYGNPSSIHTFGRQANQLLRECRQIIAEYLNVNSREIIFTSGGTESNNTAIKGYALANQLKGKHIITSEIEHHSVLHTMTYLSERFGFDITYLKPNHGQITAKDVQEALRDDTIMVSLMFVNNETGDFLPIQEIGQLLRNHQAVFHVDAVQVFSKMELDPHSLGIDFLAASAHKFHGPKGVGILYCAPHHFDSLLHGGDQEEKRRASTENIIGIAGMSQALTDATTNTLKNWTHISQLRTTFLDAISDLDFYLNNGQDCLPHVLNIGFPGQNNGLLLTQLDLAGFAVSTGSACTAGTVEPSHVLTSLYGANSPRLNESIRISFSELNTQEEILELAKTLRKIIGD

SEQ ID NO: 5271 - DNA, 1125 bp, Streptococcus pyogenes
atgacttactttgataacgccgccaccacaccacttagtcctaatgtgattagggcgatgacagcagctatgcaagataactttggtaacccctctagtattcatttctacggtcgccgagccaataaaatccttcgtgaatgccgacaagctatcgctagaaacttgggggcaagtgaacagcaaattatagtaacgtccggtggaactgaaagcaataatatggccataaaaggctatgctttagctcatcaagcaaagggcaaacatctcatcacaactactattgagcaccactctgtgcttcataccatggcctatctcgaagagcgatttggttttgaggtcacttatttgccttgtcaaaatggacaaataaatttatctgacttaaaacaagccttgagagatgacaccattttggtaagcataatgtatgccaataacgaaacaggtgacctgttacctattaaggacattgggaatctgctcaaagaccatcaagctgcttttcatgttgatgccgttcaagctgttggcaaactcaagattattcctagcgaacttgggattgactttttatctgcttctgctcacaaatttcatggtcctaaaggatgcggctttttatacagtaacggacaaccaatcgaccctcttcttcacgggggtgatcaagaaggaaagcgacgcgcaagtactgaaaatatgttaggtattattggtatggcacaagctttgactgatgctatgacttgtcttgaccaatcaactgatcacattattagtttacgtcatcacttgattagcctcctagaaggactaccctactatattaatcaaggtactcattatcttcctcatgttctcaatattggatttttaggctaccaaaatactattttactaacacaacttgacttagcaggcattgcagtatcaactggttctgcttgtactgctggagctgttaatccaagtcatgttttagctgcgtactatggggatgactcttctcgtttaaaagaatcaattcgtatcagtttttcagatcaaaatagcattgaagatgttaatcaattagctcaaacattaaaaaatattttaggaggaacagatggcttt

SEQ ID NO: 5272 - protein, 375 aa, Streptococcus pyogenes
MTYFDNAATTPLSPNVIRAMTAAMQDNFGNPSSIHFYGRRANKILRECRQAIARNLGASEQQIIVTSGGTESNNMAIKGYALAHQAKGKHLITTTIEHHSVLHTMAYLEERFGFEVTYLPCQNGQINLSDLKQALRDDTILVSIMYANNETGDLLPIKDIGNLLKDHQAAFHVDAVQAVGKLKIIPSELGIDFLSASAHKFHGPKGCGFLYSNGQPIDPLLHGGDQEGKRRASTENMLGIIGMAQALTDAMTCLDQSTDHIISLRHHLISLLEGLPYYINQGTHYLPHVLNIGFLGYQNTILLTQLDLAGIAVSTGSACTAGAVNPSHVLAAYYGDDSSRLKESIRISFSDQNSIEDVNQLAQTLKNILGGTDGF

SEQ ID NO: 5273 - DNA, 636 bp, Streptococcus agalactiae
gtgattatggataagtctattcctaaagcaactgctaaacgtttatcactgtactaccgtatttttaaacgttttaatactgatggcatcgaaaaagctagttccaaacaaattgcagatgccctaggtatcgattctgctactgttcgacgtgatttttcttattttggtgaactaggacgccgtggttttggttatgatgtcaaaaaacttatgaacttctttgcagaaatattgaacgatcattctacaacaaatgttatgttggtggggtgtggaaatatcggtagagctctcttgcattatcgtttccacgatcgcaataaaatgcaaatttcaatggcttttgatttagatagcaatgatttagttggtaaaacaaccgaagatggcattcctgtctacggtatttcgactatcaatgaccatttaatagatagtgatattgaaactgctatcctaacagtacctagtacagaagcccaagaagttgctgacatcttagtcaaagcaggtataaaaggcatcttgagtttttctccagttcatttaacattaccaaaagatatcattgttcagtatgtagatttaacaagcgaattacaaactttactttatttcatgaaccagcagcaa

SEQ ID NO: 5274 - protein, 212 aa, Streptococcus agalactiae
MIMDKSIPKATAKRLSLYYRIFKRFNTDGIEKASSKQIADALGIDSATVRRDFSYFGELGRRGFGYDVKKLMNFFAEILNDHSTTNVMLVGCGNIGRALLHYRFHDRNKMQISMAFDLDSNDLVGKTTEDGIPVYGISTINDHLIDSDIETAILTVPSTEAQEVADILVKAGIKGILSFSPVHLTLPKDIIVQYVDLTSELQTLLYFMNQQQ

SEQ ID NO: 5275 - DNA, 642 bp, Streptococcus pyogenes
gtggttattgacaaatctattccaaaagcgactgcaaagcgcttatcactttattaccgtatttttaaacgattccatgctgaccaagttgaaaaagccagttctaaacaaattgcagatgcaatgggaattgactctgctactgtacgccgtgacttttcttattttggagaattggggcgtcgtgggtttggctatgatgttaccaaattgatgaatttttttgctgacttgcttaatgatcactctacaacaaacgttatcttagttggatgcggtaatatagggcgtgctctattacattaccgcttccatgatcgtaataagatgcaaattgccatgggttttgataccgatgataacgctcttgttggtactaaaacagctgataatattccagtccatggtatctcatctgtcaaagaacggattgcgaacactgacattgaaacggctatcttaacggttcccagcattcatgctcaagaagttactgatcaacttattgaagcaggaatcaaaggaatcttgagttttgctcctgttcacctacaagttcctaaaggagttattgttcaatctgtcgatttgaccagtgagctccagacactactctattttatgaatcaaaatcatctagat

SEQ ID NO: 5276 - protein, 214 aa, Streptococcus pyogenes
VVIDKSIPKATAKRLSLYYRIFKRFHADQVEKASSKQIADAMGIDSATVRRDFSYFGELGRRGFGYDVTKLMNFFADLLNDHSTTNVILVGCGNIGRALLHYRFHDRNKMQIAMGFDTDDNALVGTKTADNIPVHGISSVKERIANTDIETAILTVPSIHAQEVTDQLIEAGIKGILSFAPVHLQVPKGVIVQSVDLTSELQTLLYFMNQNHLD

SEQ ID NO: 5277 - DNA, 711 bp, Streptococcus agalactiae
ttggtttacgaatattatgactggaggtgttttatgtaccatattgaattaaaaaaggaagctttattaccaagagaacgcctagttgatttaggcgcagatagattgagtaatcaggagttattagccattctcttacgtacaggtattaaagaaaaacctgttctggaaatttcaacgcaaattttagaaaacataagcagtttagcagattttggtcaattatccttacaggagttgcaatccattaaaggaatcggtcaggttaaatccgtcgaaataaaagctatgctagaactagcaaaacggattcacaaagctgaatatgatcgtaaagagcaaattttaagtagtgaacaattagcgaggaaaatgatgctcgaattaggggataaaaaacaagaacatttagtagctatttatatggatacacaaaatcgtattatcgaacagagaactatttttattggtactgtacgtcgttcagtagcagagccaagagaaattctacattatgcttgtaaaaacatggcaacttctttgattatcatacataatcatccctcaggttctccaaagcccagtgaaagtgatttaagtttcactaaaaaaataaaacgatcatgtgatcatctgggaattgtctgcctagatcacatcatcgttggaaaaaataaatattatagttttcgagaagaagcagatatttta

SEQ ID NO: 5278 - protein, 237 aa, Streptococcus agalactiae
MVYEYYDWRCFMYHIELKKEALLPRERLVDLGADRLSNQELLAILLRTGIKEKPVLEISTQILENISSLADFGQLSLQELQSIKGIGQVKSVEIKAMLELAKRIHKAEYDRKEQILSSEQLARKMMLELGDKKQEHLVAIYMDTQNRIIEQRTIFIGTVRRSVAEPREILHYACKNMATSLIIIHNHPSGSPKPSESDLSFTKKIKRSCDHLGIVCLDHIIVGKNKYYSFREEADIL

SEQ ID NO: 5279 - DNA, 678 bp, Streptococcus pyogenes
atgtattctataaaatgtgatgataataaagccatgccaagagaacgtttgatgcgactaggagcagagtctctaagtaatcaagaattattagcaattttattacgaacaggtaataaagaaaagcatgtcttagagctgtcatcctatcttttatcgcatttagacagtctggcagattttaaaaagatgtctttgcaagaattacaacatttggcaggtataggaaaagttaaagcgattgaaattaaagctatgattgagttggtttcccgaattttagcgacagataagacattaactgatagcgtattaaccagtgttcaggtcgctgaaaaaatgatggcagctttaggagataaaaaacaagagcatttagtcgtattgtatttagataatcaaaatcgtattattgaagaaaaaactatttttattgggactgtccgacgttcacttgcagaaccaagagaaattttatactatgcctgtaaaaatatggcgactagtctcattgttattcataatcatccttcaggaaatattgaacctagttctaacgattattgctttactgaaaaaataaaacgatcatgtgaagatttaggcattatctgtctagatcacattatcgttagctataaagattattatagttttcgagaaaaatcaacccttttt

SEQ ID NO: 5280 - protein, 226 aa, Streptococcus pyogenes
MYSIKCDDNKAMPRERLMRLGAESLSNQELLAILLRTGNKEKHVLELSSYLLSHLDSLADFKKMSLQELQHLAGIGKVKAIEIKAMIELVSRILATDKTLTDSVLTSVQVAEKMMAALGDKKQEHLVVLYLDNQNRIIEEKTIFIGTVRRSLAEPREILYYACKNMATSLIVIHNHPSGNIEPSSNDYCFTEKIKRSCEDLGIICLDHIIVSYKDYYSFREKSTLF

SEQ ID NO: 5281 - DNA, 1131 bp, Streptococcus agalactiae
atgaaatttgaaaaacggcaggtctattatgttgtcataacatttgctatttgctatgctatacaggcttattggggagctgtttctaatattttaactacgcttcataaggcaatatttccttttttgatgggagctggaattgcctatattattaatattgtaatgtcagtctatgagcgattatatataaagctttttaaaggatctagactattaatggcaatcaagcgtagtgtttctatgattttatcctatgcaacttttattggtttaattgtctggctattttcaattgtcattccagatttgatttctagtttgagttctttattggttattgataccggagcacttgctaaattggttaataatctcaatgagaataaacaaatttctgaggttttaaattatatgggaacagataaagacttagtttctactttaagtggttatagccagcagattttgaagcaagttttatctgttttaacaaatttactaacctcagtttcctctattgcggcaacactcctgaatgtttttgttagttttattttttcaatttacgttttggcaaacaaggagcagttgggacgtcagtttaatttgttaattgatacctatttaggttcaacaggcaaaacattccattacgttcgtcatatccttcatcaacgtttccatggtttttttgtaagccaaactttagaagctatgattttaggaagtttgacggttattggtatgttgatcttccaatttccttatgctttaacagttggggttttagttgcttttacagctctaataccggttgtgggagcctacattggtgttacaatcggtttcatcttaattgctactgaatcgcttactgaagcattcttgtttgttcttttcttgatccttttacaacaatttgagggaaatgtcatttatccgaaagttgtcggtggatcgattggactgccttctatgtgggttttaatggctattactatcggaggtgctttatgggggattttaggcatgttacttgctgttcctgttgcagctactatctatcagattgtaaaagatcatattatcaagcgacaaacgcttagaaattgtgcacgaacctatcgt

SEQ ID NO: 5282 - protein, 377 aa, Streptococcus agalactiae
MKFEKRQVYYVVITFAICYAIQAYWGAVSNILTTLHKAIFPFLMGAGIAYIINIVMSVYERLYIKLFKGSRLLMAIKRSVSMILSYATFIGLIVWLFSIVIPDLISSLSSLLVIDTGALAKLVNNLNENKQISEVLNYMGTDKDLVSTLSGYSQQILKQVLSVLTNLLTSVSSIAATLLNVFVSFIFSIYVLANKEQLGRQFNLLIDTYLGSTGKTFHYVRHILHQRFHGFFVSQTLEAMILGSLTVIGMLIFQFPYALTVGVLVAFTALIPVVGAYIGVTIGFILIATESLTEAFLFVLFLILLQQFEGNVIYPKVVGGSIGLPSMWVLMAITIGGALWGILGMLLAVPVAATIYQIVKDHIIKRQTLRNCARTYR

SEQ ID NO: 5283 - DNA, 1146 bp, Streptococcus pyogenes
atgataattaaaggagttaccatgaaatttgaaaaaaaacaagtcttctatttagtccttacgtttatcttatgctatgggatcctagcaaactggcgaaatggaacggctatcgtcacgactatttacaaaacaagccttccttttttttatggagcagcaggtgcctatattgttaatattgtaatgagcgcttacgaaaaggtatatgtttatatctttaaagactggtcacatgtcttaaaagtaaaacggggtatttgtttactgttagcgtatttgacattttttattttaattacttggattatttccattgtcattccagacttaattacaagtattagtactctaacaaaatttgatactataacgatacaagaagttgttaacaatcttgagcacaataaactgttagcacgtactattcagtatattggtggcgatggcaaacttacagagacgattgctaactatagtcaacagttattaaagcaatttcttactgttttgacaaatattttaacatctgtcacggttattgcttctgcaattattaatctttttattagttttgttttttcgttatacgttttagcaagtaaagaagatctttgtcgtcagggaaatactttagtagatacttatactggtaagtacgctaaacgcattcattacttgttagagttgttgcatcagcgttttcacggattttttgttagtcagaccttagaagctatgattttaggttcgctgactgctagtggcatgtttatattaagattaccatttgcagggactattggcgttttagtagcttttacagcattgattccagttataggtgcttcaattggagcagctattggatttattttaattatgactcagtccatgtcacaggccattatttttatcatttttttaattattttgcagcagattgaaggcaattttatttatccgaaagtagttggtggatcgattggattaccggctatgtgggtattaatggcaattacaataggcgcttctttaaagggaatagttggtatgattattgcagttcctttagcagcgacactttatcaagtgattaaagataatattcaaaaaagacaagctattcaaaaaaaacaagtttcc

SEQ ID NO: 5284 - protein, 382 aa, Streptococcus pyogenes
MIIKGVTMKFEKKQVFYLVLTFILCYGILANWRNGTAIVTTIYKTSLPFFYGAAGAYIVNIVMSAYEKVYVYIFKDWSHVLKVKRGICLLLAYLTFFILITWIISIVIPDLITSISTLTKFDTITIQEVVNNLEHNKLLARTIQYIGGDGKLTETIANYSQQLLKQFLTVLTNILTSVTVIASAIINLFISFVFSLYVLASKEDLCRQGNTLVDTYTGKYAKRIHYLLELLHQRFHGFFVSQTLEAMILGSLTASGMFILRLPFAGTIGVLVAFTALIPVIGASIGAAIGFILIMTQSMSQAIIFIIFLIILQQIEGNFIYPKVVGGSIGLPAMWVLMAITIGASLKGIVGMIIAVPLAATLYQVIKDNIQKRQAIQKKQVS

SEQ ID NO: 5285 - DNA, 1437 bp, Streptococcus agalactiae
atgatggtaaaacaagtatttccaaaaggttttttatggggcggggcaactgctgccaatcaatgcgaaggagcttacaatgttgatggacgtggcctagcaaatgtagatgttgttcctactggagaagatcgatttgcaattatttcaggacaaaagaaaatgtttgattttgaggaaggatacttttatccagcaaaagaatcaatagatttttatcaccattataaagaggaccttgcattacttgcagaaatgggtttcaaaacctatcgtatgtcaatagcatggacgcgtatttttccaaagggtgatgagctatatccaaatgaagctggtcttcagttttatgaaaatatttttaaagagtgtcgtaagtatggtattgaacctttggtaaccattacacattttgactgtcctatctaccttattaaacattacggtgggtggcggagccgtaaaatgattggtttttatgagcgccttgtacgagctttatttactcgttttaaggggttagttaaatattggttgacctttaacgaaatcaatatgattttacacgctccttttatgggcgctggcttatattttgaagatggtgaaaatcaagagcaaattaaatatcaagcagctcaccatgagttagtggcttcggctattgcagtaaaaattgctcatgaagttgatccaaataatcaaatcggatgtatgctagctgcaggtcaatactatccaaatacgtgtcatccacaagattattgggcttcgatgcaaaaaaatagagaaaattatttttttattgatgtgcaagctcgtggcaaataccctaattatgctaaaaaacattttgagcatttaggtatttcaattcaaatgacagcagaagatcttgctttgttaagagactatacggttgattttatttcattttcttactattcaagccgagtagcttcaggtaatccaactgtcagtgaacaggttcaagaaaatattttcgcatctcttaagaatccttacttgaaatcttctgaatggggatggcaaattgatccgcttggattacgtattaccttaaatgctatctgggatcgttatcaaaaaccgatgtttattgttgaaaatggacttggagcagtagatattcctgatgagaatggttacgtagaagatgattatcgtattgattacctccgtcagcacattgctgcaatgagagatgctatatatgtagatggtgttaatctaattggctatactacatggggatgtattgatttagtatctgcaggaactggtgaaatggaaaaacgctatggtttcatttatgttgatcgcaataataaaggagaggggacactcaagcgttacaagaaaaaatcgttttattggtacaagaaggttattgcaagtaatggcagtcaaatagaa

SEQ ID NO: 5286 - protein, 479 aa, Streptococcus agalactiae
MMVKQVFPKGFLWGGATAANQCEGAYNVDGRGLANVDVVPTGEDRFAIISGQKKMFDFEEGYFYPAKESIDFYHHYKEDLALLAEMGFKTYRMSIAWTRIFPKGDELYPNEAGLQFYENIFKECRKYGIEPLVTITHFDCPIYLIKHYGGWRSRKMIGFYERLVRALFTRFKGLVKYWLTFNEINMILHAPFMGAGLYFEDGENQEQIKYQAAHHELVASAIAVKIAHEVDPNNQIGCMLAAGQYYPNTCHPQDYWASMQKNRENYFFIDVQARGKYPNYAKKHFEHLGISIQMTAEDLALLRDYTVDFISFSYYSSRVASGNPTVSEQVQENIFASLKNPYLKSSEWGWQIDPLGLRITLNAIWDRYQKPMFIVENGLGAVDIPDENGYVEDDYRIDYLRQHIAAMRDAIYVDGVNLIGYTTWGCIDLVSAGTGEMEKRYGFIYVDRNNKGEGTLKRYKKKSFYWYKKVIASNGSQIE

SEQ ID NO: 5287 - DNA, 1422 bp, Streptococcus pyogenes
atgggaatttttccaaaagatttcttatggggcggcgcagtagctgccaaccaagtggaaggagcatttgaggcagacgcaaaaggtttgtccgtacaagatgttctaccaaatggtggactaggagaatggacagatagtcctaccagcgataatttaactttagaggcgattgatttttaccaccgctacaaagaagacattgctctttttgccgagatgggctttaaagtctttcgaacgtctattgcttggtctcgtatttttccaaatggtgacgatgaccagcccaatgaagcaggtttgcaattttatgatgacttattcgatgaattgttgaactatggcatcgaacccttagtgaccttgtcgcattatgagacacctctgcatttggccaaagcctataatggttggacagatagacgtctgattggcttttttgagcgctttgctcagacagtcatggaacgctataaggacaaagtcaaatactggttgacctttaacgaagtcaactcgattttacacatgccctttaccagtggtggcatcatgacagaaaaagaaaagctgagcctgcaagatttataccaagctattcatcatgaattggtagcatctgctagtgtcacaaagctagcgcatgaaatcaatcctgatgttaaagttgggtgtatgattttggcgatgcctgcttacccaatgacctctgatcctcgtgatatacttgctgcgcatgcatttgaaaatcttaatctcttattttcagatattcatgtgagaggcaagtatccttcatatattaagtcgtattttaaagaaaatgggattgagattgtttttgaagacggagacaaggaattattagcggaacatacggttgattttctatcctttagctattacatgagtgtcacacaagcccacaatcctgaagcttacacatctggtcagggaaatattctaggtggtttgtccaatccatatttagaatcttcggagtggggttggcagatagacccaattggtctgcgattggtcttgaatcagtactatgaccgctaccagattcctttgtttattgttgaaaatggcttaggtgcaaaggatcagctggtgcaaaccgcagatggcagcatgacggttcacgatgattatcgcattgactacatgagtcagcatctcgtacaagttgccaaagcgattgaagatggcgttgaggtcatgggttacacttcttggggctgtattgattgtgtctctatgtcaacagcccaattaagtaaacgctacggttttatttatgttgaccgaaatgatgatggtactggtcaactcacacgctataagaaaaaatcatttgattggtaccgacaagtcattcaaaccaatggacgttaccttgaggataatttttcc

SEQ ID NO: 5288 - protein, 474 aa, Streptococcus pyogenes
MGIFPKDFLWGGAVAANQVEGAFEADAKGLSVQDVLPNGGLGEWTDSPTSDNLTLEAIDFYHRYKEDIALFAEMGFKVFRTSIAWSRIFPNGDDDQPNEAGLQFYDDLFDELLNYGIEPLVTLSHYETPLHLAKAYNGWTDRRLIGFFERFAQTVMERYKDKVKYWLTFNEVNSILHMPFTSGGIMTEKEKLSLQDLYQAIHHELVASASVTKLAHEINPDVKVGCMILAMPAYPMTSDPRDILAAHAFENLNLLFSDIHVRGKYPSYIKSYFKENGIEIVFEDGDKELLAEHTVDFLSFSYYMSVTQAHNPEAYTSGQGNILGGLSNPYLESSEWGWQIDPIGLRLVLNQYYDRYQIPLFIVENGLGAKDQLVQTADGSMTVHDDYRIDYMSQHLVQVAKAIEDGVEVMGYTSWGCIDCVSMSTAQLSKRYGFIYVDRNDDGTGQLTRYKKKSFDWYRQVIQTNGRYLEDNFS

SEQ ID NO: 5289 - DNA, 612 bp, Streptococcus agalactiae
atgttagaagttattgacaaagctttaagagattatcaaatgaaacgagaacagttttttgagattaacaatcagacagtacaagaaggtgccattgttttcacaggagattctatcgttgagttttttcctttaaaaaaacatttaggacgtgactatcctttagttaatagaggagtagcaggatcagatacttattggcttttagaaaacttgagaacccaagtatgggaactattaccatccaaagtatttattttaattggaacaaatgatattggtttagggcattcacagtcagaaatcatagctaatatcacggatataattgcagaaattcgtgcggaatcttatatgacagagattaatatactgagtgttttacctgttagtgaagaagatgactatatagagcgtgtcaaggtaagaaataatcaaacaataaaagctttaaacaaaaccttatcagtaatttctggcattaattatattgaattgtatgatttattagttgacgaaaaaggtcagcttgctagcagttttacaaaagatggtttgcacctaacagatcaagcctatgctaaaatttctgaaacgataaaactctacctt

SEQ ID NO: 5290 - protein, 204 aa, Streptococcus agalactiae
MLEVIDKALRDYQMKREQFFEINNQTVQEGAIVFTGDSIVEFFPLKKHLGRDYPLVNRGVAGSDTYWLLENLRTQVWELLPSKVFILIGTNDIGLGHSQSEIIANITDIIAEIRAESYMTEINILSVLPVSEEDDYIERVKVRNNQTIKALNKTLSVISGINYIELYDLLVDEKGQLASSFTKDGLHLTDQAYAKISETIKLYL

SEQ ID NO: 5291 - DNA, 612 bp, Streptococcus pyogenes
atgttagaaattgtttcagaagagctacgtcactatcaagaacaaaaattgattgagtaccgtaacaaaaatcagttagccccaaaaggaggcattgtatttgcaggtgattctctcattgaattttttcctttaaaaaaagcttttggttcatgtttgcctattattaatcgaggtattgctgggatagatagtcagtggttattgcgccatttttctgtccaaattactgatttagagcctaaacatatttttttattaattggttgtaatgatatcgggcttggatatgataaatgtcatattgtcaagactattgtagagcttattagccagattcgtagtcattgtgtctatagtcagatttatctcttatctttattaccagtttccaacaatccccgatatcagaagactgtcaaaataagaacaaatgctatgattgatgctattaataaagatttagcaatgattccaactgtagaatttattaatcttaatacttgtcttaaagacgaaaaaggtggtttatcagatgagaatactctagatggtttacatcttaattttccagcttatgctaaactagctgaaattattaaatcttatatc

SEQ ID NO: 5292 - protein, 204 aa, Streptococcus pyogenes
MLEIVSEELRHYQEQKLIEYRNKNQLAPKGGIVFAGDSLIEFFPLKKAFGSCLPIINRGIAGIDSQWLLRHFSVQITDLEPKHIFLLIGCNDIGLGYDKCHIVKTIVELISQIRSHCVYSQIYLLSLLPVSNNPRYQKTVKIRTNAMIDAINKDLAMIPTVEFINLNTCLKDEKGGLSDENTLDGLHLNFPAYAKLAEIIKSYI

SEQ ID NO: 5293 - DNA, 819 bp, Streptococcus agalactiae
atgattaaactaatagcaacagatatggatggaacttttctacgctcagataaaacttatgataaagcacggttttcttctttattaacgttgatggagaagtatgatattaaatttgtagctgctagtggtaatttatacgatcaattgttgttaaactttttggaataccctaatcgtatcgcctacgtcgctgaaaatggtggtcgtgtcattgaccaagatggcacattactaaaagaaacttatttatctaatgatacagttgcagctgttttatcctatttatatcagaactatcctgagacactcatcagcttatctggtgaaaaacgttcataccttgagcgaagaactcctattaataggcggactgaattagaatactatatgcctaattttatctataaagaccatttgctgcccttagatgatgaccgctattttcaaatgacactttgggtaaatgaaaatcttgtttctgagatgttgttagatattagtgaacactttaaaaatcatcatatcagattgacctctagtggttttggttgtatcgatgtcttaccagctgatgtcaataaagcggatggtatcgctattctccttgaaaagtggggattgaaacaggatcaagtgatggtttttggtgatgggggcaatgatgtggaaatgttgagagcagcaaatatttcttacgctatgtcaaatgcgccagaagaaattaaagctattgctaaatatcaaacagttagtaacgatcaagatggtgtgttagaaacgatagagaactttcttcacaagatgagtgataatgaa

SEQ ID NO: 5294 - protein, 273 aa, Streptococcus agalactiae
MIKLIATDMDGTFLRSDKTYDKARFSSLLTLMEKYDIKFVAASGNLYDQLLLNFLEYPNRIAYVAENGGRVIDQDGTLLKETYLSNDTVAAVLSYLYQNYPETLISLSGEKRSYLERRTPINRRTELEYYMPNFIYKDHLLPLDDDRYFQMTLWVNENLVSEMLLDISEHFKNHHIRLTSSGFGCIDVLPADVNKADGIAILLEKWGLKQDQVMVFGDGGNDVEMLRAANISYAMSNAPEEIKAIAKYQTVSNDQDGVLETIENFLHKMSDNE

SEQ ID NO: 5295 - DNA, 927 bp, Streptococcus agalactiae
atgaactcacttgataatttactatcacataatttagaagataaccggcatttattaccctatgaacacatgcatactgaggttagaaatggttaccctgacattttatttcactggcatccggaacttgaaatttcatatgtccacgaggggaccgcacgttatcacatcgattatgatttttttaatagccaatctggtgatattatcttgatccgtccaaatggtatgcattctattcatccgattgaaaataaagagcatatcacagatagcattaaatttcacttagatttaataggatattctattgtagaccaagttagccttcgttatttacaaccgttgcagactagctcttttaagtttatccaatgtatcaaacctagtatgacaggatataatgatatcaaaaattgtttgtttgatatttttaatatttcaaaagaagaaaatcgacattttgagctactcctaaaagctaaattaaacgaactcttgtatttactctattatcatcaatatgtcattaaaaaacatactgatgatacctacagaaaaaacgagagaattcgtgatctgattgattatattaataataattaccagcaaaatcttaccattgaatttttagctgattatatggggtatagtaagacacattttatgaccgtatttaaacagcatactggaacatcctgtacagaatttatcatacaagttcgtcttaataaagctagtgaacatcttattaactccactacggccattattgatattgccaacagcgttggttttaataatctatcaaattttaatcgccaatttaaacgctattatcatacaactcctcgccagtaccgcaaacaatttaccaacaaaaaagacggtagtacgcttgtctatagaaatataaatacaaaaaaa

SEQ ID NO: 5296 - protein, 309 aa, Streptococcus agalactiae
MNSLDNLLSHNLEDNRHLLPYEHMHTEVRNGYPDILFHWHPELEISYVHEGTARYHIDYDFFNSQSGDIILIRPNGMHSIHPIENKEHITDSIKFHLDLIGYSIVDQVSLRYLQPLQTSSFKFIQCIKPSMTGYNDIKNCLFDIFNISKEENRHFELLLKAKLNELLYLLYYHQYVIKKHTDDTYRKNERIRDLIDYINNNYQQNLTIEFLADYMGYSKTHFMTVFKQHTGTSCTEFIIQVRLNKASEHLINSTTAIIDIANSVGFNNLSNFNRQFKRYYHTTPRQYRKQFTNKKDGSTLVYRNINTKK

SEQ ID NO: 5297 - DNA, 1485 bp, Streptococcus pyogenes
ttgatgtataaggtactattagttgacgatgaatacatgattttacaagggctcaccatgattattgattggcaggcacttggatttgaagtggttcaaacagcaagatcaggcaaggaagccttagcctatttgactcagtacccagtggatgtcatgatttcagatgttaccatgcctggaatgacaggactggatttaatagaagcagctaaaacctatcatcctcagctacaaaccttgattttatctggttatcaagaattctcctatgtgcaaaaggctatggaattagaaaccaaggggtatttgttaaaacctgttgataaggcagaattacaggctaaaatgaaacaatttaaagactggttggatgcccagcaggcagaatcaatccggcaagaagcctatcatgacagccttttgaccctttggcttacagatgaattgagtgagaaagaatttcagcagttaagtcaaggcttgccagcggctgctttaactggttttacagtgctgtatttggactgtcaagagtggcaagcagccatcgatgcttattttgaacgagaaggtcagcctttttatctcaaaaaagaagaagataagaaggtttatctggctgtcctacttggtaaaactgatcaagccaaggcgtttacctatgatctacaaaagcgattctcaagaaacatgcatcaacttattttgggagaaacagttgatgactgggaaaatgtttatgaaagctacaatcaggtgcttaagagcctcttttacaattgtgaagtgtcaccaattagagcaaaagataagtccaaaattgaactaccagagtcccgtttgcagttctttgcttttaacaaggcgttgatgattggggacgaacctacaatcttgtctaaattagaagctatttttgacgagatgaagaccttgaacttttcaccagaggatgtgaagcatgtttcgttcttgttgttttctgacatttatcgtcaatttcccattttagataaaatgacttatctgtccatggtaaaaactattcatgacagccaatccattgattgcattttgagggaactaaaaaaagtgttggatgtcaccaatcagaacaattcccctgaaaaacgctattcagatttagttagtgaaaccattgattgcattcgcaaggaataccatcaagaattaactcttaaagctatcgctgataggttacatgtcaatggggtttatttagggcaatgctttaaaaatgaaaccgagcgtagttttacccagtacttaaatcatgttaggattcaaaaagcgcaacagttattgctttacaccaaccaatccatcaatgaaattgcttatgaaacaggttacaataccaatcattattttatcaagatgtttaaaaagttgaatggtttatcgccaaaagagttcagagatcgttacaaggacaattaccaagccatcaagggcgaccag

SEQ ID NO: 5298 - protein, 495 aa, Streptococcus pyogenes
LMYKVLLVDDEYMILQGLTMIIDWQALGFEVVQTARSGKEALAYLTQYPVDVMISDVTMPGMTGLDLIEAAKTYHPQLQTLILSGYQEFSYVQKAMELETKGYLLKPVDKAELQAKMKQFKDWLDAQQAESIRQEAYHDSLLTLWLTDELSEKEFQQLSQGLPAAALTGFTVLYLDCQEWQAAIDAYFEREGQPFYLKKEEDKKVYLAVLLGKTDQAKAFTYDLQKRFSRNMHQLILGETVDDWENVYESYNQVLKSLFYNCEVSPIRAKDKSKIELPESRLQFFAFNKALMIGDEPTILSKLEAIFDEMKTLNFSPEDVKHVSFLLFSDIYRQFPILDKMTYLSMVKTIHDSQSIDCILRELKKVLDVTNQNNSPEKRYSDLVSETIDCIRKEYHQELTLKAIADRLHVNGVYLGQCFKNETERSFTQYLNHVRIQKAQQLLLYTNQSINEIAYETGYNTNHYFIKMFKKLNGLSPKEFRDRYKDNYQAIKGDQ

SEQ ID NO: 5299 - DNA, 126 bp, Streptococcus agalactiae
ttgagatttaaagatggtaattctgatggtaaagctaaaactggggttaaaccaaagatattaagtgagacaaagtttgccactaaacttgctaccaaagctgttatccaaactaagcgagaaaaa

SEQ ID NO: 5300 - protein, 42 aa, Streptococcus agalactiae
MRFKDGNSDGKAKTGVKPKILSETKFATKLATKAVIQTKREK

SEQ ID NO: 5301 - DNA, 1530 bp, Streptococcus agalactiae
atggaaaatcataaaaatgaatttcagttttcacttgaatcaattctgggatttgtttggagaggaatagtagtaggcttaatagcaggatttgttgtcagcatatttcgattagcgattgaaaaaatttttttagttgttatggaactttataaaagtgcccattatcaaccaattattttattgagcattacggttactagtattatcgctgcagtgataataggtttttttatcaaatctgatcctgatattaaaggttcaggtatcccgcatgttgaaggtgaacttaaaggaatgctatcgccagactggtttagtattgtatggaagaaattcattgcgggtattttagctatttcttcgggacttatgcttggtcgcgaaggtcccagtattcagttaggagctatgacaggcaagggaattgcacagtatctcaatgctagtcgaatggaaaaacgtgttttaattgctagtggtgcggcagcaggtctttcagcagctttcaacgctcctattgcaggccttttatttgtagttgaagaaatttaccatcatttttctcgcttagtttggataacagctttggtagcaagtttagtggcaaactttgtctcacttaatatctttggtttaaccccagttttagctttaccatcagaattaccatctttaaatctcaacttttattggatttttttactcatgggtctctttttgggtatcttaggttttatctatgagtgggtaattttaagatttcatgtgatctatgattatttgggcaaactatttcatctaccatctcacctatatggtatattagcggtaatttttattcttcctattggttactatttcccacaattattggggggtggaaatggcttaattgtatcactgcctaggagtaatcttagtctgatgatgttaggattatttttcctcattcgttttttatggagtatgttgagttacagtagtggcttgccaggaggaatttttttaccaattctagctttaggatctttagcaggtgctttttttgcagtaggtatgcagtactttggtataatatctcatcagcagatatctttatttgttgttctaggaatggcgggctattttggtgcaatctcaaaagcaccactaacagctatgattttggttacagaaatggttggcgatttaaaacaattaatggctattggaattgtaacgatggtatcttatattgtcatggatttattaaagggagaacctatttatgaagcgatgttggctaaaatgaccttcaatccaaaagataaagtaatgacacctacattgattgaattaactgtttcagataaaatatcaggaaagtatgtccgagatttagaattaccagaaaatgtgttaataacgactcaaattcatcataagacatcggctgtagtatcaggaaatactatcttgaatgctggcgacaccatttttttagttgtgaatgaatcggaaattaaagaagtacgtgaacagctgatg

SEQ ID NO: 5302 - protein, 510 aa, Streptococcus agalactiae
MENHKNEFQFSLESILGFVWRGIVVGLIAGFVVSIFRLAIEKIFLVVMELYKSAHYQPIILLSITVTSIIAAVIIGFFIKSDPDIKGSGIPHVEGELKGMLSPDWFSIVWKKFIAGILAISSGLMLGREGPSIQLGAMTGKGIAQYLNASRMEKRVLIASGAAAGLSAAFNAPIAGLLFVVEEIYHHFSRLVWITALVASLVANFVSLNIFGLTPVLALPSELPSLNLNFYWIFLLMGLFLGILGFIYEWVILRFHVIYDYLGKLFHLPSHLYGILAVIFILPIGYYFPQLLGGGNGLIVSLPRSNLSLMMLGLFFLIRFLWSMLSYSSGLPGGIFLPILALGSLAGAFFAVGMQYFGIISHQQISLFVVLGMAGYFGAISKAPLTAMILVTEMVGDLKQLMAIGIVTMVSYIVMDLLKGEPIYEAMLAKMTFNPKDKVMTPTLIELTVSDKISGKYVRDLELPENVLITTQIHHKTSAVVSGNTILNAGDTIFLVVNESEIKEVREQLM

SEQ ID NO: 5303 - DNA, 1566 bp, Streptococcus pyogenes
atggtaacagtgtatttaaaagaaagagaggacaacatggaaaaccataaaaatgaattcaccttttccaacaaatcaattattgcctatgtttggcgtggtgttgtggttggtattattgctggtgttattgttagtttattccggttgttaattgaagtgacagctgactgggtgattgaatggtaccgatacgctcatatcaattcgctgttgctacttcctatactaagtgtcagtttgttagctgttctttttgtaggttttttagtaaagtctgattctgatataaaaggatcagggatcccccatgtcgaaggagaactaaaggggctaatgtccccagattggtggagtgtcctttggaaaaaatttttaggaggaatcatggctatttctatgggatttatgctcggtcgtgagggtccttcgattcagttaggtgctatgtcagccaaaggattagctaagtttttaaaatcgagtcgtttggaaaagcgagtgctaattgccagcggagcagcagcagggctatcagcagcttttaatgctccaatagcaggcctcttgtttgttgttgaagaaatttaccatcatttttcgcgtttaatttggattacagcgctagtggctagcttagtggctaattttatttctctgaatatttttggattgaaaccagtcttagcaatgtcagaggcgatgccttttttaggactcaatcaatattggttgttgcttttacttggattatttctaggctgcttaggctatttatatgagatagttatccttaattttaataaactttatgttattttagggagttggttacatctgccagattatttttacggtattattatggtttttctaattttaccgattggctattatttaccacagttacttggaggaggacatggtttaatactttctttatccaatcaacaattgcctttgatgactatcttcttttattttattattcgatttattgttagtatgtttagttatggaagtggcttacctggaggtatttttttacctattttaactttaggtgctttggcaggcctattatttgggcaaatagcttctcaattaggtttattgaaccaatcttttctttctctttttttgatattagggatggcagggtattttgcggcaatttcaaaagcaccactgacaggcatgattttggtaactgaaatggtaggtgatttgaaacccttaatggccatagctgtagttacttttgtctcctatttagtgatggatttgttaaatggacagccaatttacgaagctatgctagataagatggcaatgaagcatccaactaatcttgttgaaccaacattaattgaattgactgttggtgataagattgcagggaaatatgttaaagagttaaagcttccagaaaatgtcttaattacaacccaaattcaccatcaaaaatctcaagttgtgtcaggtaacacgcgccttttatcaggagcaactatctttttggtcgttaatgaagctgatacaggttttgtccgtgaggtattgatg

SEQ ID NO: 5304 - protein, 522 aa, Streptococcus pyogenes
MVTVYLKEREDNMENHKNEFTFSNKSIIAYVWRGVVVGIIAGVIVSLFRLLIEVTADWVIEWYRYAHINSLLLLPILSVSLLAVLFVGFLVKSDSDIKGSGIPHVEGELKGLMSPDWWSVLWKKFLGGIMAISMGFMLGREGPSIQLGAMSAKGLAKFLKSSRLEKRVLIASGAAAGLSAAFNAPIAGLLFVVEEIYHHFSRLIWITALVASLVANFISLNIFGLKPVLAMSEAMPFLGLNQYWLLLLLGLFLGCLGYLYEIVILNFNKLYVILGSWLHLPDYFYGIIMVFLILPIGYYLPQLLGGGHGLILSLSNQQLPLMTIFFYFIIRFIVSMFSYGSGLPGGIFLPILTLGALAGLLFGQIASQLGLLNQSFLSLFLILGMAGYFAAISKAPLTGMILVTEMVGDLKPLMAIAVVTFVSYLVMDLLNGQPIYEAMLDKMAMKHPTNLVEPTLIELTVGDKIAGKYVKELKLPENVLITTQIHHQKSQVVSGNTRLLSGATIFLVVNEADTGFVREVLM

SEQ ID NO: 5305 - DNA, 1110 bp, Streptococcus agalactiae
ttggttattactatatttcgaaagagaagggagaaaagaatgcgtagagtttattcctttttaggcggtattgttcttgttatcctgatcctctttggtttaaccacttacttagaaaaaaagagtagttcaacacctaactcagataagttagttatttataactggggagactatattgatccagccttattaaaaaaatttacaaaagaaactggaattgaagtacaatacgaaacgtttgactctaatgaggctatgcacaccaaaattaagcagggtgggacgacatatgatattgctgtacctagtgattatatgattgacaaaatgataaaagaaaaccttctggttaaacttgatcattcaaagatagctaattgggatgctattggagccaggtttaaaaatttgagtttcgatcctaaaaataaatattcgattccttatttctggggaactgttgggattgtttataatgatcaattagttaaaactcctcctaaacattgggatgatttatggcgtccagagtttcgaaataaaatcatgctagttgatagtgcacgtgaggttattggagttggtttaaattccttgggatatggattgaatacaaagaacatatcagaattaaaagccgcttctaaaaagttagatgctctaacaccaaacgttaaggctattgttgctgatgagatgaaaggctatatgattcagggagatgcagcgattggtgttacattctctggagaagcacgagaaatgcttgatgggaacaagcatttgcattacgttgttcctagtgaaggatcgaacctttggtttgataatattgtaatccccaaaacagtaaagcatcgcaaagaagcctatgcctttattaatttcatgatggaacctaaaaatgcggcacaaaatgcagaatatattggttatgcgacccctaatctcaaagcaaaagcgctgttaccagcagatatcaaaaatgataaagcattttatcctcctgataaaacaattgatcatttagaagtttataataacttgggtcaaaaatggcttggtatttacaatgatttgtacttacaatttaaaatgtatcgtaag

SEQ ID NO: 5306 - protein, 370 aa, Streptococcus agalactiae
MVITIFRKRREKRMRRVYSFLGGIVLVILILFGLTTYLEKKSSSTPNSDKLVIYNWGDYIDPALLKKFTKETGIEVQYETFDSNEAMHTKIKQGGTTYDIAVPSDYMIDKMIKENLLVKLDHSKIANWDAIGARFKNLSFDPKNKYSIPYFWGTVGIVYNDQLVKTPPKHWDDLWRPEFRNKIMLVDSAREVIGVGLNSLGYGLNTKNISELKAASKKLDALTPNVKAIVADEMKGYMIQGDAAIGVTFSGEAREMLDGNKHLHYVVPSEGSNLWFDNIVIPKTVKHRKEAYAFINFMMEPKNAAQNAEYIGYATPNLKAKALLPADIKNDKAFYPPDKTIDHLEVYNNLGQKWLGIYNDLYLQFKMYRK

SEQ ID NO: 5307 - DNA, 1071 bp, Streptococcus pyogenes
atgcgtaaactttattcctttctagcaggagttttgggtgttattgttattttaacaagtctttctttcatcttgcagaaaaaatcgggttctggtagtcaatcggataaattagttatttataactggggagattacattgatccagctttgctcaaaaaattcaccaaagaaacgggcattgaagtgcagtatgaaactttcgattccaatgaagccatgtacactaaaatcaagcagggcggaaccacttacgacattgctgttcctagtgattacaccattgataaaatgatcaaagaaaacctactcaataagcttgataagtcaaaattagttggcatggataatatcgggaaagaatttttagggaaaagctttgacccacaaaacgactattctttgccttatttctggggaaccgttgggattgtttataatgatcaattagttgataaggcgcctatgcactgggaagatctgtggcgtccagaatataaaaatagtattatgctgattgatggagcgcgtgaaatgctaggggttggtttaacaacttttggttatagtgtgaattctaaaaatctagagcagttgcaggcagccgagagaaaactgcagcagttgacgccgaatgttaaagccattgtagcagatgagatgaaaggctacatgattcaaggtgacgctgctattggaattaccttttctggtgaagccagtgagatgttagatagtaacgaacaccttcactacatcgtgccttcagaagggtctaacctttggtttgataatttggtactaccaaaaaccatgaaacacgaaaaagaagcttatgcttttttgaactttatcaatcgtcctgaaaatgctgcgcaaaatgctgcatatattggttatgcgacaccaaataaaaaagccaaggccttacttccagatgagataaaaaatgatcctgctttttatccaacagatgacattatcaaaaaattggaagtttatgacaatttagggtcaagatggttggggatttataatgatttatacctccaatttaaaatgtatcgcaaa

SEQ ID NO: 5308 - protein, 357 aa, Streptococcus pyogenes
MRKLYSFLAGVLGVIVILTSLSFILQKKSGSGSQSDKLVIYNWGDYIDPALLKKFTKETGIEVQYETFDSNEAMYTKIKQGGTTYDIAVPSDYTIDKMIKENLLNKLDKSKLVGMDNIGKEFLGKSFDPQNDYSLPYFWGTVGIVYNDQLVDKAPMHWEDLWRPEYKNSIMLIDGAREMLGVGLTTFGYSVNSKNLEQLQAAERKLQQLTPNVKAIVADEMKGYMIQGDAAIGITFSGEASEMLDSNEHLHYIVPSEGSNLWFDNLVLPKTMKHEKEAYAFLNFINRPENAAQNAAYIGYATPNKKAKALLPDEIKNDPAFYPTDDIIKKLEVYDNLGSRWLGIYNDLYLQFKMYRK

SEQ ID NO: 5309 - DNA, 798 bp, Streptococcus agalactiae
gtggttaacaaaggagaggaaagcatgaaaaaattcgcaaatatctatttagcacttgtttttattatcctttatattcctattatttatttgattttttattctttcaataaaggtggggatatgaattcttttactggattcacctttagtcactatggagaactgtttcaggatagccgcttaatgctaattttagtgcaaacattctttttggcttttcttagcgccttattagctacaattattggtacctttggagctatttggatttatcaggtaagacgtagacatcaaacctctattttatcgcttaataatatccttttagtagcaccagatgttatgattggtgcaagttttctcttagtatttactgttattggtttacagttaggtttcacttctgtattattgagccatgttgcattctctattcctattgttgttttaatggtcttacctcgtttaaaagaaatgaatgatgatatgattaatgcttcctatgatttaggagcttcaacttggcaaatgcttaaagaagttatgttaccctatttgtcgtcgggtattatttcaggtttctttatggctttcacttactcgctagatgattttgcggttactttctttgttacaggtaatggcttttcaacgctttcagtagaaatctattcacgcgcacgtcgcggtatatcattggaaattaacgccttgtcaactattgtctttttatttagtattttattggtaattggttattactatatttcgaaagagaagggagaaaagaatgcg

SEQ ID NO: 5310 - protein, 266 aa, Streptococcus agalactiae
MVNKGEESMKKFANIYLALVFIILYIPIIYLIFYSFNKGGDMNSFTGFTFSHYGELFQDSRLMLILVQTFFLAFLSALLATIIGTFGAIWIYQVRRRHQTSILSLNNILLVAPDVMIGASFLLVFTVIGLQLGFTSVLLSHVAFSIPIVVLMVLPRLKEMNDDMINASYDLGASTWQMLKEVMLPYLSSGIISGFFMAFTYSLDDFAVTFFVTGNGFSTLSVEIYSRARRGISLEINALSTIVFLFSILLVIGYYYISKEKGEKNA

SEQ ID NO: 5311 - DNA, 774 bp, Streptococcus pyogenes
atgaaaaaatttgccaatctttatttagcgagtgtctttgttttactctacattcctattttttatttgattttctattctttcaacaaaggtggggatatgaatggttttacaggatttacccttgagcattaccaaaccatgtttgaggatagtcgtctcatgacaatcttactgcaaacctttgttcttgcttttagtagcgctctactagcaacgattattgggatctttggagctatctttatccaccatgttagaggtaagtaccaaaatgccatgctatcagccaataatgtcttgatggtatcaccagatgtcatgattggggcttcctttttaattctttttacatcattgaagtttcagctgggcatgtcttcagttttattaagtcatattgctttttcgattcctattgtggttttgatggtattgccgcgcttgaaagagatgaatcaggacatggtcaacgccgcttatgatttgggagctaattatttccaaatgctcaaagaagtcatgctgccatactttacaccagggattattgcaggttattttatggcctttacctattccttagatgattttgcagtgactttctttttgactggaaatagtgttactacattatctgttgagatttattcgcgggctcgtcagggaatttccttggatatcaatgctttgtcaaccatcgttttctttttctccatcctcttagtgatcggttattattatatgtcacaggacaaggaggaaaaacatgcg

SEQ ID NO: 5312 - protein, 258 aa, Streptococcus pyogenes
MKKFANLYLASVFVLLYIPIFYLIFYSFNKGGDMNGFTGFTLEHYQTMFEDSRLMTILLQTFVLAFSSALLATIIGIFGAIFIHHVRGKYQNAMLSANNVLMVSPDVMIGASFLILFTSLKFQLGMSSVLLSHIAFSIPIVVLMVLPRLKEMNQDMVNAAYDLGANYFQMLKEVMLPYFTPGIIAGYFMAFTYSLDDFAVTFFLTGNSVTTLSVEIYSRARQGISLDINALSTIVFFFSILLVIGYYYMSQDKEEKHA

SEQ ID NO: 5313 - DNA, 813 bp, Streptococcus agalactiae
atgctatcgaggaggagagaaatgaagaaaacctctagtctattttcaattccttatatggcttggttattcttatttgtattagcacctgttgctttgattgcttggaactcgttctttgatattaatgggcactttactttagctaattaccagacgttttttagctcaggaacctatcttaaaatgagctttaactcggtcctatatgcaggcatcgttagtttcataacgcttttgattagctatccagctgcttatttgcttacaaaattaaaacacaagcaattatggctaatgctagttattttgccaacatggattaatcttttgttaaaagcctatgcttttatggggatatttggtcaacaagggggaattaacgccttcttaacctttataggtatcggcccaaaacagattctatttacagacttttcatttctttttgtagcagcttacattgaattaccgtttatgttattacccatttttaatgccttggatgatattgatcaaaatctcatttatgcaagtgatgacttgggtgcaaatgcatggcaaacttttcagaaggttatatttcctttatctctgaatggtgtaagagcaggtgtacagtctgtctttatccctagtttgagtctctttatgcttacgcgtcttattggtggtaatcgagttatcactttagggacagccatagaacaacattttttaatcacacaaaataaaggtatgggctcaaccataggggttattttaattttagtgatggttgctattatgtggttaacaaaggagaggaaagca

SEQ ID NO: 5314 - protein, 271 aa, Streptococcus agalactiae
MLSRRREMKKTSSLFSIPYMAWLFLFVLAPVALIAWNSFFDINGHFTLANYQTFFSSGTYLKMSFNSVLYAGIVSFITLLISYPAAYLLTKLKHKQLWLMLVILPTWINLLLKAYAFMGIFGQQGGINAFLTFIGIGPKQILFTDFSFLFVAAYIELPFMLLPIFNALDDIDQNLIYASDDLGANAWQTFQKVIFPLSLNGVRAGVQSVFIPSLSLFMLTRLIGGNRVITLGTAIEQHFLITQNKGMGSTIGVILILVMVAIMWLTKERKA

SEQ ID NO: 5315 - DNA, 813 bp, Streptococcus pyogenes
atgccattgaggaggagcgtaatgaagaaaacctctagtcttttttcgattccttacttcttatggattctcttttttgttgtggcaccagtcactctcttgttttacaagtccttttttgacatagaagggcgcgtgaccttagccaattatgaaaccttttttagctcttggacttatttgaggatgagtgtgaattctattttatacgctggtattatcacactcgtcacgctcttgatttcatatcctacggctctctttttaacgcgcctaaagcacaagcagttgtggcttatgctcattatcttgccaacctgggtaaatttattgctaaaggcctatgcctttatgggaatctttggtcaacaaggagggattaacagctttttaacctttatggggattggcccgcagcaaatccttttcacagatttctccttcatttttgtagcctcttacattgagctcccttttatgatgttaccgatttttaacgctttggatgatattgaccataatgtcatcaatgccagtcgcgacctaggagctagtgaatttcaggccttctcaaaagttatttttcccctttctttaaatggggttagggcaggtgttcagtctgtctttatcccaagtttgagtctctttatgttaacccgtttgattggtggaaaccgggtgattacacttggtacagccattgaacaacattttttgaccacccaaaactggggaatgggatcaaccattggtgtcgtcttgattttgaccatggttgctattatgtggctcacaaaggagaaaagtaaa

SEQ ID NO: 5316 - protein, 271 aa, Streptococcus pyogenes
MPLRRSVMKKTSSLFSIPYFLWILFFVVAPVTLLFYKSFFDIEGRVTLANYETFFSSWTYLRMSVNSILYAGIITLVTLLISYPTALFLTRLKHKQLWLMLIILPTWVNLLLKAYAFMGIFGQQGGINSFLTFMGIGPQQILFTDFSFIFVASYIELPFMMLPIFNALDDIDHNVINASRDLGASEFQAFSKVIFPLSLNGVRAGVQSVFIPSLSLFMLTRLIGGNRVITLGTAIEQHFLTTQNWGMGSTIGVVLILTMVAIMWLTKEKSK

SEQ ID NO: 5317 - DNA, 1152 bp, Streptococcus agalactiae
ttgactaacccaatcattgcatttaaaaatgtatcaaaggtatttgaagacagcaacaccgttgtcttaaaagatattaattttgaacttgaagaaggtaaattttacaccttattaggggcctcaggaagtggtaaatcaactatcttaaatattattgcaggtttgctagaggcgagtacaggcgatatttacttagatgggaaacgcatcaatgatgttcccactaataaacgggatgttcataccgttttccaaaactatgctttgtttccacatatgacggtttttgaaaacgttgcttttccattaaagttgaaaaaaatggataagaaagaaattcaaaaacgtgttcaagaaactctaaaaatggttcgtttagaagggtttgaaaaacgagccattcaaaaattatcaggaggacaacgccagcgtgttgcgatagcgcgtgctatcatcaatcaacctaaagtagtcttactagatgaacccttatcagcattggatttgaaattgcgtacagagatgcaatatgaattgcgcgaactgcaacaacgtttaggaattacctttgtttttgtcacacatgatcaagaagaagcgttggcaatgagtgattggattttcgtcatgaatgaaggtgaaattgttcaatcaggaacaccagtagatatctacgatgaacctatcaatcattttgtagcaacttttataggtgaatcaaatatcttatctggcaagatgattgaggattatttggttgaatttaacggtaagcgctttgaggctgttgatggcggtatgcgccctaatgaatcagtccaagtagttattcgtccagaagatcttcaaattaccctacccgatgaaggaaaacttcaagttaaagtggacacacaactttttcgaggtgtccactatgaaattattgcttatgatgatttaggtaatgaatggatgattcattcaactcgtaaagctattgagggtgaagttattggtttagatttcactccagaagatatacatattatgcgtcttaatgaaacagaagaagaatttgatgcgcgcattgaagaatatgtagacactgacgatcatgaggatggtttaatcaatgctatcgaggaggagagaaatgaagaaaacctc

SEQ ID NO: 5318 - protein, 384 aa, Streptococcus agalactiae
MTNPIIAFKNVSKVFEDSNTVVLKDINFELEEGKFYTLLGASGSGKSTILNIIAGLLEASTGDIYLDGKRINDVPTNKRDVHTVFQNYALFPHMTVFENVAFPLKLKKMDKKEIQKRVQETLKMVRLEGFEKRAIQKLSGGQRQRVAIARAIINQPKVVLLDEPLSALDLKLRTEMQYELRELQQRLGITFVFVTHDQEEALAMSDWIFVMNEGEIVQSGTPVDIYDEPINHFVATFIGESNILSGKMIEDYLVEFNGKRFEAVDGGMRPNESVQVVIRPEDLQITLPDEGKLQVKVDTQLFRGVHYEIIAYDDLGNEWMIHSTRKAIEGEVIGLDFTPEDIHIMRLNETEEEFDARIEEYVDTDDHEDGLINAIEEERNEENL

SEQ ID NO: 5319 - DNA, 900 bp, Streptococcus agalactiae
atgattaaaacaatacaaaaagaattagaaggtctcgatattcgctttgatgagcctttaaagaaatatacttatactaaagtaggaggacctgctgattatcttgcattcccaaggaatcgccttgaactatcgcgtattgttaagtttgctaacagtcaaaatattccttggatggttttaggaaatgcgagtaatattatcgttagagatggtggtatccgtggttttgttatcatgtttgataaactgtcaactgtgacagtcaacggttatgttattgaagcagaagcaggagctaatctcattgaaacaactcgtattgcacgttatcatagcttaactggctttgagtttgcttgcggaattcctggaagtgtaggtggagcggtctttatgaatgctggcgcttacggtggtgaaattgctcatattttattgtctgcacaggttttgacaccacagggtgaactcaaaacgattgaagctaggaatatgcaatttggttatcgtcattctgtcattcaagagagtggagatattgttatatcagctaagtttgccttaaaaccaggagatcatctcatgattactcaggaaatggatcgtttaacctatctccgtgagctgaaacaacctttagaatacccttcttgtggttctgtgttcaaacgtcctccaggacattttgcagggcaactcattagcgaagcacatcttaaaggtcaacgtattggtggagtagaggttagtcaaaaacatgctggttttatggttaacattgcagaaggttcagctcaagattatgaaaatcttattgaacatgttattaacaccgttgaatcaacttcaggtgtccatttggaaccagaagttcgtattatcggtgagtcgctatta

SEQ ID NO: 5320 - protein, 300 aa, Streptococcus agalactiae
MIKTIQKELEGLDIRFDEPLKKYTYTKVGGPADYLAFPRNRLELSRIVKFANSQNIPWMVLGNASNIIVRDGGIRGFVIMFDKLSTVTVNGYVIEAEAGANLIETTRIARYHSLTGFEFACGIPGSVGGAVFMNAGAYGGEIAHILLSAQVLTPQGELKTIEARNMQFGYRHSVIQESGDIVISAKFALKPGDHLMITQEMDRLTYLRELKQPLEYPSCGSVFKRPPGHFAGQLISEAHLKGQRIGGVEVSQKHAGFMVNIAEGSAQDYENLIEHVINTVESTSGVHLEPEVRIIGESLL

SEQ ID NO: 5321 - DNA, 885 bp, Streptococcus pyogenes
atgataactgaacttcatgggattgatattcgagagaatgaacccctaaaacattacacttacactaaggtaggtggcccagcagatttcttggcttttcctagaaatcactacgagctatcacgcatcgttgcttatgccaacaaagaaaatatgccttggcttgttttgggaaatgccagcaatctcattgtgcgagatggtggtattcgtggctttgtcatcatgtttgataagctaaatgcagtgcacttaaatggttataccttagaagccgaagctggtgccaatctgattgaaacaacgaagattgccaaattccatagtttaacagggtttgaatttgcatgtggcattcctggaagcattgggggtgctgtttttatgaatgcgggtgcttatggtggggaaatatcacatattttcttatccgctaaggtgcttaccccaagtggagagatcaaaaccatttcagctagggatatggcttttggttaccgtcactctgccattcaagaaacaggtgacattgtcatttctgctaagtttgctcttaaaccgggtaattatgatacgatcagccaagaaatgaatcggttaaatcaccttcgccaactaaaacaacctttagaatttccatcttgtggatctgtgtttaagcgcccgccaggacactttgcaggtcaattaatcatggaagcaaatcttaaagggcatcggattggtggtgtggaagtttccgaaaaacacactggttttatgattaatgtggcagatggcacagctaaagattatgaagatttgattgcttatgtcattgagacagttgaaaaccattctggtgtcaggcttgaaccagaagttcggattattggggaaaacctg

SEQ ID NO: 5322 - protein, 295 aa, Streptococcus pyogenes
MITELHGIDIRENEPLKHYTYTKVGGPADFLAFPRNHYELSRIVAYANKENMPWLVLGNASNLIVRDGGIRGFVIMFDKLNAVHLNGYTLEAEAGANLIETTKIAKFHSLTGFEFACGIPGSIGGAVFMNAGAYGGEISHIFLSAKVLTPSGEIKTISARDMAFGYRHSAIQETGDIVISAKFALKPGNYDTISQEMNRLNHLRQLKQPLEFPSCGSVFKRPPGHFAGQLIMEANLKGHRIGGVEVSEKHTGFMINVADGTAKDYEDLIAYVIETVENHSGVRLEPEVRIIGENL

SEQ ID NO: 5323 - DNA, 486 bp, Streptococcus agalactiae
atgacaaccgtttacttgagtttaggtagtaatattggtgatagagaaacttttctgaagcaggctctcttttcaattgatcatttgcaaaagacaaaagtcgcgcaaatttccgctatttatgaaacagctgcttgggggaatactaaccaagaagatttttttaatatatgttgtcaggtagagacagacttagcaccttttgaattattggattattgtcaagaaattgaaaaatgcttaaagcgcgtgagacatgagcactggggtccaaggacaatagatattgatatcttactttttggtaatcaagtgattaaccaagaagatttagtagtaccccatccgtatatgacgaagcgagcatttgttctagttccgttactcgaaatagcacctcaactaagtttacctaatggttctaagctagaagactatctcgaaaaattgaatttaggagaagttcattatttaaaaccagtcgaa

SEQ ID NO: 5324 - protein, 162 aa, Streptococcus agalactiae
MTTVYLSLGSNIGDRETFLKQALFSIDHLQKTKVAQISAIYETAAWGNTNQEDFFNICCQVETDLAPFELLDYCQEIEKCLKRVRHEHWGPRTIDIDILLFGNQVINQEDLVVPHPYMTKRAFVLVPLLEIAPQLSLPNGSKLEDYLEKLNLGEVHYLKPVE

SEQ ID NO: 5325 - DNA, 498 bp, Streptococcus pyogenes
atgaccattgtttatttaagtttaggcaccaatatgggggaccgagcagcttacttgcaaaaagctcttgaggctttagctgacttacctcaaacacggttgcttgctcaatcatccatttatgaaacgactgcttggggcaagacaggccaggctgattttctcaatatggcctgtcaattagatacacaattaaccgcggctgatttcttaaaagaaacacaagctattgagcaatctcttggtcgtgtgaggcatgaaaaatggggatcaagaactattgacattgatatcttgctatttggagaagaggtttatgacacaaaggaattgaaagtgccacacccttatatgactgagcgtgcttttgttttaatccccttattggaattgcagccagatttaaaattgcctcctaatcataagtttttaagggattatcttgcagctttagatcaatcagatatcacactcttttcagctcaacagacagagttc

SEQ ID NO: 5326 - protein, 166 aa, Streptococcus pyogenes
MTIVYLSLGTNMGDRAAYLQKALEALADLPQTRLLAQSSIYETTAWGKTGQADFLNMACQLDTQLTAADFLKETQAIEQSLGRVRHEKWGSRTIDIDILLFGEEVYDTKELKVPHPYMTERAFVLIPLLELQPDLKLPPNHKFLRDYLAALDQSDITLFSAQQTEF

SEQ ID NO: 5327 - DNA, 360 bp, Streptococcus agalactiae
atggataagatttatttaaataaatgtcggttttatggttatcatggtgctttttcggaagaacaaacattggggcaagtttttcaagttgatgctgttctatcacttgatttggcaaaagcatcacaaactgatgatttaattgatacggttcattatggtgaagtttttgactgtattaaaaatcatgttgaaaacgaacagtatcaattaatagagaaattagcaggtgttattgttgaagatattttcttacagtttcatccagtacaagctattacattaaagattacaaaagacaatccaccaattaatgggcactatgaatcagttggaattgaattggagcgcaggcgagca

SEQ ID NO: 5328 - protein, 120 aa, Streptococcus agalactiae
MDKIYLNKCRFYGYHGAFSEEQTLGQVFQVDAVLSLDLAKASQTDDLIDTVHYGEVFDCIKNHVENEQYQLIEKLAGVIVEDIFLQFHPVQAITLKITKDNPPINGHYESVGIELERRRA

SEQ ID NO: 5329 - DNA, 357 bp, Streptococcus pyogenes
atggataaaatcgtattagaaggttgccgtttttatggctaccatggagcctttaaagaagaacagacccttgggcaaatttttctggttgatttagaattgtcagtcgatttgcaagcagcttctttgtcagaccaattaacagatacggtccattacgggatggtgtttgatagtgtccgtcagttagtggaaggggaaaagtttattttgattgaacgtttagcaggtgcgatttgtgaacagctttttaacgaatttccgcctattgaagccatcaaagtggccattaaaaaggaaaacccaccgattgcaggccactataaggcagttggtattgaattggagagacagaga

SEQ ID NO: 5330 - protein, 119 aa, Streptococcus pyogenes
MDKIVLEGCRFYGYHGAFKEEQTLGQIFLVDLELSVDLQAASLSDQLTDTVHYGMVFDSVRQLVEGEKFILIERLAGAICEQLFNEFPPIEAIKVAIKKENPPIAGHYKAVGIELERQR

SEQ ID NO: 5331 - DNA, 801 bp, Streptococcus agalactiae
atgaaaataggacaatatgatattacaggtaaagcttgtatcatggggattttaaatgtaacgcctgattccttctcagatggtggttcttataccacaattgattcagctttaaatcaagttggtgagatgcttgaacaaggggtggcaattgtagatattgggggagaatcaacgcggccaggtgcagtatttgtgactgctgaagaagaaattaaacgtgtagttccaatgattaaagctattagagaggtctaccctgatcttttgttatcaatagatacttataaaacagaggtagctcaagcagcccttgatgcaggtgtacatattttaaatgacgtttggtcaggtttatatgatggtaaaatgctatctttagcagcagaacgaaatgttccaattattttgatgcataaccaggaagaagctgtttatcaagatatcaaaaaagaagtttgtgaattcttacttgaaagagcagagcgtgctttagaagcaggtgtttcaaaggataatatttggatagatcctggctttggttttgctaaaacagaggagcaaaatttagaactattaaaaggtttggaacaagtgtgtgatttaggttatcctgtgttatttgggatctctcgaaaacgtactgttaattatcttctaggtggtaatagggaagtaactgaacgtgatatggggacggctgctttatcggcatgggcaatagcaaaggggtgtcagattgtacgtgttcacaatgttgaagtaaataaggacattgtgacagtaattagtcagttggtg

SEQ ID NO: 5332 - protein, 267 aa, Streptococcus agalactiae
MKIGQYDITGKACIMGILNVTPDSFSDGGSYTTIDSALNQVGEMLEQGVAIVDIGGESTRPGAVFVTAEEEIKRVVPMIKAIREVYPDLLLSIDTYKTEVAQAALDAGVHILNDVWSGLYDGKMLSLAAERNVPIILMHNQEEAVYQDIKKEVCEFLLERAERALEAGVSKDNIWIDPGFGFAKTEEQNLELLKGLEQVCDLGYPVLFGISRKRTVNYLLGGNREVTERDMGTAALSAWAIAKGCQIVRVHNVEVNKDIVTVISQLV

SEQ ID NO: 5333 - DNA, 798 bp, Streptococcus pyogenes
atgaaaattggaaagtttgtgattgagggcaatgcggctatcatggggattttaaatgtgactccagattctttttcagatggggggtcttacactactgtgcaaaaagcattagatcacgttgagcaaatgattgctgatggggctaaaatcatcgacgttggtggagaatcaacacgtccaggttgccaatttgtaagcgctaccgatgaaattgaccgggtggttcctgtgatcaaggccatcaaagaaaactatgatattctaatcagcattgatacctataaaaccgaaacagctagagcagctttagaggcgggtgccgatattctcaatgatgtttgggcaggtttgtacgacggtcaaatgtttgccttagcagccgagtacgatgcgcctatcatcttgatgcataaccaagacgaagaagtttatcaagaggtaacacaagacgtttgtgattttctaggcaatagagcacaagcagctcttgatgctggcgtgccaaaaaacaatatttgggttgatccaggatttggatttgccaaatctgttcaacagaatacggagttattaaaaggattggaccgcgtctgtcagttgggctatcctgtcttgtttggtatttcgagaaagcgtgtcgtagatgccttgttaggcggcaacaccaaagctaaagagcgagacggagcgacagcagccttgtctgcttatgcccttggaaaaggctgtcagattgtacgcgtacacgatgtcaaggctaatcaagacattgtggctgtgttgagccagttgatg

SEQ ID NO: 5334 - protein, 266 aa, Streptococcus pyogenes
MKIGKFVIEGNAAIMGILNVTPDSFSDGGSYTTVQKALDHVEQMIADGAKIIDVGGESTRPGCQFVSATDEIDRVVPVIKAIKENYDILISIDTYKTETARAALEAGADILNDVWAGLYDGQMFALAAEYDAPIILMHNQDEEVYQEVTQDVCDFLGNRAQAALDAGVPKNNIWVDPGFGFAKSVQQNTELLKGLDRVCQLGYPVLFGISRKRVVDALLGGNTKAKERDGATAALSAYALGKGCQIVRVHDVKANQDIVAVLSQLM

SEQ ID NO: 5335 - DNA, 561 bp, Streptococcus agalactiae
atgcccaatcaagaaaaaatggaaaaagctatttatcaatttttagaggctttaggagaaaatcctaatcgagaaggattgaaagatacaccgaagcgtgtggcaaaaatgtatatagaaatgttctcaggacttaatcaagatccaaaggagcaattcactgcagtcttttctgaaaatcatgaagaggttgtgattgtcaaggatattccattctattccatgtgtgaacatcatttggttcctttttatggtaaagctcatattgcttatttaccaaacgatggacgtgttactggacttagtaagcttgcacgtgcagttgaagtggcgagtaagcgtcctcaacttcaggaacgtttaacagcacaagttgcacaagctttagaggatgctttggcgcctaaaggtatttttgttatgatagaagcagagcatatgtgcatgacaatgcgtggcattaaaaaaccaggaagtaagacgattacaacggtagctcgtggtttatacaaggacgatcgatatgaaagacaagaaattctatcgctaatacaaaaagga

SEQ ID NO: 5336 - protein, 187 aa, Streptococcus agalactiae
MPNQEKMEKAIYQFLEALGENPNREGLKDTPKRVAKMYIEMFSGLNQDPKEQFTAVFSENHEEVVIVKDIPFYSMCEHHLVPFYGKAHIAYLPNDGRVTGLSKLARAVEVASKRPQLQERLTAQVAQALEDALAPKGIFVMIEAEHMCMTMRGIKKPGSKTITTVARGLYKDDRYERQEILSLIQKG

SEQ ID NO: 5337 - DNA, 600 bp, Streptococcus pyogenes
atgaaaaggaaaaaactaatgaaaagggaaagactaatgtctattaataaggaaaaagcagaagcagccatttatcagtttttagaggctattggtgaaaatccaaatcgggaaggtcttcttgacacgcctaaacgggttgctaaaatgtatgcggagatgtttttgggactgggaaaagatcctaaagaggagtttacggctgtctttaaagaacaacatgaggatgtggtgattgtcaaagacattagtttttattctatatgtgaacaccacttagttcctttttatggcaaggctcatatcgcttacttgccaagtgatggtcgagtaacaggtttgagtaaattagcgcgagcagttgaagtagctagtaaacgacctcaactccaagagcgtttgacctctcaaatagcggatgctttagttgaagccctcaatcctaaagggactttagttatggtagaagcagagcacatgtgcatgaccatgcgaggcatcaaaaagccaggtagtaaaaccattaccaccactgccagaggcttatataaggaaagtcgtgctgagaggcaagaagttatttctctaatgacaaaagat

SEQ ID NO: 5338 - protein, 200 aa, Streptococcus pyogenes
MKRKKLMKRERLMSINKEKAEAAIYQFLEAIGENPNREGLLDTPKRVAKMYAEMFLGLGKDPKEEFTAVFKEQHEDVVIVKDISFYSICEHHLVPFYGKAHIAYLPSDGRVTGLSKLARAVEVASKRPQLQERLTSQIADALVEALNPKGTLVMVEAEHMCMTMRGIKKPGSKTITTTARGLYKESRAERQEVISLMTKD

SEQ ID NO: 5339 - DNA, 1260 bp, Streptococcus agalactiae
atgacttatcaagaagcgctagaatggattcatagtaaattagcttttggtattaaaccaggtttggaacgtatgagatggatgctagagcagctgggaaaccctcaaaacaacctatctgccattcatgttgttggaacgaatggtaaaggatcaacaactagttatttacaacatatttttaccaattctggttatcaagttggaacatttacatcaccatatattgttgactttagagagcgtattagcattgatggtcaaatgattccagagtctgattttatcaaacttgttgaaactgttcgtccagttgttgaacggttgcaccttgagaccaacctagaaccagctacagaatttgaagttataacagttttgatgttctattattttggcaatagctgtccggttgatatcgtcattattgaggctggaatgggcggttattatgattctaccaacatgttcaaggctttagcggttacttgtccgtcaattggattagatcatcaggaggttttaggacgaacttatgtagatatagctgagcaaaaagtaggtgttttaaaaaaaggagttccattcgtatatgctaatgatcgtcaggatgttgaagaagtctttcaaataaaagccaaggaaacccacagccagacttatcgtttacacaatgacttttatataaaagaagaggaaaattattttaactatataggtcctcaagcaaatattgatcatattcagttgcaaatgccgggacatcaccaagtttccaatgctagcatagctataactaccagtttattattaagagacaaatatccaaagttaaccctacagaccattaaagatgggcttgaaatgacaaaatgggtaggccgtacagaattaatctttccgaatgtaatgattgatggcgctcataataatgaaagtgtcgatgctctcgttcaagttataaaaaaatatcagcagaaaaacgtgcatattctatttgctgcaattaatactaaaccgatagagagtatgttagaatcattgtctagtatcgctccggtttcggttactagctttgattaccctaaatcaataaacttagacaaatatcctaaagcgtacactagagttagtgattggaagaaatggctacatgatataaatctgacatcagataaagatttctatgtgattactggctccctttattttatttctcaagttcgtcaggagctactattaatcaaaactacaacaact

SEQ ID NO: 5340 - protein, 420 aa, Streptococcus agalactiae
MTYQEALEWIHSKLAFGIKPGLERMRWMLEQLGNPQNNLSAIHVVGTNGKGSTTSYLQHIFTNSGYQVGTFTSPYIVDFRERISIDGQMIPESDFIKLVETVRPVVERLHLETNLEPATEFEVITVLMFYYFGNSCPVDIVIIEAGMGGYYDSTNMFKALAVTCPSIGLDHQEVLGRTYVDIAEQKVGVLKKGVPFVYANDRQDVEEVFQIKAKETHSQTYRLHNDFYIKEEENYFNYIGPQANIDHIQLQMPGHHQVSNASIAITTSLLLRDKYPKLTLQTIKDGLEMTKWVGRTELIFPNVMIDGAHNNESVDALVQVIKKYQQKNVHILFAAINTKPIESMLESLSSIAPVSVTSFDYPKSINLDKYPKAYTRVSDWKKWLHDINLTSDKDFYVITGSLYFISQVRQELLLIKTTTT

SEQ ID NO: 5341 - DNA, 1374 bp, Streptococcus pyogenes
gtgtttggtgaggataataaaaaaaagggtactactctaggttatctgctgtcacttttttttatatatggtatactaaagatagatgtgaggtatgaaatgacttatgaagagactctagaatggattcatgatcacttagttttcggcatcaagccaggcttaaaacgtatgctttgggttcttggacagttaggaaatccccaaaaaaatgtcaagggagtgcatatcgttggaactaacggaaaaggttccacggtcaatcatttacaacacatctttacgacagctggttatgaagtggggacctttacctctccttatattatggatttcaaagaacgtattagcataaatggtcgaatgatttcagaaaaagatttggttattgctgctaatcgtattcgtcctttgacagagcgtctagttcaagagactgattttggagaggtaactgaatttgaagtgattactttgatcatgttcctctattttggtgacatgcatcctgtagatattgctattattgaagcaggccttggcggtctttatgattcgaccaatgtttttcaagcaatggttgtggtctgtccctcaattggtttagatcaccaagctattttgggcgagacttacgctaatattgccgcccaaaaagctggtgttttagaagggggcgagacccttgtttttgccgttgaaaacccgtcagctcgagaggtttttttaacaaaagctgagcaggttggtgcttcaatctgggaatggcaagagcagtttcaaatggctgagaacgcatctggctatcgttttactagtcctttaggagttatttcagatattcacatcgctatgccaggacaccaccaagtgtctaatgcagctttagctattatgacttgcttaaccttgcaagaccgctatcctaggctaactccagatcatataagggaaggtctagcaaatagtttgtggctaggccgtaccgaattattagcaccaaatctaatgattgatggggctcataacaatgaaagcgttgctgctttggtagccgtcttaaaaaataactacaatgataaaaagcttcatattttgtttggtgcgatcgacaccaagcctattgcagatatgttggttgctcttgagcaaataggtgacttgcaggttactagctttcattaccctaacgcctatccattggaaaaatacccagaacgttttggtagggttgctgatttcaaagatttcttggccttgcgtaagcatgctaaagcagatgactttttcgtgattacagggtcactatattttatttcagaaattagacagtattgggaaaaacatattgaaaaaagcgttcttttaacccat

SEQ ID NO: 5342 - protein, 458 aa, Streptococcus pyogenes
VFGEDNKKKGTTLGYLLSLFFIYGILKIDVRYEMTYEETLEWIHDHLVFGIKPGLKRMLWVLGQLGNPQKNVKGVHIVGTNGKGSTVNHLQHIFTTAGYEVGTFTSPYIMDFKERISINGRMISEKDLVIAANRIRPLTERLVQETDFGEVTEFEVITLIMFLYFGDMHPVDIAIIEAGLGGLYDSTNVFQAMVVVCPSIGLDHQAILGETYANIAAQKAGVLEGGETLVFAVENPSAREVFLTKAEQVGASIWEWQEQFQMAENASGYRFTSPLGVISDIHIAMPGHHQVSNAALAIMTCLTLQDRYPRLTPDHIREGLANSLWLGRTELLAPNLMIDGAHNNESVAALVAVLKNNYNDKKLHILFGAIDTKPIADMLVALEQIGDLQVTSFHYPNAYPLEKYPERFGRVADFKDFLALRKHAKADDFFVITGSLYFISEIRQYWEKHIEKSVLLTH

SEQ ID NO: 5343 - DNA, 885 bp, Streptococcus agalactiae
ttgagaaaagataatttaggaattatccttggcttgtcagcctatgttttatgggggctgttatctctttattggaaattattatctggaattgaagcatatagtacgtttgcttataggattatattcactgttttaactatgcttatttatatgctcgtttcgggtagaaaaacagtctatttaaaagacttaaaaggcttagttaataataaaaagtcattttggacaatgtttgtagccagtattttaatttcaattaattggttggtctatatttttgcagtcacgcatggtcacgctactgaggcaagtcttggttattatatgatgccgattatttcaattttgttgtcggtccttgttttacgtgaacacctggcaagagtagttagccttgcaattttgattgcaatcatgggagttggaattttagtttatcaaactggtcattttcctttaatttcactaactctagcgctttcttttggtttttatgggttattaaaaaaatcaatttctttatctagtgatttttcgatgctggtagaaagtagttttattgctccgtttgcactcatttatatagtgtttttcgccaaagattttctaactgattataatatattacaattagttttactctcactttcaggaatcattacagcagttcctcttttattatttgcagaagccattaagagggctcctctaaatattatcggctttatccaatacatcaatccaaccatccaattattgctagcattgtttatttttaaagaaactatcgttagtggggaggtaataggttttatttttatctggcttgctattttagtttttagtattggacaagtacatacgatgttaaagaaaggtaaa

SEQ ID NO: 5344 - protein, 295 aa, Streptococcus agalactiae
MRKDNLGIILGLSAYVLWGLLSLYWKLLSGIEAYSTFAYRIIFTVLTMLIYMLVSGRKTVYLKDLKGLVNNKKSFWTMFVASILISINWLVYIFAVTHGHATEASLGYYMMPIISILLSVLVLREHLARVVSLAILIAIMGVGILVYQTGHFPLISLTLALSFGFYGLLKKSISLSSDFSMLVESSFIAPFALIYIVFFAKDFLTDYNILQLVLLSLSGIITAVPLLLFAEAIKRAPLNIIGFIQYINPTIQLLLALFIFKETIVSGEVIGFIFIWLAILVFSIGQVHTMLKKGK

SEQ ID NO: 5345 - DNA, 123 bp, Streptococcus agalactiae
ttggctaattctattcctgcaacaattacagaggaagaagagcctaaacctctggccaaaggaatatctgaaaacatttttaagcggtgtggtgccaaatccgacttaacatgcaaagctgtt

SEQ ID NO: 5346 - protein, 41 aa, Streptococcus agalactiae
MANSIPATITEEEEPKPLAKGISENIFKRCGAKSDLTCKAV

SEQ ID NO: 5347 - DNA, 864 bp, Streptococcus agalactiae
atgaggataattgtacctgcaactagtgcgaatattggtccaggctttgattcaataggagttgcgttatcaaagtatttaatcattgaagtattagaagaaagtacagagtggttagttgaacacaatttagtaaatattccaaaagatcatactaacctccttattcaaacagctttgcatgttaagtcggatttggcaccacaccgcttaaaaatgttttcagatattcctttggccagaggtttaggctcttcttcctctgtaattgttgcaggaatagaattagccaatcaattaggaaatttggctctttctcaaaaagaaaaattagagatagctacccgattagaaggacatcctgataatgtagcaccggccatttttggtgatttagttatttcatcaatagtgaaaaatgatattaaaagtttggaagtgatgtttccagatagttcctttatcgcttttattccaaattatgaattaaaaacaagtgatagtcgaaatgtactacctcaaaaattgagttatgaggatgcagttgcttcaagcagcgtcgctaatgtgatggttgcgtcgttgttgaaaggtgatttggtaactgctggatgggctatagaaagggacctctttcatgaaagatatcgtcaacctttggtgaaggaatttgaagtgataaaacaaatcagcactcaaaatggtgcgtatgctacttatttgtctggagcaggaccgacggtaatggttctgtgttcgaaagaaaaagaacaagcaattgtcacagagttaagtaaattatgtttaggtggacagattcaagtgcttaatattgagcgaaaaggagtgagagttgagaaaaga

SEQ ID NO: 5348 - protein, 288 aa, Streptococcus agalactiae
MRIIVPATSANIGPGFDSIGVALSKYLIIEVLEESTEWLVEHNLVNIPKDHTNLLIQTALHVKSDLAPHRLKMFSDIPLARGLGSSSSVIVAGIELANQLGNLALSQKEKLEIATRLEGHPDNVAPAIFGDLVISSIVKNDIKSLEVMFPDSSFIAFIPNYELKTSDSRNVLPQKLSYEDAVASSSVANVMVASLLKGDLVTAGWAIERDLFHERYRQPLVKEFEVIKQISTQNGAYATYLSGAGPTVMVLCSKEKEQAIVTELSKLCLGGQIQVLNIERKGVRVEKR

SEQ ID NO: 5349 - DNA, 1323 bp, Streptococcus agalactiae
atgtttgtcttgaagttagagacaatttctaaggagaaattcatgactattaaaatagctttattaggttttggaacggttgctaagggtattccatatttgctaaaagaaaatcaacataagctactttctttagaaggcgaagatattgtgattgataaagtattagtaagagataatgaaagccgccagcgtttcatcaatcagggatttacttataactttgtgacagagataaatactattcttcaagattcacaaattgatattgtagtggaattaatgggggggattgagccagctaaaacttatttgagtcaagcattaggatttggtaaacatattgtgacagccaataaagatctcattgctttacacggaaaagagttgatggatttagcagacgctagaggtctagctttattctatgagggagcagttgctggaggcattcctattttaaggaccctatcgcattcgtttgcctcagataaaatgacacgtttattaggaattctcaacggtacctccaacttcatgttaacaaaaatgtttgaagagggatggtcttatgaacaagctctaaaaaaggcacaagagttaggttatgctgaaagtgatcccacaaatgatgttgaaggtattgatactgcctacaaagccactatcttaagtcaatttggatttggtatgcctattgattttgatgatgttaattataaggggatttctagtattcgctcagaggatgttgaagtagctcaggagatgggctttgccattaagttggtagctgatcttcgtgaaactccaactggtataagtgtagacgtttctccgacactaatttctcaaaagcatcccttagctgcagttaatcatgtgatgaatgcagtattcattgaatcaatagggattggtcagtctcttttttatggaccaggtgcgggacaaaatccaacagcaacctctgttttagcggatatcatcgatattagtcgtagtattcgatcacagataaaaattaagcctatgaatacttatcattgtccgtgtaggttgtcaatgcagtctgatattttcaatgagtactatctagctatttctttgagaaatgctgaagatagtgatacacttggaaggtactttgagcaagaaaatataggtttgaaaaatgttatcgaaaaagcattgggtgataaacaacaagaaatctatgtattaacagatgaagttagccaagagaaaataactcaatttattgaggagtttcctgagagtggtgtcattcagttaatcaatgttttcaaagtaataggaggg

SEQ ID NO: 5350 - protein, 441 aa, Streptococcus agalactiae
MFVLKLETISKEKFMTIKIALLGFGTVAKGIPYLLKENQHKLLSLEGEDIVIDKVLVRDNESRQRFINQGFTYNFVTEINTILQDSQIDIVVELMGGIEPAKTYLSQALGFGKHIVTANKDLIALHGKELMDLADARGLALFYEGAVAGGIPILRTLSHSFASDKMTRLLGILNGTSNFMLTKMFEEGWSYEQALKKAQELGYAESDPTNDVEGIDTAYKATILSQFGFGMPIDFDDVNYKGISSIRSEDVEVAQEMGFAIKLVADLRETPTGISVDVSPTLISQKHPLAAVNHVMNAVFIESIGIGQSLFYGPGAGQNPTATSVLADIIDISRSIRSQIKIKPMNTYHCPCRLSMQSDIFNEYYLAISLRNAEDSDTLGRYFEQENIGLKNVIEKALGDKQQEIYVLTDEVSQEKITQFIEEFPESGVIQLINVFKVIGG

SEQ ID NO: 5351 - DNA, 93 bp, Streptococcus agalactiae
ttgttgaagaatagaaatatgccgattaaagctattaacaaaaaaaagacagaagcaatagctaaccatggggaacgttttcgtggtttacga

SEQ ID NO: 5352 - protein, 31 aa, Streptococcus agalactiae
MLKNRNMPIKAINKKKTEAIANHGERFRGLR

SEQ ID NO: 5353 - DNA, 885 bp, Streptococcus agalactiae
atggcacacacacctactagtcatcgtaaaccacgaaaacgttccccatggttagctattgcttctgtcttttttttgttaatagctttaatcggcatatttctattcttcaacaatcgttcaaagcaagaaataaaaacaaaaacgaacgcctctagtcatcgaaaaattgtcacatctatcaaaaaaaagaaatggattaagcaaaagactcctgtcaaaatacccattttaatgtaccatgctgttcatgttatggacccttctgaagccgccagtgctaacttaattgtggcacctgacatttttgaaagtcatataaaacgtctcaaaaaggaaggatattacttcttagcccctaacgaggcatatcgtgcactaaacgaaaatgccttacctgaaaaaaaagtcatttggattacttttgatgatggaaatgctgatttctacactaaggcataccctatactcaaaaagtacaaggttaaagccactaataatatcatcactggctttgttcaagaaggacgagaatctaacctcaacgttcaacaaatgctagaaatgaagcaaaacggcatgtcattccaaggacatacggttactcaccccaatctttctctcttaactccagaactacaaacccaagaaatgacactatcaaaacagtttttagatcaaaaactctctcaagatactcttgcgattgcttatccatcagggcgctacaatcctacaaccttggatattgctagtcaatattataaactagggcttacaacaaacgaaggagttgcaacaaaagataacggtttgctttctcttaatcgaattcgtatcttaccaactactagcgatgatgatctgatcaagacgattaaccaa

SEQ ID NO: 5354 - protein, 295 aa, Streptococcus agalactiae
MAHTPTSHRKPRKRSPWLAIASVFFLLIALIGIFLFFNNRSKQEIKTKTNASSHRKIVTSIKKKKWIKQKTPVKIPILMYHAVHVMDPSEAASANLIVAPDIFESHIKRLKKEGYYFLAPNEAYRALNENALPEKKVIWITFDDGNADFYTKAYPILKKYKVKATNNIITGFVQEGRESNLNVQQMLEMKQNGMSFQGHTVTHPNLSLLTPELQTQEMTLSKQFLDQKLSQDTLAIAYPSGRYNPTTLDIASQYYKLGLTTNEGVATKDNGLLSLNRIRILPTTSDDDLIKTINQ

SEQ ID NO: 5355 - DNA, 960 bp, Streptococcus pyogenes
atgaacaatagacataaacggcgccaaaaaagaaaagccttcactctcattaaccttatactattatttgcctgcattcttggtttgaccctcattttctatttatatcaagggtctaacaaattcggcttgtcagatgtctctcgatttgtacctaaaataagtctttttcatcacaaaaagacggcaaaaaaagaaacgacaaaacttaagaagactcatttcgattcctcaaaatctcaaaaaaaggcccattctaaattgacttggaccaagcaagaaacacctgtcaagatcccaattttaatgtatcatgctattcatgtaatgtcccctgaagagacggctaatgctaatttgattgtcaacccagatctctttgatcaacaacttcaaaaaatgaaagacgagggctactattttttgagtcctgaagaggtctaccgcgctctttcaaataatgaattgcctgctaaaaaagttgtatggctaacatttgatgacagtatgattgatttctacaatgttgcttacccaatcttaaaaaaatatgatgctaaagccaccaataatgttattacaggactaaccgaaatgggaagcgctgccaatctgactcttaagcagatgaaagaaatgaaacaagtcggtatgtctttccaagatcatacagtgaatcatcctgatctagagcaggctagtcctgatgttcaaacaactgaaatgaaagattcaaaggactatcttgataagcaattaaaccaaaacactattgccattgcttatccatctggtagatataatgacactaccttacaaattgcagctagacttaactataaattaggtgttaccactaacgaaggaatagctagcgcggctaatggacttctttctcttaaccggattcgtatcctcccaaacatgagtcctgaaaatcttttacaaacaatggaacca

SEQ ID NO: 5356 - protein, 320 aa, Streptococcus pyogenes
MNNRHKRRQKRKAFTLINLILLFACILGLTLIFYLYQGSNKFGLSDVSRFVPKISLFHHKKTAKKETTKLKKTHFDSSKSQKKAHSKLTWTKQETPVKIPILMYHAIHVMSPEETANANLIVNPDLFDQQLQKMKDEGYYFLSPEEVYRALSNNELPAKKVVWLTFDDSMIDFYNVAYPILKKYDAKATNNVITGLTEMGSAANLTLKQMKEMKQVGMSFQDHTVNHPDLEQASPDVQTTEMKDSKDYLDKQLNQNTIAIAYPSGRYNDTTLQIAARLNYKLGVTTNEGIASAANGLLSLNRIRILPNMSPENLLQTMEP

SEQ ID NO: 5357 - DNA, 147 bp, Streptococcus agalactiae
ttgggggctggtgttggcagtgattgctattgtcttactcttgtctggtggtctgttagcgctgcagaacgttttaattattgtcgctctgccattttcattcgtaatgattttgatgatgctagcgttattagtggagcttttcca

SEQ ID NO: 5358 - protein, 49 aa, Streptococcus agalactiae
MGAGVGSDCYCLTLVWWSVSAAERFNYCRSAIFIRNDFDDASVISGAFP

SEQ ID NO: 5359 - DNA, 144 bp, Streptococcus agalactiae
gtgccaaatgctgcaaaccatacaaaactcaataatgtcggtattaaaagaactaccgttaaaaactcccgaatgctacgccctttagaaatacgagcgatgaaaactccaacaaaaggagaccaggaaatccaccacgcccaa

SEQ ID NO: 5360 - protein, 48 aa, Streptococcus agalactiae
MPNAANHTKLNNVGIKRTTVKNSRMLRPLEIRAMKTPTKGDQEIHHAQ

SEQ ID NO: 5361 - DNA, 1545 bp, Streptococcus agalactiae
ttgagtaaaaaacatattacgcctgtatttacaggttcactaattgtatcgcttattttagtcttattaggaattattgttcctcgtggttttcaatcttggacacaaatcttgcgtgaacaggtatctaccaatttcggttggttgtacttgttgttagttacttcaattcttgctttgtgtgtcttttttattatgagtcctcttggacaaatacgtttagggcaacctcattcacgtcctgaatattcaactgtatcatggatagcaatgatgttttcagcaggtatggggattggtttggtcttctacggagcagctgaacccttatcgcattttgctatttcgacacctggtgcacctaaggaatcgcaaacagcattagctgatgcatttcgttttacattttttcactgggggatacatgcttgggcagtatatgcattggttgctttagctctagcttattttggatttcgaaagcaagagaaatacctcttgtctgtcactttaaagcctcttttcggtgataagacagatggttggctaggaaaaattgttgatatcaccacagttgttgctacagttattggagttgctacgacacttggatttggagctgctcaaatcaacggagggttaagttttttattgggtgttcccaataatgcatttgttcaaattgttattatcctgattacaacagctttatttgttatgtcagctttatcaggtttaggaaaaggtgttaaaattttatcgaacttaaatttgattttagcggtagccctcttagctttagttattgtattgggaccaacggttcgtatttttgataccctaacagagtctttaggctcttatttacaaaatttctttggaatgagctttcgtgcagctgcttttgacaatactaaacgttcttggattgataattggacgattttttattgggcgtggtggatttcctggtctccttttgttggagttttcatcgctcgtatttctaaagggcgtagcattcgggagtttttaacggtagttcttttaataccgacattattgagttttgtatggtttgcagcatttggcacattatcaactcaggtacaacaactgggtactaatttgacaaagtttgcaacagaggaagtattgtttgctacttttaatcactacactttaggttggcttttatccattattgctatcattttaattttttcattttttattacatcagcagattctgcaacgtacgttttggctatgttgacagaagatggtaatttaaacccaaaaaatcgaactaaagtaatttgggggctggtgttggcagtgattgctattgtcttactcttgtctggtggtctgttagcgctgcagaacgttttaattattgtcgctctgccattttcattcgtaatgattttgatgatgctagcgttattagtggagcttttccatgagaaaaaagaaatgggcttatcgatttctccagatcgttatccacgtaaaaatgaaccatttaaatcttatgaagaa

SEQ ID NO: 5362 - protein, 515 aa, Streptococcus agalactiae
MSKKHITPVFTGSLIVSLILVLLGIIVPRGFQSWTQILREQVSTNFGWLYLLLVTSILALCVFFIMSPLGQIRLGQPHSRPEYSTVSWIAMMFSAGMGIGLVFYGAAEPLSHFAISTPGAPKESQTALADAFRFTFFHWGIHAWAVYALVALALAYFGFRKQEKYLLSVTLKPLFGDKTDGWLGKIVDITTVVATVIGVATTLGFGAAQINGGLSFLLGVPNNAFVQIVIILITTALFVMSALSGLGKGVKILSNLNLILAVALLALVIVLGPTVRIFDTLTESLGSYLQNFFGMSFRAAAFDNTKRSWIDNWTIFYWAWWISWSPFVGVFIARISKGRSIREFLTVVLLIPTLLSFVWFAAFGTLSTQVQQLGTNLTKFATEEVLFATFNHYTLGWLLSIIAIILIFSFFITSADSATYVLAMLTEDGNLNPKNRTKVIWGLVLAVIAIVLLLSGGLLALQNVLIIVALPFSFVMILMMLALLVELFHEKKEMGLSISPDRYPRKNEPFKSYEE

SEQ ID NO: 5363 - DNA, 1401 bp, Streptococcus agalactiae
atgaggatatcaaaaggagggaacattatggcatataaaacaatttatccgtacactaacgaagtattgcatgaattcgataatatcagtgacagtgatctcgaacagtcattagacatagcgcatgccctctacaagacatggcgcaaagaagataatgttgaagaacgccaaaatcaattgcataaagtagcagatttattacgtaaggatcgtgataagtacgctgaagttatgactaaagatatgggaaaacttttcactgaagcacaaggagaagtggacttgtgtgcagacatagctgactattatgctgataatgggcaaaagtttttaaaacctgttccgttagaaagtccaaatggagaggcttactatttgaagcaagctgtcggtgttttacttgctgtcgagccatggaatttcccattttatcagattatgcgtgtatttgcccctaactttatagtgggtaatactatgcttttaaaacatgcttctatttgtcctgcctcagctcaagcgtttgaggatttagtccgagaagcaggagctccagaaggagcgtttaaaaatatttttgcttcgtatgatcaagtttcaaaccttatatcagatcctcgtgttgcaggtgtgtgtttaactggttctgagcgtggtggggcatcaatagcagctgaagctggtaaaaatttgaaaaaatcgtctatggaattaggtgggaacgatgcttttcttattttagatgatgctgattttgatttacttagtaaaacaatattctttgcgcgtttatataatgcaggtcaagtatgtacatcttcaaaacgtttcattgtcatggctgataagtatgacgaatttgtaaatatggtagttgagacctttaagtctgctaaatggggcgacccaatggattcggaaacaaccttggctccactgtcatctgcaggtgcaaaggatgatgttttaaaacaaattaaattggcggtagaccacggtgctgaggtagtttttggaaatgacactatagatcatccaggaaacttcgtcatgccaactgttttaacgaatatcactaaagcaaatccaatctataatcaagaaattttcggccccgtagcctctatctataaagtggatactgaagaagaagctattgctttagctaatgattctagttatggtttaggaagcactgttttttcttctgatccagaacatgctaaaaaagtggcggctcagattgaaacagggatgacatttattaattcagggtggacatcattaccggaattaccgtttggaggtattaaaaattcaggatatggtcgtgagttgagccaacttggatttgatgcctttgtcaacgaacatttggtatttacaccaaatagtgat

SEQ ID NO: 5364 - protein, 467 aa, Streptococcus agalactiae
MRISKGGNIMAYKTIYPYTNEVLHEFDNISDSDLEQSLDIAHALYKTWRKEDNVEERQNQLHKVADLLRKDRDKYAEVMTKDMGKLFTEAQGEVDLCADIADYYADNGQKFLKPVPLESPNGEAYYLKQAVGVLLAVEPWNFPFYQIMRVFAPNFIVGNTMLLKHASICPASAQAFEDLVREAGAPEGAFKNIFASYDQVSNLISDPRVAGVCLTGSERGGASIAAEAGKNLKKSSMELGGNDAFLILDDADFDLLSKTIFFARLYNAGQVCTSSKRFIVMADKYDEFVNMVVETFKSAKWGDPMDSETTLAPLSSAGAKDDVLKQIKLAVDHGAEVVFGNDTIDHPGNFVMPTVLTNITKANPIYNQEIFGPVASIYKVDTEEEAIALANDSSYGLGSTVFSSDPEHAKKVAAQIETGMTFINSGWTSLPELPFGGIKNSGYGRELSQLGFDAFVNEHLVFTPNSD

SEQ ID NO: 5365 - DNA, 1398 bp, Streptococcus pyogenes
gtgatggcttatcaaactatttacccttatacaaatgaagtccttcatacatttgataatatgaccgatcaaggtttggcagatgtccttgaaagagctcaccttctctataaaaaatggcgcaaggaagatcatttagaagaacgtaaagcccagcttcatcaagtggctaatattcttcgtcgtgaccgcgataaatacgctgaaatcatgaccaaagacatgggaaaactgttcacagaagcccaaggtgaagtaaatctttgtgccgatattgctgattactacgctgataaggcagatgaatttttgatgtctacgccactagaaacggattcaggtcaagcttactatttgaaacaatcaactggtgttatcctagctgttgagccttggaattttccttactatcaaatcatgcgggtctttgcgccaaactttattgttggaaacccaatggttttaaaacacgcgtccatttgcccacgctctgcccaatctttcgaagaattagttcttgaagctggtgctgaagcaggtagtattaccaatttgtttatttcttatgaccaagtatcacaagtgattgctgataaacgtgtggttggtgtctgcttgacaggttccgaacgtggaggagctagcattgcagaagaagctggtaaaaacttgaaaaaaacaacccttgaattgggtggagatgatgcctttattatccttgatgacgcggattgggatcaattagagaaggtgctttacttctctcgtctctacaatgcaggtcaagtatgtacctcatcgaaacgttttatcgtgcttgacaaagactatgaccgtttcaaagagttattaacaaaagtcttcaaaacagctaaatggggtgacccaatggatcccgaaacgacgttggcgccattatcatcagctcaagctaaagcagatgttcttgaccaaattaagttggccttggatcatggtgcggagttggtttatggtggtgaagcgattgatcatccaggtcattttgtcatgccaaccattattgctggcctcacaaaagacaaccctatttactatcaagaaatctttggcccagtcggtgaaatctacaaagtgtcttctgaagaagaagcgattgaagtggcgaatgattctaactatggccttggaggtactatctttagtagcaatcaagaacatgcgaaagccgtagctgctaaaattgaaactggtatgtcttttatcaactcaggctggacaagtcttccggaactcccatttggtgggattaaacattcaggctatggtcgtgaattgagtgagcttggctttacatcttttgtgaatgaacaccttatctatattccgaataaaacgaataatggcaatactaaagtt

SEQ ID NO: 5366 - protein, 466 aa, Streptococcus pyogenes
VMAYQTIYPYTNEVLHTFDNMTDQGLADVLERAHLLYKKWRKEDHLEERKAQLHQVANILRRDRDKYAEIMTKDMGKLFTEAQGEVNLCADIADYYADKADEFLMSTPLETDSGQAYYLKQSTGVILAVEPWNFPYYQIMRVFAPNFIVGNPMVLKHASICPRSAQSFEELVLEAGAEAGSITNLFISYDQVSQVIADKRVVGVCLTGSERGGASIAEEAGKNLKKTTLELGGDDAFIILDDADWDQLEKVLYFSRLYNAGQVCTSSKRFIVLDKDYDRFKELLTKVFKTAKWGDPMDPETTLAPLSSAQAKADVLDQIKLALDHGAELVYGGEAIDHPGHFVMPTIIAGLTKDNPIYYQEIFGPVGEIYKVSSEEEAIEVANDSNYGLGGTIFSSNQEHAKAVAAKIETGMSFINSGWTSLPELPFGGIKHSGYGRELSELGFTSFVNEHLIYIPNKTNNGNTKV

SEQ ID NO: 5367 - DNA, 198 bp, Streptococcus agalactiae
atgcctaaccaacacgctgcacctaaaagaattgattttcctccagttttaattagtttgctaacattagtatttataccaattgcccccattgccataacaataaaaaatttagataaaaccttaagtggctcaaagatacgtaacgaaaaacctaatgaagcaactatcgttgttagcaaagaagctaagataaaa

SEQ ID NO: 5368 - protein, 66 aa, Streptococcus agalactiae
MPNQHAAPKRIDFPPVLISLLTLVFIPIAPIAITIKNLDKTLSGSKIRNEKPNEATIVVSKEAKIK

SEQ ID NO: 5369 - DNA, 1020 bp, Streptococcus agalactiae
gtgaggaggactatcatgttatttaaggaaaaaattcctggattaatattatgctttattattgctataccatcttggttgcttgggctttatctccctttaataggagcaccagtttttgctatcttgattggaataattgttggatccttttatcaaaatcgacaattatttaataagggtattgcttttacatctaaatatattttacaaacagcagttgtcttattaggttttggactaaacctcatgcaagtgatgaaagttggtatatcatcgttacccatcattattatgacgatttccatttcattgattattgcttatgttttgcaaaagttatttaagttagataaaacgattgctactttaataggtgttggttcatctatttgtggtgggtccgcaattgcagcgactgcaccagttattaatgctaaagatgatgaagtagcacaagctatttcggttatttttttattcaatatcttagcggctttaatttttccaacgctggggaattttattggtctctctgatcacggttttgcattatttgcagggactgctgtcaatgatacctcgtcagttacagcaactgctactgcatgggatgctatcaatcacagcaatactttgggcggagctactattgttaaattgacacgaacattagccatcattccaattacgattgtattatctatttaccatatgaaacaaacgcagaaagaacaatctgtaagtgttactaagatatttccgaagtttgtgctttattttatcttagcttctttgctaacaacgatagttgcttcattaggtttttcgttacgtatctttgagccacttaaggttttatctaaattttttattgttatggcaatgggggcaattggtataaatactaatgttagcaaactaattaaaactggaggaaaatcaattcttttaggtgcagcgtgttggttaggcattattatagttagtttaacaatgcaagctatccttggaacttgg

SEQ ID NO: 5370 - protein, 340 aa, Streptococcus agalactiae
MRRTIMLFKEKIPGLILCFIIAIPSWLLGLYLPLIGAPVFAILIGIIVGSFYQNRQLFNKGIAFTSKYILQTAVVLLGFGLNLMQVMKVGISSLPIIIMTISISLIIAYVLQKLFKLDKTIATLIGVGSSICGGSAIAATAPVINAKDDEVAQAISVIFLFNILAALIFPTLGNFIGLSDHGFALFAGTAVNDTSSVTATATAWDAINHSNTLGGATIVKLTRTLAIIPITIVLSIYHMKQTQKEQSVSVTKIFPKFVLYFILASLLTTIVASLGFSLRIFEPLKVLSKFFIVMAMGAIGINTNVSKLIKTGGKSILLGAACWLGIIIVSLTMQAILGTW

SEQ ID NO: 5371 - DNA, 1017 bp, Streptococcus pyogenes
atgtcaactcacttaagaaaacttccagggctgttactttgcttattgttagctcttccagcctggtgtttagggcgcttatttcccattattggagcacctgtttttgctattcttttaggaatgttgttagccttgttttatgaacatcgtgacaagactaaagagggaattagttttacatccaagtatattttacaaacagcagtggttttgcttggttttggattaaacctaacccaagttatggcagtgggcatgcagtctttaccgattatcatttcaactattgcgacagctcttttggtagcttatggcttacagaaatggctgcgcttagatgtcaatacagccaccttggtaggtgtaggatcttccatttgtggggggtctgctgttgcagcgacagctcctgtcattaaggcaaaggatgacgaggttgctaaggcaatttcagtcatttttctctttaatatgttagcagctttgctatttccaagtttaggacaattactaggcttatctaatgaaggttttgctatttttgccgggacagctgttaacgacacttcttccgtgactgcaacggccacggcctgggatgcccttcaccattccaatacactagatggagcaaccattgttaaattgactcgcaccttggctattctcccaattactttaggtttatccctttaccgagcgaaaaaagagcacgacatcgttacagaagaaaactttagccttaggaagtcattccctcgtttcatcctcttctttttattagcttctctcatcacaacattgatgaccagtttgggagtttctgccgatagtttccattacctaaaaaccttatcaaaattctttatcgtgatggctatggcagcgattggtttaaacacaaacctggttaaactgattaagacgggcggtcaggctatccttttaggagctatttgctgggtagctatcacccttgtcagtttagccatgcaattaagtttgggcatttgg

SEQ ID NO: 5372 - protein, 339 aa, Streptococcus pyogenes
MSTHLRKLPGLLLCLLLALPAWCLGRLFPIIGAPVFAILLGMLLALFYEHRDKTKEGISFTSKYILQTAVVLLGFGLNLTQVMAVGMQSLPIIISTIATALLVAYGLQKWLRLDVNTATLVGVGSSICGGSAVAATAPVIKAKDDEVAKAISVIFLFNMLAALLFPSLGQLLGLSNEGFAIFAGTAVNDTSSVTATATAWDALHHSNTLDGATIVKLTRTLAILPITLGLSLYRAKKEHDIVTEENFSLRKSFPRFILFFLLASLITTLMTSLGVSADSFHYLKTLSKFFIVMAMAAIGLNTNLVKLIKTGGQAILLGAICWVAITLVSLAMQLSLGIW

SEQ ID NO: 5373 - DNA, 684 bp, Streptococcus agalactiae
atgaaaaagtttttaaaagtttttttaactgtactagtacttattctaattgtaggtgcaggcggtctctatttctggaataatcatcagtcactagagggaaaatggcgtacagtttctttagagaagcaagttgagaaagaaatagaacaacaacttggaagtcaggcagcggatatggggattagtgcagctgatttggttaagggcgctaatatgcatatgaacgtcaaaaacgatgaggcaaagataacagtcactgctcaaattgatgaggtaaaattccatcaagctataaaaacttttattgataaagctcttgaaaaacaattaaaagatcaaggtttgacttacaatgatttaagtgaagcaggtaaaaagatttttgatgaaacaaaaatcactgaccaacaaattgaccaacaaattgatagaagttttcaaagtgctgcacaagctgccggaggaaaatataatactaatactggtgaaatgacattgccagttatggatggtaaagtacatcgcttaacaagtgttattaaagtatcgcatatcaataaaaaggcaaatgcgttctatggtaatattgtgaaaaatggtgaaaaaacagcctataaaaaagagggctctaaattgattttaggtaatgaaaaatcatatccatttatgaaagtaactaaa

SEQ ID NO: 5374 - protein, 228 aa, Streptococcus agalactiae
MKKFLKVFLTVLVLILIVGAGGLYFWNNHQSLEGKWRTVSLEKQVEKEIEQQLGSQAADMGISAADLVKGANMHMNVKNDEAKITVTAQIDEVKFHQAIKTFIDKALEKQLKDQGLTYNDLSEAGKKIFDETKITDQQIDQQIDRSFQSAAQAAGGKYNTNTGEMTLPVMDGKVHRLTSVIKVSHINKKANAFYGNIVKNGEKTAYKKEGSKLILGNEKSYPFMKVTK

SEQ ID NO: 5375 - DNA, 741 bp, Streptococcus pyogenes
atgacacaagtagcccaaaggcgctctaaaagaaagtcattgttatgccatcaatgcaatgccctttttgtatttattatttttcttatcttgcttgctgtactttttggtgttcgatatcgtaatagctctattgaaggtatctggcgaacaacaagcattgatcagaagttaggcgatgattttgctaaacgtcttactggtttgcatcagagccctcttattgatgatagtttattaacgtcatctcagatgatactaacagttaaaaataacaacgttgacttgagttttagtgttcaagttgaacgagacatttttgtcaaacgtttagctgcttatcaccaaaatgaattattaaagacattaaaggaaaatcatttagttgttggtgacttgagtagtaaagaacgccaaattattgagaatagtatgccagctagccatgaattagaaatgattttagatcaagcttttgagaaattagcttctcagatcggaggcaaatataatcaaaaaacaggacatttatctgctgttgttctcaaaggaaaagttaatcgtattttgcacaccattgatatcaaagaagaagtagcagcgggacatacttctttttcaaaaggattactcacacctaatggttattttgattacaccagatttggaaagaaacttgagttattaggcgatgaaaaaattatttttaaaaaagcgctaaaaaaaagtccgtcaagtgta

SEQ ID NO: 5376 - protein, 247 aa, Streptococcus pyogenes
MTQVAQRRSKRKSLLCHQCNALFVFIIFLILLAVLFGVRYRNSSIEGIWRTTSIDQKLGDDFAKRLTGLHQSPLIDDSLLTSSQMILTVKNNNVDLSFSVQVERDIFVKRLAAYHQNELLKTLKENHLVVGDLSSKERQIIENSMPASHELEMILDQAFEKLASQIGGKYNQKTGHLSAVVLKGKVNRILHTIDIKEEVAAGHTSFSKGLLTPNGYFDYTRFGKKLELLGDEKIIFKKALKKSPSSV

SEQ ID NO: 5377 - DNA, 561 bp, Streptococcus agalactiae
ttgattaactatcaaatcgaaaacaatagacccacactaaacctatctaatgaagccgagactgatatctttttcgaaagatattatgtttctagagatggagatagtttagcacgtacagaatcaacaatttcgattaaaatggttgatgccaaaactgaacaaccgctatttaaccacacattaacgggttatcaattgtcaactgtttccaatgtctataacagactctttgaagaaaatcttatcccaactacaaaatcaggagaaaaatattttattcaaaatatgaaaaaaacagctgaacaagaatatactgtttacctttcagaaacaccttattctgaagagaacgctcccgtaatttcttatgatgcaagacctgttgattgggattatcactcaggcgcttcaggatcacttgaaaatcagcctaacatctatactgaagaagattcaactgaatttttgggtaataaaccacaagcagcttgttatccaaacaaacaatttgcttgcgaaaatactgactctaaatacaactatagctatttagaaaaa

SEQ ID NO: 5378 - protein, 187 aa, Streptococcus agalactiae
MINYQIENNRPTLNLSNEAETDIFFERYYVSRDGDSLARTESTISIKMVDAKTEQPLFNHTLTGYQLSTVSNVYNRLFEENLIPTTKSGEKYFIQNMKKTAEQEYTVYLSETPYSEENAPVISYDARPVDWDYHSGASGSLENQPNIYTEEDSTEFLGNKPQAACYPNKQFACENTDSKYNYSYLEK

SEQ ID NO: 5379 - DNA, 531 bp, Streptococcus agalactiae
atgaaagaaaagaaaaatttggggataaaattaataaaatccctatatggtattaatggcccattcgatgaatacagagaacaaaaaatcaattaccttggaaatctattatttgcaaccactagcctctatcacattttatcctctatcatcgcctggttcacggtaagtaaatatcccacagagactgcatatactctcctagctttaacattctttctatatttttgtatttttctaattgttattccctcttatctcaacagtcatgatttaataacgtcactagaagtctcaaaaaatgactatccagtagcaataaagaaaaacaaacaaaaatttatcaaaatcgggatattttatactgtcatccagtggcttatcttgggtttaacaactagcaataacactccgctgattgtatcactattttctttaaaagttattttgtctagtattatgtccggtgtagcttacaatggagttatgtatctaatatttaaaaacaatgttgatattgaaaaagatgaa

SEQ ID NO: 5380 - protein, 177 aa, Streptococcus agalactiae
MKEKKNLGIKLIKSLYGINGPFDEYREQKINYLGNLLFATTSLYHILSSIIAWFTVSKYPTETAYTLLALTFFLYFCIFLIVIPSYLNSHDLITSLEVSKNDYPVAIKKNKQKFIKIGIFYTVIQWLILGLTTSNNTPLIVSLFSLKVILSSIMSGVAYNGVMYLIFKNNVDIEKDE

SEQ ID NO: 5381 - DNA, 135 bp, Streptococcus agalactiae
gtgttaacaaatgccactcattcatcaaaagagcgtactcttgaccaaacgaatgatcataaaaatctgataataaaatcacgttatcaaggccttcagcactgcaccaacgcttctgagcaaatggaaggtcca

SEQ ID NO: 5382 - protein, 45 aa, Streptococcus agalactiae
MLTNATHSSKERTLDQTNDHKNLIIKSRYQGLQHCTNASEQMEGP

SEQ ID NO: 5383 - DNA, 492 bp, Streptococcus agalactiae
atgacaacatttcttggaaatcctgttacttttacaggaaaacagctacaagttggggatattgcaaaagattttttactaatagctacagacttatctcaaaaatctttaaaagattttgaagggaaaaagaaagttattagcgttgttccttctattgatacaggtatttgttcaaaacaaacacgtacttttaatgaggaattatcagagctagataacacagtggttattactgtttctatggaccttccatttgctcagaagcgttggtgcagtgctgaaggccttgataacgtgattttattatcagatttttatgatcattcgtttggtcaagagtacgctcttttgatgaatgagtggcatttgttaacacgtgcagttcttattttggatgagcataataaggtgacttacaccgaatacgttgacaatgttaattcagatgttgactacgaagcggcgattaatgctgcaaagatattacca

SEQ ID NO: 5384 - protein, 164 aa, Streptococcus agalactiae
MTTFLGNPVTFTGKQLQVGDIAKDFLLIATDLSQKSLKDFEGKKKVISVVPSIDTGICSKQTRTFNEELSELDNTVVITVSMDLPFAQKRWCSAEGLDNVILLSDFYDHSFGQEYALLMNEWHLLTRAVLILDEHNKVTYTEYVDNVNSDVDYEAAINAAKILP

SEQ ID NO: 5385 - DNA, 657 bp, Streptococcus agalactiae
atggatttattcctaagtttagagaggaaatttaaagctgcaagtgacaaagaagtttctaagcaacaggaggcttatttacgccatcattttaagtgctatggtattaaatcacctgagcgacgtatgctctacaaagagcttataaaggctgctaaaagacaagcaaaaattgattggcaattgcttgataaatgttggcaaagtgactatcgtgaatatcatcattttgtacttgattatctattagctatgagtcaatttctcacctataatgattgctctagactagagttttacgctcgtcatcaacagtggtgggatagtattgatgttctgactaagatttttgggaacttatccttaaaagatgacaaggttatgaatttactgtcagaatggtcacttgatcaagatttttggatgaggcgactagctattgagcatcaactaggatttaaagaaaaaacaaatactgatattttgtcactttttattttaagaaatacaggaagtcaagaattttttatcaataaggcgattggctgggcgcttagggattattcaaagtataataaagtatgggtaaaggactttatcagtaatcattgtgatgagttgtcgactttgagcatacgcgaaggaagtaagtacctt

SEQ ID NO: 5386 - protein, 219 aa, Streptococcus agalactiae
MDLFLSLERKFKAASDKEVSKQQEAYLRHHFKCYGIKSPERRMLYKELIKAAKRQAKIDWQLLDKCWQSDYREYHHFVLDYLLAMSQFLTYNDCSRLEFYARHQQWWDSIDVLTKIFGNLSLKDDKVMNLLSEWSLDQDFWMRRLAIEHQLGFKEKTNTDILSLFILRNTGSQEFFINKAIGWALRDYSKYNKVWVKDFISNHCDELSTLSIREGSKYL

SEQ ID NO: 5387 - DNA, 762 bp, Streptococcus agalactiae
atggattttgtctttgatatagatggaactctttgttttgatggtatgagtctatctaaagaaatacaaggaatactagagagagcccagattgattatggtcatagagtcacttttgctacagcgcgatcttatagagacactataggtatccttggcgacaagctatctttatcaaaaattattggtttaaatggtgcgactttacatgaaaatggtcacttagtggatagttactatttacaaagtgacttttttagtactattatttcatattgtcatcgccatcagattccatattttgttgatgaggtctttaattacgctacttatcaggcttctaaaattccctttattgcttatgttgatcctcaaaaaaggggagagcttctagaagtttctaaaattgagaaaccgataaaaatggtgttgtattttggtgatcagctgggaagggcagaccaaatgttagcggaattaaatcgttttggacttagtagtcactttttccacgaatttgaaaaatgtttgtacataaatcccattgcagttgacaagggaaaagccactaagaaattatttgggaatcgttttatagcttttggcaatgataaaaatgatatttctatgtttgatgctgcgcattatagtgttcaagtaggggattttgatgaactgactccttacgctaatttacgtgtatcaagagaatctgtacatgaaggaattacaacgctttttgaaaaatacaaggggattacg

SEQ ID NO: 5388 - protein, 254 aa, Streptococcus agalactiae
MDFVFDIDGTLCFDGMSLSKEIQGILERAQIDYGHRVTFATARSYRDTIGILGDKLSLSKIIGLNGATLHENGHLVDSYYLQSDFFSTIISYCHRHQIPYFVDEVFNYATYQASKIPFIAYVDPQKRGELLEVSKIEKPIKMVLYFGDQLGRADQMLAELNRFGLSSHFFHEFEKCLYINPIAVDKGKATKKLFGNRFIAFGNDKNDISMFDAAHYSVQVGDFDELTPYANLRVSRESVHEGITTLFEKYKGIT

SEQ ID NO: 5389 - DNA, 639 bp, Streptococcus agalactiae
atggtttctgaacaatctgaaattgtaacatctaaatatcaaaaaatagcagtagcggttgcacaaagaatcgcaaatggagattatgaagttggagagaagttgaaatctagaacaactattgcttcaacattcaacgtatcaccagaaacagcacgtaagggtcttaatattttagcagatttacagattttaactttaaagcatggcagtggagccattattctctctaaagaaaaagcaattgaattcttaaaccaatatgaaacctctcattcagttgctattttgaaaggtaaaatccgtgataatatcaaggctcagcaacaagaaatggaagagttagctactttagttgatgattttttgcttcaaacacgtgcggttagtaaacaatacccactagcaccatatgaaattattgtcagtgaagattctgaacaccttggtaagtcaataggagaattaaatgtatggcatcaaactggtgcgactattgtggctattgaacacgaagggaaatttattgtttctccggggcctttctcagttatagagcaaggagatcatatcttttttgttggtgatgaagatgtttatgcacgtatgaaaacctattttaacttaaggatgggactt

SEQ ID NO: 5390 - protein, 213 aa, Streptococcus agalactiae
MVSEQSEIVTSKYQKIAVAVAQRIANGDYEVGEKLKSRTTIASTFNVSPETARKGLNILADLQILTLKHGSGAIILSKEKAIEFLNQYETSHSVAILKGKIRDNIKAQQQEMEELATLVDDFLLQTRAVSKQYPLAPYEIIVSEDSEHLGKSIGELNVWHQTGATIVAIEHEGKFIVSPGPFSVIEQGDHIFFVGDEDVYARMKTYFNLRMGL

SEQ ID NO: 5391 - DNA, 639 bp, Streptococcus pyogenes
gtgataagtcctaaaaaagagataacaagttcaaaatatcaaaaaattgctatttcagtagctcagcgtatcgcaaatggcgaatatgaagtgggcgaaaagttaaagtcaagaactactatcgcctcgacatttaatgtatcaccagaaacggctcgtaaaggcctgaatattttagctgacttgaaaattttgactttaaaacatggtagtggagctattgtgctgtcaaaagaaagagctattgagtttataaatcaatacgaatcaacccattccatcgctgttttaaaagaaaaaatacgtgagactattaatgatcagggaaaagcaatggaaaaaatggctgttttggttaatgattttttaatgcaaagtcaatctgttagtaagcaatacccattagcaccttatgagattatttgtaatcaagattcggaacattttggcaaatctattggtgtgttaaatatctggcaccagacaggagcaactatcgtcgctattgaacatgctggtcagtttatcgtttcaccaggtccttattctgttattgaaaaaggcgatcatatttatttcgttggtgatgagtcagtcatttcacgaatgaagaccttttttaatttacgaaaaggatta

SEQ ID NO: 5392 - protein, 213 aa, Streptococcus pyogenes
VISPKKEITSSKYQKIAISVAQRIANGEYEVGEKLKSRTTIASTFNVSPETARKGLNILADLKILTLKHGSGAIVLSKERAIEFINQYESTHSIAVLKEKIRETINDQGKAMEKMAVLVNDFLMQSQSVSKQYPLAPYEIICNQDSEHFGKSIGVLNIWHQTGATIVAIEHAGQFIVSPGPYSVIEKGDHIYFVGDESVISRMKTFFNLRKGL

SEQ ID NO: 5393 - DNA, 444 bp, Streptococcus agalactiae
gtgagtggaggtttcttctctaatctaaaaaatagcgttgtaaattctgactcagtaactgatggtgtaaatgttgaagttggtactaaagaagttgcagttgatttagacatcgttgttgaatacggcaaggacatcccagctatcgttgaaagcattaaagcgattgtcagtcaaaacgttgaagtgatgacccaccttaaagttgttgaattgaacgcaaatgtcgtagatattaagactaaagctgaacatgaagctgactcagtgacagtacaagatcgtgtatctgatgcagcacaagcaacaggaaactttgcttctgaacaagctggcaaagctaaagcagcaatttcctctggagcagagaaaacaaaagaagcagtatcaaatggtactgaggctgcaaaagaaaaaatctcagaagctcgtactagtgaatct

SEQ ID NO: 5394 - protein, 148 aa, Streptococcus agalactiae
MSGGFFSNLKNSVVNSDSVTDGVNVEVGTKEVAVDLDIVVEYGKDIPAIVESIKAIVSQNVEVMTHLKVVELNANVVDIKTKAEHEADSVTVQDRVSDAAQATGNFASEQAGKAKAAISSGAEKTKEAVSNGTEAAKEKISEARTSES

SEQ ID NO: 5395 - DNA, 489 bp, Streptococcus pyogenes
atgatggaaaaaactcaaattaaaagcactcttacttatgacgataaggtcatcgaaaaaattgtcggtcatgctttggaaaacgttggcggattactagctgtaacaggtggatttttctcaaatatcaaaaataatttggtgaattctgagtctgtaactgatggtgtttcagttgaagttggtagcaaggaagtagcagttgatttagcaatcattgtagaatacggtaaagatattcctgctattgcagaatctattaaagctattgtttctcaaaacgttgacagtatgacacatttgaaagttgttgaagtcaatgtgaacgttgttgatattcgtactaaggaagaacatgaagctgctagcgttactgttcaagatcgtgtcactagtgcagcttcaagtacttcacaatttgtatcagaacaaacagaaaaattaaaagatactatctctgatactgtaaatagtgatgaggcagctaaa

SEQ ID NO: 5396 - protein, 163 aa, Streptococcus pyogenes
MMEKTQIKSTLTYDDKVIEKIVGHALENVGGLLAVTGGFFSNIKNNLVNSESVTDGVSVEVGSKEVAVDLAIIVEYGKDIPAIAESIKAIVSQNVDSMTHLKVVEVNVNVVDIRTKEEHEAASVTVQDRVTSAASSTSQFVSEQTEKLKDTISDTVNSDEAAK

SEQ ID NO: 5397 - DNA, 129 bp, Streptococcus agalactiae
atgcaaaagaaaaacttgctgacattaaagataccattaagggtgcttcagagagctttaagaaaaaggactagaaggtttgaggtcatttatttatggaaaatcaaaaacaagatattaaaacttcag

SEQ ID NO: 5398 - protein, 43 aa, Streptococcus agalactiae
MQKKNLLTLKIPLRVLQRALRKRTRRFEVIYLWKIKNKILKLQ

SEQ ID NO: 5399 - DNA, 114 bp, Streptococcus agalactiae
atgtctgaagaaaaatttgatgcaaaagttgataaggtttctggttcagtaaaagaatctgttggaaacttactggcgataaagaagttgaatctgaaggtaaagttgataaat

SEQ ID NO: 5400 - protein, 38 aa, Streptococcus agalactiae
MSEEKFDAKVDKVSGSVKESVGNLLAIKKLNLKVKLIN

SEQ ID NO: 5401 - DNA, 540 bp, Streptococcus agalactiae
atgactgaaacttacatcaaaaacacaactaacaattctggcacgacagctgttcgtggagaattaactttcgaagataaagtgattgaaaaaattgttggaattgcgattgagcatgtagatggtcttttggctgtaaatggtggttttttctcaaatttaaaaaatagcgttgtaaattctgattcagttacagatggcgtaaatgtcgaagtgggtaaaaagcaagttgctgttgatttggatattgttgctgaataccaaaaacatgttccaactatctttgccgatatcaaaaaagttgttgaagctgaagtgaaacgtatgacagaccttgaagtggttgaagttaatgttaatgttgttgatattaaaactcgtgctcaacatgaagaagattcagtaactcttcaagatcgtgtaacaagtgcagcacaagcaacaggtgaatttgcttcgaatcaagtttcaaacgttaaaagtgccgtaggtagcggtgttgataaagtggaagacatgaagtctgaaccacgtgtacaa

SEQ ID NO: 5402 - protein, 180 aa, Streptococcus agalactiae
MTETYIKNTTNNSGTTAVRGELTFEDKVIEKIVGIAIEHVDGLLAVNGGFFSNLKNSVVNSDSVTDGVNVEVGKKQVAVDLDIVAEYQKHVPTIFADIKKVVEAEVKRMTDLEVVEVNVNVVDIKTRAQHEEDSVTLQDRVTSAAQATGEFASNQVSNVKSAVGSGVDKVEDMKSEPRVQ

SEQ ID NO: 5403 - DNA, 537 bp, Streptococcus pyogenes
atgactgaaacttatattaaaaacacatctaaagacttaacttcagcaattcgtggccaattaacatatgatgataaagtaattgaaaaaattgttggtttagcacttgaaaatgttgatgggttactgggtgtaaatggtggtttttttgctaacctaaaagataaattagtaaacaccgaatctgtacgtgatggcgtgaacgtggaagttggaaaaaaacaagttgccgttgatcttgatattgtcgctgaatatcaaaagcatgtgccgactatttatgactctattaaatcgatcgttgaagaagaagtgaagagaatgaccgatctggatgtgattgaagttaatgttaaagtagtcgacattaaaacaaaagaacaatttgaagctgaaaaagtaagtttacaagacaaagtttcagacatggcacgttcaacatctgaatttacgagtcatcaagttgagaatgttaaagcttcagtggataacggtgttgaaaaacttcaagatcaaaaagctgagccacgtgtaaaa

SEQ ID NO: 5404 - protein, 179 aa, Streptococcus pyogenes
MTETYIKNTSKDLTSAIRGQLTYDDKVIEKIVGLALENVDGLLGVNGGFFANLKDKLVNTESVRDGVNVEVGKKQVAVDLDIVAEYQKHVPTIYDSIKSIVEEEVKRMTDLDVIEVNVKVVDIKTKEQFEAEKVSLQDKVSDMARSTSEFTSHQVENVKASVDNGVEKLQDQKAEPRVK

SEQ ID NO: 5405 - DNA, 192 bp, Streptococcus agalactiae
atgtcagaattcgtgaggaaatacagatatccactaggaggtgcagttattgggctcgttttagctgcaatgattgtaaccattggattctttaaaacaattcttgctcttgttatcattgtgctaggtgcttatgctggactttatgtgcaaagaacaggtatgcttgaccaattctttaataagagaaaa

SEQ ID NO: 5406 - protein, 64 aa, Streptococcus agalactiae
MSEFVRKYRYPLGGAVIGLVLAAMIVTIGFFKTILALVIIVLGAYAGLYVQRTGMLDQFFNKRK

SEQ ID NO: 5407 - DNA, 186 bp, Streptococcus pyogenes
atggaattttatgaaaaattcaagtaccctattattggtggcttggtggggctaattattgccatattgctcatggcttttggtttattcaaaacgctactagcaattattttcattattttaggaatatatggtggcctgtatgccaaaaaaacaggtattattgatcaatttcttaatcgtaaa

SEQ ID NO: 5408 - protein, 62 aa, Streptococcus pyogenes
MEFYEKFKYPIIGGLVGLIIAILLMAFGLFKTLLAIIFIILGIYGGLYAKKTGIIDQFLNRK

SEQ ID NO: 5409 - DNA, 579 bp, Streptococcus agalactiae
atgtcaaaaggactaaaaagtttatatactttactaggtctaatctcccttaccctactaggatttgtagctgttatcagtaaacaacacatttatctaccatcttttaattggttagattgggattttaatttgccatcaccgattgacgttggtatgtatcattatttcttttggggagcattagtgctgtttgtgatcgttttactggctatattggtagttctgttttatccaagacgatacacagagtataaactagctgataaaactggtaaattgatgttaaaaaaatctgcaatagagggatttgttaaaacagaagtattaaaaactggtttgatgaaatctcctagtgtgacagctcatttatataagaaaaaagtgaaagttgatgttaaaggtcttttaacttctcgtacaaatgtaccggaacaacttgaacatattcaaagtgatgttgaacttggcttaaaagaattctttgggttggaaaagaaaatgaacactagagtatttgttaagcaagttgaagaagaaaatgttggaaatgctaagacgaataaaagtcgtgtagaa

SEQ ID NO: 5410 - protein, 193 aa, Streptococcus agalactiae
MSKGLKSLYTLLGLISLTLLGFVAVISKQHIYLPSFNWLDWDFNLPSPIDVGMYHYFFWGALVLFVIVLLAILVVLFYPRRYTEYKLADKTGKLMLKKSAIEGFVKTEVLKTGLMKSPSVTAHLYKKKVKVDVKGLLTSRTNVPEQLEHIQSDVELGLKEFFGLEKKMNTRVFVKQVEEENVGNAKTNKSRVE

SEQ ID NO: 5411 - DNA, 609 bp, Streptococcus pyogenes
atgttaagtagaaaagaggtctgtatgtcaaaattgttaaagattagttattgtcttgtcggacttgttctattgtctgtttttggatgggtagttggaataaccggaggctatatatatttaccttatagttatcgttggctaagttggggtatggatagttttcccaatctcttagattcagctttatcctattattacttctggacagcccttgtattatttgttataacatttcttgccttattagttattattttatacccaagaatttatactgaggtccagttacgccataaaaataaaaaaggaacacttttattaaaaaaatcggctattgaaagttatgttgcgaccgctattcaaactgcaggtttgatgccaaacccaacagtcacagctaaattatataagcggaagtttaacattatcgttaaaggacgtttagcttctcgtgtagcagtggcagatcaaattagtggcgtgaaagaagggatcgaaaaaggtttaaccgagttcttcggaattaattatcctgttaatttcaaagtttatgttaaagatattgctgattctgatcgtaaacatattaccagaaatcgtgtagaa

SEQ ID NO: 5412 - protein, 203 aa, Streptococcus pyogenes
MLSRKEVCMSKLLKISYCLVGLVLLSVFGWVVGITGGYIYLPYSYRWLSWGMDSFPNLLDSALSYYYFWTALVLFVITFLALLVIILYPRIYTEVQLRHKNKKGTLLLKKSAIESYVATAIQTAGLMPNPTVTAKLYKRKFNIIVKGRLASRVAVADQISGVKEGIEKGLTEFFGINYPVNFKVYVKDIADSDRKHITRNRVE

SEQ ID NO: 5413 - DNA, 246 bp, Streptococcus agalactiae
atgagtttaatttggtcattaatcgtaggtgctattatcggtgctattgcaggggctgttactaacaaaggtggttcaatgggttggatagctaacatcttagctggtttagttggttcatttgttggtcaaagtttactaggaacatgggggcctaagttagcaggtatggctttgattccttcaatcgtaggtgctattattgttgtcattgttacttcatttgtactaggtaaaatgaataac

SEQ ID NO: 5414 - protein, 82 aa, Streptococcus agalactiae
MSLIWSLIVGAIIGAIAGAVTNKGGSMGWIANILAGLVGSFVGQSLLGTWGPKLAGMALIPSIVGAIIVVIVTSFVLGKMNN

SEQ ID NO: 5415 - DNA, 246 bp, Streptococcus pyogenes
atgggacttatttggactttaatcgtcggtgcgcttattggtgtgattgctggagcacttactaaaaaaggtggttcaatgggctggattgcaaacatcgctgctggtctagttggttcttccgttggtcaagctttacttggttcatggggcccttctttagcaggaatgtctttgatcccgtcagttattggtgccgttatcgttgttatgatcacttcttttgtactaaacaaaactaacaac

SEQ ID NO: 5416 - protein, 82 aa, Streptococcus pyogenes
MGLIWTLIVGALIGVIAGALTKKGGSMGWIANIAAGLVGSSVGQALLGSWGPSLAGMSLIPSVIGAVIVVMITSFVLNKTNN

SEQ ID NO: 5417 - DNA, 336 bp, Streptococcus agalactiae
ttgccgagtggtcacttaagaaactcttgttatttagttaagaacaaaataagtttgtacactgagatgtacttaggaagaaaggtatttatcatgggtttaatttggtcattaatcgttggtgctattattggtgctattgcaggagcaatcactaacaagggtggttcaatgggttggatagctaacatcttagctggtttagttggttcatttgttggtcaaagtttactaggaacatgggggcctaagttagcagatatggctttgattccttcaatcgtaggtgcgattatcgttatcattgttacttcatttgtattaggcaaaaaatca

SEQ ID NO: 5418 - protein, 112 aa, Streptococcus agalactiae
MPSGHLRNSCYLVKNKISLYTEMYLGRKVFIMGLIWSLIVGAIIGAIAGAITNKGGSMGWIANILAGLVGSFVGQSLLGTWGPKLADMALIPSIVGAIIVIIVTSFVLGKKS

SEQ ID NO: 5419 - DNA, 2298 bp, Streptococcus agalactiae
ttgacaaaattaggagtagaaatgaatcctttaataattggaatgaatgataaacaagcagaagcggtacaaacgacagacggaccgcttttgattatggcaggagctggctctggaaaaacacgtgttctgactcatcgtattgcttatttaatagatgaaaaatatgttaatccttggaatattttagcgattacttttactaataaagcagcgcgtgaaatgcgtgaacgtgctatcgccttgaatccagctacccaagatactttgattgcaacttttcatagtatgtgtgttcgtattttacgtcgtgaagctgattatattggatataatcgtaactttacaatcgttgatccaggtgagcagcgtactttaatgaagcgaatcattaagcaattaaatttggacacaaaaaagtggaatgaacgttcaattttaggtacaatctctaatgctaaaaatgaccttcttgatgaaattgcatatgagaagcaagccggagatatgtatacacaggtaattgctaaatgctataaagcttatcaagaggaattacgtagaagtgaggccatggatttcgatgacttgattatgatgacacttcgattatttgatcagaataaagatgttttggcctattaccaacagaggtatcaatatatccatgtagacgagtatcaagatactaaccacgctcaataccaattagttaagttattagcttcgcgtttcaaaaatatttgtgttgttggtgatgccgatcaatccatttacggatggcgtggagctgatatgcaaaatattcttgattttgaaaaggactatccgcaagccaaagttgtattattagaagaaaattatcgatcgactaagaaaatacttcaagctgctaataatgtgattaatcataataaaaatcgccgtcccaaaaaattatggactcaaaatgatgaaggtgagcaaattgtatatcatagagctaacaacgagcaagaagaagcagtttttgtagcatcaactattgataacatcgttcgagaacaaggaaaaaatttcaaagattttgccgttctttatcgtacgaatgcgcaatctcgtactattgaggaagcacttttaaaatccaatattccatatacaatggttggtggaacaaaattctatagtcgtaaagaaattcgagatgttattgcttatctcaatatccttgcaaatacttctgataatatttcttttgagcggattgtaaatgaacctaaaagaggggtggggccaggaactttagaaaaaatacggtcatttgcctatgaacagagcatgtctcttcttgatgcctcttcaaatgtcatgatgtcgcccttaaaagggaaggctgctcaagctgtttgggatttagctaatctgattttgactctacgtagtaatctagatagtttaactgtaacggagattacagaaaacctactggataagacaggatatctagaagcacttcaagttcaaaatacattagaaagtcaagcgcgtattgaaaatattgaagaattcttgtcagtgactaaaaattttgacgataacccagagattacagtagagggtgaaactggtttagatcgtctatcgcgttttttaaatgatttagctttaatagcagatactgatgatagcgccactgaaacggctgaggtcactttaatgacattacatgctgccaagggtctagaatttccagttgttttcttaatcggtatggaagaaggagtatttcctttatcgcgtgcaatagaggatgctgatgaattagaagaagagcgtcgtttagcttatgtcgggattacgagagcagaacaaatacttttccttaccaatgctaatacccgtactttatttggtaaaactagttataatagaccaacccgttttatacgtgagattgatgatgaactgatacaataccaagggttagctcgaccagttaattcttcatttggtgtgaaatattcaaaagaacagcctacacaatttggtcaaggaatgagtcttcaacaagcgcttcaggcacgtaaaagtaattcacaatctcaagtaactgcccaactccaggctcttaacgcgaacaatagccatgagacatcatgggagattggtgatgttgcaactcataaaaaatggggggacggtacggtgcttgaagtttcaggtagcggaaagactcaagagttaaaaataaattttccaggtattgggttaaagaaattattagcgagtgtcgctcctattagcaaaaaggaaaac

SEQ ID NO: 5420 - protein, 766 aa, Streptococcus agalactiae
MTKLGVEMNPLIIGMNDKQAEAVQTTDGPLLIMAGAGSGKTRVLTHRIAYLIDEKYVNPWNILAITFTNKAAREMRERAIALNPATQDTLIATFHSMCVRILRREADYIGYNRNFTIVDPGEQRTLMKRIIKQLNLDTKKWNERSILGTISNAKNDLLDEIAYEKQAGDMYTQVIAKCYKAYQEELRRSEAMDFDDLIMMTLRLFDQNKDVLAYYQQRYQYIHVDEYQDTNHAQYQLVKLLASRFKNICVVGDADQSIYGWRGADMQNILDFEKDYPQAKVVLLEENYRSTKKILQAANNVINHNKNRRPKKLWTQNDEGEQIVYHRANNEQEEAVFVASTIDNIVREQGKNFKDFAVLYRTNAQSRTIEEALLKSNIPYTMVGGTKFYSRKEIRDVIAYLNILANTSDNISFERIVNEPKRGVGPGTLEKIRSFAYEQSMSLLDASSNVMMSPLKGKAAQAVWDLANLILTLRSNLDSLTVTEITENLLDKTGYLEALQVQNTLESQARIENIEEFLSVTKNFDDNPEITVEGETGLDRLSRFLNDLALIADTDDSATETAEVTLMTLHAAKGLEFPVVFLIGMEEGVFPLSRAIEDADELEEERRLAYVGITRAEQILFLTNANTRTLFGKTSYNRPTRFIREIDDELIQYQGLARPVNSSFGVKYSKEQPTQFGQGMSLQQALQARKSNSQSQVTAQLQALNANNSHETSWEIGDVATHKKWGDGTVLEVSGSGKTQELKINFPGIGLKKLLASVAPISKKEN

SEQ ID NO: 5421 - DNA, 2316 bp, Streptococcus pyogenes
atgaatcctttattaaatggaatgaatgatcggcaggcacaagctgttcaaacaactgaaggccccttattgattatggcgggggctggttctggtaaaacaagggtactgacccatcgtattgcctatttaattgatgaaaaatttgtcaatccttggaatattttagctattacctttactaataaggctgcgcgtgaaatgaaagaaagggccttggccttaaatccagctactaaagataccttaattgctacctttcactccatgtgtgtacggattctgcgtcgtgaggctgatcacattggttacaaccgaaacttcacaatcgtggatccaggtgagcaacgaacgttgatgaagcgcattttaaaacaattaaatatagaccctaaaaagtggaatgaacgttctattttaggaactatttcaaacgctaaaaatgatttgcttgatgaaaagggatacgaggcacaggctgctgatatgtatagtcaaatcgtagcgaggtgttacaaagcttatcaggaagaattacgacgtagcgaagcacttgactttgatgatttaatcatgatgacgctacgcctgtttgacgctaatcctgacgtgttagcttattaccagcagcgttaccaatacattcatgtggatgagtaccaagataccaaccatgctcaatatcagctaattaaattactagcttctcgctttaaaaatatttgcgttgttggagacgctgatcagtctatctatggttggcggggagctgacatgcaaaatattcttgattttgaaaaagattacccagatgctaaggtagtgcttttagaagaaaactatcgctctaccaagaaaattctgcaagcagctaacgacgtgattaacaataaccgtaatcgccgtcctaagaaactttggacacaaaatgcggatggtgaacaactggtttattaccgggcaaatgatgagcgagatgaggcagtatttgtggcctcaaccattagcaatatgagtcaagagcttggaaaaaacttcaaagatttcgctgttttataccgtaccaatgcccaatctcggaccattgaagaagcactcttaaaatccaatattccttacaccatggttggaggcaccaagttttacagccgtaaagaaattcgggatttgattgcctatttaaccattgttgctaaccctgctgataatatttcttttgagcggattgtgaatgagcctaaacgaggtgttggtccaggaacgcttgataaactgcgtcagtttgcctatgagagtgaccagtctttattagaagcagcttcaaatctattgatgtcccccttgaaaggtaaagcagcacaagctatcatggacttggccaatattctcggtcagctacgtcaagacctagatcagatgagtatcaccgacttagcagaagctttgttagaaaaaacaggttatttagatagcttacgcctgcaaaatacattggaaagccaagcccgtatcgaaaatatcgaagaattcttatctgttaccaaaaattttgacgagtcaagtgcctctcaagaagaagacgaaaccggtgttgatcgcttgggacgttttttaaacgatttagcactgattgctgatacagatgattcccaagcagaagctgctgaagtaaccttaatgaccctacatgctgccaaaggcttggagttccctgttgttttcttaattggtatggaagaaggtgtcttccccttatcacgtgcctctgaagatccagatgaattggaagaagaaagacgtttagcttatgtcggaatcacaagagctgaagaagttctctttatgaccaatgccaacaccagaaccctctttggtaaaagtagttataaccgtccaacacgcttcttgaaagaaatttcagaggaactactctcttataaaggattggcaagaccagcacaatcttcatttggtgtgcgtttttctactgaaacacacacacagtttggacaagggatgagcctatcagaagccttacaagctcgaaaggcccaggctcaagtaagacaatcagcacagccaatgcaggcacatacgataccatcagcttcaactagctcagttttaccgtttggttctaatagctctgtagaagaggtcacttggcagattggcgatatcgctcaccataaaaaatggggagacgggactgtgcttgaggtttcaggctccggaaaaacgatggaattgaaaatcaaatttccagaagttggtttaaagaaattactagcaagtgttgctcctattgagaaaaaa

SEQ ID NO: 5422 - protein, 772 aa, Streptococcus pyogenes
MNPLLNGMNDRQAQAVQTTEGPLLIMAGAGSGKTRVLTHRIAYLIDEKFVNPWNILAITFTNKAAREMKERALALNPATKDTLIATFHSMCVRILRREADHIGYNRNFTIVDPGEQRTLMKRILKQLNIDPKKWNERSILGTISNAKNDLLDEKGYEAQAADMYSQIVARCYKAYQEELRRSEALDFDDLIMMTLRLFDANPDVLAYYQQRYQYIHVDEYQDTNHAQYQLIKLLASRFKNICVVGDADQSIYGWRGADMQNILDFEKDYPDAKVVLLEENYRSTKKILQAANDVINNNRNRRPKKLWTQNADGEQLVYYRANDERDEAVFVASTISNMSQELGKNFKDFAVLYRTNAQSRTIEEALLKSNIPYTMVGGTKFYSRKEIRDLIAYLTIVANPADNISFERIVNEPKRGVGPGTLDKLRQFAYESDQSLLEAASNLLMSPLKGKAAQAIMDLANILGQLRQDLDQMSITDLAEALLEKTGYLDSLRLQNTLESQARIENIEEFLSVTKNFDESSASQEEDETGVDRLGRFLNDLALIADTDDSQAEAAEVTLMTLHAAKGLEFPVVFLIGMEEGVFPLSRASEDPDELEEERRLAYVGITRAEEVLFMTNANTRTLFGKSSYNRPTRFLKEISEELLSYKGLARPAQSSFGVRFSTETHTQFGQGMSLSEALQARKAQAQVRQSAQPMQAHTIPSASTSSVLPFGSNSSVEEVTWQIGDIAHHKKWGDGTVLEVSGSGKTMELKIKFPEVGLKKLLASVAPIEKK

SEQ ID NO: 5423 - DNA, 300 bp, Streptococcus agalactiae
atgaaattcaatttagaacaagtaaaagtatttgagaattacgaaattgaaaactgggaagaaggtcaagttaccttaacaacgaaggtcgttgactcttcgctcaactattatggtaatgctcatggtggttatttgtttacactgtgtgatcaagtcagtggtttagttgctatttcaacaggatatgaagcggtaactctacaatcaaatatcaactatttgagggcaggccgattagatgatctgcttactgtcatcggtacttgtgttcataatggtcgtactacaaaaagtcgt

SEQ ID NO: 5424 - protein, 100 aa, Streptococcus agalactiae
MKFNLEQVKVFENYEIENWEEGQVTLTTKVVDSSLNYYGNAHGGYLFTLCDQVSGLVAISTGYEAVTLQSNINYLRAGRLDDLLTVIGTCVHNGRTTKSR

SEQ ID NO: 5425 - DNA, 399 bp, Streptococcus pyogenes
atgtcagatttaacacaagagatgaccttaaatgttattagtatttttgataattaccaaattgaacttgctgaaaaaggacaccttattttaagtactgaagtgactgagacggctttgaattattatgggaatgcccatggtggttatcttttcactctatgtgatcaagtaggtggtttggttgctagaactactggcgtagaatctgtcaccttacaggccaatgctaactatttaaaagcagggcacaagggagacaagctgatggttgaaggtcgattggttcatggaggtcgaaccacgcaggtggttgatgtgacgattcataaccaaacaggagctcttctaacaaaaacaagcttgaccatgtttgtgactggccgacgtcataacggg

SEQ ID NO: 5426 - protein, 133 aa, Streptococcus pyogenes
MSDLTQEMTLNVISIFDNYQIELAEKGHLILSTEVTETALNYYGNAHGGYLFTLCDQVGGLVARTTGVESVTLQANANYLKAGHKGDKLMVEGRLVHGGRTTQVVDVTIHNQTGALLTKTSLTMFVTGRRHNG

SEQ ID NO: 5427 - DNA, 99 bp, Streptococcus agalactiae
atgagcgttccgcaaccagaagcaaataaagccactgatacaggcatccctaaaataagcggaactaatatcgtagctccaaacatggcaaaaacatgt

SEQ ID NO: 5428 - protein, 33 aa, Streptococcus agalactiae
MSVPQPEANKATDTGIPKISGTNIVAPNMAKTC

SEQ ID NO: 5429 - DNA, 1347 bp, Streptococcus agalactiae
atgcccaagaggactagtttagatatgactttaaatgctaaaggtgaaagtaatcaaattctagtagataaggaagtacattctactaacttattactagatatcgatgaaaaaccagaattatttcaaggtttgctgttaagttttcaacatgtttttgccatgtttggagctacgatattagttccgcttattttagggatgcctgtatcagtggctttatttgcttctggttgcggaacgctcatttatcaagttgcgacaaaatttaaagtccctgtttacctaggctcatcatttgcttatattacagctatggcattagccatgaaacaaatgcatggcgatatttcggctgctcaaacaggtattctttttgtaggtctaatctatgtcgttgtggcgacggttattaagttcgtaggaaattcatgggttgataagattttgccaccaataatcattggacctatgattattgttattggtttaggtttggcaaactctgctgtaactaatgcaggttttgtcgctaaaggtgattggcgtaaaatgctagttgctgttgttacattcttgattgcagcttttatcaatactaaagggaaaggttttatcaagattattccatttttatttgcaattattggaggttatattttatcaatcattcttggcttggtagatttatctccagttgaaaaagctgcctggtttgaattgccaaaattctatttaccgtttaagacaggtttatttcacagttataaactttactttggaccagaaatgcttgccattcttccaatctcaattgtaacgattgctgaaaatatcggtgatcatacagttttaggtcagatttgtgggcgtaactttctaaaaaaaccaggtttaaatcgtcttttaattggagatggtttagcaaccgcattttctgctcttataggaggaccagctgaaactacttatggtgaaaatacaggtgttattggcatgacgcgtatagcttctgtaacggttattcgtaatgcagcttttattgcaatcgctttttcattctttggtaaatttacagctttgatctctacaattcctagtgcagtacttggtggaatggctatattactttatggtgttattgcaagtaatggattaaaagtgttgattgaaaatcgtgtcaattttgctgaggttcgtaatctgattattgctagttccatgttagttttaggcctcggtggagcagtccttgatctaggtgctctaactttatcaggaacagcattaagtgctatagtgggtattatattaaatttaatattgccaaaagaaagcatgaaatca

SEQ ID NO: 5430 - protein, 449 aa, Streptococcus agalactiae
MPKRTSLDMTLNAKGESNQILVDKEVHSTNLLLDIDEKPELFQGLLLSFQHVFAMFGATILVPLILGMPVSVALFASGCGTLIYQVATKFKVPVYLGSSFAYITAMALAMKQMHGDISAAQTGILFVGLIYVVVATVIKFVGNSWVDKILPPIIIGPMIIVIGLGLANSAVTNAGFVAKGDWRKMLVAVVTFLIAAFINTKGKGFIKIIPFLFAIIGGYILSIILGLVDLSPVEKAAWFELPKFYLPFKTGLFHSYKLYFGPEMLAILPISIVTIAENIGDHTVLGQICGRNFLKKPGLNRLLIGDGLATAFSALIGGPAETTYGENTGVIGMTRIASVTVIRNAAFIAIAFSFFGKFTALISTIPSAVLGGMAILLYGVIASNGLKVLIENRVNFAEVRNLIIASSMLVLGLGGAVLDLGALTLSGTALSAIVGIILNLILPKESMKS

SEQ ID NO: 5431 - DNA, 1257 bp, Streptococcus pyogenes
gtgaaagatgtcatttatgatgtggaagaagtgccaaaggcaggtatgttagttggtttgtcctttcagcacttatttgctatgtttggtgcgactgttctggttcccattctagttggaattgacccatcagttgctttgttatctagtggtttaggaacccttgcccacttatcagtgaccaaatttaaaattccagcctacatgggctcaagttttgcttatatagcagctatgcagttactgatgaagacaaatggtattggtgctgtagctcaaggggctatgacaggaggtctcgtttacctgattgtagctttgattgttaaagctattggcaatgattggattgataacatcttaccaccgattgtggttggtccgattgttatggtcattggtctaagcctagcttctacagctgttaatgatgtcatgctaaaaaatgggaactataatctgacttatcttgttattgggttagtcaccttattatcagttatttttttcaatatttatggtaagggaattgttgctattgtaccgcttttattagggctattagttggttatgttgtagcccttttagtgggtgttctcaccggtcaagaaattgttgattttaccaatgtggctcaggccaaatggtttagtatcccatcagtggaaattcctttcttaacctacggggttaaattctacccaagtgccattttaactatggcacccattgcctttgttacaatgacagaacattttggacacattatggtcttaaatagtttgacaaaaagagattatttcaaggatccaggacttgaaaagactttaactggtgatggttttgcgcaaatcattgccggcttcttaggggcacctccggtcacttcttatggtgaaaacatcggtgtaatggctttgaataaaatattctcggtctatgttattgcaggtgccgcagtgattgccgctctcctcagttttatcggtaaggtatcagccttaattcaatctattccaacaccagttattggaggtatatcagttgccttgtttggtgtgatagcttctagcggtttgaaaatcttgattgaatccaaagttgatatggataataagaaaaacttattgattgctagtgttattttggtctctgggattggaggattgatgcttcaagtaaatggtcttcaaatttcaggtgtcgctttctcaacactccttggcatcatcttatatcaggtacttcctgaaaaa

SEQ ID NO: 5432 - protein, 419 aa, Streptococcus pyogenes
VKDVIYDVEEVPKAGMLVGLSFQHLFAMFGATVLVPILVGIDPSVALLSSGLGTLAHLSVTKFKIPAYMGSSFAYIAAMQLLMKTNGIGAVAQGAMTGGLVYLIVALIVKAIGNDWIDNILPPIVVGPIVMVIGLSLASTAVNDVMLKNGNYNLTYLVIGLVTLLSVIFFNIYGKGIVAIVPLLLGLLVGYVVALLVGVLTGQEIVDFTNVAQAKWFSIPSVEIPFLTYGVKFYPSAILTMAPIAFVTMTEHFGHIMVLNSLTKRDYFKDPGLEKTLTGDGFAQIIAGFLGAPPVTSYGENIGVMALNKIFSVYVIAGAAVIAALLSFIGKVSALIQSIPTPVIGGISVALFGVIASSGLKILIESKVDMDNKKNLLIASVILVSGIGGLMLQVNGLQISGVAFSTLLGIILYQVLPEK

SEQ ID NO: 5433 - DNA, 96 bp, Streptococcus agalactiae
atgtgctctaggcgccgaaggggcaagaagagtaaaacaactcctccaatctctcaggcaaaaggacagaagctaaaagccaatattaataatgag

SEQ ID NO: 5434 - protein, 32 aa, Streptococcus agalactiae
MCSRRRRGKKSKTTPPISQAKGQKLKANINNE

SEQ ID NO: 5435 - DNA, 1368 bp, Streptococcus agalactiae
atgtcatgtatcaaaggagaacatatgctaacactttttactcatatcaatagcttcgtttggggtccacctttacttgctttattagtcggaacaggtatttacctatcatttcgcttaggttttattcaattgagacaactttctagagctttcaaattgattttccgagaggataacgggcaaggagatatttcaagttatgctgcccttgcaactgctcttgctgcaacggtagggacaggtaatatcgttggtgtggctacggctattaaatctggaggaccaggagctttgttttggatgtgggtagctgccttttttggaatggcaacaaaatacgcagaaggattattagctatcaaatatcgcacaaaagatactaatggagaaatttctggaggaccgatgtactacattatcaatggaatgggacaaaaatggaaaccattagcagtctttttttctgcagcaggtatcttagtagctcttttaggaatagggacattcactcaagtcaatgcaattgcttcttctcttgagcatactttcaaaatatcaactagatttaccagcctcattcttgctgttatagtattatttattatatttggaggtataaaatctatttcaaaagtttcagaaaaaatagtgccttttatggctataagctatattttagcaactctgattattattgcagttaattacaataagattccacatactttccaactcatctttagcggtgctttttctgggacagcagccattggtggtttttctggagctatcgttaaagaagcaattcaaaagggaattgctagaggagttttctcaaatgaatctggattgggttctgctccaatagccgcagcagcagctaaaacaaaagaacctgttgaacaaggccttatttcaatgacaggaaccttcattgacactattgttatttgtactttgacagggattgcaattttagttacaggaaaatggctagaatttgatttacagggtgctccgttaacacaagcatcttttaataccgtatttggctcactaggtagttttgccctaaccttttgccttgtcttatttgcttttactactattttaggatggagctattacggagagcgttgctttgaatatctatttgggactaaatttattaacgcttatcgcattatttttgtcattatggtcggcttaggtggtttcttacagctcgatctcatttgggttatcgctgatatcgttaatggtttaatggctttacccaatctaatagctctcctagctttgtcaccaattattgttaaagaaacacagaaatatttttcagagactaaaaatatcactaagcct

SEQ ID NO: 5436 - protein, 456 aa, Streptococcus agalactiae
MSCIKGEHMLTLFTHINSFVWGPPLLALLVGTGIYLSFRLGFIQLRQLSRAFKLIFREDNGQGDISSYAALATALAATVGTGNIVGVATAIKSGGPGALFWMWVAAFFGMATKYAEGLLAIKYRTKDTNGEISGGPMYYIINGMGQKWKPLAVFFSAAGILVALLGIGTFTQVNAIASSLEHTFKISTRFTSLILAVIVLFIIFGGIKSISKVSEKIVPFMAISYILATLIIIAVNYNKIPHTFQLIFSGAFSGTAAIGGFSGAIVKEAIQKGIARGVFSNESGLGSAPIAAAAAKTKEPVEQGLISMTGTFIDTIVICTLTGIAILVTGKWLEFDLQGAPLTQASFNTVFGSLGSFALTFCLVLFAFTTILGWSYYGERCFEYLFGTKFINAYRIIFVIMVGLGGFLQLDLIWVIADIVNGLMALPNLIALLALSPIIVKETQKYFSETKNITKP

SEQ ID NO: 5437 - DNA, 1320 bp, Streptococcus pyogenes
atgatagcactcgttaaattaattgataaccttgtttggggaccgcccctcttaattttattggttgggacggggatttaccttaccagtcatttaggattaattcaaatcttaaaactaccaagagcctttaaactcattttttcagatgacgaaggacatggagatatttcatcctttgctgctcttgcaactgcccttgccgctactgtcggaactggtaacattgttggggttgccactgctatcaagtctggtggtcctggagcgctcttttggatgtgggttgccgctttttttggaatggccactaagtacgctgaaggggtactagcgattaaataccgtacaaaggatgccaacggtcatatttctggtggtcctatgtactatattgttaatggcatggggacaaaatggaaacccttagccgttctttttgcgggttcagggatcctagttgccctatttggaataggaacctttgctcaagtgaactcgatcacctcgtctttaggtcatagctttggcttatccccacaaatggtcagtattgttttagctatctttgtggctgccattatttttggtggcattcattccatttccaaagtggctgaaaaagtcgttccttttatggctattttttatattctatctagtttagcagttatttttagtcactaccaacagctacttcctgttattcgtttagtctttcaatcagccttcactccgacagctgctattggaggctttgctggaagtctcatgaaggatgccattcaaaaaggaattgcacgcggtgtcttctccaatgagtctggactaagatctgcacctattgctgcagcagcagctaaaaccaatgaacccgtggagcagggactgatctccatgacaggaacttttattgatacgattattatctgtaccctaaccggcctatctattttagtaacaggccaatggactgggcagctcgaaggggctcctctgacccaatctgcctttgccactgtgtttggaaatttagggacttttggcctaaccttttccctagttctcttcgcctttacaacgattttaggatggagttattatggagaacgctgctttgaattcctctttggcattacacatctcacctacttccgtattgtctttatcttaatggtaggcctaggaggcttccttaagttagaactaatttgggttttggctgatattgtcaatggtttaatggcacttcctaacctgattgccctcctagctctctcgccagttgttattttagaaaccaagcattactttattaag

SEQ ID NO: 5438 - protein, 440 aa, Streptococcus pyogenes
MIALVKLIDNLVWGPPLLILLVGTGIYLTSHLGLIQILKLPRAFKLIFSDDEGHGDISSFAALATALAATVGTGNIVGVATAIKSGGPGALFWMWVAAFFGMATKYAEGVLAIKYRTKDANGHISGGPMYYIVNGMGTKWKPLAVLFAGSGILVALFGIGTFAQVNSITSSLGHSFGLSPQMVSIVLAIFVAAIIFGGIHSISKVAEKVVPFMAIFYILSSLAVIFSHYQQLLPVIRLVFQSAFTPTAAIGGFAGSLMKDAIQKGIARGVFSNESGLRSAPIAAAAAKTNEPVEQGLISMTGTFIDTIIICTLTGLSILVTGQWTGQLEGAPLTQSAFATVFGNLGTFGLTFSLVLFAFTTILGWSYYGERCFEFLFGITHLTYFRIVFILMVGLGGFLKLELIWVLADIVNGLMALPNLIALLALSPVVILETKHYFIK

SEQ ID NO: 5439 - DNA, 1233 bp, Streptococcus agalactiae
atggcaacttctactgaaaacttacaacttgcaaaaagagggcccattattagtatcattgcctatataacactggcagtcgctaaattagctgcaggttattggtttgatgctacttcacttgtagcagatggatttaataacttatctgatatcttaggaaatgtagcactcttaattggtttacacttggctagtcaaccagccgactcaaaccatcgttttggtcactggaaaattgaagatttagcaagcctgattacctcttttatcatgtttgtcgtaggtattcaagtttttattcaaactgtcactaagattattaataatactgatactaacattgatcctctaggtgctatagtaggtgctatatctgctcttgttatgcttggcgtttatttctataataaacaattatctcaaagagtaaagtctagcgctctggttgcagcttctaaagataacctttctgatgctgtgacatctatcggcacatctattgctatcattgcggcttctctaaattttcctattattgatcgtttagctgctatcattattacttattttattcttaaaacagcttatgatatttttatagaatctgctttcagcttatcggatggtttcgatgattatcaattaaaacaatacgaaaaagctatattaacaattcctaaaatatccgctgtaaaatctcaacgtggacgtacttacggtagtaatatttaccttgatattgttctcgaaatgaaccctgatctctcagtctttgaaagtcatgccattaccgaaagagtggaaaaactactcagtgataaattttctgtatatgacatagatattcatgtagaacccgcttctatcccagaagacgaaattttcgataatgtttatcaaaaattatacaaaaacgaaaaaatcatcctagcaaaaattcccggttatgagacctttattagccctgacttttatatgattaatgaaaagggaaacattatcacttctgacatgctcactaatgctacaaatcattcattggcaagcaactttaaatatttcaatgtaaaatcaattagtcaaaaaacaaaacttgtgtcttatgaattggaaggtaaacgacatactagtatttggcgccgtaatgaaaaatggttcttaatctaccatcaaataactgccaagtcaagtccgtataaaacgagacgatatcaaatcacttcccttgat

SEQ ID NO: 5440 - protein, 411 aa, Streptococcus agalactiae
MATSTENLQLAKRGPIISIIAYITLAVAKLAAGYWFDATSLVADGFNNLSDILGNVALLIGLHLASQPADSNHRFGHWKIEDLASLITSFIMFVVGIQVFIQTVTKIINNTDTNIDPLGAIVGAISALVMLGVYFYNKQLSQRVKSSALVAASKDNLSDAVTSIGTSIAIIAASLNFPIIDRLAAIIITYFILKTAYDIFIESAFSLSDGFDDYQLKQYEKAILTIPKISAVKSQRGRTYGSNIYLDIVLEMNPDLSVFESHAITERVEKLLSDKFSVYDIDIHVEPASIPEDEIFDNVYQKLYKNEKIILAKIPGYETFISPDFYMINEKGNIITSDMLTNATNHSLASNFKYFNVKSISQKTKLVSYELEGKRHTSIWRRNEKWFLIYHQITAKSSPYKTRRYQITSLD

SEQ ID NO: 5441 - DNA, 1233 bp, Streptococcus pyogenes
atgacacaggatccgattgcaaatttaaaactagccagaaagggcccaatcgttagtattattgtctacttgtcgcttagtgttgccaaattattagctggttatttgttaaatgcaagttcccttattgctgatggatttaacaatttatcggatattgtgggaaatgtagccctgcttattggtcttcacttagctagccaaccagccgatgccaatcataaatttggtcattggaaaattgaagacttatccagccttgtcacttcttttattatgtttcttgtaggtttccaagtactgattcacacaattaaaagtatctttagtggtcagcaagttgatattgaccctcttggggctattgtcggtatcgtttcagcttttgttatgttaggggtttatgtctttaacaaacgtctttccaaacgtgtaaaatccagtgccttagtcgctgcttctaaggataatctagctgatgctgttacttctatcggaacatcaattgctattatagcagcttctttgcatttaccagttatcgatcatatagctgctatgatcattacgttctttattcttaaaacagcttttgatatctttatggaaagttcgtttagtttatctgatggatttgatagccgtcatttgaaaaaatacgaaaaagccattttagaaatccctaaaattgtcgccgttaagtctcaacgagctaggacctatggtagcaatgtctatcttgatattgtacttgaaatgaatcctgatctttcagtctatgaaagtcactctattacagagaaagtggagcagttattgagtgaccaattttctatttatgacattgacattcacgttgagcctgccatgattcccgaagaagagatttttgataatgtcgccaaaaagctctaccgctacgaaaaattaattttgagtaaggttcctgactatgaccactacattgctaagtctttccaactgattgatgcgaatggccaaacagttaactatgaacaatttttgaaccaagaaatttattatccaagtaacttcaaccattttcagattgaatccattagtcaaaaaacgatgttggtaacttaccaattaaatggcaatcaacgtaccagtatttggaggcgtcatgaatcttggtccttactcttccaccaaattacccctatcgctaagaaacaattacatcacacacactatcgtattgtaaaaatg

SEQ ID NO: 5442 - protein, 411 aa, Streptococcus pyogenes
MTQDPIANLKLARKGPIVSIIVYLSLSVAKLLAGYLLNASSLIADGFNNLSDIVGNVALLIGLHLASQPADANHKFGHWKIEDLSSLVTSFIMFLVGFQVLIHTIKSIFSGQQVDIDPLGAIVGIVSAFVMLGVYVFNKRLSKRVKSSALVAASKDNLADAVTSIGTSIAIIAASLHLPVIDHIAAMIITFFILKTAFDIFMESSFSLSDGFDSRHLKKYEKAILEIPKIVAVKSQRARTYGSNVYLDIVLEMNPDLSVYESHSITEKVEQLLSDQFSIYDIDIHVEPAMIPEEEIFDNVAKKLYRYEKLILSKVPDYDHYIAKSFQLIDANGQTVNYEQFLNQEIYYPSNFNHFQIESISQKTMLVTYQLNGNQRTSIWRRHESWSLLFHQITPIAKKQLHHTHYRIVKM

SEQ ID NO: 5443 - DNA, 759 bp, Streptococcus agalactiae
ttggactggtatcccaatggatcaaaaagagatatgaaggagattatccagaaattggaggtaaaaatggcaactttaacgaataaccctatctttggtattatgttaaccgtatgggcgtattacattggcataaggatttttagaaaatatccttcccctgcaacaactccacttcttttggcgactattttattaattgcttttttaaaattaacacatatctcctataaagattactacaatggcggttcatttctaacgatgttaattacgccttcaacggttgtattggctattcctctctatagaacctttcatttaatgaagcatcacattaaaagcattagcattagcatcatcttagcttctgttatcaacacagtttttaccgcaatagttgctaagttttttggtatgaaatatttcttagcaatctcacttttcccaaagtccgtaactacagctatggccgttggaattacaagtaaagcaggtggattagctactatcactctggtcgtagttgttattacaggcatcttaacaagcgttttgggtcctatttttctaaaattattaaggatagaagatcctgttgctatagggctcgcgctaggaggaactgggcatgctataggaactggacaagccttaaaatatggccaagttcaaggcgccatggctggactagcaattggtatcacagggatttgctatgttattgtcagtcctttagttgcaggcttaatattgaaa

SEQ ID NO: 5444 - protein, 253 aa, Streptococcus agalactiae
MDWYPNGSKRDMKEIIQKLEVKMATLTNNPIFGIMLTVWAYYIGIRIFRKYPSPATTPLLLATILLIAFLKLTHISYKDYYNGGSFLTMLITPSTVVLAIPLYRTFHLMKHHIKSISISIILASVINTVFTAIVAKFFGMKYFLAISLFPKSVTTAMAVGITSKAGGLATITLVVVVITGILTSVLGPIFLKLLRIEDPVAIGLALGGTGHAIGTGQALKYGQVQGAMAGLAIGITGICYVIVSPLVAGLILK

SEQ ID NO: 5445 - DNA, 621 bp, Streptococcus agalactiae
atgataccgttaaaaaaaataactgttggaacgattgtctgtctctcatttttgggtttaacagcatgctcttcttcaaatactcagcaaacctctacttcaaaatcaaatgtatcacaacataaaaatatcaaagctgaccacgaagaattacgtttgaaatttaataaagtaaagttaggggttaaagcaaataactttaaaggaggcactagtctcgctgaattaaaacaattatttggtggcgaaccaaatgaaaaatttgatacaccagcgggaaatgtcactcttaaaggctatcgttggaatgtcgatgatatctccatcactatacaattattaaacgatagtagcattgttcgttcaattagtaattttaagtttattcgtgatgccaacatcacaacaaaagattataatagtttaaaaaatggcatgtcatacaataaagtaaaagaacttctaggagaacctgatgatatttctcaagcagtttcttcagataaagaggaactacaggctgcatggattagtggcatccagtcgtcagacagtgatccgggaattaaccttacatttgaaaatgataaactcactaacaaacaacagcatggtttaaaa

SEQ ID NO: 5446 - protein, 207 aa, Streptococcus agalactiae
MIPLKKITVGTIVCLSFLGLTACSSSNTQQTSTSKSNVSQHKNIKADHEELRLKFNKVKLGVKANNFKGGTSLAELKQLFGGEPNEKFDTPAGNVTLKGYRWNVDDISITIQLLNDSSIVRSISNFKFIRDANITTKDYNSLKNGMSYNKVKELLGEPDDISQAVSSDKEELQAAWISGIQSSDSDPGINLTFENDKLTNKQQHGLK

SEQ ID NO: 5447 - DNA, 618 bp, Streptococcus pyogenes
atgacaaaaaaacacttactaacacttcttctcatctctttttttactagctttttggtagcttgttcaacaacgaaagataaagagcctcaaccgtctgattcagaaatcattactccccgactacaccaagccgctcatcaagataaacgcgctaactttgaaaaaattaaacttgcgactgttgattcctcatttacaggagggacaagccttgaagaacttatttcactctttggagagcctagccaacatgatccaaaaacagcaggcgaagtaacaatcgacgcttatacttggcagtttgatcaagttactctcactgttaatctttatcaaaatagtagtattgttaaaaccatctctaattttacctttgcaagagagttaggcttatcgcaaaaggaataccaacaattacaaaaaggaatgtcttatgaagacgttaaaaagatcttaacagaacctgataattatagccaagcgtcatctagtgatcatcaaactttgcaagcgatttgggttagtggcttaaagacagatacaagcggagctaatatttctctcgtttttgaaaataatcagttaacagaaatgtctcaggtaggacttgaagaa

SEQ ID NO: 5448 - protein, 206 aa, Streptococcus pyogenes
MTKKHLLTLLLISFFTSFLVACSTTKDKEPQPSDSEIITPRLHQAAHQDKRANFEKIKLATVDSSFTGGTSLEELISLFGEPSQHDPKTAGEVTIDAYTWQFDQVTLTVNLYQNSSIVKTISNFTFARELGLSQKEYQQLQKGMSYEDVKKILTEPDNYSQASSSDHQTLQAIWVSGLKTDTSGANISLVFENNQLTEMSQVGLEE

SEQ ID NO: 5449 - DNA, 924 bp, Streptococcus agalactiae
ttggaagctcgtaaagcatgggacaaacttgttggtcgtgaaggtgaagttgttactgttaaaggtacacgtgctgttaaaggcggactttcagttgaatttgaaggacttcgtggtttcatcccagcttcaatgattgatactcgttttgtacgtaatactgaaaaatttgttggacaagaatttgatgctaaaatcaaagaagttgatgcagcagaaaatcgcttcatcctttcacgtcgtgaagttgttgaagaatcagcagctgcagcacgtaaagaagttttctcaaacattgaagtaggttcagttgtaactggtaaagttgctcgtttaacaagctttggtgctttcattgaccttggtggtgttgatggacttgtacacgtaactgaattatcacatgagcgcaatgtttcacctaaatcagttgtaactgttggtgaagaagttgaagttaaagtactttcaattgatgaagaagctggtcgtgtatcactttcacttaaagcaactacacctggcccatgggatggcgttgaacaaaaacttgctgctggtgatgttattgaaggtaaagtaaaacgcttgactgactttggtgcttttgttgaagtgttacctggcattgatggacttgtacacatttcacaaatttcacacaaacgtgttgaaaatcctaaagacgtattatctgcaggacaagaagttactgttaaagttcttgaagttaattcagatgcagaacgtgtctcactttcaatgaaagctcttgaagagcgtccagcgcaagcagaaggtgaaaaagaagaaaaacgtcaatcacgtccacgtcgtccacgtcgtcaagaaaaacgcgactacgagcttccagaaacacaaactggattctctatggctgacttattcggtgatattgaatta

SEQ ID NO: 5450 - protein, 308 aa, Streptococcus agalactiae
MEARKAWDKLVGREGEVVTVKGTRAVKGGLSVEFEGLRGFIPASMIDTRFVRNTEKFVGQEFDAKIKEVDAAENRFILSRREVVEESAAAARKEVFSNIEVGSVVTGKVARLTSFGAFIDLGGVDGLVHVTELSHERNVSPKSVVTVGEEVEVKVLSIDEEAGRVSLSLKATTPGPWDGVEQKLAAGDVIEGKVKRLTDFGAFVEVLPGIDGLVHISQISHKRVENPKDVLSAGQEVTVKVLEVNSDAERVSLSMKALEERPAQAEGEKEEKRQSRPRRPRRQEKRDYELPETQTGFSMADLFGDIEL

SEQ ID NO: 5451 - DNA, 1203 bp, Streptococcus pyogenes
atgaatgaatttgaagatttgctaaacagtgttagcgaagtgaaccctggtgatgttgtcactgcggaagttttaactgttgataacggtcaagcaaacgttgttatcgaaggaacaggtgttgaaggtgtcttgacacttcgtgaattgactaacgaccgcgatgctgatattaacgactttgttaaagctggcgacacagttgaagtacttgttcttcgtcaagtagtaggtaaagatactgatacagttactttcctagtatctaaaaaacgtttggaagctcgtaaagcctgggacaaacttgttggtcgtgaaggcgaagttgttactgttaaaggtacccgtgctgttaaaggtggcctttcagttgaatttgaaggacttcgtggatttatccctgcttcaatgattgacactcgttttgttcgcaacactgaaaaatttgttggacaagagtttgatgctaaaatcaaagaagttgatgcagcagaaaaccgtttcatcctatcacgtcgtgaagttatcgaagaggccgctaaagaagctcgtgctgaagtgttctctaagatttcagaaggtgcagtcgttacaggtactgtagcgcgtttaacaagttttggtgctttcattgaccttggtggtgttgacggacttgttcacgtgactgaattgtctcacgaacgtaacgtgtcacctaaatcagttgtttcagttggtgaagaagttgaagttaaagttctttcaattgacgaagaagctggtcgtgtgtcactttcacttaaagcaacaacacctggaccatgggacggcgttgaacaaaaacttgctcaaggtgatgttgttgaaggtaaagtaaaacgcttgactgacttcggtgcttttgttgaagtattaccaggtattgatggacttgttcatatttcacaaatttcacacaaacgtgttgaaaatccaaaagatgtactttctgtaggacaagaagtaacagttaaagttcttgaagtgaatgcagctgatgagcgcgtatcattatcaatcaaagctcttgaagaacgcccagcgcaagctgaaggagacaacaaagaagaaaaacgtcaatcacgcccacgtcgtccaaaacgtgaatcaagacgtgactacgaactcccagaaacacaaactggattctcaatggctgatcttttcggtgatattgaattg

SEQ ID NO: 5452 - protein, 401 aa, Streptococcus pyogenes
MNEFEDLLNSVSEVNPGDVVTAEVLTVDNGQANVVIEGTGVEGVLTLRELTNDRDADINDFVKAGDTVEVLVLRQVVGKDTDTVTFLVSKKRLEARKAWDKLVGREGEVVTVKGTRAVKGGLSVEFEGLRGFIPASMIDTRFVRNTEKFVGQEFDAKIKEVDAAENRFILSRREVIEEAAKEARAEVFSKISEGAVVTGTVARLTSFGAFIDLGGVDGLVHVTELSHERNVSPKSVVSVGEEVEVKVLSIDEEAGRVSLSLKATTPGPWDGVEQKLAQGDVVEGKVKRLTDFGAFVEVLPGIDGLVHISQISHKRVENPKDVLSVGQEVTVKVLEVNAADERVSLSIKALEERPAQAEGDNKEEKRQSRPRRPKRESRRDYELPETQTGFSMADLFGDIEL

SEQ ID NO: 5453 - DNA, 930 bp, Streptococcus agalactiae
atggtatcgctaaaaacggaaattgctggttttagttttgacaattgtttgatgaatgcagcgggtatttattgtatgactaaggaagagttattagctattgaaaattctgaagctggttcctttgttacaaaaacaggtacccttgaagctagagagggaaaccctcaaccacgttatgcagatactgactggggatcaattaattctatgggactccctaataaaggtattgactattatcttgatttcgtgactgaattacaagatcaagacaatagcaaaaatcacgttttatcattagtaggtttatcaccagaagagacacatattattcttaaaaaggttgaaaacagtagttacaatggcctaatagagttaaatttatcgtgcccaaatgttcctggaaaacctcaaattgcttatgattttgaaatgactgacctcatcctttcagaaatctttagctattatcaaaagccattgggcatcaaattaccaccttactttgatatcgttcactttgatcaagcagctacaatttttaacaaatatcctttagcttttattaactgtgttaattctatcggaaatggacttgttattgatgatgaaactgtcgttataaagcctaaaaatggctttggaggtatcggtggggattttatcaagcctaccgccttagctaacgtccatgctttctacaaacgtttaaatccttcaattaaaattatcggaacaggtggtgttaaaaacggccgtgatgcctttgaacacattctatgtggagctagtatggtccaaatcggaaccgctttacaaaaagaaggaccagaaatttttcagcgtgtaagcagagaattaaaagaaataatggctgataaaggctatcaatcattggaggattttcgaggacaacttaattacctt

SEQ ID NO: 5454 - protein, 310 aa, Streptococcus agalactiae
MVSLKTEIAGFSFDNCLMNAAGIYCMTKEELLAIENSEAGSFVTKTGTLEAREGNPQPRYADTDWGSINSMGLPNKGIDYYLDFVTELQDQDNSKNHVLSLVGLSPEETHIILKKVENSSYNGLIELNLSCPNVPGKPQIAYDFEMTDLILSEIFSYYQKPLGIKLPPYFDIVHFDQAATIFNKYPLAFINCVNSIGNGLVIDDETVVIKPKNGFGGIGGDFIKPTALANVHAFYKRLNPSIKIIGTGGVKNGRDAFEHILCGASMVQIGTALQKEGPEIFQRVSRELKEIMADKGYQSLEDFRGQLNYL

SEQ ID NO: 5455 - DNA, 945 bp, Streptococcus pyogenes
atggaggaaataatggtttctactgctacacaaattggtcatttctcttttgataactgtttgatgaatgctgctggtgtttactgcatgacaaaagaagagcttatggaggttgaaaagtctcaagccgcttcctttgtcaccaaaacagggacgcttgaagttcgtccaggtaatccagaacctcgctacgcagatactcgtcttggttctatcaattcaatgggactccctaataatggttttcgctactacttagactttgtcagtgatcttgccaaaaccgggcaacataaacctcactttctctccgttgtcgggctatctcctactgaaaccgaaaccattttaaaagccatcatggcttcagattatgagggtctagtggaactaaacctttcttgccctaacgttccaggaaaaccacagattgcttatgattttgaaaccactgatcaacttctagagaacatctttacctattacactaaacctcttggtatcaaattacctccttattttgacattgtgcattttgatcaagcggctgcgattttcaataaataccccctttcctttgttaactgtgtcaattctatcggaaatgggctggtcattaaggatgaacaagtcctcatcaagcctaaaaatggctttggtggtataggtggagattacatcaaacctactgctctagccaatgtccatgcgttttacaaacgcttaaaaccttctatccacattattggtacagggggagttaaaacaggacgcgatgcctttgaacatattctttgtggcgccagcatggtccaaattgggacagcccttcatcaagaagggccagctatctttgaacgggtcactaaggaacttaaaacgattatggtagaaaaaggctaccaaagcttagacgattttcgtgggaacttacgttacaaagat

SEQ ID NO: 5456 - protein, 315 aa, Streptococcus pyogenes
MEEIMVSTATQIGHFSFDNCLMNAAGVYCMTKEELMEVEKSQAASFVTKTGTLEVRPGNPEPRYADTRLGSINSMGLPNNGFRYYLDFVSDLAKTGQHKPHFLSVVGLSPTETETILKAIMASDYEGLVELNLSCPNVPGKPQIAYDFETTDQLLENIFTYYTKPLGIKLPPYFDIVHFDQAAAIFNKYPLSFVNCVNSIGNGLVIKDEQVLIKPKNGFGGIGGDYIKPTALANVHAFYKRLKPSIHIIGTGGVKTGRDAFEHILCGASMVQIGTALHQEGPAIFERVTKELKTIMVEKGYQSLDDFRGNLRYKD

SEQ ID NO: 5457 - DNA, 1233 bp, Streptococcus agalactiae
atggcgcttaaagaattaacagctaaagagttcgaaagttattcaggaaattacgatttacaatcgtttatgcaaacccctgagatggcaaagcttctaaaaaaacgtgggtatgacattacctacatgggctaccaaatcgatgggaaaatggaaatcatcagtattgtttataccatcccaatgactggtggacttcatatggaagtcaattctggtccagcccattccaattctaaatatctgaaacatttttataaagaactacagaactatgccaaatctcagggcgctttagaattattaattaaaccttatgatacctaccaagagtttactggtgaaggtaagcctaaaggtgcaccgaacacctatcttattgatgacctgactagtataggttatcaccacgatgggcttcatattggttatcctggcggtgaacctgattggcattatgttaaaaatctagaaggtatcactcctcaaaatcttcttaaatctttctctaaaaaaggacgccccttggttaaaaaagccatgtcttttggtataaaaatacgtgtcctcaagcgggaagaactacatatctttaaggatattacttcttctacttctgatcgccgggactatatggataaatctctagattattatcaagatttttatgatagtttcggagataaggcggaatttgtcattgcaactctaaactttagggaatatgatcataacctacaattaaatgcaaagaaattggaagaacagattacagtccttgataatcgccatcaaaataatacagattctgccaaataccatcgtcaacgtactgagcttgtcaatcaactagctagtttagataaacgtcgcaaagaagtcgaaccttttattcaaaaatttggaaatcaagatgttgttttagctggtagcctctttatttatagcccgaaagaaactgtctatcttttctctggctcatacacagaatttaataaattttatgcgcctgcagttcttcaagaatatgttatgcaagaggctttaaagcgtcaatcaactttctataattttttaggtattcaaggaaattttgatggttcagatggcgtacttcgctttaaacagaattttaatggttacattgttcgtaaaatgggtactttccgctactatccaaatccattaaaatataagagtattcaattactaaagaaaatcttacgccgaaca

SEQ ID NO: 5458 - protein, 411 aa, Streptococcus agalactiae
MALKELTAKEFESYSGNYDLQSFMQTPEMAKLLKKRGYDITYMGYQIDGKMEIISIVYTIPMTGGLHMEVNSGPAHSNSKYLKHFYKELQNYAKSQGALELLIKPYDTYQEFTGEGKPKGAPNTYLIDDLTSIGYHHDGLHIGYPGGEPDWHYVKNLEGITPQNLLKSFSKKGRPLVKKAMSFGIKIRVLKREELHIFKDITSSTSDRRDYMDKSLDYYQDFYDSFGDKAEFVIATLNFREYDHNLQLNAKKLEEQITVLDNRHQNNTDSAKYHRQRTELVNQLASLDKRRKEVEPFIQKFGNQDVVLAGSLFIYSPKETVYLFSGSYTEFNKFYAPAVLQEYVMQEALKRQSTFYNFLGIQGNFDGSDGVLRFKQNFNGYIVRKMGTFRYYPNPLKYKSIQLLKKILRRT

SEQ ID NO: 5459 - DNA, 1233 bp, Streptococcus pyogenes
atggcactaattgaaatttcacaagaacaatttgaccattactgccacagtctcgtccatcattcctttatccaaacctcagaaatggccagcttgatggctaaaagaggggcaaaaccacaatttcttggacttgaaaaagatggtgaactaaaggttgctgctatggtctttagccaaaaagtggctggaggttggcgtatggaactcaatgcaggccctaataccaatcatcccgaagaattagaacatttttacactcaacttaaagactatgccaaacaaaaagacgttatcgaactcattttaaaaccttacgacaattatcagtcatttgatactgatggcatccctatttctcgtccaaacactgaccttattagccttttaacggcgttaggatataaacatgacggtttaaaaacaggctatcctgagggtgaacctgtttggcattacgttaaaaagttagaaggaattgattcctcacgtttaacccgttccttcagcaaaaaaggaaaagctttaataaaaaaagctaatacttttggtattaaattacgtcaactgaaacgagatgagttacaccatttcaaagaaattactgaagcaacctctgatcgtagagattaccttgacaaatcattatcttactatcaggacttttatgatagttttggagactcttgtgaatttatggttgcgactcttaattttgaagattaccttaataaccttaaacaaagacaactacaactagcaaccagcatcaacaaagttaaaggagaccttggcaaaaatcctcattctgaaaaaaagcaaaatagattaaaagaactatccagccagttcgaaacctttcaggtaagaatttctgaagctctccattttcttgaagagtatggaactaaagatgtgttccttgcgggaagtctttttatctataccgaacaagaggccgtctacctcttttcaggatcttaccccaaatttaataaattttatagcccagctctattacaagagcatgctatgctcaaggcaattcacaagggcatcaaacaatataattttcttggtattactggaaagtttgatggttcagacggtgtcttgcgctttaaacagaatttcaatggctttattttgcaaaaaccagggacatttagatgttatccatttccaatcaaatatcatttcattagattggcaaaaaagctattaaaccgctat

SEQ ID NO: 5460 - protein, 411 aa, Streptococcus pyogenes
MALIEISQEQFDHYCHSLVHHSFIQTSEMASLMAKRGAKPQFLGLEKDGELKVAAMVFSQKVAGGWRMELNAGPNTNHPEELEHFYTQLKDYAKQKDVIELILKPYDNYQSFDTDGIPISRPNTDLISLLTALGYKHDGLKTGYPEGEPVWHYVKKLEGIDSSRLTRSFSKKGKALIKKANTFGIKLRQLKRDELHHFKEITEATSDRRDYLDKSLSYYQDFYDSFGDSCEFMVATLNFEDYLNNLKQRQLQLATSINKVKGDLGKNPHSEKKQNRLKELSSQFETFQVRISEALHFLEEYGTKDVFLAGSLFIYTEQEAVYLFSGSYPKFNKFYSPALLQEHAMLKAIHKGIKQYNFLGITGKFDGSDGVLRFKQNFNGFILQKPGTFRCYPFPIKYHFIRLAKKLLNRY

SEQ ID NO: 5461 - DNA, 1209 bp, Streptococcus agalactiae
atgtatagagaaattaccgctgtcgaacacgatcgctttgtgagcgaatccaaccaaacaaacctacttcaatcttctaattggcccaaagtaaaagacaactggggtagtcaattacttggcttttttgacggtgaaacccaaattgccagcgctagtattctcatcaaatcacttcctcttggcttctccatgctatatattccgcgtggaccaatcatggattactccaatctagatattgtaactaaggtccttaaggaccttaaagcttttggcaaaaaacaaagagctctctttatcaagtgtgatcctctcatctatttaaaaatggtcaatgccaaagattttgaaaattcgcccgatgaaaaagaagggttaatcgccattgatcatttacagcgtgcaggtgctgattggactggtcggacaacagatttagctcatactatccaaccacgttttcaggcaaacctatatgctaatcaatttggacttgataaaatgtctaaaaaaactcgtcaagctattcgaacttccaaaaataagggagtagatatacaatttggtagccatgaactacttgaagattttgcagagttgatgaaaaaaacggaagaccgtaaagggataaatcttagaggaattgactactaccaaaaactccttgatacgtatcctaataactcatacatcacaatggcttcgctagatgttgcaaaacgattagaaaaaatagaaaaagaatgtcagatagcccaatctgaaagaataaaatcacttgaacttaatcgtgagaaaaaagttaaacaacaccaaggtacgattgatcgattaaataaagaaattgattttctcaaagaagctcaaaaagcctatgaccgagacattattccattggctgcaaccctcactctagaatttggtaatacatcagaaaatatttatgctggtatggacgattactttaaatcttattctgctcctatttacacttggtttgaaacagctcaaagggcttttgaacgtggaaatatttggcaaaatatgggggggattgagaatgacttatctggtggtttatatcattttaagtctaagttcgaaccaatcattgaggaatttattggagaatttaacattccagtgaacagattgctttataaagcctctaattatgtctatgccttacgcaaaaaacgtaatagc

SEQ ID NO: 5462 - protein, 403 aa, Streptococcus agalactiae
MYREITAVEHDRFVSESNQTNLLQSSNWPKVKDNWGSQLLGFFDGETQIASASILIKSLPLGFSMLYIPRGPIMDYSNLDIVTKVLKDLKAFGKKQRALFIKCDPLIYLKMVNAKDFENSPDEKEGLIAIDHLQRAGADWTGRTTDLAHTIQPRFQANLYANQFGLDKMSKKTRQAIRTSKNKGVDIQFGSHELLEDFAELMKKTEDRKGINLRGIDYYQKLLDTYPNNSYITMASLDVAKRLEKIEKECQIAQSERIKSLELNREKKVKQHQGTIDRLNKEIDFLKEAQKAYDRDIIPLAATLTLEFGNTSENIYAGMDDYFKSYSAPIYTWFETAQRAFERGNIWQNMGGIENDLSGGLYHFKSKFEPIIEEFIGEFNIPVNRLLYKASNYVYALRKKRNS

SEQ ID NO: 5463 - DNA, 1239 bp, Streptococcus pyogenes
gtgggtattaaactaatgtatacatataaaatcggaatatctcctgaagaacatgatcagtttgtcttagcacagccacaagctggcttacttcaaagttcaaagtggggaaaagtcaaagataactggaaacacgaacgcatcagcttttatgaaaatggggtacaagttgctgctgctgcttgtttaatcagaaaacttcctcttggtttcactatgatttatatcccacgtgggccaatcatggactacgccaattttgaactccttgatttcgtcattaaaacgctcaaaactttcggaaaaagcaaacgagcgctttttatcaaaattgatccaagtttagtcatcaaacaaactttagaaggaaaagagagcaaagaaaatgatgtgacactctctattattgcttttctaaaaaaactcggtgtcgaatggtctggcagaacaaaagaactcgaagacactattcaaccaagaatacaagccaacatctacgccaaggattttgactttgacagcctgcccaaaaaagccaagcaatccattcgtaccgctaccaataaaggtgttaatgtcacgattggtggcagtgaattgctagacgacttttcagccttgatgaaaaaaaccgagaatcgaaaaggcattatccttcgaggcaaatcctattatcaaaaattactaggtatttatgctggtcagtcctacattactatggctagtttagacttacctgaacaaaaaaaactcttgatccaacagttggacaaggccttagcagaacaagcacgattaacagataagagtaaacctagcaaagtagcagaaaatcaaaaaaccattgcacggctacaaaaagatttaaccattttaagcgagcagctcgctacaggccaaacccgtatcccattagccgccaccctaaccttgatttatggcgagacttctgaaaatctttatgcgggaatggacgatgattatcgcaattatcaagctcctcttttaacctggtatgaaacggctaaagaagcttttaaaagaggctgccgctggcataatttaggaggtgtggaaaatcaacaagatggtggactctatcatttcaaagctagactcaaccccactatcgaagaatttgcaggtgaattcaacattcctgtcggccttgtttcaagcttagccatcttaacctataacttaagaaaaaaattaaggagcacaactaatggcactaat

SEQ ID NO: 5464 - protein, 413 aa, Streptococcus pyogenes
VGIKLMYTYKIGISPEEHDQFVLAQPQAGLLQSSKWGKVKDNWKHERISFYENGVQVAAAACLIRKLPLGFTMIYIPRGPIMDYANFELLDFVIKTLKTFGKSKRALFIKIDPSLVIKQTLEGKESKENDVTLSIIAFLKKLGVEWSGRTKELEDTIQPRIQANIYAKDFDFDSLPKKAKQSIRTATNKGVNVTIGGSELLDDFSALMKKTENRKGIILRGKSYYQKLLGIYAGQSYITMASLDLPEQKKLLIQQLDKALAEQARLTDKSKPSKVAENQKTIARLQKDLTILSEQLATGQTRIPLAATLTLIYGETSENLYAGMDDDYRNYQAPLLTWYETAKEAFKRGCRWHNLGGVENQQDGGLYHFKARLNPTIEEFAGEFNIPVGLVSSLAILTYNLRKKLRSTTNGTN

SEQ ID NO: 5465 - DNA, 93 bp, Streptococcus agalactiae
atgttaccgttggaatatccgaaaaagaatatgatgcctttgctattgcatcgtctcaaaccaatctcctccactcttcaaagtgggcacaag

SEQ ID NO: 5466 - protein, 31 aa, Streptococcus agalactiae
MLPLEYPKKNMMPLLLHRLKPISSTLQSGHK

SEQ ID NO: 5467 - DNA, 1233 bp, Streptococcus agalactiae
atgggtaataaactgatgtatcatgttaccgttggaatatccgaaaaagaatatgatgcctttgctattgcatcgtctcaaaccaatctcctccactcttcaaagtgggcacaagtaaaatcaaattggcaaaatgaacgtttaggcttttataaagatgaccaattagttgctgtagctagcatcttaattaaatcattaccacttggttttacaatgctttatattccacgtggacctattatggactacagcaataaagaattagttaactttgtgttaaaaacactaaaaaactttggacgaaagaaacgtgctgtttttgcaaaattcgatccagcacttcttctacgtcaatatcaccttaaagaagagaatgtcgccgaagagatagatgaaagtagacaggcaattgataatcttaagtcagcaggtgcccaatggataggtccaacgaaagccatttccgaaaccatccaacctcgttttcaagcgaatatctataccaaagcaaatatagaagaaaactttccaaaacacactaaacgtctgataaaagatgcaaagcatcgcggtgttcaaatttatcgtgccaacattgatgatttacctaaattcgccacggttgtagcattaaccgagaatcgtaaaggtgtagctttacgtaatgaaaactatttccatcaactaatgacaatttatggagaagatgcctatctctatttagctaaagtcaatcttcctaaaagattagcgcaatttaaagaacaacttcttcaaatccaaaaagatttatcagaaactccatcccatcaaaaaagtcgcctgacaaggctaaatcaacaagaagcttctgttaaacaatatatccttgaatttcaggagtttagcaagaaatatccagatgagcctgtcattgcaggaattttgtccattcgttttggcaatgtcctggagatgttgtatgctggtatggatgatagcttccgtaaattttatccacagtatctcttgaatgctagggtgttcgaagatgctttcaaaaacgatattgtatctgctaatctaggcggtgtcgagggaagtcttaacgatggtttaacaaaatttaaaagtaacttcaatccaatgtttgaagaatatattggcgagtttaatctagcaatcaatccattattatataaattggccaacctagcctatactattcgaaaaaaacaaagacactctcac

SEQ ID NO: 5468 - protein, 411 aa, Streptococcus agalactiae
MGNKLMYHVTVGISEKEYDAFAIASSQTNLLHSSKWAQVKSNWQNERLGFYKDDQLVAVASILIKSLPLGFTMLYIPRGPIMDYSNKELVNFVLKTLKNFGRKKRAVFAKFDPALLLRQYHLKEENVAEEIDESRQAIDNLKSAGAQWIGPTKAISETIQPRFQANIYTKANIEENFPKHTKRLIKDAKHRGVQIYRANIDDLPKFATVVALTENRKGVALRNENYFHQLMTIYGEDAYLYLAKVNLPKRLAQFKEQLLQIQKDLSETPSHQKSRLTRLNQQEASVKQYILEFQEFSKKYPDEPVIAGILSIRFGNVLEMLYAGMDDSFRKFYPQYLLNARVFEDAFKNDIVSANLGGVEGSLNDGLTKFKSNFNPMFEEYIGEFNLAINPLLYKLANLAYTIRKKQRHSH

SEQ ID NO: 5469 - DNA, 1221 bp, Streptococcus pyogenes
atgacgaatttaacgttttatgcaaaaatcggtatttcagaagaagagcatgactcttttgttaaagaacatcagcaaattagcgttttacaaggtagtgattgggcaaaaatcaaaaatcaatggcagaatgagcgaattggtatctataaagaggaaaagcaggttgcctctttatcacttttgattaagctattgccacttggaagaagcattatttatattccaagagggccagtcatggattatcttgaccgtgatttggtggcatttaccatgaaaacactaaaggattatggtaaaactaaaaaggccctctttatcaaatatgatccagctatcctgttaaaacaatacgcactgggacaggaagaagaagaaaaacctttagctttagcagctattaagaatctccaagaagctggtgttcattggactggtttaacaatggagattgcagatagtatccaacctcgtttccaagctaatatttacactcaagaaaaccttgagatgcaatttcctaagcataccagacgtttaataaaagatgctaagcagcgtggtgtaaaaacatatcgtgtcagtcaatcagaacttcacaaattttccaagattgtctccttaacagaaaaacgtaaaaatatttctttgcgtaacgaagcttactttcaaaagttgatgactacttatggggataaggcctacttacatctagcaaaagtgaatattcctcaaaaactagatcaataccgccagcaattaattcttattaaccaagatattactcgcacccaagctcatcaaaagaagcgtttaaaaaaattagaagatcaaaaagcttctttagaacgttatataactgaatttgaaggctttacagaccaatatcctgaggaagttgttgtagcaggtatattatctatttcttatggaaatgttatggaaatgctttatgctgggatgaatgatgattttaagaagttttatcctcagtatctgctgtatcctaatgtttttcaggatgcttatcaagatggtattatttgggctaacatgggaggagtagaaggctcgcttgatgatggacttaccaaatttaaggccaactttgctccgacaatagaagaatttataggagaatttaatctccctgtcagcccactttatcatattgctaataccatgtacaaaatacgaaaacagttaaagaataaacat

SEQ ID NO: 5470 - protein, 407 aa, Streptococcus pyogenes
MTNLTFYAKIGISEEEHDSFVKEHQQISVLQGSDWAKIKNQWQNERIGIYKEEKQVASLSLLIKLLPLGRSIIYIPRGPVMDYLDRDLVAFTMKTLKDYGKTKKALFIKYDPAILLKQYALGQEEEEKPLALAAIKNLQEAGVHWTGLTMEIADSIQPRFQANIYTQENLEMQFPKHTRRLIKDAKQRGVKTYRVSQSELHKFSKIVSLTEKRKNISLRNEAYFQKLMTTYGDKAYLHLAKVNIPQKLDQYRQQLILINQDITRTQAHQKKRLKKLEDQKASLERYITEFEGFTDQYPEEVVVAGILSISYGNVMEMLYAGMNDDFKKFYPQYLLYPNVFQDAYQDGIIWANMGGVEGSLDDGLTKFKANFAPTIEEFIGEFNLPVSPLYHIANTMYKIRKQLKNKH

SEQ ID NO: 5471 - DNA, 822 bp, Streptococcus agalactiae
gtgggagataaaatgacttcaattaaacttgttgccgtagatattgacggcaccctattaaatagtaagcgtgaaattacacctgaagtggctaaagctgttcaagaagcaaaatcaaaaggcgttaaaattgttattgctacaggacgtccaatcatcggagtccaagatcttttagaagaattgaaactcaatgaagagggagattatgttatcacctttaacggcggtctagttcaagacacagccacaggagatgacatcatcaaagaaaccttaacctatgaagactatctggatttcgaactgttagcgcgtaaattaggcgtccacatgcacgccattacaaaagaaggaatttacacagcaaatcgtgatattggtaaatatacaatacacgaagtaactttagttaatatgccgctcttctatcgtactcctgaagaaatgggagacaaagaaatcattaaactaatgatgattgatcaacctgacatcttagatgcagcaattgctaaaattccaaaaaaagttctcgataactacactattgtaaaatcaactcctttttatttagaaattttacccaaaaacgttaataaaggcactgcacttctccaccttgcagagaaaatgggattaactgtagatcaaacaatggctattggtgatgaagaaaatgaccgtgctatgcttgaagttgttggaaatcctgttgttatgcaaaacggcaatcctgaactaaaaaaaatagcaaaatatatcaccaaatcaaacgaggaaagtggcgtagcctacgcactacgtgaatgggtaataaac

SEQ ID NO: 5472 - protein, 274 aa, Streptococcus agalactiae
MGDKMTSIKLVAVDIDGTLLNSKREITPEVAKAVQEAKSKGVKIVIATGRPIIGVQDLLEELKLNEEGDYVITFNGGLVQDTATGDDIIKETLTYEDYLDFELLARKLGVHMHAITKEGIYTANRDIGKYTIHEVTLVNMPLFYRTPEEMGDKEIIKLMMIDQPDILDAAIAKIPKKVLDNYTIVKSTPFYLEILPKNVNKGTALLHLAEKMGLTVDQTMAIGDEENDRAMLEVVGNPVVMQNGNPELKKIAKYITKSNEESGVAYALREWVIN

SEQ ID NO: 5473 - DNA, 1314 bp, Streptococcus agalactiae
atgaatgaaaaagtatttcgtgaccccgttcacacttatatccatgtaaataatcaagtcatatatgacttgattaacactaaagaatttcaacgtttacgacgcattaaacaaacctcaacgacttcttttaccttccatggtgcagagcatagtcgtttttcacattgtctcggagtttatgaactggctcgtaaagttacagaaatctttgatgaacattattctgatctttggaataaaaatgagtccctgctaacgatggctgccgccctactacatgatatcggacatggcgcatattctcatacatttgagcgtctcttcaatactgatcatgaagcttacactcaggaaatcatcaccaatcctaccacagagattaatgctattttacgaaaggtggctcctgattttcctgataaagtagctagtgttattaatcatagctaccccaataaacaagttgttcaattaatttctagtcaaattgattgtgatcgaatggactatcttctcagagattcttactacactgctgctagctatggacaatttgatttaacacgaattttacgcgttattagaccaaccgattctggaattgcttttgctcgtaacgggatgcacgctgtggaagattatattgttagtcgcttccaaatgtatatgcaagtttatttccatccagccagtcgtgctatggaattactcttacaaaatttactaaaacgtgctcgcttcttatttgatacccatcgcgatttttttgaacaaacttctccaaatcttattcctttcttcacggatcaatatgatttacaagattatttagccctagatgatggggtaatgaatacttacttccaatcttggatgcaagctgatgataacattttggcagatttagctaatcgttttatcaatcgaaaagtctttaaatcaattacctttgaagagtctgataaagaaaatctagttaaaatgaaagaactagtctcacaggttggttttgatcccgattattacactggtgtccatgctaattttgacttaccttacgatgtttatcggcctgaacattcaaatccacgaacagaaattcaaattatccaaaagaatggacaacttgctgaattatcaagcttatcaccgattgtaaaagcattaactggatctaattatggtgatcaacgtttttattttccaaaagaaatgttgacattagatagcctattttcaagtacaaaagaagaatttcaatcttatatcacaaatgagcatttgacactcacgaaagataatagccattca

SEQ ID NO: 5474 - protein, 438 aa, Streptococcus agalactiae
MNEKVFRDPVHTYIHVNNQVIYDLINTKEFQRLRRIKQTSTTSFTFHGAEHSRFSHCLGVYELARKVTEIFDEHYSDLWNKNESLLTMAAALLHDIGHGAYSHTFERLFNTDHEAYTQEIITNPTTEINAILRKVAPDFPDKVASVINHSYPNKQVVQLISSQIDCDRMDYLLRDSYYTAASYGQFDLTRILRVIRPTDSGIAFARNGMHAVEDYIVSRFQMYMQVYFHPASRAMELLLQNLLKRARFLFDTHRDFFEQTSPNLIPFFTDQYDLQDYLALDDGVMNTYFQSWMQADDNILADLANRFINRKVFKSITFEESDKENLVKMKELVSQVGFDPDYYTGVHANFDLPYDVYRPEHSNPRTEIQIIQKNGQLAELSSLSPIVKALTGSNYGDQRFYFPKEMLTLDSLFSSTKEEFQSYITNEHLTLTKDNSHS

SEQ ID NO: 5475 - DNA, 1299 bp, Streptococcus pyogenes
atgaatgaaaaagtatttcgtgaccctgttcacaactatatccacattgataatccattaatttatgaccttatcaataccaaagaattccaacgcttacgacgcatcaaacaagtccctacaacagctttcaccttccacggcgcagaacatagccgtttttctcactgcctaggtgtttacgaaattgcccgtcgggtgacagctatttttgaagagaaatacgctgatatctggaataaagatgaaagtctggtcactatgacggctgccctcttacatgacattggtcatggagcctattctcatacctttgaggttctttttcatacggatcacgaggcctttactcaggagataattaccaatcctgagacagaaatcaatgccattttggtgcgtcatgctcctgattttccagacaaagttgccagcgtgattaatcatacttatcctaacaagcaagttgtgcaactgatttccagccagattgactgcgaccgtatggattaccttttaagagattcttatttttctgctgccaattacggtcagtttgatttaatgcgcatcctacgtgtgattcgacctgttgaagatggcattgtctttgaacatagtggtatgcatgctgtcgaggactatattgtcagtcgttttcaaatgtacatgcaggtctattttcatcccgccagccgtgctgttgagctcatcttacaaaatctcctcaaaagagcccaacacttatatcctgagcaacaggcttatttccaaaaaacagctcctggactcatccccttctttgaaaagaaggctaatttagcagattatatagccctagatgacggagtcatgaatacttacttccaagtctggatggcaagcgaagaccatatcttatcagatttggccagtcgctttattaatcgaaaaattctgaagtctgttacctttgaccaagattcccaaggagagttagaacgcttgcgccaattggtcgaatcagttggctttgatccagattattacaccggtatccatatcaacttcgacctgccttatgatatttatcgaccagagctcgaaaatccaagaactcagattgaaatgatgcaaaaagacgggagccttgctgaattatctcagttatctcctattgtcaaagcattaacagggacaacctacggagaccgtcgcttttattttccaaaggaaatgttagagctcgatgacctctttgctcctagcaaggaaacttttatgagttatatttccaatgggcattttcactttagtcag

SEQ ID NO: 5476 - protein, 433 aa, Streptococcus pyogenes
MNEKVFRDPVHNYIHIDNPLIYDLINTKEFQRLRRIKQVPTTAFTFHGAEHSRFSHCLGVYEIARRVTAIFEEKYADIWNKDESLVTMTAALLHDIGHGAYSHTFEVLFHTDHEAFTQEIITNPETEINAILVRHAPDFPDKVASVINHTYPNKQVVQLISSQIDCDRMDYLLRDSYFSAANYGQFDLMRILRVIRPVEDGIVFEHSGMHAVEDYIVSRFQMYMQVYFHPASRAVELILQNLLKRAQHLYPEQQAYFQKTAPGLIPFFEKKANLADYIALDDGVMNTYFQVWMASEDHILSDLASRFINRKILKSVTFDQDSQGELERLRQLVESVGFDPDYYTGIHINFDLPYDIYRPELENPRTQIEMMQKDGSLAELSQLSPIVKALTGTTYGDRRFYFPKEMLELDDLFAPSKETFMSYISNGHFHFSQ

SEQ ID NO: 5477 - DNA, 396 bp, Streptococcus agalactiae
gtgagagaagtcatgaaactagaaattaacaataacattcaaattgacaacgaaaccgaaatgattcatgagattcacgattgtcaatttattgaaaaaggaagttacgtttatttgaattatattaatgctgagggcgagagggtagttattaaggcaaatcatgaggaattgcttatgacgaggttttcaaatcctaagtctgtaatgcgttttcatcgtgaaacgcctgctttggttaatatccccactccacttggtgttcaacatttgattacagagacaagtcactatcagtttgatttgtcacagcaaaggttgcatatcaattatgtccttaagcaaacggagacaggagactgttttgcaaattatgaattaaggattcaatggtat

SEQ ID NO: 5478 - protein, 132 aa, Streptococcus agalactiae
MREVMKLEINNNIQIDNETEMIHEIHDCQFIEKGSYVYLNYINAEGERVVIKANHEELLMTRFSNPKSVMRFHRETPALVNIPTPLGVQHLITETSHYQFDLSQQRLHINYVLKQTETGDCFANYELRIQWY

SEQ ID NO: 5479 - DNA, 384 bp, Streptococcus pyogenes
atgaaattacagttaaccaaccatattcgctttggagatgagacagagattattcaagaaattcatgattgtgagtggcgagaaaaagggggctatcagtacctcatctatcaaaacactgacaaggaaaaggttgtcatcaagtacaatgagacagaactgaccatgagccgtttttccaaccctcagtcaatcatgaaattttttgcgggcaagaaggtcctgattgctctacctacgccgatgggggttcaacaatttttgacagataccagtcattaccacttagattgttcttgtcaaaaattggaccttcattatcatttgcttcaagctcaaacagaaatgctatttgcaagctatcatcttgagctgagttgggat

SEQ ID NO: 5480 - protein, 128 aa, Streptococcus pyogenes
MKLQLTNHIRFGDETEIIQEIHDCEWREKGGYQYLIYQNTDKEKVVIKYNETELTMSRFSNPQSIMKFFAGKKVLIALPTPMGVQQFLTDTSHYHLDCSCQKLDLHYHLLQAQTEMLFASYHLELSWD

SEQ ID NO: 5481 - DNA, 2682 bp, Streptococcus agalactiae
ttgttaaaagaacagaaaaaatccttgttttacacacaaggtcaagaagaggttctaacgtctttagaatcttctcgtgaaggattatcaacgacagaagcgaaaaatcgcttagagatgtatggtcgcaatgagcttgaagaagggaaaaaacgtagtctaatagctaagttttttgaccaattcaaagatttaatgattattatcttactggttgctgcagctctctctgttattacggaaggtatgcatggcttaacggatgcattgattatcttggcggttgttatcttaaatgcagcttttggtgtttatcaagaggggcaagccgaagcagctattgaagccctcaaagatatgtcaagcccaattgcgcgtgttcgtcgtgatggtcatactattgaggtggattctaaagaactagttcctggtgacctcgttatgttagaagcaggagatgttgttcccgcagatttacgacttttagaagccgcgtctctaaaaattgaagaagcagctctaactggtgagtcagtacctgttgagaaagacatatctcaagtagtagcagaggatgcaggtattggtgaccgtgtgaatatggcgtatcaaaattcaaatgtcacgtatggtcgaggatatggtgttgttactaacacagggatgtatactgaagttggtaaaattgcggacatgttggcaaatgctgatgaatctgaaacaccattgaaacaaagtttagttcaactttctaaattattgacttacttaatcgtgattattgcggttattactttcttagtggggatatttgtccgtaaagaaggttggattgaaggattgatgacttcagttgctttagcagttgcagctattccagaagggcttcctgcaattgttacgattgtcttatcaatgggaacaaaaactcttgctaaacgcaattctatcgttcgtaaactccctgcagttgaaactttaggttctacagaaatcattgcatcagataagactggaactctgacaatgaatcaaatgactgtcgaaaaagtgtatactaatggtgttctccaatcatcttcggaagaaatttcagttgataataacactttacgtattatgaatttctccaacgatactaagattgatccttcaggaaaattaattggtgacccaacagagactgcactggtacaatttggtttagataagaattttgatgtccgtgaagttttgaaaaatgaaccacgtgtagctgagttaccatttgattcagatcgtaagttaatgtctacgattcataaagaatcagatggtcgctactttatcgcagtcaagggtgctcctgatcaattattaaaacgagttactaaaattgaagataatggcttggttcgtgatatcacggctgaagataaagaggctatcctaaataccaataaagaactcgcaaaacaagctcttcgtgtcttgatgatggcttataaatatgaaacacaaattccaagtttagagactgatattgttgagtcagatttagtattctcaggtttagtgggaatgattgaccctgagcgtccagaagcggcagaagctgttcgagttgctaaagaagcaggaattcgtccgattatgattaccggggaccatcaagatactgcagaagctattgcaaagcgtctaggtattattgatgcaaatgacacagaagatcatgtctttacgggtgctgaacttaatgaattaagtgatgaagagtttcaaaaagtatttaaacaatattctgtctatgcacgtgtttctcctgaacataaagtgcgtatcgtgaaagcttggcaaaacgatggcaaagtcgttgccatgactggtgatggtgttaatgatgctccatcgctaaaaacagcagatattggtattggtatgggaataactggtacggaagtttccaaaggtgcttctgatatggtccttgctgatgataattttgcaactattattgtggctgttgaggaaggacgtaaagtcttctcaaatatccaaaaatctattcagtatcttctttcagccaacatggcagaggtatttacaattttctttgcaactttattaggatgggatgtacttgcaccggttcaccttctttggattaacttggtaacagatactcttccagccatcgctcttggagttgagccagctgaaccaggagttatgacacataaacctcgtggtcgccagtcaaacttctttgatggtggtgttatgggagctattatctatcaaggtattttacaaactatcttagtacttggtgtctatggttgggcattgatgtatccagaacatgctggttatcgcatgattcacgcagatgcccttacgatggcctttgcaacgcttggtttaatccaattggtacatgcatttaacgttaagtcagtttaccaatcaatctttacagttggagcttttaaaaatagaacctttaactggtctattccagtagctttcattcttttgatggtgactattgttgttcctggatttaataaacttttccatgtaactcatttaagttcaacacaatggttaactgtagttatcggaagtttattgatggtagtgttaacggaaattgttaaatttatccaacgtaaattaggacaagacgaaaaagctatt

SEQ ID NO: 5482 - protein, 894 aa, Streptococcus agalactiae
MLKEQKKSLFYTQGQEEVLTSLESSREGLSTTEAKNRLEMYGRNELEEGKKRSLIAKFFDQFKDLMIIILLVAAALSVITEGMHGLTDALIILAVVILNAAFGVYQEGQAEAAIEALKDMSSPIARVRRDGHTIEVDSKELVPGDLVMLEAGDVVPADLRLLEAASLKIEEAALTGESVPVEKDISQVVAEDAGIGDRVNMAYQNSNVTYGRGYGVVTNTGMYTEVGKIADMLANADESETPLKQSLVQLSKLLTYLIVIIAVITFLVGIFVRKEGWIEGLMTSVALAVAAIPEGLPAIVTIVLSMGTKTLAKRNSIVRKLPAVETLGSTEIIASDKTGTLTMNQMTVEKVYTNGVLQSSSEEISVDNNTLRIMNFSNDTKIDPSGKLIGDPTETALVQFGLDKNFDVREVLKNEPRVAELPFDSDRKLMSTIHKESDGRYFIAVKGAPDQLLKRVTKIEDNGLVRDITAEDKEAILNTNKELAKQALRVLMMAYKYETQIPSLETDIVESDLVFSGLVGMIDPERPEAAEAVRVAKEAGIRPIMITGDHQDTAEAIAKRLGIIDANDTEDHVFTGAELNELSDEEFQKVFKQYSVYARVSPEHKVRIVKAWQNDGKVVAMTGDGVNDAPSLKTADIGIGMGITGTEVSKGASDMVLADDNFATIIVAVEEGRKVFSNIQKSIQYLLSANMAEVFTIFFATLLGWDVLAPVHLLWINLVTDTLPAIALGVEPAEPGVMTHKPRGRQSNFFDGGVMGAIIYQGILQTILVLGVYGWALMYPEHAGYRMIHADALTMAFATLGLIQLVHAFNVKSVYQSIFTVGAFKNRTFNWSIPVAFILLMVTIVVPGFNKLFHVTHLSSTQWLTVVIGSLLMVVLTEIVKFIQRKLGQDEKAI

SEQ ID NO: 5483 - DNA, 858 bp, Streptococcus agalactiae
atgaccaaacttgctatcatgagtgatttacatattgacctcaatcatttttctacctttgagacgaaaacgttaattaatttgcttaagaaagaaaaaattgatcacctccatatcgctggagatatatctaatcattttactaaagatacacttccctttatcaataacttaaaaaagcatattaaacttagctataatttaggaaaccatgatatgcttgatttaacagaaacagaaatccaacgtcttgactttcaaacctatcgatttgacaaaaaaatgctactagcttttcatggctggtatgattacagcttttcaaataatagagacatcaaggatgttgaaaaattaaaaaagactttttggtttgatagacgtttaaaacgtccaaataatgatgtaactatccaagcatcaattttaaaacgcttagacgaaatattagcaaaagtcgattcttcaaatatcattattgctatgcactttgttccccataaacaattcacgatgactcatcctagattctctccttttaatgcttttttggggagtcaggcttatcatgatttattccaaaaatatcatatcaaagatgttgtttttggtcatgcacaccgctcatttggcgacgttaaaattggagagactacttatcattctagaccacttggatatattagagaatggaatttaactattgactttgtcaatcagaatcccaatcataaccctaatttaacctggaatcttagcaaaaggtataatgccgttaagcatttggatagttttgaaaactatcgaaaaaaatattttgaagacgaattacgcaactctatgacaatatttgattgc

SEQ ID NO: 5484 - protein, 286 aa, Streptococcus agalactiae
MTKLAIMSDLHIDLNHFSTFETKTLINLLKKEKIDHLHIAGDISNHFTKDTLPFINNLKKHIKLSYNLGNHDMLDLTETEIQRLDFQTYRFDKKMLLAFHGWYDYSFSNNRDIKDVEKLKKTFWFDRRLKRPNNDVTIQASILKRLDEILAKVDSSNIIIAMHFVPHKQFTMTHPRFSPFNAFLGSQAYHDLFQKYHIKDVVFGHAHRSFGDVKIGETTYHSRPLGYIREWNLTIDFVNQNPNHNPNLTWNLSKRYNAVKHLDSFENYRKKYFEDELRNSMTIFDC

SEQ ID NO: 5485 - DNA, 1929 bp, Streptococcus agalactiae
atgtctaatttttataagctcttgaaagaaaaatttcctcgaaaagaagatatcgtaacagaaatgatcaatttagaagctatttgtcaattacccaaagggacggagtattttattagtgatttacacggggaatacgatgctgttgattatctcttacggacaggtgcagggtctattagagctaaattattagactgttttgattggcagaaaatagttgctgttgatttagatgatttttgtatactgctttattacccaaaggaaaaattagccttcgataaaatgaacttgtcagcaagtgcttataaaacgaagttatgggaaatgattccgttacaaatacaagttttaaaatatttttctagtaaatatacaaaatctaaagtacgtaagcaattgtcaggtaagtttgcttacattatcgaagaacttttagctgagattgaccgtaacccagagaagaaaagctattttgatactattattgaaaaattatttgaattagaccaagtagaagatttaattatagtattgtcccaaacaattcaagttttgattattgaccatttacatgttgtaggggatatttacgatcgtggtaggtatcctgatcgtatcttgaataggttaatggcttttccaaatttggatatccaatgggggaaccatgatgtcacttggatgggagcagcatctggttcttacctttgtatggtaaatgttatccgtattgctgcacgttataataatattactttaattgaagaccgatatggtatcaatttgcgtcgcttggttgattactcacgccgttactatgaacctctaccttctttcgttcctatattagatggagaggaaatgactcatccagatgaactagacttgttaaatatgatacaacaagcaacagcaattttacagtttaaattggaagcccaattgattgacaggcgtccagaatttcaaatgcataatcggcaacttattaaccaggtaaattataaagatttaagtatatctattaaggaagttgtgcatcaacttaaagattttaatagtagatgcattgattcgaaaaatcccagtcgattaacaagtgaggaagaagagcttttacaacaattgatgatagccttccagacttctgaaagtttaaagaaacatattgatttcctatttgaaaaaggaagtatgtatttaacatataatgataatcttttattccatggttgcataccaatgcatagtaatggtgattttaaaagctttaaaattgcaggaaaaacttatggtggtagggatttactggatttatttgaaagtcaaatacgtctagcatatgctagaccagagaaacatgatgatttggcgacagatatcatttggtatctttggtgtggtgaaaattcttctctttttggtaagaatgccatgactacttttgagcgctattatgtttccgacaaagtaactcatcaagaaagaaaaaatccctactttaaactgagagataaagatgatatttgcactgctcttttacaagagtttgatttgcctaagtttgggcatattgtcaatggtcatacgccagtcaaagaaaaaaatggtgagcaaccgataaaagcaaatggtaagatgttagtaattgatggtggctttgccaaaggttatcagaaaaatacaggtttagctggctacactttgatttataatagctatgggatacaattaatttcacaccttccttttacatccattgaggaagttttaagtggaaccaactatatcattgatacgaagcgattagtagaagaagccaaggataggattcttgtaaaagatacaactattggacaaaagttaaccaaagagattaaagacttagatcacctttatcgtcattttcaggaatatgatgac

SEQ ID NO: 5486 - protein, 643 aa, Streptococcus agalactiae
MSNFYKLLKEKFPRKEDIVTEMINLEAICQLPKGTEYFISDLHGEYDAVDYLLRTGAGSIRAKLLDCFDWQKIVAVDLDDFCILLYYPKEKLAFDKMNLSASAYKTKLWEMIPLQIQVLKYFSSKYTKSKVRKQLSGKFAYIIEELLAEIDRNPEKKSYFDTIIEKLFELDQVEDLIIVLSQTIQVLIIDHLHVVGDIYDRGRYPDRILNRLMAFPNLDIQWGNHDVTWMGAASGSYLCMVNVIRIAARYNNITLIEDRYGINLRRLVDYSRRYYEPLPSFVPILDGEEMTHPDELDLLNMIQQATAILQFKLEAQLIDRRPEFQMHNRQLINQVNYKDLSISIKEVVHQLKDFNSRCIDSKNPSRLTSEEEELLQQLMIAFQTSESLKKHIDFLFEKGSMYLTYNDNLLFHGCIPMHSNGDFKSFKIAGKTYGGRDLLDLFESQIRLAYARPEKHDDLATDIIWYLWCGENSSLFGKNAMTTFERYYVSDKVTHQERKNPYFKLRDKDDICTALLQEFDLPKFGHIVNGHTPVKEKNGEQPIKANGKMLVIDGGFAKGYQKNTGLAGYTLIYNSYGIQLISHLPFTSIEEVLSGTNYIIDTKRLVEEAKDRILVKDTTIGQKLTKEIKDLDHLYRHFQEYDD

SEQ ID NO: 5487 - DNA, 1122 bp, Streptococcus agalactiae
atggacataaaggcagaaattcaaaaattagcaaaagaaattggtatctctaaaattggttttacgacggcagataactttgattatttggaaaagtcattgcgtgcttctgtggaagaggggcgcaattcaggatttgaacataaagtcatagaggatcgtatctaccctgaaaggcttttagaatcggctaaaacgattatttcaattggcgttgcttatcctcacaaacttcctcagcaacctcaaaaaacatcttataaacgaggaaaaattacacctaattcgtgggggcttgattatcattatgtggtcggcgaaaagttagacagactatcaaaaggcattgaagagctctgtcgagattttcctttgcaacaaaaagcaatggtcgatactggagctttagttgatactgcagttgcccaaagagcaggtattggttttataggaaaaaatggtctagttatttctaaagaatatggctcttatatgtttttgggagaattaattaccaatttagagatcgagccagacaagcctgtcgattatgattgtggtgactgtcgtcgttgtctagatgcctgtccaacttcttgtttaattggtgatggctcaatgaatgccaagcgttgtctatcatttcaaacccaagataagggaatgatggacatagagtttcgaaaaaagattaaaacagttatctatggttgtgatatttgccaaatttgctgtccttataacaaaggtataaataatccattggcgacagagattgatcctgagttggctcaaccagaattaataccatttttgagtttatcaaatggacaatttaaagaaaaatttggtatgattgctggaagttggcgaggtaaaaatattttacagcgtaatgccattattgcgctagcaaatgctcatgataaaaccgcagtggtcaaattaatagagattattgataaaaataataaccctattcatactgcaacagctatatgggcattgggagaaattgtcaaaaaaccaaacgatgagatactggagtttatgagtaatttaaccttaaaagatgaagatagccgaaaagagttggaattaatccgtcataaatggcaattt

SEQ ID NO: 5488 - protein, 374 aa, Streptococcus agalactiae
MDIKAEIQKLAKEIGISKIGFTTADNFDYLEKSLRASVEEGRNSGFEHKVIEDRIYPERLLESAKTIISIGVAYPHKLPQQPQKTSYKRGKITPNSWGLDYHYVVGEKLDRLSKGIEELCRDFPLQQKAMVDTGALVDTAVAQRAGIGFIGKNGLVISKEYGSYMFLGELITNLEIEPDKPVDYDCGDCRRCLDACPTSCLIGDGSMNAKRCLSFQTQDKGMMDIEFRKKIKTVIYGCDICQICCPYNKGINNPLATEIDPELAQPELIPFLSLSNGQFKEKFGMIAGSWRGKNILQRNAIIALANAHDKTAVVKLIEIIDKNNNPIHTATAIWALGEIVKKPNDEILEFMSNLTLKDEDSRKELELIRHKWQF

SEQ ID NO: 5489 - DNA, 1173 bp, Streptococcus pyogenes
ttgtccttctttttccttgaagtcttaacttattttgattatgatagtagtatgactattaaggcagaaattaaggcgctcgccaaagaaattggtatctctaaaattggttttacgacggcagataactttgattatttggaaaagtcattgcgtgcttctgtggaagaggggcgcaattcaggatttgaacataaagtcatagaggatcgtatctacactgaaaggcttttagaatcggctaaaacgattatttcaattggcgttgcttatcctcacaaacttcctcagcaacctcaaaaaacaccttataaacgtggaaaaattacacctagttcgtgggggcttgattatcattatgtggtcggcgaaaagttagacagactatcaaaaggcattgaagagctgtgtcgagattttcctttgcaacaaaaagcaatggtcgatactggagctttagttgatactgcagttgcccaaagagcgggtattggttttataggaaaaaatggtctagttatttctaaagaatatggctcttatatgtttttgggagaattaattaccaatttagagatcgagccagacaagcctgtcgattatgattgtggtgactgtcgtcgttgtctagatgcctgtccaacttcttgtttaattggtgatggctcaatgaatgccaagcgttgtctatcatttcaaacccaagataagggaatgatggacatagagtttcgaaaaaagattaaaacagttatctatggttgtgatatttgccaaatttgctgtccttataacaagggtataaacaattcaccagctacagagattgatcctgagttggctcaaccagaattaataccatttttgagtttatcaaatggaaaatttaaagaaaaatttggtatgattgctggaagttggcgaggtaaaaatattttacagcgtaatgccattattgcgctagcaaatgctcatgataaaactgcagtggtcaaattaatagagattattgataaaaataataaccctattcatactgcaacagctatatgggcattgggagaaattgtcaaaaaaccaaacgatgagatactggcgtttatgagtcatttaaccttaaaagatgaagatagccgaaaagagttggaattaatccgtcataaatggcaattt

SEQ ID NO: 5490 - protein, 391 aa, Streptococcus pyogenes
LSFFFLEVLTYFDYDSSMTIKAEIKALAKEIGISKIGFTTADNFDYLEKSLRASVEEGRNSGFEHKVIEDRIYTERLLESAKTIISIGVAYPHKLPQQPQKTPYKRGKITPSSWGLDYHYVVGEKLDRLSKGIEELCRDFPLQQKAMVDTGALVDTAVAQRAGIGFIGKNGLVISKEYGSYMFLGELITNLEIEPDKPVDYDCGDCRRCLDACPTSCLIGDGSMNAKRCLSFQTQDKGMMDIEFRKKIKTVIYGCDICQICCPYNKGINNSPATEIDPELAQPELIPFLSLSNGKFKEKFGMIAGSWRGKNILQRNAIIALANAHDKTAVVKLIEIIDKNNNPIHTATAIWALGEIVKKPNDEILAFMSHLTLKDEDSRKELELIRHKWQF

SEQ ID NO: 5491 - DNA, 1011 bp, Streptococcus agalactiae
ttggaagaggagattgctcttcttgaaaatcaaatgactgagccagacttttggaatgacaatattgcagcgcaaaagacatctcaagaactgaatgagttaaaaggtaagtatgatactttccataatatgcaagaattatctgacgaaacagaactcttacttgagatgcttgacgaagatgattctttgaaagaagaattagaagaaaatctaatgcagctagataagataatgggtgcttatgaaatgacgcttctcttatctgagccttatgaccacaataatgctatcttagaaatccatcctggttcaggaggaactgaagcgcaagattggggagatttactcttacgaatgtatacccgttttggcaatgctaatggtttcaaagtagaagtattagattatcaagcaggggatgaagctggtattaaatcggttaccctctcttttgaaggccccaatgcttatggtttgttgaaatcagaaatgggagttcatcgcctcgttcgtatatcaccttttgattcggctaaacgtcgtcatacctcatttgcttcagttgaagtgatgccagagttagatgatacgattgaagtagaagtacgtgatgatgacattaaaatggatactttccgttccggaggagctggtggtcagaacgtcaataaagtatcaacaggtgttcgtttgacgcatattccaactggaattgtggtatcgtctaccgttgaccgtactcaatatgggaaccgcgatcgcgctatgaagatgttgcaggctaagctatatcagttagaacaagaaaagaaagcacaagaagtagatgctcttaagggtgataaaaaagaaatcacttggggaagtcagattcgttcttatgttttcaccccttatacgatggtgaaggatcatcgtactaactttgagcttgctcaggtagataaggttatggatggagaaatcaatggctttattgatgcctaccttaagtggcgcattgaagac

SEQ ID NO: 5492 - protein, 337 aa, Streptococcus agalactiae
MEEEIALLENQMTEPDFWNDNIAAQKTSQELNELKGKYDTFHNMQELSDETELLLEMLDEDDSLKEELEENLMQLDKIMGAYEMTLLLSEPYDHNNAILEIHPGSGGTEAQDWGDLLLRMYTRFGNANGFKVEVLDYQAGDEAGIKSVTLSFEGPNAYGLLKSEMGVHRLVRISPFDSAKRRHTSFASVEVMPELDDTIEVEVRDDDIKMDTFRSGGAGGQNVNKVSTGVRLTHIPTGIVVSSTVDRTQYGNRDRAMKMLQAKLYQLEQEKKAQEVDALKGDKKEITWGSQIRSYVFTPYTMVKDHRTNFELAQVDKVMDGEINGFIDAYLKWRIED

SEQ ID NO: 5493 - DNA, 1011 bp, Streptococcus pyogenes
ttggaagaggagattgctcttcttgaaaatcacatgactgagccagacttttggaatgacaatattgcagcgcaaaagacatctcaagaactaaatgagttaaaaggtaagtatgatactttccataatatgcaagaattatctgacgaaacagaactcttacttgagatgcttgacgaagatgattctttgaaagaagaattagaagaaaatctaatgcagctagataagataatgggtgcttatgaaatgacgcttctcttatctgaaccctatgaccacaataatgctatcttagaaatccatcctggttcaggaggaactgaagcgcaagattggggagatttactcttacgaatgtatacccgttttggcaatgctaatggtttcaaaatagaagtattggattatcaagcaggagatgaagctggtattaaatcggttaccctctcttttgaaggccccaatgcttatggtttgttgaaatcagaaatgggagttcatcgcctcgttcgtatatcaccttttgattcggctaaacgtcgtcatacctcatttgcttcagttgaagtgatgccagagttagatgatacgattgaagtagaagtacgtgatgatgacattaaaatggatactttccgttccggaggagctggtggtcagaatgtcaataaagtatcaacaggtgttcgtttgacgcatattccaactggaattgtggtatcgtctaccgttgaccgtactcaatatggaaaccgcgatcgcgctatgaagatgttgcaggctaagctatatcagttagaacaagaaaagaaagcacaagaagtagatgctctcaagggtgataaaaaagaaatcacttggggaagtcagattcgttcttatgttttcaccccttatacgatggtgaaggatcatcgtactaactttgagcttgctcaggtagataaggttatggatggagagatcaatggctttattgatgcctaccttaagtggcgcattgaagac

SEQ ID NO: 5494 - protein, 337 aa, Streptococcus pyogenes
LEEEIALLENHMTEPDFWNDNIAAQKTSQELNELKGKYDTFHNMQELSDETELLLEMLDEDDSLKEELEENLMQLDKIMGAYEMTLLLSEPYDHNNAILEIHPGSGGTEAQDWGDLLLRMYTRFGNANGFKIEVLDYQAGDEAGIKSVTLSFEGPNAYGLLKSEMGVHRLVRISPFDSAKRRHTSFASVEVMPELDDTIEVEVRDDDIKMDTFRSGGAGGQNVNKVSTGVRLTHIPTGIVVSSTVDRTQYGNRDRAMKMLQAKLYQLEQEKKAQEVDALKGDKKEITWGSQIRSYVFTPYTMVKDHRTNFELAQVDKVMDGEINGFIDAYLKWRIED

SEQ ID NO: 5495 - DNA, 690 bp, Streptococcus agalactiae
atggcactaatagaaatgtctggtgttactaaaaagtatcgccgttcaacaactgccttgagaaacttaaatttatcaattcagcaaggtgagtttgtgtatttagttggtccgtcaggtgctggtaaatctagcttgattcgcctcctataccgtgaagaaaaattaagttcaggtagattaaaggtaggggaattcaatctcaataaactcaaacgtcgtcaaattcctattttacgtcgtagtattggagttgtcttccaagattataaattactaccaacaaaaacagtttatgagaatgttgcgtttgcgatgcaagttattggagctaagcgccgtcatattaaaaaacgcgtgccagaagttctagaattagtaggtttaaaacacaagatgcgttcttttccaacacagttatctggtggagaacaacaacgtgtggcaattgcacgtgcgattgttaataatccaaaattattaattgcagatgaacctactggtaatttggatccagaaattgcttgggaaatcatgcatctattggaacgtattaaccttcaaggaacgactgttttgatggcaacacacaatagtcaaattgttaacacacttcgtcatcgtgtcattgagattgaagcaggtagcgttatccgagatgaagagaagggagaatatggttatcatgat

SEQ ID NO: 5496 - protein, 230 aa, Streptococcus agalactiae
MALIEMSGVTKKYRRSTTALRNLNLSIQQGEFVYLVGPSGAGKSSLIRLLYREEKLSSGRLKVGEFNLNKLKRRQIPILRRSIGVVFQDYKLLPTKTVYENVAFAMQVIGAKRRHIKKRVPEVLELVGLKHKMRSFPTQLSGGEQQRVAIARAIVNNPKLLIADEPTGNLDPEIAWEIMHLLERINLQGTTVLMATHNSQIVNTLRHRVIEIEAGSVIRDEEKGEYGYHD

SEQ ID NO: 5497 - DNA, 690 bp, Streptococcus pyogenes
atggcactaatagaaatgtctggtgttactaaaaaataccgccgctcaacgaccgccctcagagacgtcaatgtttctgttaaccaaggtgagtttgtttatctcgtaggcccatcaggtgctggtaaatcaacttttatcaaactcctttaccgtgaagaacaactgacaactggtaagctatatgtgggtgaattcaatttaactaagctaaaagcacgtgatgttccgattcttcgtcgtcacatcggagtagtttttcaagattacaaactgctaccaagaaaaacagtctttgaaaatgtagcttacgccatggaagttattggtgaaaagcgccgccacattaaaaaacgcgtgccagaggtactcgatttagttggcttgaaacataagatgcgttcttttccaagtcagctatcaggaggggagcagcaacgtgtggccattgcgcgtgcgattgttaacaaccctaaattattgattgcagatgaaccgacagggaatttagatcctgagatttcatgggaaattatgcagttacttgaacgtattaatgttcagggaacaactatcttaatggcgacacacaacagtcatattgtgaatacattccgtcatcgtgttgttgctattgaagatggtcgcatagtacgtgatgaagaaaaaggagattatggttacgatgat

SEQ ID NO: 5498 - protein, 230 aa, Streptococcus pyogenes
MALIEMSGVTKKYRRSTTALRDVNVSVNQGEFVYLVGPSGAGKSTFIKLLYREEQLTTGKLYVGEFNLTKLKARDVPILRRHIGVVFQDYKLLPRKTVFENVAYAMEVIGEKRRHIKKRVPEVLDLVGLKHKMRSFPSQLSGGEQQRVAIARAIVNNPKLLIADEPTGNLDPEISWEIMQLLERINVQGTTILMATHNSHIVNTFRHRVVAIEDGRIVRDEEKGDYGYDD

SEQ ID NO: 5499 - DNA, 981 bp, Streptococcus agalactiae
gtgtcattgagattgaagcaggtagcgttatccgagatgaagagaagggagaatatggttatcatgattaatttctttagacatttctgggaatcgcttaaaaacttgaaacgtaacttttggatgacttttgcttctgtaacatcagttaccataaccttacttcttgtaggcttgttttcatcagttttactgaatgttgaaaagttaacaactgatgtttcaggtaattttactatcagtgcctttttaaatgttgactcaacggatgctcaaaaacaagtcaaagataaggacggaaagctaaaagataatcctgattatcataaagtttacgacaaaattaaacgtatttctggtgtagagaaagtcacttattcaagtaaagctgaacaattaaaagaagttcaaaaagagtatggttcagatgttattgatgatacctataaagatgctttgttagatgtttacgtagttgggacaagttctgcaaaagtttctaagagtgtcagtgaagcaattggacgcattgaaggtgttgattatactaaagaacctattgattcaacaaaactatctaatctcacagataacatccgtatatggggatttggtggtgttgccttattaattgtccttgctatctttttgatttcaaatactattcgtatgtcgattatgtcacgccgtacagatattgaaatcatgagattagttggcgctaaaaattcttatattcgaggaccgttcttttttgaaggtgcttgggtagggattttaggggctatcgttccatcgctgattttctattttggttatcaatttgtgtttaacaagtttaatccaaaatttgagacaagccatgtttcattgtatcctatggatattatggttccagcaattattggtggtatggtgattattggtattattattggctcacttgggtctgtcctatcaatgagacgttaccttaagatt

SEQ ID NO: 5500 - protein, 327 aa, Streptococcus agalactiae
MSLRLKQVALSEMKRRENMVIMINFFRHFWESLKNLKRNFWMTFASVTSVTITLLLVGLFSSVLLNVEKLTTDVSGNFTISAFLNVDSTDAQKQVKDKDGKLKDNPDYHKVYDKIKRISGVEKVTYSSKAEQLKEVQKEYGSDVIDDTYKDALLDVYVVGTSSAKVSKSVSEAIGRIEGVDYTKEPIDSTKLSNLTDNIRIWGFGGVALLIVLAIFLISNTIRMSIMSRRTDIEIMRLVGAKNSYIRGPFFFEGAWVGILGAIVPSLIFYFGYQFVFNKFNPKFETSHVSLYPMDIMVPAIIGGMVIIGIIIGSLGSVLSMRRYLKI

SEQ ID NO: 5501 - DNA, 957 bp, Streptococcus pyogenes
gtgatgaagaaaaaggagattatggttacgatgattagatactttttccgtcatatttgggaatccattaaaaatcttaaacgcaacttttggatgacatttgcttcagttagtatggtggctgttacattgactttagttggtgtttttgcggcgacattgttgaatatacagcgtgttgcttcgggtgttgaaaataatgtccatatcaatacctacttacaagttgattcaactgatgctgcaaaagttattcaaaatactgccggtgaacctgttaataacgataactaccacagtgtttacgacaaaattgctcagataaaaggtgtcaaaaagattacattttctagcaaggatgaacaattgaaaaaattgcaagaaaccttaggtgatgtttggaatatgtatgaccaagacactaatccgctccaagatatctatcttattgagacccagacgcctaaacaagttaaggcgatcactaaaaagatcagaacgattgaaggcgtagaagccgcagattatggagggattaactccgataaactatttaagttttcaacattaattcaaacttgggggctgatcggaacagcaatgctattatttgtagctgtctttctcatttcaaacactattcgtatgactattatgtctcgtaaacgtgacattgaaattatgcggttagttggtgctaaaaattcttatattcgagggcctttcttttttgaaggggcttgggttggcttgttaggagctgttttaccatctcttctgatttattatggatatgatcttgtttataagcattttgcacaagaattacaacgtaataatctctcgatgtatccgcttgatccttatgtatattacctgattggtgctttgtttgtcataggtattatgattggttcgcttggttcagtgctttctatgagacgttatttaaaattc

SEQ ID NO: 5502 - protein, 319 aa, Streptococcus pyogenes
VMKKKEIMVTMIRYFFRHIWESIKNLKRNFWMTFASVSMVAVTLTLVGVFAATLLNIQRVASGVENNVHINTYLQVDSTDAAKVIQNTAGEPVNNDNYHSVYDKIAQIKGVKKITFSSKDEQLKKLQETLGDVWNMYDQDTNPLQDIYLIETQTPKQVKAITKKIRTIEGVEAADYGGINSDKLFKFSTLIQTWGLIGTAMLLFVAVFLISNTIRMTIMSRKRDIEIMRLVGAKNSYIRGPFFFEGAWVGLLGAVLPSLLIYYGYDLVYKHFAQELQRNNLSMYPLDPYVYYLIGALFVIGIMIGSLGSVLSMRRYLKF

SEQ ID NO: 5503 - DNA, 708 bp, Streptococcus agalactiae
atgaacataaaacgtcactctatttttctttggttaacaacaagtatccttgctattttaatggccgtcgggatgaccatttacttcaatacttaccaagcctccccattagctaggagaattgctaaaaccgctacaaaccataagaactaccttctttttagaagcaagggtaaggtaaaagcaaatattattttctatcaaggggctcttgtggaagaagaagcttattctcaacttgctagagatttagctgacaaaggggataatacctatattttgaagacacctttaaatttgccagttttatcgcctcataaagctaaaacaattattaatcagaaccacttaactaatgtttaccttgctggacattctttaggaggagttgttgctagccaaaatgccaaagtagcccctgttagagggctcatattattagcttcctacccttcacgtaaatccgacctatctcataaaaatttaagagtactctccattacagcaagtaatgatcatattttaaactgggaaaaatatgaggaagctaaaaaacgcctcccaaattcaagtacttttcgaactattgtcggaggaaaccatagccgatttggtaactacggacatcaaaaaggggatggtaaagctaccctttctcacaaatcatctgaaaaacaattggctacgtttatttcgaattttatccac

SEQ ID NO: 5504 - protein, 236 aa, Streptococcus agalactiae
MNIKRHSIFLWLTTSILAILMAVGMTIYFNTYQASPLARRIAKTATNHKNYLLFRSKGKVKANIIFYQGALVEEEAYSQLARDLADKGDNTYILKTPLNLPVLSPHKAKTIINQNHLTNVYLAGHSLGGVVASQNAKVAPVRGLILLASYPSRKSDLSHKNLRVLSITASNDHILNWEKYEEAKKRLPNSSTFRTIVGGNHSRFGNYGHQKGDGKATLSHKSSEKQLATFISNFIH

SEQ ID NO: 5505 - DNA, 696 bp, Streptococcus agalactiae
ttgccatttattttccgccactctttttttaacaaagtcttgattttttggtacactatcattatgaaaatctataaaacaataaaccacattgctggtgaaaatacttattacctcgttaatgatcaagctgttatcctcattgatccagggagcaatggccaagaaattattgctaaaattaaatcctttgaaaaacctttagtggctatcctcttaactcatactcactatgatcatatttttagtttagatttggtcagagatacttttgataatccacctgtttatgtttcagaaaaagaagccgcttggctatcttccccagatgataatttatctgggttaggccgtcatgatgatatcattaatgttatagcaagaccggcagagaacttttttaaattaaagcaaccctatcaactaaatggttttgaattcacagttttaccaacacctggtcattcttggggaggagtctcgtttgttttccactcagatgaattagtcgttactggcgatgctctatttcgtgaaactatcggtcgtactgacttacctaccagtaactttgaggacctcattactggtattcgtcaagaactattcaccttacctagtcattatagtgttcacccaggccatggcatgaatacaactattggccacgaaaaaaactttaatcctttcttccaa

SEQ ID NO: 5506 - protein, 232 aa, Streptococcus agalactiae
MPFIFRHSFFNKVLIFWYTIIMKIYKTINHIAGENTYYLVNDQAVILIDPGSNGQEIIAKIKSFEKPLVAILLTHTHYDHIFSLDLVRDTFDNPPVYVSEKEAAWLSSPDDNLSGLGRHDDIINVIARPAENFFKLKQPYQLNGFEFTVLPTPGHSWGGVSFVFHSDELVVTGDALFRETIGRTDLPTSNFEDLITGIRQELFTLPSHYSVHPGHGMNTTIGHEKNFNPFFQ

SEQ ID NO: 5507 - DNA, 696 bp, Streptococcus pyogenes
ttgccatttattttccgctactctttttttaacaaagtcttgattttttggtacactatccttatgaaaatctataaaacaataaaccacattgctggtgaaaatacttattacctcgttaatgatcaagctgttatcctcattgatccaggaagtaacggccaagaaatcattgctaaaattaaatcctttgaaaaacctttagtggctatcctcttaacgcatactcactatgatcatatttttagtttagatttggtcagagatgcttttgatcatccacctgtttatgtttcagaaaaagaagccgcttggctatcttccccagatgataatttatcgggcttaggccgtcatgatgatatcattactgttatagcaagaccggcagagaacttttttaaattaaagcaaccctatcaactaaatggttttgaattcacagttttaccaacatctggtcattcttggggaggagtctcatttgttttccactcagatgaattagtcgttactggcgatgctctatttcgtgaaactatcggtcgtactgacttacctaccagtaactttgaggacctcattactggtattcgccaagaactattcaccttacctaatcattaccgagtttatcctgggcatggtccttctactaccatttgtcacgaaaaaaatgctaaccccttttttcat

SEQ ID NO: 5508 - protein, 232 aa, Streptococcus pyogenes
LPFIFRYSFFNKVLIFWYTILMKIYKTINHIAGENTYYLVNDQAVILIDPGSNGQEIIAKIKSFEKPLVAILLTHTHYDHIFSLDLVRDAFDHPPVYVSEKEAAWLSSPDDNLSGLGRHDDIITVIARPAENFFKLKQPYQLNGFEFTVLPTSGHSWGGVSFVFHSDELVVTGDALFRETIGRTDLPTSNFEDLITGIRQELFTLPNHYRVYPGHGPSTTICHEKNANPFFH

SEQ ID NO: 5509 - DNA, 789 bp, Streptococcus agalactiae
ttgactaaagaatatgaggtggaagatatgtcaaaagttgctattgttactggtgctggtcaaggaattggatttgctattgcgaaacgtcttcatgcagacggctttaaaataggcgttttagactataatgaagagactgctcaggctgcggttgataaactatcacctgaggatgctgttgcagttgtagcagatgtttcaaaacgtgatcaagtttttgatgctttccaaaaagttgtagatacttttggtgatttgaatgttgttgttaacaatgcaggtgttgccccaacaactcctcttgacactattactgaagagcagtttgaaaaggcttttgcaatcaatgtcggaggaactatttggggaagccaagcagctcagaaacattttagagaattaggtcatggcggaaaaattataaatgcaacttcacaagcaggatgtgaagggaatcctaatttgactgtttatggtggtacaaaatttgcagttcgtggtattacacagactttggcaaaagatttagcatcagaaggaatcacagtcaatgcttacgcaccaggtattgttaaaacacctatgatgtttgatattgcccatgaagttggtaagaatgcaggcaaagatgatgaatggggtatggagcagtttgccaaagatatcactttgaaacgcttgtctgaaccagaagatgttgctaatgcagtaggcttcttagcgggagatgattcaaattatatcactggacaaacaatagttgtcgatgggggtatggtattccat

SEQ ID NO: 5510 - protein, 263 aa, Streptococcus agalactiae
MTKEYEVEDMSKVAIVTGAGQGIGFAIAKRLHADGFKIGVLDYNEETAQAAVDKLSPEDAVAVVADVSKRDQVFDAFQKVVDTFGDLNVVVNNAGVAPTTPLDTITEEQFEKAFAINVGGTIWGSQAAQKHFRELGHGGKIINATSQAGCEGNPNLTVYGGTKFAVRGITQTLAKDLASEGITVNAYAPGIVKTPMMFDIAHEVGKNAGKDDEWGMEQFAKDITLKRLSEPEDVANAVGFLAGDDSNYITGQTIVVDGGMVFH

SEQ ID NO: 5511 - DNA, 639 bp, Streptococcus pyogenes
ttgactaaaaaatatgaggtggaagatatgtcaaaagttgctattgttactggtgctggtcaaggaattggatttgctattgcgaaacgtcttcatgcagacggctttaaaataggcattttagactataatgaagagactgctcaggctgcggttgataaactatcacctgaggatgctgttgcagttgtagcagatgtttcaaaacgtgaccaagtttttgatgctttccaaaaagttgtagatacttttggtgatttgaatgttgttgttaacaatgcaggcgttgccccaacaacccctcttgacacgattactgaagagcagtttgaaaaggcttttgcaatcaatgtcggaggaacgatttggggaagccaagcagctcaaaaacattttagagaattaggtcatggcggaaaaattataaatgcaacatcacaagcaggatgtgaaggaaatcctaatttgactgtttatggtggtacaaaatttgcagttcgtggtattacacagactttggcaaaggatttggcatcagaaggaatcacagtcaatgcttacgcaccaggtattgttaagacacctatgatgtttgctattgcccatgaagttggtaaaaatgcaggcaaagatgatgaa

SEQ ID NO: 5512 - protein, 213 aa, Streptococcus pyogenes
LTKKYEVEDMSKVAIVTGAGQGIGFAIAKRLHADGFKIGILDYNEETAQAAVDKLSPEDAVAVVADVSKRDQVFDAFQKVVDTFGDLNVVVNNAGVAPTTPLDTITEEQFEKAFAINVGGTIWGSQAAQKHFRELGHGGKIINATSQAGCEGNPNLTVYGGTKFAVRGITQTLAKDLASEGITVNAYAPGIVKTPMMFAIAHEVGKNAGKDDE

SEQ ID NO: 5513 - DNA, 2505 bp, Streptococcus agalactiae
atgttttgttttatagatatagcgtgctataatagacttactatgacccagaaaaaacttagaaaatatgcagtagttgacttggaggctactggagcaggtcccaatgcttctattattcaggttgggattgttattatccaaggaaataaaattattgatagttatgaaacagatgttaatcctcatgaatctttggatgagcatattgttcatttgacaggtattacggataagcagttggctaaagctccggattttggtcaagtggcgcatcacatttatcaattgattgaagattgtatttttgttgcccacaatgtaaagttcgatgcaaatttattggctgagcaactatttttagaaggctgcgagttacgtacaccaaggatagatacagtagaattatcacaagtattttatccctgtttagaaaaatattctttaggggcattagcagaaagcttaaatattgaattaacagatgcgcacactgctattgcagatgcaagagctacagcacagttattcattaagttaaaagctaaaattagtagtttacctaaagaagtgttggagaccattttaacatttgctgataatcttttgttcgaatcctatttattgattgaagaagcttatcaagaagctgatttcgttaatcctaaagaatattatttctggcaaggattggtcttaaaaaaagaaaaagctgttggaaagcctaagaaattatctagtgattttcaagttaacatggctttgttaggtatggatgctcgccctaagcaagttgtttttgctgacttggttaaagcgcattttaatgatcaaacaacaacgtttttagaagctcaaccaggacttggtaaaacatatggttatctcttgcctttattggatcagtctcaaaaacaacaaataatagtatctgttccaacaaagattttgcaagatcaaataatggctaaagaaataaagcacattcaagaactttttcatattccctgtcacagtatcaaaggaccgagaaattacttgaagttagatgcgttttataagagcctccaagtgcaggatcgaaatcgattgataaatcgttttaaaatgcaactgctagtgtggttgacggaaacgactacaggtgatttggatgaaattaaacaaaaacaacgattagaatcttactttgaccagctaaaacacgatggagaagtgactcaatcatcacttttttatgatctggatttttggaaacgcagttatgataaagttgcacaaagtcaacttgttattatcaatcatgcttattttcttgagcgtgttcaggatgacaaagattttgcaaaggggaaggttttagtttttgatgaagctcagaaacttgttttgggactggaaaatttttctcgtgggcaacttgatattagtcaccaattgcaggttattcaaaaaataattgatagttctattccattattacaaaagcgccttctggaaagtatctcttatgagctaagtcatgcagtagaacttttttatcgtcataattcttttgaattttcagagacctggttgaaacgtctaaaaaatagtataaacgctttagaagtagtaggattagatgagttacaaacttttttcacagctacttatactaactattggtttgaaactgacaaagtcaatgagaagcgtttaaccattttacgtggggcgagagaagattttcttaaattttcaaagttcctcccccccacaaaaaagacctatatgatatcagcgactttacaaatcagtcccaaagtctacttgtcagatcttttaggaggattttcaagtataagtacagaaaagatagcgcatgagaaaaatgccaatcagaaagtatggattgatacctctatgcccaatatacttgatttatcaccggaacagtatgcttacgaaatagccaagcgtttacaagatataatgacgttaaagcagcctaccttagtcttattaacttctaaacagacaatgtttatggtatctgattatttggataagtgggagataaaacatcttactcaagataaaaatggcttagcttataacgttaaaaaacgttttgatcgtggagaaagcaatcttcttttaggtacaggatctttttgggaaggtgttgactttgtacatcgtgatcgtcttattgaagttatcacgcgattgccttttgatactcccaaagactattttatccagaaactatcgcagagtttaacaaaagaggggaaaaacttcttttatgactattctttaccaatgactgtcttaaaattaaaacaggccttgggacgtactacaaggagagaagaacaaaagtcagcggtaattattttggatagcagattggttattaaatcttatggacaaaccatcatgcattctcttggtagagattttgaaatttctaaggaaaaaattaacaaggtcttgactgaaatggctaaatttttgata

SEQ ID NO: 5514 - protein, 835 aa, Streptococcus agalactiae
MFCFIDIACYNRLTMTQKKLRKYAVVDLEATGAGPNASIIQVGIVIIQGNKIIDSYETDVNPHESLDEHIVHLTGITDKQLAKAPDFGQVAHHIYQLIEDCIFVAHNVKFDANLLAEQLFLEGCELRTPRIDTVELSQVFYPCLEKYSLGALAESLNIELTDAHTAIADARATAQLFIKLKAKISSLPKEVLETILTFADNLLFESYLLIEEAYQEADFVNPKEYYFWQGLVLKKEKAVGKPKKLSSDFQVNMALLGMDARPKQVVFADLVKAHFNDQTTTFLEAQPGLGKTYGYLLPLLDQSQKQQIIVSVPTKILQDQIMAKEIKHIQELFHIPCHSIKGPRNYLKLDAFYKSLQVQDRNRLINRFKMQLLVWLTETTTGDLDEIKQKQRLESYFDQLKHDGEVTQSSLFYDLDFWKRSYDKVAQSQLVIINHAYFLERVQDDKDFAKGKVLVFDEAQKLVLGLENFSRGQLDISHQLQVIQKIIDSSIPLLQKRLLESISYELSHAVELFYRHNSFEFSETWLKRLKNSINALEVVGLDELQTFFTATYTNYWFETDKVNEKRLTILRGAREDFLKFSKFLPPTKKTYMISATLQISPKVYLSDLLGGFSSISTEKIAHEKNANQKVWIDTSMPNILDLSPEQYAYEIAKRLQDIMTLKQPTLVLLTSKQTMFMVSDYLDKWEIKHLTQDKNGLAYNVKKRFDRGESNLLLGTGSFWEGVDFVHRDRLIEVITRLPFDTPKDYFIQKLSQSLTKEGKNFFYDYSLPMTVLKLKQALGRTTRREEQKSAVIILDSRLVIKSYGQTIMHSLGRDFEISKEKINKVLTEMAKFLI

SEQ ID NO: 5515 - DNA, 2499 bp, Streptococcus pyogenes
atgttttgttttatagatatagcgtgctataatagacttactatgacccagaaaaaacttagaaaatatgcagtagttgacttggaggctactggagcaggtcccaatgcttctattattcaggttgggattgttattatccaaggaaataaaattattgatagttatgaaacagatgttaatcctcatgaatctttggatgagcatattgttcatttgacaggtattacggataagcagttggctaaagctccggattttggtcaagtggcgcatcacatttatcaattgattgaagattgtatttttgttgcccacaatgtaaagttcgatgcaaatttattggcagaagctctttttttagaaggatatgagttaacaataccacgtgttgatactgttgaattagcccaactatttttccctcgctttgaaaagtataaccttagtcacctatctaggcagctcaatattgatttggcagaagctcatactgctattgcagatgcaagagctacagctatactgtttttaagacttttacaaaaaattgagagccttccaattgagtgcttagaaagcttattagtctattcagatagcctgctatttgaaacagcaatggtcattcaagaaggattagccaaagccaaaccttatgatcccaacaaatacattaaaatcagacagattctcttaccaaagggctcaaaagctctcaagccttatcaaatatcaaaaagcttccctattaatatggcactattaggtctggaagaaaggcctaaacagactcaatttgctcagttaattgacgaagattaccatcagggagtagctagttttattgaagctcagacaggtattggaaaaacctacggctacctgctaccccttttggcaaaagaagatcaaaaccaaatcattgtcagtgtgcccaccaaacttcttcaagaccaattaatggctggtgaagtagctgctattcaagaacaatttcacatcgcctgccatagtttaaaagggcccgccaattacctaaagctagatagctttgcagatagtttggaccaaaatgaccagaaccgtttggtgaatcgttataaaatgcaattattggtttggctcttagaaactaagacaggagaccttgacgaaatcaaacaaaagcagcgctttgcagcttattttgagcagcttaagcacgatggagacattaagcagtcttctgaattttacgattacgatttttggagagttagttatgaaaaagccaaaacagcccgtctcctgattaccaaccatgcttattttttacaccgtgttcaagatgacaaggactttgctagaaacaaggtcttggtctttgatgaggcccaaaagctgatgctccaattagatcaattatcacgtcatcagcttaacctgacggtttttttacaaacaatacaggccaagttaagcaaccctttacctcttttagaaaaacgcttattggaaagcttgtcgtttgaactgggacaagtgtcaagtgattactatcaaaataaagagcaccagcttgctcatgattggtctcgtatagctggctacgccaaagaattaacaggagcagattatcaagagttacaagccttttttgctacctcagatggtgactactggcttagtagcgaaaagcaagaggagaagcgagtgacttatctaaacagtgctagtaaggcatttattcatttccaacagctcttaccagaaacggtgaaaacttattttgtttctgccactttaaccatcagctcagaagtaaccttggcagacctattaggttttgaagagtatctctatcatgtcattgaaaaggataaaaagcaagaccagttggtgcttgttgatcaagaggcgcctatcgtgacagaagtcagtgaccaaatctatgtggaagcaattgcaaaacgaatcgaaagcttgaagcaagagggttatcctattttagtgctttttaattctaaaaaacacttgctgttggtttcagactatctagaccaatggcaggtgcctcacttagcgcaggaaaagaatggaacagcttataatattaaaaaacggtttgatcaaggagagcaaactattttgcttggtttaggttctttttgggaaggagttgattttattcaagcggatcgtatgattacccttatcgcacgattgccctttgataacccagaggatttctttgttaagaaaatgagtcattatctattggaaaaaggtaaaaatcctttcagagattacttcttgccaatgactattttgcgattaaaacaggctattggtcgcacgatgcgtcgacaagatcaaaagtcagtggttattattttggatcgtcgtctccttacaaagtcctatggacaagttattttggaaggtctcggtcaggaatttttgatttctcaacaaaattttcacgattgtctagtagaaacggactgttttctgata

SEQ ID NO: 5516 - protein, 833 aa, Streptococcus pyogenes
MFCFIDIACYNRLTMTQKKLRKYAVVDLEATGAGPNASIIQVGIVIIQGNKIIDSYETDVNPHESLDEHIVHLTGITDKQLAKAPDFGQVAHHIYQLIEDCIFVAHNVKFDANLLAEALFLEGYELTIPRVDTVELAQLFFPRFEKYNLSHLSRQLNIDLAEAHTAIADARATAILFLRLLQKIESLPIECLESLLVYSDSLLFETAMVIQEGLAKAKPYDPNKYIKIRQILLPKGSKALKPYQISKSFPINMALLGLEERPKQTQFAQLIDEDYHQGVASFIEAQTGIGKTYGYLLPLLAKEDQNQIIVSVPTKLLQDQLMAGEVAAIQEQFHIACHSLKGPANYLKLDSFADSLDQNDQNRLVNRYKMQLLVWLLETKTGDLDEIKQKQRFAAYFEQLKHDGDIKQSSEFYDYDFWRVSYEKAKTARLLITNHAYFLHRVQDDKDFARNKVLVFDEAQKLMLQLDQLSRHQLNLTVFLQTIQAKLSNPLPLLEKRLLESLSFELGQVSSDYYQNKEHQLAHDWSRIAGYAKELTGADYQELQAFFATSDGDYWLSSEKQEEKRVTYLNSASKAFIHFQQLLPETVKTYFVSATLTISSEVTLADLLGFEEYLYHVIEKDKKQDQLVLVDQEAPIVTEVSDQIYVEAIAKRIESLKQEGYPILVLFNSKKHLLLVSDYLDQWQVPHLAQEKNGTAYNIKKRFDQGEQTILLGLGSFWEGVDFIQADRMITLIARLPFDNPEDFFVKKMSHYLLEKGKNPFRDYFLPMTILRLKQAIGRTMRRQDQKSVVIILDRRLLTKSYGQVILEGLGQEFLISQQNFHDCLVETDCFLI

SEQ ID NO: 5517 - DNA, 1209 bp, Streptococcus agalactiae
ttgataaaaggaggagtaatgacctatttgtcagaacgtgtactcaatatggaagagagtgttactttagctgcgggagctaaagcaagagaactcagagtacaaggaagagatattcttagtttaactttaggggagcctgactttgctactcctaaaaacattcagcaagcggctattgaggctataacagatggacgtgcaagtttttacacaccatcaagtggtttgccggagttgaagtcagcaattaatgcgtattttgaacgtttttatggctactcccttaaacctaatcaggtggttgtgggaactggtgctaagtttatcctttatactttctttatgacagtactgaatcccggtgatgaagtaattattccgactccttattgggtatcttatgctgatcagattaagatggctgaaggtaagccagtttttgtcacagcaaaagaagttaatcacttcaaagtaactgtggaacagttagaagctgttaggactgataagacaaaagtcatacttcttaatagtccatcaaatcctacaggtatgatttataaagctgaggagttggaggctattggaaattgggcagtcgaacatgatatcctaattttagcagatgatatttacggtcgattggtttacaatggcaatatttttacccctatttcaagcctttcagagtctattcgaaaccaaacgatagtcataaatggagtttctaagacttatgcgatgacaggttggcgtgttggttttgcagtgggtaatcatgatattatagcggcaatgtctaaagtagtcagtcaaacaacttctaaccttacggctgtctcacagtatgctactattgaggctttaaatggttctcaagagtcatttgaaaaaatgaggctagcatttgaagaacgccttaatatcatttatccattgttgtgtcaggtccctgggtttgaggttgttaaaccacaaggtgctttttatcttttcccaaatgttacaaaagcaatggaaatgaaaggatatacggatgttacagcattcacggatgccattcttgaagaagttggacttgctttagtaacgggtgctggttttggagcgccggaaaatgttcgtctgagttatgctacagatcttgaaacccttaaagaagctgttcgtagactgcatgtctttatgggaagtaatgaaattaat

SEQ ID NO: 5518 - protein, 403 aa, Streptococcus agalactiae
MIKGGVMTYLSERVLNMEESVTLAAGAKARELRVQGRDILSLTLGEPDFATPKNIQQAAIEAITDGRASFYTPSSGLPELKSAINAYFERFYGYSLKPNQVVVGTGAKFILYTFFMTVLNPGDEVIIPTPYWVSYADQIKMAEGKPVFVTAKEVNHFKVTVEQLEAVRTDKTKVILLNSPSNPTGMIYKAEELEAIGNWAVEHDILILADDIYGRLVYNGNIFTPISSLSESIRNQTIVINGVSKTYAMTGWRVGFAVGNHDIIAAMSKVVSQTTSNLTAVSQYATIEALNGSQESFEKMRLAFEERLNIIYPLLCQVPGFEVVKPQGAFYLFPNVTKAMEMKGYTDVTAFTDAILEEVGLALVTGAGFGAPENVRLSYATDLETLKEAVRRLHVFMGSNEIN

SEQ ID NO: 5519 - DNA, 1344 bp, Streptococcus agalactiae
atgtcaaaaaaacttatttcaattgttgatgttaaagattatgttggtcaagaagttactattggtgcttgggttgctaacaaatcaggtaaaggtaagattgcgtttgtacagttgcgcgatggttctgcctttttccaaggtgtcgcttttaaaccaaacttcattgaaaaatatggtgaagaatcaggtcttgaaaaatttgacgttattaaacgtctcaaccaagaaacatctgtttatgtaacagggattgttaaagaggatgaacgttcaaaatttggctatgagcttgatattactgaccttgaagtcattggagagtcacatgaatatcctataactcctaaagagcatgggacagacttcttgatggacaaccgtcatctttggttgcgttctcgtaaacaaatggctgttatgcaaattcgtaacgctattatttattcaacttatgaattctttgaccaaaatggttttatcaaatttgatagcccaattttatcagaaaatgcagcagaagattcaacagagttatttgaaacagactattttgggaaaccagcatttcttagccaatctggtcaattataccttgaagctggagcaatggctctaggccgagttttcgactttggtccagtctttcgtgctgaaaaatctaaaacacgtcgccatttaacagaattttggatgatggatgctgagtattctttcttgtcacatgaggaatcacttgacctccaagaagcttatgttaaagcattgatccaaggcgttctagatcgtgcgcctcaagcacttgatattttagaacgtgatgttgaggctctcaaacgttatatcgcagagccattcaagcgtgtttcttatgatgatgctattacacttcttcaagagcatgaagcagatgaagatacagattatgaacatttagagcatggtgatgactttggttcaccacatgaaacttggatttctaattactttggagtgccgacatttgtagtgaattacccagcaagctttaaagcattttatatgaaaccagttcctggaaatccagaacgcgttctttgtgctgatcttctagctccagaaggttatggagagatcattggcggctcaatgcgtgaagacgactacgatgctcttgtggctaaaatggatgaactaggtatggataaatcagaatacgacttttaccttgaccttcgtaaatacggctctgttcctcatggcggttttggtataggtattgaacgtatggtaacttttgttgctggtaccaaacatattcgcgaagctattccattcccacgtatgttacatcgtatcaaacca

SEQ ID NO: 5520 - protein, 448 aa, Streptococcus agalactiae
MSKKLISIVDVKDYVGQEVTIGAWVANKSGKGKIAFVQLRDGSAFFQGVAFKPNFIEKYGEESGLEKFDVIKRLNQETSVYVTGIVKEDERSKFGYELDITDLEVIGESHEYPITPKEHGTDFLMDNRHLWLRSRKQMAVMQIRNAIIYSTYEFFDQNGFIKFDSPILSENAAEDSTELFETDYFGKPAFLSQSGQLYLEAGAMALGRVFDFGPVFRAEKSKTRRHLTEFWMMDAEYSFLSHEESLDLQEAYVKALIQGVLDRAPQALDILERDVEALKRYIAEPFKRVSYDDAITLLQEHEADEDTDYEHLEHGDDFGSPHETWISNYFGVPTFVVNYPASFKAFYMKPVPGNPERVLCADLLAPEGYGEIIGGSMREDDYDALVAKMDELGMDKSEYDFYLDLRKYGSVPHGGFGIGIERMVTFVAGTKHIREAIPFPRMLHRIKP

SEQ ID NO: 5521 - DNA, 1344 bp, Streptococcus pyogenes
atgtcaaaaaaacttatttcaattgttgatgttaaagattatgttggtcaagaagttactattggtgcttgggttgctaacaaatcaggtaaaggtaagattgcgtttgtacagttacgcgatggttctgcttttttccaaggtgtcgcttttaaaccaaacttcattgaaaaatatggtgaagaatcaggtcttgaaaaatttgacgttattaaacgtctcaaccaagaaacatctgtttatgtaacagggattgttaaagaggatgagcgttctaaatttggctatgaacttgatattactgaccttgaaatcattggagagtcacatgaatatcctataactcctaaagagcatgggacagacttcttgatggacaaccgtcatctttggttgcgttctcgtaaacaaatggctgttatgcaaattcgtaacgctattatttatgcaacttatgaattctttgaccaaaatggttttatcaaatttgatagcccaattttatcagaaaatgcagcagaagattcaacagagttattcgaaacagactattttgggaaaccagcatttcttagccaatctggtcaattataccttgaagctggagcaatggctctaggccgagttttcgactttggtccagtctttcgtgctgaaaaatctaaaacacgtcgccatttaacagaattttggatgatggatgctgagtattctttcttatcacatgaggaatcacttgaccttcaagaagcttatgttaaagcattgatccaaggcgttctagatcgtgcgcctcaagcacttgatattttagaacgtgatgttgaggctctcaaacgttatatcacagagccattcaagcgtgtttcttatgatgatgctattacacttcttcaagagcatgaagcagatgaagatacagattatgaacatttagagcatggtgatgactttggttccccacatgaaacttggatttctaattactttggagtaccgacatttgtagtgaattacccagcaagctttaaagcattttatatgaaaccagttcctggaaatccagaacgcgttctttgtgctgatcttttagctccagaaggttatggagagatcattggcggctcaatgcgtgaagacaactacgatgctcttgtggctaaaatggatgaactaggtatggataaatcagaatatgacttttaccttgaccttcgtaaatatggctctgttcctcatggcggttttggtataggtattgaacgtatggtaacttttgttgctggtaccaaacatattcgcgaagctattccattcccacgtatgttacatcggattagaccc

SEQ ID NO: 5522 - protein, 448 aa, Streptococcus pyogenes
MSKKLISIVDVKDYVGQEVTIGAWVANKSGKGKIAFVQLRDGSAFFQGVAFKPNFIEKYGEESGLEKFDVIKRLNQETSVYVTGIVKEDERSKFGYELDITDLEIIGESHEYPITPKEHGTDFLMDNRHLWLRSRKQMAVMQIRNAIIYATYEFFDQNGFIKFDSPILSENAAEDSTELFETDYFGKPAFLSQSGQLYLEAGAMALGRVFDFGPVFRAEKSKTRRHLTEFWMMDAEYSFLSHEESLDLQEAYVKALIQGVLDRAPQALDILERDVEALKRYITEPFKRVSYDDAITLLQEHEADEDTDYEHLEHGDDFGSPHETWISNYFGVPTFVVNYPASFKAFYMKPVPGNPERVLCADLLAPEGYGEIIGGSMREDNYDALVAKMDELGMDKSEYDFYLDLRKYGSVPHGGFGIGIERMVTFVAGTKHIREAIPFPRMLHRIRP

SEQ ID NO: 5523 - DNA, 555 bp, Streptococcus agalactiae
atgacaaaatcacctgctcgtttaatttcatttatctcaatcgctatcgccatcaaccttgttggggctaatttagctctatttttacgcctacctatctatctagatactataggtacattgttaatagcagttatcctgggaccatggtacgctgccagcactgcttttctcagtgcactcatcaattggatgactactgatattttttcactttattattcaccagtcgccatcgtggttgctatcattacgggtatcttgattaaaaggaattgtaaaccctctagcctattgtggaaatcactgattatttctttaccaggaactattattgcttcagttataacagttatcctttttaaaggaattacctctagtggctcaagtattatagcacaattcttacatggaattggattagacatgacaagtagtttgatacttgttcaagttggaacagattatatggatcgactaatcagtcttatccttgtcttttcgacaatcacattgttaaaaaaacatagtcccaatttaattaaccaacgattc

SEQ ID NO: 5524 - protein, 185 aa, Streptococcus agalactiae
MTKSPARLISFISIAIAINLVGANLALFLRLPIYLDTIGTLLIAVILGPWYAASTAFLSALINWMTTDIFSLYYSPVAIVVAIITGILIKRNCKPSSLLWKSLIISLPGTIIASVITVILFKGITSSGSSIIAQFLHGIGLDMTSSLILVQVGTDYMDRLISLILVFSTITLLKKHSPNLINQRF

SEQ ID NO: 5525 - DNA, 981 bp, Streptococcus agalactiae
atgaataaagaaaaaattattatcgattgcgatcccggtattgatgataccttagcactgatgtatgctattcagcatcctaagttagaagttgttgctattactataacagcaggcaattcgcctgttgagctaggactaaagaatacctttgtaacgcttgaattactaaaccgtcacgacattccagtttatgttggtgataacttgcctttacaacgtgaatttgtatctgctcaggatactcatggaatggatggccttggagagaataactttacattggcgcaaccaattatctttcaagaagaatcagcagattgttttttagcaaactattttgaacacaaaaatgatacttctattatagctctcggacctctgaccaatatcgctcgagccttacaaactaatcccaaattaggcaaacattgcaagcgatttattagcatgggaggaagttttaaatcacatggcaattgttctccagttgctgaatacaactattggtgtgatcctcatgctgcacaatatgtatttgaaaaccttgacaaaaaaatagagatggttggactagacatcacacgtcatattgtattaacccccaatcatttatcttatatggagcgtattaatccagacgtatcaagttttatccaaaaaatcacaaagttctacttcgattttcactggcaatatgagcatattattggatgtgtgataaatgatcctttagctattgcttactttgttaatgaaaatatcgctactggttttgatagctataccgatgttgcttgtcacggaatcgccatgggacaaacaattgtagatcagtatcatttttataaaaaagatgctaacagtaagattttaacctcagtcaatactaatttattttggaatgattttatgaccgtcctattacatgcacaaaattcagtcatcattgaagacttagaaatgttaggacttaacaaa

SEQ ID NO: 5526 - protein, 327 aa, Streptococcus agalactiae
MNKEKIIIDCDPGIDDTLALMYAIQHPKLEVVAITITAGNSPVELGLKNTFVTLELLNRHDIPVYVGDNLPLQREFVSAQDTHGMDGLGENNFTLAQPIIFQEESADCFLANYFEHKNDTSIIALGPLTNIARALQTNPKLGKHCKRFISMGGSFKSHGNCSPVAEYNYWCDPHAAQYVFENLDKKIEMVGLDITRHIVLTPNHLSYMERINPDVSSFIQKITKFYFDFHWQYEHIIGCVINDPLAIAYFVNENIATGFDSYTDVACHGIAMGQTIVDQYHFYKKDANSKILTSVNTNLFWNDFMTVLLHAQNSVIIEDLEMLGLNK

SEQ ID NO: 5527 - DNA, 411 bp, Streptococcus agalactiae
atgctttatgaagtaacctcatcaaacactcaaggcgttgatggaaaagtttatctctccaatggaaaaattgtggagaccaatcaccctttaaatcatttaccaggatttaatcctgaggaattaattgctttagcatggtcaacatgtttaaatgcaactataaaagctattttagaacaaaaaggattcaaagacctaaaatctcgcgttgatgttacttgccagctcatgaaggaaaagcaagtaggtaagggattttatttccaagttaacgctgttgctagtattgaaaaactgtcattatctgatagtaagctaatcgttaacaaagcacacagcagatgtccgatttcaaaattaatttcaaatgctaaaacaatcaatctagacactgttaaatggtcagtt

SEQ ID NO: 5528 - protein, 137 aa, Streptococcus agalactiae
MLYEVTSSNTQGVDGKVYLSNGKIVETNHPLNHLPGFNPEELIALAWSTCLNATIKAILEQKGFKDLKSRVDVTCQLMKEKQVGKGFYFQVNAVASIEKLSLSDSKLIVNKAHSRCPISKLISNAKTINLDTVKWSV

SEQ ID NO: 5529 - DNA, 888 bp, Streptococcus agalactiae
atgtcagacgaacaaatcaaacttgtgattgtaacaggtatgagtggggcaggaaagacagtggctattcagtcatttgaagatttaggatattttacaatagataatatgccgcctactctagtgcctaagtttttagaattagcagcacaatcaggagatacaagcaagattgctatggtagttgacatgcgtagtcgtcttttctttagagaaattaactctattttggatagccttgaaattaatgataatattaactttaagattctatttttagatgctactgacaccgagctagtgtcacgatataaagagacacgtcgtagccaccctcttgctgccgacggcagagtgttagatggtatttctctagagagagaactattagcaccgcttaaaagtatgagtcagaacgttgtggacactagtgaattaacaccaagacaactacgtaaggtcatttctaaagaattctcaaatcaagatagtcaaagttcttttcgtatcgaagttatgagttttggttttaaatatggtatacctttggatgcggatttagtattcgatgtgcgttttttaccaaatccatactataaaccagaattaagagataagacaggtttagatactgaggtttatgactatgtcatgagttttgatgaatcagatgatttttatgaccatcttcttgccttaataaagccaatcttaccaggctatcaaaatgaagggaaatctgttttgactgtggcaatcggatgtacaggtgggcaacatcgtagcaccgcttttgctcatagattatcagaagatttaaaagcagattggacagttaatgaaagccatcgtgataaaaataagcgtaaggagacggtaaatcgttca

SEQ ID NO: 5530 - protein, 296 aa, Streptococcus agalactiae
MSDEQIKLVIVTGMSGAGKTVAIQSFEDLGYFTIDNMPPTLVPKFLELAAQSGDTSKIAMVVDMRSRLFFREINSILDSLEINDNINFKILFLDATDTELVSRYKETRRSHPLAADGRVLDGISLERELLAPLKSMSQNVVDTSELTPRQLRKVISKEFSNQDSQSSFRIEVMSFGFKYGIPLDADLVFDVRFLPNPYYKPELRDKTGLDTEVYDYVMSFDESDDFYDHLLALIKPILPGYQNEGKSVLTVAIGCTGGQHRSTAFAHRLSEDLKADWTVNESHRDKNKRKETVNRS

SEQ ID NO: 5531 - DNA, 888 bp, Streptococcus pyogenes
atgtcagacaaacacattaatttagttattgtgacaggaatgagcggcgctggaaaaacagttgccattcagtcttttgaggatctaggctactttaccattgataatatgcccccagccttggttccaaaatttttagaattaattgaacaaaccaatgaaaatcgtagggtggctttggttgtcgatatgagaagtcgtttgtttttcaaggaaattaattctaccttagatagtattgaaagcaatcctagcattgattttcggattctttttttggatgcaacggatggagaattggtgtcacgctataaagaaaccagacggagccaccctttggctgcggacggtcgtgtgcttgatggtattcgattggaaagagaactcctatctcctttgaaaagcatgagccaacatgtggtggatacaacaaaattgacccctagacaattgcgtaaaaccatttcagaccagttttctgaagggtctaatcaagcctctttccgtattgaagtgatgagctttgggttcaaatatggtcttcctttggatgcggatttggtttttgatgtgcgttttctacccaatccttattatcaggtagagcttcgtgaaaaaacaggactagatgaggacgtttttaattatgtgatgtctcacccagaatcagaggtgttttacaagcatttgttaaaccttattgtccctatcttaccggcttaccaaaaagaagggaagtctgtcttgacggtggctattggctgcacaggaggccaacaccgcagcgttgcctttgcccattgcttggcagaaagtctggcaacagattggtcggttaatgaaagccatcgtgatcaaaatcgtcgtaaggaaacggtgaatcgttca

SEQ ID NO: 5532 - protein, 296 aa, Streptococcus pyogenes
MSDKHINLVIVTGMSGAGKTVAIQSFEDLGYFTIDNMPPALVPKFLELIEQTNENRRVALVVDMRSRLFFKEINSTLDSIESNPSIDFRILFLDATDGELVSRYKETRRSHPLAADGRVLDGIRLERELLSPLKSMSQHVVDTTKLTPRQLRKTISDQFSEGSNQASFRIEVMSFGFKYGLPLDADLVFDVRFLPNPYYQVELREKTGLDEDVFNYVMSHPESEVFYKHLLNLIVPILPAYQKEGKSVLTVAIGCTGGQHRSVAFAHCLAESLATDWSVNESHRDQNRRKETVNRS

SEQ ID NO: 5533 - DNA, 972 bp, Streptococcus agalactiae
atgagaaaacctaaaataaccgttatcggcggaggaacgggaattccagttattttgaaaagtcttcgcttagaagatgttgagattacagcggttgtcacggttgcagatgatggtggttcgtcaggtgagttgcgctcagttatgcaactaacaccaccaggagatctaagaaatgttttggttgccttgagtgatatgccgaagttttacgaacaaattttccaatatcgttttgcagaaggtgatggggattttgcaggtcatcctttaggaaatcttattattgctggtgttgctgaaatgcaaggttcaacttataacgctatgcagagtttaacacagttctttcatacaacaggaaagatatatccatctagtgaacatccgctcactctgcatgctgtttttaaagatggccatgaagtggttggagagagtcaaatagccgattataaaggcatgattgaccatgtgtatgtcactaatacttataatgaagagactcctacggccagccgcaaagttgttgatgcaattttagaaagtgatatgattgtgttggggccagggtcacttttcacctctattttacctaacctagttattccagaaattaaacaagctcttttagaaactcgggcagaggtagcttatgtatgcaatattatgacacaacgtggtgaaactgagcattttacagacgcagaccacgttgaagtattgaaacgtcatttaggacaagatgctatcgatacagttttggttaatattgaaaaagtgccagagtcttatatggaaaacaatcattttgatgagtatttggtacaggttgaacatgatttttcagggcttagaaaacatgccagacgtgtcatctcgtctaactttttaaaattagaaaaaggtggagccttccatcatggtgacttcgttgttgaggaactaatgaatttagtaggaacacattta

SEQ ID NO: 5534 - protein, 324 aa, Streptococcus agalactiae
MRKPKITVIGGGTGIPVILKSLRLEDVEITAVVTVADDGGSSGELRSVMQLTPPGDLRNVLVALSDMPKFYEQIFQYRFAEGDGDFAGHPLGNLIIAGVAEMQGSTYNAMQSLTQFFHTTGKIYPSSEHPLTLHAVFKDGHEVVGESQIADYKGMIDHVYVTNTYNEETPTASRKVVDAILESDMIVLGPGSLFTSILPNLVIPEIKQALLETRAEVAYVCNIMTQRGETEHFTDADHVEVLKRHLGQDAIDTVLVNIEKVPESYMENNHFDEYLVQVEHDFSGLRKHARRVISSNFLKLEKGGAFHHGDFVVEELMNLVGTHL

SEQ ID NO: 5535 - DNA, 975 bp, Streptococcus pyogenes
atgaaaaatcctaaaatgactgttataggtgggggtactggcatctccattatcctaaaaagccttcgtaatgaagcagttgatattactgctgtggtcactgttgcagatgatggtggttcctcaggagaacttcgtaatgccatgcaattagctccgccaggagacttacggaatgtcttgttagcgatgagtgacatgccaaaattttatgagcgggttttccaataccgttttaacgagagtgatggagccttggctggtcaccctctaggcaatctcattattgctggtatctctgaaatgcaaggctcaacctacaatgccattcaaattttaaccaaatttttccatattacaggtaaaatttacccctctagcgagcaggccttgacccttcatgctgtttttaaagatgggcatgaagtagcaggagaaagttctattgccaaatacccaggcatgattgaccatgtctatgtgaccaacacctacaacgaccaaaagcctcaggccagtcgtaaggtggttgaggctattctagaaagtgacatgattgtcttgggaccaggctcactgtttacctctattttacctaatttggtcattccagaaattaaagaagctttgcgccagactaaagcagaagtggtgtatatttgtaatatcatgacccagtatggtgaaacagaacaattttcagatgcagaccatgtggctgttttaaatcagcacttaggaagagatttgattgatacggttttggtaaatgtggctaaggtgccgcaggcttacatgaattctaacaaatttgatgaatacctcgttcaggttgatcacgactttgctggcctttgcagggctgctaagcgtgtgatttcgtcttattttttacggttggagaatggcggagcttttcacgatggtaacttagtggtggaagaattaatgaatttagtgaggatagtcaagcaa

SEQ ID NO: 5536 - protein, 325 aa, Streptococcus pyogenes
MKNPKMTVIGGGTGISIILKSLRNEAVDITAVVTVADDGGSSGELRNAMQLAPPGDLRNVLLAMSDMPKFYERVFQYRFNESDGALAGHPLGNLIIAGISEMQGSTYNAIQILTKFFHITGKIYPSSEQALTLHAVFKDGHEVAGESSIAKYPGMIDHVYVTNTYNDQKPQASRKVVEAILESDMIVLGPGSLFTSILPNLVIPEIKEALRQTKAEVVYICNIMTQYGETEQFSDADHVAVLNQHLGRDLIDTVLVNVAKVPQAYMNSNKFDEYLVQVDHDFAGLCRAAKRVISSYFLRLENGGAFHDGNLVVEELMNLVRIVKQ

SEQ ID NO: 5537 - DNA, 909 bp, Streptococcus agalactiae
atgagttttacagtaaaagtcaaagaagagctgctaggtcataagagtgaaaataagatggaactgtcagctattatcaaaatgtcaggtagtttaggattagctaaccacggccttaacctttctattactacagaaaatgctaaaattgctcgtcatatttatagcatgctagaagaacattatcatttgcagccagaaatcaaataccatcaaaaaacgaacttacgaaagaatcgtgtgtatactgtttttattgaagaaaaagttgatgttattcttgctgatttgaagttggctgatgctttttttggtattgaaactggtattgaacactctatattggacaatgatgaaaatggaagagcttatctcaggggagcattcttatcaacgggtactgttagagaacctgattctgggaaatatcaactagaaattttttctgtttatctagaccatgcacaagacttagctaatcttatgaaaaaatttatgttagatgcaaaggttattgaacataaacatggagcagtaacttatttgcaaaaagcagaagatattatggatttcttgatagtcattgatgccatggaagctagagatgcttttgaagagattaaaatgatacgtgagacacgtaatgatattaatcgtgctaacaacgttgaaacagctaatattgctagaacaatcacagctagtatgaagactatcaataatattatcaagattatggatactattggttttgatgcactgcctagtgatttaagacaagtagctcaggtgcgtgtggctcatccagattactctattcaacaaatagcagacagtttagaaacgcctctgagtaagagtggcgttaaccatcgcttacggaaaataaataaaattgcagatgaatta

SEQ ID NO: 5538 - protein, 303 aa, Streptococcus agalactiae
MSFTVKVKEELLGHKSENKMELSAIIKMSGSLGLANHGLNLSITTENAKIARHIYSMLEEHYHLQPEIKYHQKTNLRKNRVYTVFIEEKVDVILADLKLADAFFGIETGIEHSILDNDENGRAYLRGAFLSTGTVREPDSGKYQLEIFSVYLDHAQDLANLMKKFMLDAKVIEHKHGAVTYLQKAEDIMDFLIVIDAMEARDAFEEIKMIRETRNDINRANNVETANIARTITASMKTINNIIKIMDTIGFDALPSDLRQVAQVRVAHPDYSIQQIADSLETPLSKSGVNHRLRKINKIADEL

SEQ ID NO: 5539 - DNA, 909 bp, Streptococcus pyogenes
atgagttttacaaccaaggtcaaagaggaattaattcacttgtccacaggtgacaacaatgaattggccgccattatcaaattatcaggcagcttgggcttagctcaccaaagccttcatttatccattaccactgaaaatgctaaaattgcccgctacatttattctcttattgaagacgcctatgttatcgtgccagaaatcaggtatcatcaaaagacgaacctgcgcaaaaaccgtgtttacaccgtctatgttgagcaaggtgtggaaaccattttagccgatttgaaattagcggactccttttttggtctggaaacaggcatcgaacctcaggttttatcagacgataatgctggccgttcttatcttaaaggggcttttctagcggcaggtagcatcagagatcctgagtcaggcaagtatcagttagaaatctattcagtttatcttgatcatgctcaagatttagctcaactcatgcaaaaatttatgctagatgccaaaaccatcgagcataaaagcggtgcagttacttatttgcaaaaggcagaagatatcatggactttttaattataattggtgccatgtcctgcaaagaagactttgaagccatcaaattacttcgagaagctcgaaatgatattaaccgtgccaataatgcagaaacagctaatattgccaaaactatcagtgctagcatgaaaaccattaataatattattaaaatcatggacacaattggtttagaaagtttaccgattgaattgcaacaggtagcccagcttcgggttaagcatccagactattccattcaacaagttgctgatgctcttgagttcccaatcaccaagagcggggtcaaccatcgcttgcgtaaaatcaataaaattgcagatgactta

SEQ ID NO: 5540 - protein, 303 aa, Streptococcus pyogenes
MSFTTKVKEELIHLSTGDNNELAAIIKLSGSLGLAHQSLHLSITTENAKIARYIYSLIEDAYVIVPEIRYHQKTNLRKNRVYTVYVEQGVETILADLKLADSFFGLETGIEPQVLSDDNAGRSYLKGAFLAAGSIRDPESGKYQLEIYSVYLDHAQDLAQLMQKFMLDAKTIEHKSGAVTYLQKAEDIMDFLIIIGAMSCKEDFEAIKLLREARNDINRANNAETANIAKTISASMKTINNIIKIMDTIGLESLPIELQQVAQLRVKHPDYSIQQVADALEFPITKSGVNHRLRKINKIADDL

SEQ ID NO: 5541 - DNA, 1395 bp, Streptococcus agalactiae
atggcttgtacaacaatattggttggtaaaaaggcttcttatgatggttcgactatgatcgctagaacggaagactctgttaatggcgatttcacacccaaaaaattaaaggtaatgacatctaaagatcaaccgcgtcattacaaatcagttttatcaaattttgaagtagatttaccagataacccacttccttatacttcagtaccggacgcattgggaaaagatggtatatggggtgaagccggtattaacagtaaaaatgtagcgatgagtgctacagaaactattacaacgaattcccgcgttttgggtgcagatcctttggtttcagatggtataggggaagaggatatactcactttagtgcttccctatattcagtcagcgcgagaaggtgtggagcgtttaggtgctattttggaaaaatatggaacctatgaatcaaatggtattgctttttcagataccgaagaaatatggtggttagaaacaattggtgggcatcattggattgctcgtcgcgtacctgatgatgtttatgttactaatcctaaccaactaggaattgatcattttgaatttaataactgtgatgactacatgtgctctagtgatttgaaagagtttatcgaacaataccatttagatttgacctattctaatgagcatttcaatcctcgatatgcttttggtagccaacgtgataaagatcgtcattacaacacaccaagaagttgggcaatgcagcgttttttaaatcctgaaattgaacaggatccacgtagcttgtttattccctggtgtcaaaagccttaccgaaaaattactgttgaggatattaaatatgtgttgagtgatcattatcaagacagtgtgtatgacccatatggaccagaaggggatgcggtaagtaggagagcttttcgttcagttggtatcaaccgaactagtcaaacgtctattctacaattacgaccaaataaatcacttgaaacgacaggtgttcaatggttatcttatggctctatgccatttgcaaccatggtgccgttgtttacacaagttgagactgtaccaaactatttttcgaatacaaccaaggatgcttcaacagataatttttattggaccaatcgtttaattgcagctctagcagatccacacttttatcaacatgaagctgatattgaaagctatatcgagagaacgatggctcaaggacatgcacatattaacggtgttgatagagaagttgctgagaataaagagattgattttcaacagaaaaatcaagaaatgagtgactatatccaaaaagaaagccaagaattgttaaatcgtattctatttgatgcaagtaatttaatgacaaatcgcttttcaatgggagat

SEQ ID NO: 5542 - protein, 465 aa, Streptococcus agalactiae
MACTTILVGKKASYDGSTMIARTEDSVNGDFTPKKLKVMTSKDQPRHYKSVLSNFEVDLPDNPLPYTSVPDALGKDGIWGEAGINSKNVAMSATETITTNSRVLGADPLVSDGIGEEDILTLVLPYIQSAREGVERLGAILEKYGTYESNGIAFSDTEEIWWLETIGGHHWIARRVPDDVYVTNPNQLGIDHFEFNNCDDYMCSSDLKEFIEQYHLDLTYSNEHFNPRYAFGSQRDKDRHYNTPRSWAMQRFLNPEIEQDPRSLFIPWCQKPYRKITVEDIKYVLSDHYQDSVYDPYGPEGDAVSRRAFRSVGINRTSQTSILQLRPNKSLETTGVQWLSYGSMPFATMVPLFTQVETVPNYFSNTTKDASTDNFYWTNRLIAALADPHFYQHEADIESYIERTMAQGHAHINGVDREVAENKEIDFQQKNQEMSDYIQKESQELLNRILFDASNLMTNRFSMGD

SEQ ID NO: 5543 - DNA, 1416 bp, Streptococcus pyogenes
atggataaaaaaatacagcgtttttcatgtacaactatactcgtcggtaaaaaggcatcttatgatggctcaaccatggttgctcgaacagaagattctcaaaatggtgatttcacgcctaaaaaaatgattgtggtgaaaccagaagatcaaccgagacattaccgttcggtgcaatcttcctttgaaatggacttaccggacaatcccatgacttacacgtctgttcccgatgcgcttggtaaagatggtatctgggcagaagcaggcgtgaacgaggctaatgtggccatgtcagcaactgaaaccatcactaccaattctcgtgttttaggggcagatcctctagtagcttctggtattggtgaggaggacatggtgaccttagtgctcccttatatccgttctgcgcgtgaaggggttttgcgccttggtgccattttagaagactatggcacttacgagtcaaatggtgtggctttttcagatgaacatgacatttggtggctggaaacgattggtggtcatcactggattgcaagacgggtgccagatgatgcttatgtcaccaatcccaatcaatttggcattgatcattttgaatttaacaatcctgaagattacctttgctcagctgatttaaaggactttattgacacgtatcacttagatttaacctatagccatgagcattttaatccgcgctatgcctttggtagtcaacgtgacaaagaccgtcagtataatacgccacgtgcttggatcatgcaaaaattcttaaacccagaaattgtgcaagacccgcgcagctttgcccttgcttggtgtcaaaaaccttaccgtaaaataacagtagaagatgtcaaatatgtattgagtagtcactatcaggacacgggttatgacccttacggttcagaaggaactcctgttagtaagaaagtctttcgccctattggcattaaccgtaccagccaaaccgctatcttacacattcgtcctaataaacctcaagaaattgccgctattcaatggatggcttatgggtcaatgccatttaataccatggtgccttttttcacacaggtgaagactattccagattattttgccaacacttacgaaaatgtgtttaccgacaatttctattggaccaaccgtctgattgcggctttggcagatcctcactacaatcatcatgaaactgatttggacaattacttggaagaaaccatggcaaaaggtcatgccatgttacatgctgtggaagtacagttattggctggtgaaacagtcgatttggaagaggaaaatcaaaaaatgagtgactatgtgcaaggagaaacgcagacgctgttgaacaagattctctttgacgctagcaatctaatgaccaatcgtttcagtttgagcgat

SEQ ID NO: 5544 - protein, 472 aa, Streptococcus pyogenes
MDKKIQRFSCTTILVGKKASYDGSTMVARTEDSQNGDFTPKKMIVVKPEDQPRHYRSVQSSFEMDLPDNPMTYTSVPDALGKDGIWAEAGVNEANVAMSATETITTNSRVLGADPLVASGIGEEDMVTLVLPYIRSAREGVLRLGAILEDYGTYESNGVAFSDEHDIWWLETIGGHHWIARRVPDDAYVTNPNQFGIDHFEFNNPEDYLCSADLKDFIDTYHLDLTYSHEHFNPRYAFGSQRDKDRQYNTPRAWIMQKFLNPEIVQDPRSFALAWCQKPYRKITVEDVKYVLSSHYQDTGYDPYGSEGTPVSKKVFRPIGINRTSQTAILHIRPNKPQEIAAIQWMAYGSMPFNTMVPFFTQVKTIPDYFANTYENVFTDNFYWTNRLIAALADPHYNHHETDLDNYLEETMAKGHAMLHAVEVQLLAGETVDLEEENQKMSDYVQGETQTLLNKILFDASNLMTNRFSLSD

SEQ ID NO: 5545 - DNA, 1518 bp, Streptococcus agalactiae
atgagaaagaaatttcttttattgatgagctttgtagctatgtttgcagcttggcaacttgttcaagttaaacaagtttgggctgatagtaaacttaaagtggtaacaactttttacccagtttatgagtttacaaaaaatgtcgttggtgataaagctgatgtatctatgttaattaaagcaggtacagaaccgcatgattttgaaccatcaactaaaaacatcgctgccatccaagattcaaatgcttttgtttacatggatgataacatggaaacttgggctccaaaagtagctaagtcagttaaatccaaaaaagtaacaactattaaaggtactggcgatatgttacttactaaaggcgtcgaagaagaaggtgaagaacatgaaggacatggtcatgaagggcatcatcatgaacttgacccacacgtatggttgtctccagaacgtgcgatttctgttgtagaaaacatccgtaataaatttgtcaaagcttatccaaaagatgcagcttcatttaacaaaaatgcagatgcttacattgcaaaattaaaagagcttgacaaagaatacaaaaatggtttgtcaaatgctaaacaaaagagttttgtgactcaacacgcagcgtttggttacatggcgcttgattacggtttaaatcaagttccaattgctggtcttactccagatgcagaaccttcatcaaaacgtttaggcgaattagctaaatacatcaagaaatataacatcaactacatttattttgaagaaaatgcttcaaataaagttgctaaaactttagcagatgaagttggcgtgaaaacagctgtgcttagtccacttgaaggactttctaaaaaagaaatggcagctggcgaagattacttctcagttatgagacgtaatttgaaagttcttaaaaagacaacagatgttgcaggtaaagaagtagctcctgaagaagataaaactaaaacagttgaaacaggttactttaaaactaaagatgttaaagaccgtaaattgacagattactctggtaattggcaatcagtatatcctcttcttcaagatgggacacttgatccagtttgggattacaaagctaaatctaaaaaagatatgactgctgcagagtacaaaaaatattatacagcaggttacaagactgacgtagaatcaatcaagattgatggtaaaaaacatcaaatgacctttgtacgtaatggtaaatcacaaacatttacatacaaatatgcaggttacaaaatcttaacttataaaaaaggtaatcgtggagtacgttatctctttgaagctaaagaaaaagatgctggtcaattcaaatatatccaatttagtgaccatggtattaaaccgaataaagctgaacacttccatatcttctggggttcagaaagccaagaaaaattatttgaggaaatggaaaactggccaacatacttcccagctaaaatgtctggacgtgaagttgcccaagaccttatgtctcat

SEQ ID NO: 5546 - protein, 506 aa, Streptococcus agalactiae
MRKKFLLLMSFVAMFAAWQLVQVKQVWADSKLKVVTTFYPVYEFTKNVVGDKADVSMLIKAGTEPHDFEPSTKNIAAIQDSNAFVYMDDNMETWAPKVAKSVKSKKVTTIKGTGDMLLTKGVEEEGEEHEGHGHEGHHHELDPHVWLSPERAISVVENIRNKFVKAYPKDAASFNKNADAYIAKLKELDKEYKNGLSNAKQKSFVTQHAAFGYMALDYGLNQVPIAGLTPDAEPSSKRLGELAKYIKKYNINYIYFEENASNKVAKTLADEVGVKTAVLSPLEGLSKKEMAAGEDYFSVMRRNLKVLKKTTDVAGKEVAPEEDKTKTVETGYFKTKDVKDRKLTDYSGNWQSVYPLLQDGTLDPVWDYKAKSKKDMTAAEYKKYYTAGYKTDVESIKIDGKKHQMTFVRNGKSQTFTYKYAGYKILTYKKGNRGVRYLFEAKEKDAGQFKYIQFSDHGIKPNKAEHFHIFWGSESQEKLFEEMENWPTYFPAKMSGREVAQDLMSH

SEQ ID NO: 5547 - DNA, 1545 bp, Streptococcus pyogenes
atgaaaaagaaaattcttttaatgatgagtttaatcagtgtcttttttgcttggcaacttactcaggcaaaacaagtcttagcagagggtaaagtgaaggtggtgacaactttctatcctgtttatgaatttacaaaaggggttattggtaatgatggcgatgttttcatgcttatgaaagcaggaacggaacctcatgattttgagccttctacaaaagacattaaaaaaatccaagatgcagatgcatttgtttatatggatgacaatatggaaacttgggtttctgatgtgaaaaaatcattgacatctaaaaaagtgaccatcgtcaagggaactggtaacatgctcttggtagcaggagctggacatgaccatccccatgaggatgctgacaaaaagcatgagcataataaacatagcgaagaaggacacaaccatgcttttgacccacacgtgtggttgtcaccataccgtagcattacagtcgttgaaaatattcgcgacagtctttcaaaagcttacccagaaaaagcagagaacttcaaagccaatgccgctacttatattgaaaaattaaaagagcttgacaaagactatacggcagcactttcagatgctaagcaaaagagctttgtgacacaacacgcagcttttggttatatggcacttgactatggcttgaaccaaatttctattaatggtgtcacaccagatgcagaaccatcagcaaaacgtattgctactttgtcaaaatacgttaaaaaatatggcatcaaatacatttattttgaggaaaatgcgtcaagtaaagtcgcaaaaaccctagctaaagaagcaggagttaaagcggctgtgcttagtccgcttgaaggtttgactgaaaaagagatgaaagctggccaagattactttacggtcatgcgtaaaaaccttgaaaccttacgcttaaccactgatgtggctggtaaagaaattcttccagaaaaagacacgactaagacagtttacaatggttatttcaaagacaaagaagtcaaagatcgtcaattatctgactggtcaggtagctggcaatctgtttacccctatctacaagatggtactttagaccaagtttgggactacaaggctaaaaaatctaaaggtaaaatgacagcagccgagtacaaagattactacactactggttataaaactgacgtggaacaaatcaaaatcaatggtaagaaaaagaccatgacctttgttcgtaatggtgaaaagaaaaccttcacttacacatacgccggcaaagaaatcttgacctatccaaaaggaaatcgcggggttcgtttcatgtttgaagctaaagaagcagatgctggcgaattcaaatacgttcaattcagtgaccatgccattgctcctgaaaaagcaaagcatttccacctgtactggggtggtgacagccaagaaaaattacataaagagttagaacattggccaacttactacggttcagacttatctggtcgtgaaatcgcccaagaaatcaatgctcat

SEQ ID NO: 5548 - protein, 515 aa, Streptococcus pyogenes
MKKKILLMMSLISVFFAWQLTQAKQVLAEGKVKVVTTFYPVYEFTKGVIGNDGDVFMLMKAGTEPHDFEPSTKDIKKIQDADAFVYMDDNMETWVSDVKKSLTSKKVTIVKGTGNMLLVAGAGHDHPHEDADKKHEHNKHSEEGHNHAFDPHVWLSPYRSITVVENIRDSLSKAYPEKAENFKANAATYIEKLKELDKDYTAALSDAKQKSFVTQHAAFGYMALDYGLNQISINGVTPDAEPSAKRIATLSKYVKKYGIKYIYFEENASSKVAKTLAKEAGVKAAVLSPLEGLTEKEMKAGQDYFTVMRKNLETLRLTTDVAGKEILPEKDTTKTVYNGYFKDKEVKDRQLSDWSGSWQSVYPYLQDGTLDQVWDYKAKKSKGKMTAAEYKDYYTTGYKTDVEQIKINGKKKTMTFVRNGEKKTFTYTYAGKEILTYPKGNRGVRFMFEAKEADAGEFKYVQFSDHAIAPEKAKHFHLYWGGDSQEKLHKELEHWPTYYGSDLSGREIAQEINAH

SEQ ID NO: 5549 - DNA, 282 bp, Streptococcus agalactiae
atggcagaaaggaaatttttaaagatgaaaaaagacatccatccagattatcgtccagttgttttcttagatacaactacaggttacaaattccttagtggttcaactaaatcaactaaagaaacagtagaattcgaaggtgaaacttacccacttattcgtgtggaaatctcatcagattcacatccattctatacaggacgtcaaaaattcactcaagcagatggacgtgtggaccgtttcaacaaaaaatatggtctcaaagacgcaaacgctgctcaa

SEQ ID NO: 5550 - protein, 94 aa, Streptococcus agalactiae
MAERKFLKMKKDIHPDYRPVVFLDTTTGYKFLSGSTKSTKETVEFEGETYPLIRVEISSDSHPFYTGRQKFTQADGRVDRFNKKYGLKDANAAQ

SEQ ID NO: 5551 - DNA, 258 bp, Streptococcus pyogenes
atgagaaaagacattcatccagattatcgtccagttgttttcctagatacaactacaggttaccagttccttagcggctcaacaaaagcttctaaagaaactgttgagtttgaaggtgaaacttacccacttatccgtgtggaaatttcatcagattcacacccattctacacaggacgtcaaaagttcactcaagcagatggacgtgtggaccgcttcaacaaaaaatacggtctcaaagacgcaaacgcagcaaaa

SEQ ID NO: 5552 - protein, 86 aa, Streptococcus pyogenes
MRKDIHPDYRPVVFLDTTTGYQFLSGSTKASKETVEFEGETYPLIRVEISSDSHPFYTGRQKFTQADGRVDRFNKKYGLKDANAAK

SEQ ID NO: 5553 - DNA, 966 bp, Streptococcus agalactiae
atgcagtattaccagttacaaaacatccatgttgacatggatgatatatacattgttaatggtgttagtgagggaatctctatgtcaatgcaagctttgcttgataatgatgacgaggttctagttccaatgccagattacccgttatggacagcttgtgttagccttgctggtggaaatgctgtgcattatatttgtgatgaggaagctaattggtatcctgatattgatgatatcaaatcaaaaatcacatccaaaacaaaagcaattgtcctcattaatccaaataatccaactggagcagtctatccgcgtgaaattctgcaagagattgtggatatcgctagacaaaatgacttgattattttttcagacgaggtttatgaccgtttagttatggatggaatggagcatatcccaattgcttctattgcagaggatatttttacagttactttatctggcttatctaaatcacatcgcatctgtggtttccgcgttggttggatggtattgtctggtccgcgacaacatgttaaaggttatattgaaggtttgaatatgttagctaacatgaggctgtgttcaaatgttcttgctcaacaggttattcaaacatcgttaggcggacagcaatctattgatagtatgttgttgccaggaggtcgtatctacgagcaacgtaattatatccataaagcaattaatgaaatacctggtttatctgctgtaaaaccaaatgctggactgtatcttttccctaaaattgatacagatatgtaccgtattgataatgatgaagagtttgtgcttaatttcttaaaacaagaaaaagtattactaacacacggtagaggatttaatatgaataccgctgaccattttagaattgtttacttaccacgtgttgatgaattgactgaactacaagaaaaaatggctcgctttttaagccaatacaagcgc

SEQ ID NO: 5554 - protein, 322 aa, Streptococcus agalactiae
MQYYQLQNIHVDMDDIYIVNGVSEGISMSMQALLDNDDEVLVPMPDYPLWTACVSLAGGNAVHYICDEEANWYPDIDDIKSKITSKTKAIVLINPNNPTGAVYPREILQEIVDIARQNDLIIFSDEVYDRLVMDGMEHIPIASIAEDIFTVTLSGLSKSHRICGFRVGWMVLSGPRQHVKGYIEGLNMLANMRLCSNVLAQQVIQTSLGGQQSIDSMLLPGGRIYEQRNYIHKAINEIPGLSAVKPNAGLYLFPKIDTDMYRIDNDEEFVLNFLKQEKVLLTHGRGFNMNTADHFRIVYLPRVDELTELQEKMARFLSQYKR

SEQ ID NO: 5555 - DNA, 843 bp, Streptococcus agalactiae
ttgcaaaagctaaaatgctttgatataattgtaacgcaaaacatacaaaggatgaaggaaatgccgaatttattagaaaaaactagaaaaattacatccatcttacagcgttccgtagatagcttagatgccgaactaccatataatacaatggcggctcaattagctgatattattgactgtaacgcatgtattattaatggtggtggtaacttacttggctatgccatgaaatataaaacaaacactgaccgtgtggaagaattttttgaaacaaaacaattcccagattactatgttaaatctgctagtcgtgtttatgatacagaagctaacttatcagtagataatgatttgtcaattttcccagttgagacaaaggaaaacttccaagatggtattacaacaatcgctccaatttatggtggtggaatgcgcttgggaacatttattatctggcgtaatgataaagaatttagcgacgatgatttgattttagttgaaattgcaagcaccgttgttggtattcaattacttaaccttcaaacagaaaatctagaagaaaatattcgtaaacaaacagcggtgacaatggctatcaacactctatcttattcagaaatgaaagctgtagctgctatcttaggagaattagatggacttgaaggacgcctaacggcatctgttattgcagaccgtattggaattacacgttccgttattgtaaatgctcttcgtaaattggagtctgcgggaatcattgagagccgctcactcggtatgaagggaacatacctcaaagttattaacgaaggtatttttgacaaattaaaagaatataat

SEQ ID NO: 5556 - protein, 281 aa, Streptococcus agalactiae
MQKLKCFDIIVTQNIQRMKEMPNLLEKTRKITSILQRSVDSLDAELPYNTMAAQLADIIDCNACIINGGGNLLGYAMKYKTNTDRVEEFFETKQFPDYYVKSASRVYDTEANLSVDNDLSIFPVETKENFQDGITTIAPIYGGGMRLGTFIIWRNDKEFSDDDLILVEIASTVVGIQLLNLQTENLEENIRKQTAVTMAINTLSYSEMKAVAAILGELDGLEGRLTASVIADRIGITRSVIVNALRKLESAGIIESRSLGMKGTYLKVINEGIFDKLKEYN

SEQ ID NO: 5557 - DNA, 780 bp, Streptococcus pyogenes
atgcctaacttattagaaaaaactcgtaaaatcacatctattttgcagcgttccgtagatagcctagaaacagaattaccgtataacacaatggcatctcgcctagcagatatcattgactgcaatgcttgtattatcaatggcggcggcacactgcttggttatgccatgaaatataaaactaacactgatcgtgttgaggaattttttgaagctaaacaatttccagatacttatgtaaaggctgctagccgagtttacgatacagaagctaacctttctgtcgaaaatgaattgactatattccctgttgagtctaaagacacttatccaggaggtctaacgactattgcgccgatttatggtggagggatgcgccttggatcactcattatctggcgtaatgacaatgagtttagtgatgatgatttgattttggttgagatctcaagtactgttgtggggattcaactattaaatcttcagacagaaaacttagaagacaccatccgtaaacaaacagcggtcaacatggcaattaatacgctttcttattcagaaatgaaagctgttgcagcaattcttggagagttagatggtaacgaaggacgattgacagcttctgttattgctgatcgtattggtattacccgttctgttattgtcaatgctctgcgtaaactagaaagtgcagggattattgaaagtcgttctcttggtatgaaagggacatacctcaaagttatcaacgaaggtatttttgctaaattaaaagaattt

SEQ ID NO: 5558 - protein, 260 aa, Streptococcus pyogenes
MPNLLEKTRKITSILQRSVDSLETELPYNTMASRLADIIDCNACIINGGGTLLGYAMKYKTNTDRVEEFFEAKQFPDTYVKAASRVYDTEANLSVENELTIFPVESKDTYPGGLTTIAPIYGGGMRLGSLIIWRNDNEFSDDDLILVEISSTVVGIQLLNLQTENLEDTIRKQTAVNMAINTLSYSEMKAVAAILGELDGNEGRLTASVIADRIGITRSVIVNALRKLESAGIIESRSLGMKGTYLKVINEGIFAKLKEF

SEQ ID NO: 5559 - DNA, 546 bp, Streptococcus agalactiae
atgacaaaagcactcatctcaatagactacacatatgattttgtggcagatgatgggaaattaacggcaggtaaaccagcgcaatctatcgcttcagctatagctgacgttacagagaaagcataccggtcaggggattatattttttttgcgattgataatcatgatattggagatgtttttcatccagagagcaatctttttcctgagcataatattaaagggacttctggtagaaacctatatggtcctttgggaactctatatgaaactattaaggaagatagtcgtgttttttggatagataagcgtcattattctgccttttctggcactgatttagatattcgcctacgtgaaagacgagtagatactttgatattgacaggagtattgacagatatttgtgtattacacacagcaattgatgcttataacttaggttataaaattgaggtcccagcagcagctgtagctagcttaaatgatagtaatcatcaatgggctttaaatcattttaaaactgttcttggtgcaactattctt

SEQ ID NO: 5560 - protein, 182 aa, Streptococcus agalactiae
MTKALISIDYTYDFVADDGKLTAGKPAQSIASAIADVTEKAYRSGDYIFFAIDNHDIGDVFHPESNLFPEHNIKGTSGRNLYGPLGTLYETIKEDSRVFWIDKRHYSAFSGTDLDIRLRERRVDTLILTGVLTDICVLHTAIDAYNLGYKIEVPAAAVASLNDSNHQWALNHFKTVLGATIL

SEQ ID NO: 5561 - DNA, 555 bp, Streptococcus pyogenes
gtgatgagagcattgatttcaattgattacacaaatgattttgtagcagatgatggtaaattaagtgcaggtaaatctgctcaggctattgccactaaaatagcagaggtaactaaaacggcatttgatcaaggagactatattttttttgctattgattgtcatgatcaaaatgattcttggcatcctgagagtaagctatttgcagcacataatatcaaaggaactactggacgccatctttatggtccactagctgaagtttacagttatatgaagcaacatcccagagttttttggattgataagcgttattattcagctttttcggggactgatttagatattagactacgagaaagaggtatcactcaattagtgttaacaggagttttatctgatatctgtgtcttacatactgctattgacgcttatcatcttggttatcaattagagattgttaaatcggctgtcgctagccttacaaaagaatcttatgagtggtctttggctcactttgagcaggttcttggtgctaagcttattaacgattac

SEQ ID NO: 5562 - protein, 185 aa, Streptococcus pyogenes
VMRALISIDYTNDFVADDGKLSAGKSAQAIATKIAEVTKTAFDQGDYIFFAIDCHDQNDSWHPESKLFAAHNIKGTTGRHLYGPLAEVYSYMKQHPRVFWIDKRYYSAFSGTDLDIRLRERGITQLVLTGVLSDICVLHTAIDAYHLGYQLEIVKSAVASLTKESYEWSLAHFEQVLGAKLINDY

SEQ ID NO: 5563 - DNA, 99 bp, Streptococcus agalactiae
ttgctaaaaatttgtcaggccgtcctgttatatcagcaaactgacttggaacaagtgttgaagaatttgttgcaaagattgtctttgaaggtgccactt

SEQ ID NO: 5564 - protein, 33 aa, Streptococcus agalactiae
MLKICQAVLLYQQTDLEQVLKNLLQRLSLKVPL

SEQ ID NO: 5565 - DNA, 1131 bp, Streptococcus agalactiae
ttgtatactatttattttatatgttatattatatatctttttttactgaaatcaagtaaaaaaagatactattttaaaaataatcatactatatatttgcttttagacatatcttttgttaaactttcttcgaaaacgttttcgaatataagtatcggaggttgtaatatgacaattaaaaatctcactgttgcaggaagtggcgttctaggtagtcaaatcgcctttcaagcagcttacaaaggaatgtctgtcaccatatatgacattaacgatgaagctttaaataagggaaaagaacgcatcaaaaaattagctaaagtctatcaatcagaaattgaaacagcaaaagaagcatatagtgataaagctaaaagtatcaagtataataaaaacttattgcctagcttagaccatatttttctttcaaaagttgccgattcattagacttgattgctgatttaccaaaccaaattactttttcaaaaaacttagaccaagctgtaagtgacgccgatttagtaatcgaagctgtcccagaaacagttagtataaaagaagatttttataaacaattagctaaagtggcaccttcaaagacaatctttgcaacaaattcttcaacacttgttccaagtcagtttgctgatataacaggacggcctgacaaatttttagcaatgcatttcgctaacaatatttggcaaaataatattgttgaaattatgggacataagggaactgacgacgaggttatcaaagaagctttggcattctcaaaagatattggtatggtgcctttacatattcataaagaacaacctggctatattcttaattcaatactagttccattcttagagagtgcactagcattgtactatgataaggtttctgattctgaaactattgataaaacctggaagttaggaacaggagcaccgatgggacctttagaaattttagatattattggcatcgataccgcttataatatcatgaagaattattcagataccaacagcgatcctaatagtcttcatgctcaccttgcaaaaatgcttaaagaagaattcattgataaaggacgtaccggtaaagctgctggacacggcttttatgattacgac

SEQ ID NO: 5566 - protein, 377 aa, Streptococcus agalactiae
MYTIYFICYIIYLFLLKSSKKRYYFKNNHTIYLLLDISFVKLSSKTFSNISIGGCNMTIKNLTVAGSGVLGSQIAFQAAYKGMSVTIYDINDEALNKGKERIKKLAKVYQSEIETAKEAYSDKAKSIKYNKNLLPSLDHIFLSKVADSLDLIADLPNQITFSKNLDQAVSDADLVIEAVPETVSIKEDFYKQLAKVAPSKTIFATNSSTLVPSQFADITGRPDKFLAMHFANNIWQNNIVEIMGHKGTDDEVIKEALAFSKDIGMVPLHIHKEQPGYILNSILVPFLESALALYYDKVSDSETIDKTWKLGTGAPMGPLEILDIIGIDTAYNIMKNYSDTNSDPNSLHAHLAKMLKEEFIDKGRTGKAAGHGFYDYD

SEQ ID NO: 5567 - DNA, 510 bp, Streptococcus agalactiae
ttggcggttttaagtatgctaggtatcatagatgcaaaacctaaggttggttatttttatttaggacagtatcatgcttcaatagggacaagtcattttgaaaagatgacagtttcagaaattatggggatccctctgacagttcatcaaaaagattcagtttatgatgttattgtacatatttttatggaagatgctggttgtgcttttatcttggatgatgatgattttctctgtggagtcgtgtcacgtaaagatttactaaaaatcagtattggcggaggagatctttctaaaatgccaataggaatggtgatgacacgtatgccacacgtgacaactgttttagaaaatgaaagtctttttgcggcagctgataaattagtgagcagaaaagtggatagtctccctgtcgttcgtcatgataagcaatatcccgaaaaatttaaagtgatcgggaaattatctaaaacaatcctcgctagtttgtttttagaaataagagattat

SEQ ID NO: 5568 - protein, 170 aa, Streptococcus agalactiae
MAVLSMLGIIDAKPKVGYFYLGQYHASIGTSHFEKMTVSEIMGIPLTVHQKDSVYDVIVHIFMEDAGCAFILDDDDFLCGVVSRKDLLKISIGGGDLSKMPIGMVMTRMPHVTTVLENESLFAAADKLVSRKVDSLPVVRHDKQYPEKFKVIGKLSKTILASLFLEIRDY

SEQ ID NO: 5569 - DNA, 828 bp, Streptococcus agalactiae
atggaagatcaactcactatatttattatttcagattctttaggggaaacagccaaagctattgcgaaagcatgtttgtcacaatttccaggacatgatgattggcattttcaacgtttttcctatattaacagtcaggaacgcttagaacaagtttttgaagaggctagccagaagacagtatttatgatgtttagtttagttgatgttgctttggcttcctatgcacagaaacgatgtgaaagtgaacattatgcttatgttgacttattaacaaatgttattcaaggaatatcaaggatatcgggtatagatcctttgggagaaccagggattttacgacgcttagacaatgattatttcaaaagagtagaatcaatagaatttgcagtaaaatatgatgatgggagagatccgcgaggtattttacaagcagatttagttattataggaatttcaagaacttctaaaacaccattaagtatgtttttagcagataaaaatattaaagttattaatattcctttggttccagaggttcctgttcctaaagaattacgtatgattgattctagaaggattatcggactaactaattcggttgatcatcttaatcaagtccgaaaagttcgattaaagtccttaggtctttctagtacggcaaattatgccagtttagaacggattttggaggagacgaggtatgctgaagaagttatgaaaaatttaggttgcccaatcattaatgtatctgataaagcaatcgaagaaacagcaacgattattttagaaatcttaaaaacaaatggacaagtagctaaaaatctg

SEQ ID NO: 5570 - protein, 276 aa, Streptococcus agalactiae
MEDQLTIFIISDSLGETAKAIAKACLSQFPGHDDWHFQRFSYINSQERLEQVFEEASQKTVFMMFSLVDVALASYAQKRCESEHYAYVDLLTNVIQGISRISGIDPLGEPGILRRLDNDYFKRVESIEFAVKYDDGRDPRGILQADLVIIGISRTSKTPLSMFLADKNIKVINIPLVPEVPVPKELRMIDSRRIIGLTNSVDHLNQVRKVRLKSLGLSSTANYASLERILEETRYAEEVMKNLGCPIINVSDKAIEETATIILEILKTNGQVAKNL

SEQ ID NO: 5571 - DNA, 2643 bp, Streptococcus agalactiae
atggaaactaagtttgtgtatcattttgatgaaggttgtaaggaaatgaaggaactgctaggtggtaagggggctaatctagctgaaatgacgagtattgggttaccggtaccacaaggttttactattacaacacaggcttgtaatgattattatgataacgcttgccatatccgagagagtattcttagtcaaattgatcaagcaatggcacaattggaggttgaacagaacaagcaattaggaagtgttgatgatcctttgttggtgtcagttcggtcaggatcagttttttcaatgcctggtatgatggacacagttttaaatttagggttaaatgatcgtagtgtccaaggtttagtgaaaaagacagaagacgagcgttttgcttatgacagttatcgtcgttttatccaaatgtttgcagatgtggttacaggcattccaaaatataaatttgataccattttagatcgacttaagacagataaatgttatcaagatgacacagaactaactggttcagatttaaagagacttgttgaattttacaaggaactatatcaaaaagaagcaggagaaaaatttccgcaagatcctaaaaggcagcttttgttagcaattgaggcagtttttaaatcatggaataatccaagagctaagatttatcgtaaattaaatgatattccggagacgcttgggacagccgttaatatccaagctatggtttttgggaatatgggaaataacagcggaacgggagttgcttttacacgaaacccatcaactggagcagcaaatttatttggtgagtatttgattaatgcacaaggagaagatgttgttgcaggtatcagaacaccacaatccatatcaaaattggcagaacaaatgcctattatttaccaagagtttgtaagcgttacccaaaagttagaagctcattatcgcgatatgcaagatatggagtttacaattgaaaatggtaatctttatatgcttcagacgagaagcggtaagcgtacagcgaaggcagctatcaaaatagcagtagatcaagtaaatgaaggcctaattagtaaagaagaagctatactacgtatcgagcccaaacaattagatcagttattacacccttcttttgacttgaaaagtttaaagaaagctattattttgacgacaggacttccagcttctcctggagctgcttatgggaaagtttatttccatgcagaagatgttgttaaagagatgaaaaagggaaatccagtgctattggtcagacaagagacatcacctgaagatatcgaggggatggttagtgcaaacgggattataacagcaagaggcggaatgacttcccatgcggcagtagtagccagaggaatggggaaaccatgcgttgcaggctgtagtcaattattggttgatgaagtaagacgagaaatttctattgggcatcaaacgataaaagaaggtgagatgttatcaatcgatggtgctacaggaaatgtttatataggacaagttccgatggcagagactagcgtagatcgtgattttgagatatttatgaaatgggtagatgaaaatcgagatatgatggtgtgttcaaatgcagataatccgagagatgctcaaaaggccttggactttggagcagaaggaataggtctttgtcgcacggaacatatgttttttgacgatgaacgtattccagtcgttagagaaatgattttagcggatgaaatattgagccgaaggaaggctctagaaaggcttttatctttccaaagagacgatttttatcaaatttttaaagtattgaaaggtaaagcttgtacgattcgtttgcttgaccctcctttacatgaattcttaccccatgataaagagtctatagaatctatggcaagacaaatggggatatctactttagctattgaaaaacggattcaaacattagaagaattcaaccctatgttaggtcatcgtggttgtagacttgcgattacctatccggaaatttaccaaatgcaggtgagagctcttgtacaaggcgctatacttgcaatgaaagagggatatgaggcaaagccagaaattatgattcctttagtgacagcgcatgaagaaatctctataatacgtgatctgattgaagagacaattgttgaggagagtaaatctaaaaaaattaacttatcattccctattgggacaatgattgaaacaccaagagcttgtatgatagcggatgatattgcaaagtttgcggatttctttagttttgggaccaatgatttaacacaaatgagctttggattttcacgagatgatgctggaaaattcttaggagaatacgttgataaaggacttctaaaaaaagaccctttccaagttttagatcaaaaaggaataggaaggtttattgggcaggcagtgaggttaggaaaagaagttaagccaaaccttaaaataggtatctgtggagagcatggtggagaaccatcatctattgagttctgttaccaactggggttacattatgtatcgtgttcgccgtttaggattcctattgctaaattagcggctgcacaggctaaaatcaaacaaagcagaaatgatataacaatagataaa

SEQ ID NO: 5572 - protein, 881 aa, Streptococcus agalactiae
METKFVYHFDEGCKEMKELLGGKGANLAEMTSIGLPVPQGFTITTQACNDYYDNACHIRESILSQIDQAMAQLEVEQNKQLGSVDDPLLVSVRSGSVFSMPGMMDTVLNLGLNDRSVQGLVKKTEDERFAYDSYRRFIQMFADVVTGIPKYKFDTILDRLKTDKCYQDDTELTGSDLKRLVEFYKELYQKEAGEKFPQDPKRQLLLAIEAVFKSWNNPRAKIYRKLNDIPETLGTAVNIQAMVFGNMGNNSGTGVAFTRNPSTGAANLFGEYLINAQGEDVVAGIRTPQSISKLAEQMPIIYQEFVSVTQKLEAHYRDMQDMEFTIENGNLYMLQTRSGKRTAKAAIKIAVDQVNEGLISKEEAILRIEPKQLDQLLHPSFDLKSLKKAIILTTGLPASPGAAYGKVYFHAEDVVKEMKKGNPVLLVRQETSPEDIEGMVSANGIITARGGMTSHAAVVARGMGKPCVAGCSQLLVDEVRREISIGHQTIKEGEMLSIDGATGNVYIGQVPMAETSVDRDFEIFMKWVDENRDMMVCSNADNPRDAQKALDFGAEGIGLCRTEHMFFDDERIPVVREMILADEILSRRKALERLLSFQRDDFYQIFKVLKGKACTIRLLDPPLHEFLPHDKESIESMARQMGISTLAIEKRIQTLEEFNPMLGHRGCRLAITYPEIYQMQVRALVQGAILAMKEGYEAKPEIMIPLVTAHEEISIIRDLIEETIVEESKSKKINLSFPIGTMIETPRACMIADDIAKFADFFSFGTNDLTQMSFGFSRDDAGKFLGEYVDKGLLKKDPFQVLDQKGIGRFIGQAVRLGKEVKPNLKIGICGEHGGEPSSIEFCYQLGLHYVSCSPFRIPIAKLAAAQAKIKQSRNDITIDK

SEQ ID NO: 5573 - DNA, 300 bp, Streptococcus agalactiae
atgaaaatttctgaagaagaagtgcgtcatgttgccaatctgtcaaaattgcgcttttctgatcaagagactaaagaatttgcgtcaagtttgtcaaagattgttgatatgattgaactcttaaatgaagttgacacagaaggcgtaccagtaacaacgaccatggcagatcgcaaaaccgtgatgcgtgaagatattgctcaaccaggccataatcgtgatgacttatttaaaaatgtaccacagcatcaagattattatattaaagtacctgcaattcttgaggatggaggagatgcc

SEQ ID NO: 5574 - protein, 100 aa, Streptococcus agalactiae
MKISEEEVRHVANLSKLRFSDQETKEFASSLSKIVDMIELLNEVDTEGVPVTTTMADRKTVMREDIAQPGHNRDDLFKNVPQHQDYYIKVPAILEDGGDA

SEQ ID NO: 5575 - DNA, 312 bp, Streptococcus pyogenes
atgggagaaatcatgaaaatttctgaagaagaagttcgccatgtcgcgaagctatcaaaattatcattttcagaaagtgagacaacaacctttgcaacgaccttatccaaaatcgttgatatggttgaattgctgaacgaagttgataccgaaggtgtcgccattacaacaaccatggcagataagaaaaatgtgatgcgtcaagatgtcgctgaagaaggaacagaccgtgccttgctctttaaaaatgttcctgaaaaagaaaatcactttatcaaggtacctgctattttggatgacggaggagatgcc

SEQ ID NO: 5576 - protein, 104 aa, Streptococcus pyogenes
MGEIMKISEEEVRHVAKLSKLSFSESETTTFATTLSKIVDMVELLNEVDTEGVAITTTMADKKNVMRQDVAEEGTDRALLFKNVPEKENHFIKVPAILDDGGDA

SEQ ID NO: 5577 - DNA, 279 bp, Streptococcus agalactiae
gtgcagttattgaggaagttagtttaccgcattctaaatacggtgttgctgtttattatattgttgcttcatcggaagcttcttcaaacttacaacgttttgatggtattcgttatggataccgtacagaaaattataaaaacttggatgatatctatgtcaatacacgatctgaaggttttggagacgaagttaagcgtcgcattatgctgggaacgttcagtttatcttctgggtattacgatgcttattataaaaaagcaggtcaagttcgtagtt

SEQ ID NO: 5578 - protein, 93 aa, Streptococcus agalactiae
MQLLRKLVYRILNTVLLFIILLLHRKLLQTYNVLMVFVMDTVQKIIKTWMISMSIHDLKVLETKLSVALCWERSVYLLGITMLIIKKQVKFVV

SEQ ID NO: 5579 - DNA, 1464 bp, Streptococcus agalactiae
atgtcgtttaataatcaatcaattgatcagttgcatgattttctcgttaaaaaagaaatttcagcaactgaattaacaaaagctacattggaagatattcatgcgcgtgaacaagcggttggatcttttattactatttctgatgagatggcaatagctcaagccaaagaaattgatgataaaggaattgatgctgataatgttatgtcaggtattcccttagcagttaaagataatatttcaacaaaggggattcttacaacagctgcttctaaaatgctctataactatgagccaatctttgatgctacggctgttgaaaagttatatgctaaagatatgattgtgattggtaaagcaaacatggatgaatttgccatgggaggctctacagaaacatcttattttaaaaagacaaataacgcttgggaccatagtaaagttccgggaggatcatcaggtggttctgcagcagcagtagcttcaggacaagtacgtttatcattgggctctgatacaggtggttcaattcgccaaccggcttcatttaatggaatcgttggtatgaagccaacttacggacgtgtatcacgctttggtttgtttgctttcggtagttcgcttgaccagattggaccgatgtctcaaacagtaaaagagaatgcacagcttttgacagttatttctgggcatgatgtaagagattcaacttcttctgagcgtactgtaggcgattttactgctaaaattggtcaagatattcaaggaatgaaaattgctttaccaaaagaatatttgggagaaggaatagcgcaaggagttaaagaaacgattattaaggccgcaaaacatctggaaaaactaggtgcagttattgaggaagttagtttaccgcattctaaatacggtgttgctgtttattatattgttgcttcatcggaagcttcttcaaacttacaacgttttgatggtattcgttatggataccgtacagaaaattataaaaacttggatgatatctatgtcaatacacgatctgaaggttttggagacgaagttaagcgtcgcattatgctgggaacgttcagtttatcttctgggtattacgatgcttattataaaaaagcaggtcaagttcgtagtttgattattcaagattttgaaaaagttttcgcagattatgacttgattttaggtccaacagctccaacaacagcctttgacttagattctttaaatcacgatccagttgcaatgtacctagctgatattctaacaataccagttaatttggctggtttaccaggtatttcaatccctgctggttttgatcaaggtctaccggttggtatgcagttgattggtccgaaattcagtgaagaaacaatatatcaggttgctgctgccttcgaagcaacgacagattatcataaacaacaacctaaaatttttggaggtgagaac

SEQ ID NO: 5580 - protein, 488 aa, Streptococcus agalactiae
MSFNNQSIDQLHDFLVKKEISATELTKATLEDIHAREQAVGSFITISDEMAIAQAKEIDDKGIDADNVMSGIPLAVKDNISTKGILTTAASKMLYNYEPIFDATAVEKLYAKDMIVIGKANMDEFAMGGSTETSYFKKTNNAWDHSKVPGGSSGGSAAAVASGQVRLSLGSDTGGSIRQPASFNGIVGMKPTYGRVSRFGLFAFGSSLDQIGPMSQTVKENAQLLTVISGHDVRDSTSSERTVGDFTAKIGQDIQGMKIALPKEYLGEGIAQGVKETIIKAAKHLEKLGAVIEEVSLPHSKYGVAVYYIVASSEASSNLQRFDGIRYGYRTENYKNLDDIYVNTRSEGFGDEVKRRIMLGTFSLSSGYYDAYYKKAGQVRSLIIQDFEKVFADYDLILGPTAPTTAFDLDSLNHDPVAMYLADILTIPVNLAGLPGISIPAGFDQGLPVGMQLIGPKFSEETIYQVAAAFEATTDYHKQQPKIFGGEN

SEQ ID NO: 5581 - DNA, 1464 bp, Streptococcus pyogenes
atgtcttttaatcataaaaccattgaagagttgcatgacctccttgtagctaaggagatttcagcaacagaattgacccaagcaacacttgaagacatcaagtctcgtgaggaggctgtcggatcgtttatcactgtttcagaagaagttgctcttaaacaagctgcggcaattgatgccaaaggtattgatgctgataacctcatgtcaggtattccgttagctgttaaggataatatttcaaccaaggaaatcctaaccacagccgcttcaaaaatgttgtataactacgagccgatttttaatgccacatcagtagcaaatgcctacgctaaagacatgattgttattggaaaaaccaacatggacgaatttgccatgggtggttcaacagaaacctcttatttcaagaaaacgaaaaatgcttgggaccacacaaaagtacctggaggctcatcaggtggttcggcaacagcagtcgcttcaggacaagtccgtttatctcttggttcagacactggtggttctattcggcagccagctgcatttaatagtgttgtcggtttgaaaccaacctatggcactgtttctcgctatggtctcattgcttttggaagttcacttgatcagattggaccttttgctccgacagttaaagaaaacgcccaattattaaatgtgattgcaagtagcgatgtcaaggatgccacttcagcgcctgtccgcattgcagactacacatctaagattggtcgtgacattaaaggcatgaagattgcccttcctaaagagtatcttggcgaagggattgatcctgagattaaggaaacggttcttgcgtcagttaaacaatttgaagccttaggagctactgttgaggaagtcagccttccacatagcaagtacggtgtggctgtttattatattatcgcttcgtcagaagcgtcttcaaacttacaacgttttgatggcattcgctatggtttccgtgctgacgatgctaaaaacttggatgaaatctatgttaacactcgtagccaaggctttggtgatgaggtgaaacgtcgtatcatgcttggaacctttagtttgtcatcgggttattatgacgcttatttcaaaaaggccggtcaagtgcgcactttgattattcaagattttgacaaggtttttgcggattatgatcttattctaggcccaacaacaccgacggttgcttttggcttagacacactcaaccacgatcctgttgccatgtatttggccgacttattgaccattccggttaacttggctggtctgccaggtatttctattccagcaggattcgtcgatggcttgccagtagggcttcaattaattggtccgaaatacgctgaagaaaccatctatcaagcagcagcagcctttgaagcggtgacagattatcacaagcaacaaccgattatttttggaggtgacaag

SEQ ID NO: 5582 - protein, 488 aa, Streptococcus pyogenes
MSFNHKTIEELHDLLVAKEISATELTQATLEDIKSREEAVGSFITVSEEVALKQAAAIDAKGIDADNLMSGIPLAVKDNISTKEILTTAASKMLYNYEPIFNATSVANAYAKDMIVIGKTNMDEFAMGGSTETSYFKKTKNAWDHTKVPGGSSGGSATAVASGQVRLSLGSDTGGSIRQPAAFNSVVGLKPTYGTVSRYGLIAFGSSLDQIGPFAPTVKENAQLLNVIASSDVKDATSAPVRIADYTSKIGRDIKGMKIALPKEYLGEGIDPEIKETVLASVKQFEALGATVEEVSLPHSKYGVAVYYIIASSEASSNLQRFDGIRYGFRADDAKNLDEIYVNTRSQGFGDEVKRRIMLGTFSLSSGYYDAYFKKAGQVRTLIIQDFDKVFADYDLILGPTTPTVAFGLDTLNHDPVAMYLADLLTIPVNLAGLPGISIPAGFVDGLPVGLQLIGPKYAEETIYQAAAAFEAVTDYHKQQPIIFGGDK

SEQ ID NO: 5583 - DNA, 1440 bp, Streptococcus agalactiae
atgaattttgaaacagtcattggacttgaagtccatgttgaattaaatacgaactctaaaattttctcaccttcttccgctcattttggtcaggaacaaaatgctaatacaaatgtaattgactggtctttcccaggtgtccttccagtcatgaataaaggagttattgatgcaggaatcaaggcggcacttgccttgaatatggatatccatcaaaacatgcattttgatcgtaaaaattatttctatccagataatcctaaagcttatcaaatttcacagtttgatgagcctattggttacaatggttggattgaaatcgaattagaagatggtacacgaaaaaaaattcgtattgagcgtgcccacctcgaagaagatgcaggaaaaaatacacatgggacagatggttattcctatgttgaccttaatagacaaggtgttccactgattgaaattgtatcagaagctgatatgcgttctcctgaggaagcttatgcttatttgacagctctcaaagagattatccaatatactggaatttctgacgttaaaatggaagaaggttctatgcgtgtagatgccaatatttcacttcgtccttatggtcaagaagagtttggtactaaagcagaacttaagaaccttaactcattcaataatgtacgtaaaggtttgatacatgaagaaaaacgtcaagcacaagttttacgatctggtggtcaaattcagcaagagactcgtcgttttgatgaaacaacaggtgagactattttgatgcgtgtcaaggaaggctcatcagattatcgctatttccctgaaccagatttaccactatttgatatctcggatgaatggattgatcaagttcgtttagaattaccagaatttccacaggaacgtcgtgcgaaatatgtatcgtcttttggtctatcatcttatgatgctagccaattaacagctacaaaagcaacttctgatttctttgaaaaagctgttgctattgggggtgatgcaaaacaagtttccaattggttacaaggagaagtggcgcaatttcttaacagtgaatcaaaatcaatcgaagaaattggtctgactcctgagaatttggttgagatgattggcttgattgctgacggtacaatttcatccaaaattgctaaaaaagtttttgtgcatttagctaaaaatggtggttcagctgaagaattcgttaaaaaggctggtttagttcaaatttcagatcctgaagtattaatcccaattattcatcaagtctttgcagataatgaagctgctgtgattgactttaagtcaggaaaacgcaatgctgataaggccttcacaggttatctaatgaaagcaacaaaaggacaagctaatccacaagttgctctgaagctgttagcgcaagaattagcaaaattaaaagaagaa

SEQ ID NO: 5584 - protein, 480 aa, Streptococcus agalactiae
MNFETVIGLEVHVELNTNSKIFSPSSAHFGQEQNANTNVIDWSFPGVLPVMNKGVIDAGIKAALALNMDIHQNMHFDRKNYFYPDNPKAYQISQFDEPIGYNGWIEIELEDGTRKKIRIERAHLEEDAGKNTHGTDGYSYVDLNRQGVPLIEIVSEADMRSPEEAYAYLTALKEIIQYTGISDVKMEEGSMRVDANISLRPYGQEEFGTKAELKNLNSFNNVRKGLIHEEKRQAQVLRSGGQIQQETRRFDETTGETILMRVKEGSSDYRYFPEPDLPLFDISDEWIDQVRLELPEFPQERRAKYVSSFGLSSYDASQLTATKATSDFFEKAVAIGGDAKQVSNWLQGEVAQFLNSESKSIEEIGLTPENLVEMIGLIADGTISSKIAKKVFVHLAKNGGSAEEFVKKAGLVQISDPEVLIPIIHQVFADNEAAVIDFKSGKRNADKAFTGYLMKATKGQANPQVALKLLAQELAKLKEE

SEQ ID NO: 5585 - DNA, 1437 bp, Streptococcus pyogenes
atgaattttgaaaccattattgggcttgaagtccatgtggaattaaataccaattccaaaattttctcaccttcgtcagctcactttggtgaggacccaaatgccaacacgaatgtgattgattggtctttcccaggggtcttaccagtcatgaacaaaggggtgattgatgcgggcataaaagcagcgcttgcccttaatatggacatccataaagagatgcactttgaccgcaaaaattatttctacccagataatcctaaagcttatcaaatttcacagtttgatgagccgattggctacaacggctggattgatatcaaactagaagacggttcaaccaagaaaattcgtattgaacgcgcacacttggaagaagatgctggtaaaaacactcatggcacagatggttattcttatgtggaccttaaccgccaaggagttcctttgattgagattgtgtcagaagccgacatgcgttctcctgaagaagcctatgcttatttgacagctctgaaagaaatcatccagtatacgggtatttctgatgtcaagatggaagaaggctccatgcgtgtggatgccaatatttctcttcgtccttacgggcaagaacaatttggaacaaagaccgaattgaaaaacttgaactccttctcaaatgtccgtaaagggcttgaatttgaggtggaacgtcaagccaaactcttgcgttcaggtggtgtgatacgccaagaaacgcgccgctatgacgaagcgaataaggggactattttgatgcgggtcaaagaaggggcagcggactatcgttatttcccagaaccagacctgccattatatgagattgatgatgcttggattgacgagatgcgtgctcaattacctcaattcccagctcagcgtcgtgctaaatacgaagaggaacttggcctctcagcttatgatgctagccagctaacagctaccaaagtcttgtcagatttctttgaaactgcagtaagtcttggtggcgatgccaagcaagtctctaactggttgcaaggagaagttgcccaattcttaaatgcagaaggcaaaaccattgaagaaatcgctctgacaccagaaaatttggtggagatgattgctatcattgctgatggtacaatctcttctaaaatggctaagaaggtctttgtgcatttggctaaaaacggtggctcagcacgtgcctacgtcgaaaaggcaggacttgttcagatttctgatcccgctgttttggtaccaattattcaccaagtctttgctgataatgaagctgcagtagctgatttcaaatcaggcaaacgtaatgctgataaggctttcacaggcttcttgatgaaggcaaccaaaggtcaagctaatccacaagtcgctcaacaattattggcacaagaattgcaaaaattgcgagat

SEQ ID NO: 5586 - protein, 479 aa, Streptococcus pyogenes
MNFETIIGLEVHVELNTNSKIFSPSSAHFGEDPNANTNVIDWSFPGVLPVMNKGVIDAGIKAALALNMDIHKEMHFDRKNYFYPDNPKAYQISQFDEPIGYNGWIDIKLEDGSTKKIRIERAHLEEDAGKNTHGTDGYSYVDLNRQGVPLIEIVSEADMRSPEEAYAYLTALKEIIQYTGISDVKMEEGSMRVDANISLRPYGQEQFGTKTELKNLNSFSNVRKGLEFEVERQAKLLRSGGVIRQETRRYDEANKGTILMRVKEGAADYRYFPEPDLPLYEIDDAWIDEMRAQLPQFPAQRRAKYEEELGLSAYDASQLTATKVLSDFFETAVSLGGDAKQVSNWLQGEVAQFLNAEGKTIEEIALTPENLVEMIAIIADGTISSKMAKKVFVHLAKNGGSARAYVEKAGLVQISDPAVLVPIIHQVFADNEAAVADFKSGKRNADKAFTGFLMKATKGQANPQVAQQLLAQELQKLRD

SEQ ID NO: 5587 - DNA, 924 bp, Streptococcus agalactiae
atgaggggaaaaatgactaaaaaagaaaaaggaacaatgatgaccttagctgccggactagcatggggcatttctggaattagtggtcaatacttgatgtcgcacggagtacacgttaaccttttgacttctttacgattgttgataacaggtatctttctcttgtctttagctagatcaaaacaaaaggagcatttagtagcagcgtggaaacagccaaaatttttaaagcaggttttacttttttctatatttggtttagttttaaatcaatatgcttttctcagagcgattcatttaacaaatgctggaactgcaacggttttgcaatatatggcaccaatacttattttgagtattgtttgtatcctaaacagacaaagaccaacatcttttgaaataatagcaattgctatggcaattttaggaacctatatgattgcaacgcatgggaagttaggaagtttagctatcacaccgaaaggattaatgtgggggcttggttccgccattacttattctatttatattttattacctgtgaaacttattcatgaatggggaagtacgattgttattggttcaggaatgtttataggtgggattttatttagtttggtgacaaaagcgtggcaataccccttacaaattaatgtgatgagtatacttgcttatattggcattattggtattgggactatttttgcttacacttttttccttaaaggggttagtattgtaggtgctgtcaagggtagcttattagcatcggtagagccagtttcttcggtatttttgacagtacttgttttaggagaaattttttatccaatagatttacttgggatgctgtttatttttcttgctgtaactctaatctcttacaaagatttaattgcattgaagaaaatgaaacgagtaaga

SEQ ID NO: 5588 - protein, 308 aa, Streptococcus agalactiae
MRGKMTKKEKGTMMTLAAGLAWGISGISGQYLMSHGVHVNLLTSLRLLITGIFLLSLARSKQKEHLVAAWKQPKFLKQVLLFSIFGLVLNQYAFLRAIHLTNAGTATVLQYMAPILILSIVCILNRQRPTSFEIIAIAMAILGTYMIATHGKLGSLAITPKGLMWGLGSAITYSIYILLPVKLIHEWGSTIVIGSGMFIGGILFSLVTKAWQYPLQINVMSILAYIGIIGIGTIFAYTFFLKGVSIVGAVKGSLLASVEPVSSVFLTVLVLGEIFYPIDLLGMLFIFLAVTLISYKDLIALKKMKRVR

SEQ ID NO: 5589 - DNA, 558 bp, Streptococcus agalactiae
atgaatagtaaaatatattttttggagatgaaattgagtatagatgattataggccgaccttcgtggttgaggcagtttatgatttaagagcagaagatttattacgtcatggcattcgtgcggttttagttgatttagataatacactcattgcttggaataatccagatggtactgctgaggtgcgtgcatggttagatgagatgacaacagcggatatttcagttgtagtagtgtctaataacaatcatgctcgcgtagaacgtgcagtatcacgttttggtgtggattttgtaagtcgtgcgatgaaaccatttactcgtggtataaacatggcaattgagcgttatggctttgatcgtgacgaggtgattatggttggagatcaattgatgacagatattcgtgctagtcatcgcgcaggaataaagtccgtattggtaaaaccaattgttaaatctgatgcttggaataccaagttcaatcgcttacgtgaacgtcgcgtttggaaaaaaatagaagagaattacggtaaaatcgtatatcaaaaaggaatt

SEQ ID NO: 5590 - protein, 186 aa, Streptococcus agalactiae
MNSKIYFLEMKLSIDDYRPTFVVEAVYDLRAEDLLRHGIRAVLVDLDNTLIAWNNPDGTAEVRAWLDEMTTADISVVVVSNNNHARVERAVSRFGVDFVSRAMKPFTRGINMAIERYGFDRDEVIMVGDQLMTDIRASHRAGIKSVLVKPIVKSDAWNTKFNRLRERRVWKKIEENYGKIVYQKGI

SEQ ID NO: 5591 - DNA, 582 bp, Streptococcus pyogenes
atgctatttcaaaaaaaatatgataaaatagaaagtactaattattttggagatgacatgagtatcgatgattataggccgacctatatggtagaggctatttatgatttaagagcaaatgatttgttgcgtcatggtattacggctgttttagtggatttagataataccttaattgcatggaataatcctgatggcacaccagaggttcgcgcttggcttgatgaaatgactatcgcggatattagcgtggttgttgtttcaaataataaacattctcgtgttgagcgtgccgtttcacgatttggtgttgactttattagccgtgctttgaagccatttgcttatggtattgaaaaagccattgctcgttatggatttgatcgcaacgaggttatcatggttggagatcaactaatgactgatatcagagctagtcatagagctggaataaaatcagttttagtcaaaccacttgttgcttctgatgcttggaatactaaaattaaccgctggcgtgaacgccgtgtgatggcaaaattagaagagaaatatggtaaattatcatatcaaaaaggaatt

SEQ ID NO: 5592 - protein, 194 aa, Streptococcus pyogenes
MLFQKKYDKIESTNYFGDDMSIDDYRPTYMVEAIYDLRANDLLRHGITAVLVDLDNTLIAWNNPDGTPEVRAWLDEMTIADISVVVVSNNKHSRVERAVSRFGVDFISRALKPFAYGIEKAIARYGFDRNEVIMVGDQLMTDIRASHRAGIKSVLVKPLVASDAWNTKINRWRERRVMAKLEEKYGKLSYQKGI

SEQ ID NO: 5593 - DNA, 1116 bp, Streptococcus agalactiae
atggaagagttattttgtattggctgcggagccaggattcaaactgaaaataaagatgctgctggctatacacctcgtgcagcacttgaaaaaggtttagagacaggagaattatactgtcagcgttgtttcagattgcgccactataatgagattactgacgttcatatcactgatgatgaatttttgaaattactacatgaggttggagatagtgatgcccttgtggtgaatgtcattgatatttttgatttcaatggttcaattattcctggtcttagtcgtttcgttgcaggaaacgatgttcttttagtaggaaataaaaaagatattcttcccaaatcggttaaagatggaaaagtaacacaatggttaactgagagagctcatgaagaggggcttcgtcctgttgatgtcatcttgacaagtgcccaaaatcatcatgctattaaggatttgattgatacgattgaaaagtatcgtcatggtcaagatgtttatgttgttggggttactaatgttggaaagtcaactcttattaacgctattattcgtgaaattactggtagtcgtgatgttattacgacctcacgtttcccaggtacaacgttagataaaatagaaatacctcttgatgatggtagctatatttttgataccccgggtattattcatcgtcatcaaatggctcattatttgacagcaaaaaatcttaaatatgttagtcctaaaaaagaaataaaacccaaaacttatcagcttaattcagaacaaacattattcttggctggcctagcacgttttgattttatttctggtcaaaaacaaggttttacggcatattttgataataacctgaatttacaccgcactaaactagttggagcagatgaattttacactaaacatgttggaaaattattgacaccaccaacaggtaaggaagtttcagattttcctaaattagttcgtcatgaatttacaatcaaagataaaatggatattgtttattcgggtcttggttggatacgtgtgaaatcagaagcagaaaatccagtagtagtagctgcttgggctccagaaggcgtggcagttgttttacgcaaagctttaatt

SEQ ID NO: 5594 - protein, 372 aa, Streptococcus agalactiae
MEELFCIGCGARIQTENKDAAGYTPRAALEKGLETGELYCQRCFRLRHYNEITDVHITDDEFLKLLHEVGDSDALVVNVIDIFDFNGSIIPGLSRFVAGNDVLLVGNKKDILPKSVKDGKVTQWLTERAHEEGLRPVDVILTSAQNHHAIKDLIDTIEKYRHGQDVYVVGVTNVGKSTLINAIIREITGSRDVITTSRFPGTTLDKIEIPLDDGSYIFDTPGIIHRHQMAHYLTAKNLKYVSPKKEIKPKTYQLNSEQTLFLAGLARFDFISGQKQGFTAYFDNNLNLHRTKLVGADEFYTKHVGKLLTPPTGKEVSDFPKLVRHEFTIKDKMDIVYSGLGWIRVKSEAENPVVVAAWAPEGVAVVLRKALI

SEQ ID NO: 5595 - DNA, 1116 bp, Streptococcus pyogenes
atggaagaattattttgtataggctgtggtatccagattcaaactgaagataaagaaaaagctggttttacgccagctgctgctttgaaaaagggtatggaaacaggagaactctattgtcagcgctgctttagattgaggcattataatgaaattacagatgtccatattaccgatgatgaatttttaagacttcttcacgaagtgggtgatagtgatgctcttgtggttaatgtgattgatatttttgactttaatggttctattattccaggtctatctcgctttatttctggtaatgatgtcttactggttgggaataaaaaagatattttgccaaagtctgttaaggatggtaaagttactcaatggttgacggaacgtgcacacgaagaaggtcttcgcccattagacgttatgttaacgagcgctcaaaataaatatgcgattaaagacttgattgggcgtatcaatgagttacgtaatggtcgagatgtttatgttgtgggggtcactaatgttggtaaatcaaccttgattaatgctattatccaagagattactggtaacaaggatgtcatcacgacgtctcgttttcctgggacaactcttgacaaaattgaaattcctttggatgatgggacgttcatttttgatacgccaggaattattcacaggcaccagatggctcattatttatcccctaaagagctaaaaatagtgagtcctaagaaggaaatcaagcctaagacgtatcaattaaatccagaacaaactctctttttaggtggtctggctcgctttgactttatcaacggtgagcgtcaaggatttacagctttttttgacaatcaactagaattacatcgtacaaaattagctggagcagatgctttttatgataagcatgttggaactttgttaaccccgccagataagaaagagttgactgcatttcctaaattagttcgtcatgaatttacaattgatcagaaaatggatattgttttttctggtctaggatggattcgtgttaatggtcaaaaagactcaaaagcgatagttgctgcatgggctcctgaaggggttgctgtcattgttcgtaaagcgattatt

SEQ ID NO: 5596 - protein, 372 aa, Streptococcus pyogenes
MEELFCIGCGIQIQTEDKEKAGFTPAAALKKGMETGELYCQRCFRLRHYNEITDVHITDDEFLRLLHEVGDSDALVVNVIDIFDFNGSIIPGLSRFISGNDVLLVGNKKDILPKSVKDGKVTQWLTERAHEEGLRPLDVMLTSAQNKYAIKDLIGRINELRNGRDVYVVGVTNVGKSTLINAIIQEITGNKDVITTSRFPGTTLDKIEIPLDDGTFIFDTPGIIHRHQMAHYLSPKELKIVSPKKEIKPKTYQLNPEQTLFLGGLARFDFINGERQGFTAFFDNQLELHRTKLAGADAFYDKHVGTLLTPPDKKELTAFPKLVRHEFTIDQKMDIVFSGLGWIRVNGQKDSKAIVAAWAPEGVAVIVRKAII

SEQ ID NO: 5597 - DNA, 315 bp, Streptococcus agalactiae
atgttaacatctaaacaacgtgctttcttaaaatcagaagcacattctatgaaacccattattcaaattgggaaaaatggtttaaatgatcaaatcaaaacaagcgtacgtaatgcactcgatgcacgtgagctaatcaaagtaacccttttacaaaataccgatgaagatatccacgatgtcgctgaagttctggaagatgaaattggctgcgatactgtccttaaaataggacgtatcttgattctttataaagagtcagcgcgcaaagaaaatcgtaaaatttcagttaaagtaaaagcagtaaaatcaaac

SEQ ID NO: 5598 - protein, 105 aa, Streptococcus agalactiae
MLTSKQRAFLKSEAHSMKPIIQIGKNGLNDQIKTSVRNALDARELIKVTLLQNTDEDIHDVAEVLEDEIGCDTVLKIGRILILYKESARKENRKISVKVKAVKSN

SEQ ID NO: 5599 - DNA, 306 bp, Streptococcus pyogenes
atgcttacaagtaaacaaagagctttcttaaaatctgaggctcatagcttaaaaccgattgtacaaattggcaaaaatggattaaatgaccacattaagactagtattcgtcaagctttggatgctagagaattgataaaggtcactttgttgcaaaatactgatgaagatattcatgaagtagcagagattttagaagaagaaattgggtgtgatacggttttgaaaattggtcgtatcttgattctctataaggtttctgctaagaaagaaaaccgcaagttgtcccctaaagttaaagcaatc

SEQ ID NO: 5600 - protein, 102 aa, Streptococcus pyogenes
MLTSKQRAFLKSEAHSLKPIVQIGKNGLNDHIKTSIRQALDARELIKVTLLQNTDEDIHEVAEILEEEIGCDTVLKIGRILILYKVSAKKENRKLSPKVKAI

SEQ ID NO: 5601 - DNA, 672 bp, Streptococcus agalactiae
gtgtttgtttttttagagatactacttgttcatggaggaattatggcactcgaattgctaacaccatttacaaaagttgaattagaagagaaaaagcgagatactaaccgaaaacaaattggaattatgggaggaaattttaaccctgttcataacgcccaccttgttgttgcagatcaagtacgtcagcaattgtgtttagaccaagttctgttgatgcctgaatttcagccaccacatattgataaaaaagagacaattgatgaacagcatcgtctcaagatgcttgaattagcaatagaaggcattgatggtttatctattgaaccaattgaaattgaacgtaaaggtatcagctatacatacgatacgatgaagcttctaattgaaaaaaatccagatgttgattattatttcattattggggcagatatggtggaatatctacctaagtggcatcgtattgatgaacttgttaaaatggtgcagtttgttggtgttcaacgtccaaaatataaagctggtacatcatatcccgttatttgggtggatctgccattgatggatatctcatcaagtatgattcgtcaatttattaaaagtaatcgtcagcccaactatttactgcctagagaggtattagattatatcaggaaagaaggtctttacaaa

SEQ ID NO: 5602 - protein, 224 aa, Streptococcus agalactiae
MFVFLEILLVHGGIMALELLTPFTKVELEEKKRDTNRKQIGIMGGNFNPVHNAHLVVADQVRQQLCLDQVLLMPEFQPPHIDKKETIDEQHRLKMLELAIEGIDGLSIEPIEIERKGISYTYDTMKLLIEKNPDVDYYFIIGADMVEYLPKWHRIDELVKMVQFVGVQRPKYKAGTSYPVIWVDLPLMDISSSMIRQFIKSNRQPNYLLPREVLDYIRKEGLYK

SEQ ID NO: 5603 - DNA, 630 bp, Streptococcus pyogenes
atggcattagaattgttgacgccttttacgaaggtggaattagaggaagaaaaaaaagaaagcaaccgcaaacagattgggattttaggagggaattttaatcctattcacaatgcacaccttgtggttgcagatcaagttcgccagcaattaggattagatcaggtgctattgatgcctgaatgtaaaccaccgcatgtggatgccaaagagactattgatgagaagcatcgtcttcgcatgttggaattggctattgaagatgttgaagggctagctattgaaacctgtgaacttgaacgtcagggaatcagctatacctatgatacgatgctttatttgactgagcagcatcctgatgttgatttttattttatcatcggagctgatatggttgattatttgccaaagtggcaccgtattgatgaactggtcaaactcgttcaatttgttggagttcaacgtccaaaatataaagctggaacctcttacccggtcatttgggtagatcttcctttgatagatatttcttctagtatgattagggattttattaaaaaaggtcgtcagcccaattatctcttacctaagcgggttttagactacattactcaagaaggtttgtatcaa

SEQ ID NO: 5604 - protein, 210 aa, Streptococcus pyogenes
MALELLTPFTKVELEEEKKESNRKQIGILGGNFNPIHNAHLVVADQVRQQLGLDQVLLMPECKPPHVDAKETIDEKHRLRMLELAIEDVEGLAIETCELERQGISYTYDTMLYLTEQHPDVDFYFIIGADMVDYLPKWHRIDELVKLVQFVGVQRPKYKAGTSYPVIWVDLPLIDISSSMIRDFIKKGRQPNYLLPKRVLDYITQEGLYQ

SEQ ID NO: 5605 - DNA, 585 bp, Streptococcus agalactiae
atgacctacaaagattacacaggtttagatcggactgaacttttgagtaaagtgcgtcatatgatgtccgacaaacgttttaatcatgtgttaggagtagagcgtgctgcaatagagttagcagaacggtatggttatgacaaggaaaaagcgggtctagctgctttattacatgattatgctaaggaactatctgatgatgaatttcttagattaattgataaataccaaccagatcccgacctaaaaaaatggggtaataatatttggcatggtcttgttggcatttataaaatacaagaggatctagctatcaaagatcaagatattttagctgctattgcaaaacatactgttggttcagcccaaatgtccacattggataaaatcgtttatgtagcagattacattgaacacaatcgagattttccaggagttgaagaagctcgtgagttagcgaaagttgaccttaataaagcagtagcttatgagactgctagaacagttgcgtttttagcaagtaaggctcagcctatctatcctaaaacgattgaaacctataatgcttatataccttatctcgac

SEQ ID NO: 5606 - protein, 195 aa, Streptococcus agalactiae
MTYKDYTGLDRTELLSKVRHMMSDKRFNHVLGVERAAIELAERYGYDKEKAGLAALLHDYAKELSDDEFLRLIDKYQPDPDLKKWGNNIWHGLVGIYKIQEDLAIKDQDILAAIAKHTVGSAQMSTLDKIVYVADYIEHNRDFPGVEEARELAKVDLNKAVAYETARTVAFLASKAQPIYPKTIETYNAYIPYLD

SEQ ID NO: 5607 - DNA, 591 bp, Streptococcus pyogenes
atgacatatgaagattatcttccttatagcaggaccgaactgttagcaaaaattgcagagcagatgagccctaaacggtttaaacatgtacttggcgtggaaaaggcagccttgtccttggcagagtgttatggttgtaacccagacaaagcagggttagcagctcttttacatgattatgccaaggagtgccctgaccaggtctttttagacttaattgacaagtaccaattatctccagaattagctaaatggaataataatgtctggcatggtatggttggtatttataagattcaagaagacctggggctaaaagacaaagatatcttgcgagctattgaaattcacaccgttggtgctgctgagatgaccttgctggataaggtcttatacgttgctgattatattgaagaaggtcgcatttttcctttggttgatgacgctagaaaaatcgcgaagctcgatttgaatcaggctgttgcctatgaaacagtgaacactgtcgcttatttagcctcaaaagcgcagcctattttcccacaaactctggatacctataatgcgttttgcagctatttaaaggaatac

SEQ ID NO: 5608 - protein, 197 aa, Streptococcus pyogenes
MTYEDYLPYSRTELLAKIAEQMSPKRFKHVLGVEKAALSLAECYGCNPDKAGLAALLHDYAKECPDQVFLDLIDKYQLSPELAKWNNNVWHGMVGIYKIQEDLGLKDKDILRAIEIHTVGAAEMTLLDKVLYVADYIEEGRIFPLVDDARKIAKLDLNQAVAYETVNTVAYLASKAQPIFPQTLDTYNAFCSYLKEY

SEQ ID NO: 5609 - DNA, 573 bp, Streptococcus agalactiae
ttgaataatggtcatgataggtttggcgatgcagtggtcattttggaggaaagtatgacttgtgcacttttactaattgatatccaacaaggtattatggataagaaaccaaagcatttaacaaattttgcagtgcttttagatgatttacttttaagtgccaaaggttctaattgtgaagtgatatggataaggcatcatgataaggaattgcctcaaggttctccacagtgggaaatttgggaacagcgacatcttgtgacgcatcacaaaataattgataaaacttacaatagttgttttaaagatactcatttacatgattacttgcaaagtaagcatattagtcaattaatcatgatgggacttcaaacagaatactgttttgatacatcagtaaaagttgcttttgaatatggttatgatatctttattccacaaggtggacacctaacatttgatacaccaactttaagtggggattctattaaaaaacattacgagaatatttggcatcatcgttttgcgacaatggtagcaaaagatagcttattgaaattaataaacgaggaa

SEQ ID NO: 5610 - protein, 191 aa, Streptococcus agalactiae
MNNGHDRFGDAVVILEESMTCALLLIDIQQGIMDKKPKHLTNFAVLLDDLLLSAKGSNCEVIWIRHHDKELPQGSPQWEIWEQRHLVTHHKIIDKTYNSCFKDTHLHDYLQSKHISQLIMMGLQTEYCFDTSVKVAFEYGYDIFIPQGGHLTFDTPTLSGDSIKKHYENIWHHRFATMVAKDSLLKLINEE

SEQ ID NO: 5611 - DNA, 354 bp, Streptococcus agalactiae
atgacagaaaaagacttactacagctagtcgttaaggctgcggatgaaaaacgagcagaagatattgtaattttagatttacagcctgtaacgagtgttgcagattactttgtgattatgagtgcaagtaatagtaggcagttagaagcaatcgcagacaatatccgtgaacaagtaaaaggaaatggtggggatgctagccaccttgaaggcgatagtaaagctggttgggtacttcttgacctcaatagcgtcgtggttcatatcttctctgaagatgagagacagcactataaccttgaaaaactttggcatgaagcaccattgcttgatgctgaagtctttatgacagaa

SEQ ID NO: 5612 - protein, 118 aa, Streptococcus agalactiae
MTEKDLLQLVVKAADEKRAEDIVILDLQPVTSVADYFVIMSASNSRQLEAIADNIREQVKGNGGDASHLEGDSKAGWVLLDLNSVVVHIFSEDERQHYNLEKLWHEAPLLDAEVFMTE

SEQ ID NO: 5613 - DNA, 399 bp, Streptococcus pyogenes
ttgcagctatttaaaggaatactaatggataatgatatgaggaataaaatgaaaaaagaagaactcttaaaaattgttgtggaagcaactgaggaaaagcgtgctaaagatattttagccttggatttagaggggttaactagtttgaccgattattttgtgattgcgagtgcaacaaacagtcgtcaattagaggctattgcggataatattcgtgaaaaggtaaaagaggctggtggagatgctagccatgttgaaggtaatagccaagcaggctgggtcttgcttgatttgaccgatgtggtggtacatctttttttagaagacgagcgttaccactataatcttgaaaaattgtggcatgaagcgcctgctgtggctctagatgcctatttagct

SEQ ID NO: 5614 - protein, 133 aa, Streptococcus pyogenes
LQLFKGILMDNDMRNKMKKEELLKIVVEATEEKRAKDILALDLEGLTSLTDYFVIASATNSRQLEAIADNIREKVKEAGGDASHVEGNSQAGWVLLDLTDVVVHLFLEDERYHYNLEKLWHEAPAVALDAYLA

SEQ ID NO: 5615 - DNA, 96 bp, Streptococcus agalactiae
gtgcaaatcgaacagactgaattcccgtaccacatgctaattccaaaagttttttcttaccttttggaaaatgacgaagtgaaaaatcagtccatt

SEQ ID NO: 5616 - protein, 32 aa, Streptococcus agalactiae
MQIEQTEFPYHMLIPKVFSYLLENDEVKNQSI

SEQ ID NO: 5617 - DNA, 732 bp, Streptococcus agalactiae
atggcaacgtatgaaacttttgcagctgtttatgatgctgtcatggatgatactttatatgctaaatggactgatttttcacttcgtcattttccaaaaggtaagaaaaaacttttggaattagcatgtggtacgggaattcagtctgttcgatttgcacaagctggttatgctgttacaggacttgatcttagtggcgatatgctgaaacttgccaaaaaacgtgcaacttctgctcaccaaagtatccagtttattgaaggaaatatgttagatttatctaatgttggtaaatatgatctcatcacgtgctattcagactctatttgttatatgcaagatgaagtcgaggttggtgatgtttttatcgaagtctataaggccttagaagaaaatggcgtctttatttttgatgttcattcgacttatcaaacagataaagtatttcctggttattcttatcatgaaaatgcagatgactttgctatggtgtgggatacttatgaagatgatgcacctcattctattgtccatgaattaacattttttgttcaagaagaagatggtcgatttacacgtcatgatgaagttcatgaagagcgtacttatgatattttgacttatgatattttacttgaacaggcaggttttaaagatgttaaggtgtatgcagattttgaagataaaaaaccaactgcaacttctgctcgctggttttttgtagctcataaa

SEQ ID NO: 5618 - protein, 244 aa, Streptococcus agalactiae
MATYETFAAVYDAVMDDTLYAKWTDFSLRHFPKGKKKLLELACGTGIQSVRFAQAGYAVTGLDLSGDMLKLAKKRATSAHQSIQFIEGNMLDLSNVGKYDLITCYSDSICYMQDEVEVGDVFIEVYKALEENGVFIFDVHSTYQTDKVFPGYSYHENADDFAMVWDTYEDDAPHSIVHELTFFVQEEDGRFTRHDEVHEERTYDILTYDILLEQAGFKDVKVYADFEDKKPTATSARWFFVAHK

SEQ ID NO: 5619 - DNA, 789 bp, Streptococcus pyogenes
atgttacaaagagaccttgtcaatacgacagggtttttgaggatgataatggaacataattatgaaaaatttgcgtcagtttatgatgctgtgatggatgattctctatatgacttgtggacagatttttcacttcgacatttaccaaagtctaagggtcgaaatcgtttgttagagttggcctgtggaaccggtattcagtcagttcgttttgctcaagcaggttttgatgtgactggtttagacttaagtcaagacatgctggctattgctaaaaagcgtgcgcaatctgctaaaaagaaaattgattttattcaaggtaacatgctggatttgtcacaggtggggcagtttgattttgtaacctgctattcggattccatttgctatatgcaagacgaagttgatgttggcgatgtttttaaagaagtttatgatgttttagcaaacgatggcatctttatttttgatgtgcattcaacctatcaaacggatgagtgtttccctggttattcctatcatgagaatgcagatgattttgcaatggtttgggatacctatgctgacgaggctcctcactctgttgttcacgaactcactttctttatccaagaagacgatggacgtttttctcgctttgatgaagtgcatgaggaacgaacgtatgagttattgacttatgatattttgttggaacaagcagggttcaagtcatttaaggtctatgctgattttgaagataaggagccaactaagaccagcaagcgttggttttttgtagcatataaa

SEQ ID NO: 5620 - protein, 263 aa, Streptococcus pyogenes
MLQRDLVNTTGFLRMIMEHNYEKFASVYDAVMDDSLYDLWTDFSLRHLPKSKGRNRLLELACGTGIQSVRFAQAGFDVTGLDLSQDMLAIAKKRAQSAKKKIDFIQGNMLDLSQVGQFDFVTCYSDSICYMQDEVDVGDVFKEVYDVLANDGIFIFDVHSTYQTDECFPGYSYHENADDFAMVWDTYADEAPHSVVHELTFFIQEDDGRFSRFDEVHEERTYELLTYDILLEQAGFKSFKVYADFEDKEPTKTSKRWFFVAYK

SEQ ID NO: 5621 - DNA, 1107 bp, Streptococcus agalactiae
atgacagttacaggaattgttgccgaatttaatccctttcataatgggcataagtaccttttagaacaagctcaaggcataaaagtaatagccatgtcgggtaattttatgcaacgtggtgagccggcgattgtagataaatggacccgttcccagatggcactagaaaatggtgctgatttagtgattgaactcccttttctggtttcggtacagtcagcggattatttcgctagtggagctgtgtctatcctggcacgattaggtgtggataacttatgcttcggtaccgaagaaatgcttgattatgcccgtattggggatatttatgtgaataaaaaagaggagatggaagcttttttgaaaaaacaatcggattctctttcctatccacaaaaaatgcaagctatgtggcaagaatttgcagggattacattttcgggacaaaccccaaatcacattttaggcttagcctacaccaaagcagctagccaaaatggtattcgattaaatccgatacaacgtcaaggagctggttatcattcatcagaaaaaacagagatatttgcttctgcaacaagtcttcgtaaacatcaatctgatcgtttctttgtagaaaaaggtatgcctaacagtgacttgtttttgaatagtccacaagtagtttggcaagattattttagtttactcaaatatcagataatgacgcattctgatttgacacaaatttatcaagtgaatgaagagatagccaatcgtataaaaagtcaaattcgttatgtggagactgtggatgagttagttgataaagtcgcaactaaacggtataccaaagcaagaattcgacgtttattaacctatatcttgataaatgctgtggaaagtcctataccaaatgctattcatgtcttaggttttacacaaaaaggtcaacagcatttaaagtctgtgaagaagtctgtggatatcgtgacgaggattggttcacaaacgtgggatagtttgacgcaacgagcagattctgtttatcagatgggaaatgctaatatagcagagcaaacatggggacgtatccctttttatcaacctgttagtcaaagtgacctt

SEQ ID NO: 5622 - protein, 369 aa, Streptococcus agalactiae
MTVTGIVAEFNPFHNGHKYLLEQAQGIKVIAMSGNFMQRGEPAIVDKWTRSQMALENGADLVIELPFLVSVQSADYFASGAVSILARLGVDNLCFGTEEMLDYARIGDIYVNKKEEMEAFLKKQSDSLSYPQKMQAMWQEFAGITFSGQTPNHILGLAYTKAASQNGIRLNPIQRQGAGYHSSEKTEIFASATSLRKHQSDRFFVEKGMPNSDLFLNSPQVVWQDYFSLLKYQIMTHSDLTQIYQVNEEIANRIKSQIRYVETVDELVDKVATKRYTKARIRRLLTYILINAVESPIPNAIHVLGFTQKGQQHLKSVKKSVDIVTRIGSQTWDSLTQRADSVYQMGNANIAEQTWGRIPFYQPVSQSDL

SEQ ID NO: 5623 - DNA, 1104 bp, Streptococcus pyogenes
atgactgttaccggaattatagctgagtttaatccgtttcacaatggacacaaatatttgctagaaacagcagagggactaaaaattattgctatgtcaggaaattttatgcaaagaggagagcctgctcttattgataaatggattcgatcagagatggctcttaaaaatggtgcagatattgttgtggaattgccctttttcgtttcagttcaatcagcagactattttgctcaaggagctattgatattctttgtcaattaggaattcagcaattagcatttgggacagagaatgtgattgattatcaaaaactgattaaggtctatgagaaaaaatcagagcaaatgactgcctatttatcgacgcttgaagatacatttagctatccacaaaaaacacaaaaaatgtgggaaatctttgctggagttaaattttcagggcaaacgccaaatcatattttggggttaagttacgcaaaggctagcgctggaaagcatatacaactatgtcctatcaagcgtcaaggggctgcctaccattcgaaagacaaaaatcatctgctagcttctgcaagtgccattagacagcacctgaatgattgggatttcataagtcattcagtaccaaatgcaggtttacttataaacaatccccatatgtcatgggaccattatttttcattcttaaaatatcaaattctgaaccattctgatttaactagtatttttcaggtcaatgatgaattggcaagtcgtattaaaaaagcgataaaagttagtcaaaatattgaccacctagttgacactgttgctaccaaacgctatacaaaagctcgtgtaagacgtattttaacctacattttggttaatgctaaggaacctactttacctaaaggaattcatattctagggtttacctcaaaaggacaagcacatttaaaaaaattaaaaaaaagcaggcctctgattactagaattggagcagaaacttgggatgagatgacacaaaaagcagacagcatctatcaacttgggcatcaggatatcccagaacaaagttttggaagaatacctattataataaaaaatgagaggctcaat

SEQ ID NO: 5624 - protein, 368 aa, Streptococcus pyogenes
MTVTGIIAEFNPFHNGHKYLLETAEGLKIIAMSGNFMQRGEPALIDKWIRSEMALKNGADIVVELPFFVSVQSADYFAQGAIDILCQLGIQQLAFGTENVIDYQKLIKVYEKKSEQMTAYLSTLEDTFSYPQKTQKMWEIFAGVKFSGQTPNHILGLSYAKASAGKHIQLCPIKRQGAAYHSKDKNHLLASASAIRQHLNDWDFISHSVPNAGLLINNPHMSWDHYFSFLKYQILNHSDLTSIFQVNDELASRIKKAIKVSQNIDHLVDTVATKRYTKARVRRILTYILVNAKEPTLPKGIHILGFTSKGQAHLKKLKKSRPLITRIGAETWDEMTQKADSIYQLGHQDIPEQSFGRIPIIIKNERLN

SEQ ID NO: 5625 - DNA, 711 bp, Streptococcus agalactiae
atgaaaacagttaaagaaataagtcacatttctggtattagtgtgcgcacacttcattattatgatgaaatagatttgttatctccttcatttgtaggagagaatggttatcgttactatgatgatgaatcactgattaagttacaagaaattttgttatttaaggaactggaatttcctcttaaaaaaataaaagagataatggatagtccaaattatgatcgtaatcaagcacttcttgatcaaattaggtggctggaactaaagaaacagcgactagaagaagtaattgaacatgcaaagtctatccagaggggtaaaaatatgtcagattttacagcttataatcaagaagaattagaagcatttcaagaggaagctagaacacgctggggggatacagatagttacaaagaatttgaaaatagccatagtaagaatgatttttcaatgatttcacaagctatgagtcagatttttaaagactttggacagttgaaagaactttctccgacagatgagaaagttcaaaaacaagttcagattttacaagattatatcacagctcagttttacaactgcactaacgatttattagcaagtcttggaataatgtacatccaagatgagcgtttccaaaagtctattgataattggggaggccagggaacagcattatttgtttctaaagctatagatagctattgtcat

SEQ ID NO: 5626 - protein, 237 aa, Streptococcus agalactiae
MKTVKEISHISGISVRTLHYYDEIDLLSPSFVGENGYRYYDDESLIKLQEILLFKELEFPLKKIKEIMDSPNYDRNQALLDQIRWLELKKQRLEEVIEHAKSIQRGKNMSDFTAYNQEELEAFQEEARTRWGDTDSYKEFENSHSKNDFSMISQAMSQIFKDFGQLKELSPTDEKVQKQVQILQDYITAQFYNCTNDLLASLGIMYIQDERFQKSIDNWGGQGTALFVSKAIDSYCH

SEQ ID NO: 5627 - DNA, 402 bp, Streptococcus agalactiae
atgaaaggatttcatgggaatatcgaaaaattgacactaggaaatacaaatttccgccaagtcctctataccgcagaacattgtcaactcgttttaatgacactgcctgttggtggagaaattggtagcgagattcatgcagaaaatgatcagtttttccgttttgaagctggtcatggtaaggttgtcattgatggtaatgaatatgaagttgcagatggagacgctataatagttccggcaggtgctgaacataacgtaattaacacttctgaaactgagatgttaaaactctatacaatttacagtccagctcatcacaaagatggtattatccgtgccacaagagaagaagctgaagaaaatgaagaagattttgatggagttactactgaaactaaa

SEQ ID NO: 5628 - protein, 134 aa, Streptococcus agalactiae
MKGFHGNIEKLTLGNTNFRQVLYTAEHCQLVLMTLPVGGEIGSEIHAENDQFFRFEAGHGKVVIDGNEYEVADGDAIIVPAGAEHNVINTSETEMLKLYTIYSPAHHKDGIIRATREEAEENEEDFDGVTTETK

SEQ ID NO: 5629 - DNA, 711 bp, Streptococcus agalactiae
atgactcaatttcttggggaatttttaggaacatttattttggttcttcttggggatggcgtagttgcaggaaatgtgctcagtaaaaccaaagaagaaggaactggatggactgctattgtttttggctggggaattgcttgtaccgttgctgtttatgtttctggattattcagtcccgctcatctaaatccagcagtcacattagcaatggcttctattggagcaatttcttggggacaagttatcccctttatcattgcacagatgttaggagcaatggttgcggcaactattttatggttacactattatcctcattggaaagaaacaaaagatagtggacttatccttgccagcttctcaaccggacctgctatccgccatacaccatcgaatctccttggtgaaattatcggtactgctattcttgtgattacaattatggcaattggtcctagtaaagttgcagcaggtcttggtccaattatcgttggtatagttattttcgcagtaggattctctcttgatccaacaactggttatgctattaaccctgcacgtgacctagggcctcgtcttatgcatgctatcttacctattgaaaataagggtaactcagattggtcatacgcttggattccagttgtaggtccaattatcggcggtgtccttggggctatcttatacaatattgctttgactttagtt

SEQ ID NO: 5630 - protein, 237 aa, Streptococcus agalactiae
MTQFLGEFLGTFILVLLGDGVVAGNVLSKTKEEGTGWTAIVFGWGIACTVAVYVSGLFSPAHLNPAVTLAMASIGAISWGQVIPFIIAQMLGAMVAATILWLHYYPHWKETKDSGLILASFSTGPAIRHTPSNLLGEIIGTAILVITIMAIGPSKVAAGLGPIIVGIVIFAVGFSLDPTTGYAINPARDLGPRLMHAILPIENKGNSDWSYAWIPVVGPIIGGVLGAILYNIALTLV

SEQ ID NO: 5631 - DNA, 372 bp, Streptococcus agalactiae
atgtctgatattggtattattgttgtttctcactctaaaaatattgctcaaggagttgttgatcttatttcagaggtagcaaaggatgtctcaataacttacgtgggtggaacagaagatggtgagattggtacttcttttgatcaagttcaacagattgtagagcaaaatgataaaaagacgttattagctttctttgatttaggttcagcaaaaatgaatttagagttagtagctgatttttcagaaaaaaatattatcattaactctgtcccagtagtggagggagcttacaccgctgctgctcttctacaggcaggtgctgacctggatagtattcaatcacaattagctgaattaactatcaataaa

SEQ ID NO: 5632 - protein, 124 aa, Streptococcus agalactiae
MSDIGIIVVSHSKNIAQGVVDLISEVAKDVSITYVGGTEDGEIGTSFDQVQQIVEQNDKKTLLAFFDLGSAKMNLELVADFSEKNIIINSVPVVEGAYTAAALLQAGADLDSIQSQLAELTINK

SEQ ID NO: 5633 - DNA, 576 bp, Streptococcus agalactiae
atggaagtaaaaactgcaatagaatggatgcacacttttaaccaaaaaattcaatccaacaaggactatttatccgaactagatactccaataggtgatggcgaccatggtggcaatatggcgcgtggtatgactgctgttattgaaaaccttgataacaatgaatttagtagtgctgccgatgttttcaaaaccgtgtccatgcaacttttaagcaaagtaggcggagcatctggaccactctatggttctgcatttatgggaattacaaaagctgaacagagtaaaagtaccatttcagaggcacttggcgcaggacttgaaatgattcaaaaacgtggtaaagctgaacttaatgaaaaaacaatggttgatgtttggcacggtgttattgaagcgattgaaaaaaatgaattgactgaagaccgtatcgattccttagtagatgctacaaaagggatgaaagcaacaaaaggacgcgcttcttatgttggagaacgctcagtaggacacattgatccaggatcattttcttcaggattattatttaaagcattactagaagttggaggtgtc

SEQ ID NO: 5634 - protein, 192 aa, Streptococcus agalactiae
MEVKTAIEWMHTFNQKIQSNKDYLSELDTPIGDGDHGGNMARGMTAVIENLDNNEFSSAADVFKTVSMQLLSKVGGASGPLYGSAFMGITKAEQSKSTISEALGAGLEMIQKRGKAELNEKTMVDVWHGVIEAIEKNELTEDRIDSLVDATKGMKATKGRASYVGERSVGHIDPGSFSSGLLFKALLEVGGV

SEQ ID NO: 5635 - DNA, 1662 bp, Streptococcus pyogenes
gtgtcaaatattacaacaagcttattccaagaaatggtccaagcggcagcgactcgccttggcaaacaagcagaatatgttaattccttaaatgtttttcctgttccagatggtgatacaggaacaaacatgagcatgactatggacaatggtgccaaggaagttgctgataaacctgcgtcaactgtgggagaagttggacaaatgttatcaaaaggtcttttgatgggagcgcgtggaaattctggagttattacttcacaactttttcgtggttttggtcaaagcattaagggaaaagatgagctgacaggtaaagatttggcacaagcctttcaagtgggtgtagaagttgcctacaaagcagtgatgaaacctgttgaaggaacaattttaactgtttctcggggtgcagcgactgctgccttaaaaaaagcagatcttacagacgacgccgtggaagtcatgcaagctgctttagacggtgccaaaggtgcccttgctaagacacctgatttattaccagtccttaaagaagttggtgtggttgattcaggcggtcaaggtcttgtctttatctatgaaggtttcctatctgctttgaatggcgactatgtgacttcagcagactttaaagcgactcctgctaacatgtctgaaatgattaatgctgagcatcacaaatccgttgttggtcatgtggctactgaagacattacctacggttattgtactgaaatcatggttgcccttaaacaaggcccaacctatgtgaaagaattcaactatgatgagtttcaaggctaccttagtggccttggtgactcgctgttagtggtcaatgatgatgagattgttaaagttcacgtccatactgaagaccccggacttgtgatgcaagaaggtcttaaatatggttcgctcatcaagattaaagtggacaatatgcgtaaccagcatgaagcacaggttcaaaagactgatgtcgaaaaaaacaaggctgaagtaaaagactttggcttgattgcagtagtagctggagaaggtttatctgaaattttcaaggcgcaaggtgttgattacgtgatttctggtggtcaaaccatgaatccatctacagaagatattgttaaagctattgaagcagttaatgccaaacaagtcattatcttgccaaacaataaaaatatctttatggctgcccaatctgctgcagaagtggtggatattccggctgctgttgttgcaacacgtactgttccgcaaggatttaccagcttgttggcctttgatccttcaaaatctttagaggacaatgtagcagatatgtcaactagtctttctgacgtggtcagtggaagcgttactttggcagtccgtgacaccaccattgatggtttagaaatccatgaaaatgatttcttgggaatggttgatggtaaaatcatcgtttcaaacccagacatggaagcaactctaaaagctgcctttgaaaagatgattgacgaagatagcgagattgtgactatctttgttggtgaagaaggtgatcaagacttagcagaagaacttgctgggtatttaggagagacttacgaagatgtggaagttgagatccatcaaggagatcagcctgtttacccatatctcatgagtgtagaa

SEQ ID NO: 5636 - protein, 554 aa, Streptococcus pyogenes
VSNITTSLFQEMVQAAATRLGKQAEYVNSLNVFPVPDGDTGTNMSMTMDNGAKEVADKPASTVGEVGQMLSKGLLMGARGNSGVITSQLFRGFGQSIKGKDELTGKDLAQAFQVGVEVAYKAVMKPVEGTILTVSRGAATAALKKADLTDDAVEVMQAALDGAKGALAKTPDLLPVLKEVGVVDSGGQGLVFIYEGFLSALNGDYVTSADFKATPANMSEMINAEHHKSVVGHVATEDITYGYCTEIMVALKQGPTYVKEFNYDEFQGYLSGLGDSLLVVNDDEIVKVHVHTEDPGLVMQEGLKYGSLIKIKVDNMRNQHEAQVQKTDVEKNKAEVKDFGLIAVVAGEGLSEIFKAQGVDYVISGGQTMNPSTEDIVKAIEAVNAKQVIILPNNKNIFMAAQSAAEVVDIPAAVVATRTVPQGFTSLLAFDPSKSLEDNVADMSTSLSDVVSGSVTLAVRDTTIDGLEIHENDFLGMVDGKIIVSNPDMEATLKAAFEKMIDEDSEIVTIFVGEEGDQDLAEELAGYLGETYEDVEVEIHQGDQPVYPYLMSVE

SEQ ID NO: 5637 - DNA, 987 bp, Streptococcus agalactiae
atgaaaaaaattctcaatcaaccaactgatgttgttactgaaatgctagatggattagcatatgttcataatgatttagtacatcgcatagaaggttttgatatcattgctcgcaatgaagagaagtcaggaaaagtggctctcatttctggcggaggaagtggacatgagccttcacatgctggtttcgtaggcgaaggaatgttatctgcagctgtgtgtggtgcagtatttacttctccaactcctgaccaagttcttgaagcaattaaagaagctgatgagggggctggagttttcatggttatcaaaaattattcaggggatatcatgaactttgaaatggcacaagatatggctgaaatggaaggcatagaagttgcaagtgtggtcgttgatgatgatattgcagtcgaagacagtctttacacacaaggaaaacgtggtgtagctggtacgatactcgtccataaaattctaggacatgctgctcgtcatggcaaatcacttcaggaaatcaaagctattgctgatgaattagtaccaaacattcacactgttggacttgcactaagcggggctactgttcctgaagtaggcaagccaggatttgttcttgcagaagatgaaattgaatttggtatcggtattcatggtgaaccaggttatcgtaaagaaaaaatgcaaccttcaaaggctttagcgacagaattagttgataagttaattgaatcgttcgatgctaaatctggcgaaaaatatggtgtccttattaacggtatgggtgcaaccccacttatggaacaatatgtctttgctaacgatgttgccaaactccttgaggataaaggcattgaagtgaattacaaaaaacttggtaactatatgacttcaattgatatggctggtttatcactaaccttgattaaactggaaaatcaagagtggttagaagcacttaatagtgacgttacaaccattgcttgg

SEQ ID NO: 5638 - protein, 329 aa, Streptococcus agalactiae
MKKILNQPTDVVTEMLDGLAYVHNDLVHRIEGFDIIARNEEKSGKVALISGGGSGHEPSHAGFVGEGMLSAAVCGAVFTSPTPDQVLEAIKEADEGAGVFMVIKNYSGDIMNFEMAQDMAEMEGIEVASVVVDDDIAVEDSLYTQGKRGVAGTILVHKILGHAARHGKSLQEIKAIADELVPNIHTVGLALSGATVPEVGKPGFVLAEDEIEFGIGIHGEPGYRKEKMQPSKALATELVDKLIESFDAKSGEKYGVLINGMGATPLMEQYVFANDVAKLLEDKGIEVNYKKLGNYMTSIDMAGLSLTLIKLENQEWLEALNSDVTTIAW

SEQ ID NO: 5639 - DNA, 534 bp, Streptococcus agalactiae
atgacttcttcgcttattactaagaaaaaaatagccaagtcatttaaacgtttatttatttcgcaagcttttgacaaaatatcggtgagtgatattatggaagatgcaggtattagacgtcaaacattttataatcactttgttgataaatatgctttattagaatggattttccaaacagaattaagcgaacaagttacggataatttagactatatctcaggttttcagttgttatcagagttgttgactttttttaaaatgaatcaagaattctatattaaattatttcaaattgaagatcaaaatgatttttcttcgtattttgagtcttactgtgagcagttagtagataagcttctttctgattatagtaaatctaactttaatcagaaagaaagagttacatttattaattatcatagtaaagccctctcttattttataaaatatgagttaataaataactcaaaagaagaattatttaataggaaagtcattgaaaaaattatcagaacatcaatagaaaattat

SEQ ID NO: 5640 - protein, 178 aa, Streptococcus agalactiae
MTSSLITKKKIAKSFKRLFISQAFDKISVSDIMEDAGIRRQTFYNHFVDKYALLEWIFQTELSEQVTDNLDYISGFQLLSELLTFFKMNQEFYIKLFQIEDQNDFSSYFESYCEQLVDKLLSDYSKSNFNQKERVTFINYHSKALSYFIKYELINNSKEELFNRKVIEKIIRTSIENY

SEQ ID NO: 5641 - DNA, 540 bp, Streptococcus pyogenes
atgaccaaaagacatactgaaaccaaagcttatgtaaagaccgccttaaccaccttactaactgaacaatcttttgaaactcttactgtctctgaccttactaaaaaggctggtatcaatagaggaaccttctacctccactacactgataaatttgacatgatgaatcacttcaaaaatgacactctggatgatttgtaccgtttgttaaatcaggctgaaatctacacagacactcgacaagtcctcaatcaaaccttgtcctaccttatagaacatagagaatttataaccgcactcgctactatttcttacctcaaatttccgcaactcatcaaggatttctgttaccaatttttgactactattactggtttccaagacattgtgaccaatcaataccatattccttatccctatgctttagaagtttaccttgccagtattgagagcattatcagctattggattgctaatggctatcaagaaaccactgaagaggttgccgatattattctcaaagcagttactctagacaat

SEQ ID NO: 5642 - protein, 180 aa, Streptococcus pyogenes
MTKRHTETKAYVKTALTTLLTEQSFETLTVSDLTKKAGINRGTFYLHYTDKFDMMNHFKNDTLDDLYRLLNQAEIYTDTRQVLNQTLSYLIEHREFITALATISYLKFPQLIKDFCYQFLTTITGFQDIVTNQYHIPYPYALEVYLASIESIISYWIANGYQETTEEVADIILKAVTLDN

SEQ ID NO: 5643 - DNA, 144 bp, Streptococcus agalactiae
gtggctgacttacttgctacacctaaagtagccattgaagttgtcaaagatagtcctagctgttctaattcatctaagcttgctccttctaaagcagcttgtccaataattttatgtagcaacacagtaccagcaacgcctcga

SEQ ID NO: 5644 - protein, 48 aa, Streptococcus agalactiae
MADLLATPKVAIEVVKDSPSCSNSSKLAPSKAACPIILCSNTVPATPR

SEQ ID NO: 5645 - DNA, 984 bp, Streptococcus agalactiae
atgagaaaaacagaacatcataaaatggaatatgtttttgaaacaataaaagcaatcactaaaactaatcctaaagtagagcaaataaaagatttgcccgctattcattatttagggcaatccgagcaagtaattccgattttatcaggaggaggcagcggacatgagccggctcactttggatatgttggtgagggaatgctatcggcagcgattagtggtcctatttttgtaccaccatgtgctagtgatattctagagactattagatttatcaatcgaggcaaaggtgtctttgttattatcaaaaattttgaagctgatttggaagaattttcccaagcgattgaacaggctcgtcaagaaggcattccaatcaaatacatcgtttctcatgatgacatctctgttgaaacatcaaattttaaaattcgtcatcgaggcgttgctggtactgtgttgctacataaaattattggacaagctgctttagaaggagcaagcttagatgaattagaacagctaggactatctttgacaacttcaatggctactttaggtgtagcaagtaagtcagccactattttaggtcagcatcaacctgtttttgatatagaagaaggttacatctcatttggaatcggtattcatggtgagccaggataccggacaatgcctttcgtgtccatggaacatttggcaaacgaactagttaacaaattgaaaatgaaattacgttggcaagatggagaagcattcattctattgataaataatcttggaggaagttctaaaatggaggaattactttttacaaatgctgtcatggaatttctggctttagacgatttacaattaccttttattaaaacaggccacctaattacaagtttagatatggctggtttatcagttaccttgtgtcgtgtaaaggatagtagatggattgattacttaaaacataagacagatgctagagcttgg

SEQ ID NO: 5646 - protein, 328 aa, Streptococcus agalactiae
MRKTEHHKMEYVFETIKAITKTNPKVEQIKDLPAIHYLGQSEQVIPILSGGGSGHEPAHFGYVGEGMLSAAISGPIFVPPCASDILETIRFINRGKGVFVIIKNFEADLEEFSQAIEQARQEGIPIKYIVSHDDISVETSNFKIRHRGVAGTVLLHKIIGQAALEGASLDELEQLGLSLTTSMATLGVASKSATILGQHQPVFDIEEGYISFGIGIHGEPGYRTMPFVSMEHLANELVNKLKMKLRWQDGEAFILLINNLGGSSKMEELLFTNAVMEFLALDDLQLPFIKTGHLITSLDMAGLSVTLCRVKDSRWIDYLKHKTDARAW

SEQ ID NO: 5647 - DNA, 771 bp, Streptococcus agalactiae
ttgcttgccaatatgagccagcaggttattaaaaatgaaatcaaaggagattttccaatgggacgtaagtgggccaatattgttgccaaaaagactgctaaagatggtgctaactcaaaagtatacgctaaattcggtgttgaaatatatgttgctgcaaagcaaggtgaaccagaccccgagtcaaactcagctctaaaattcgttttggaccgtgctaagcaagcacaagttccaaagcatgttattgataaagcgattgataaagccaaaggaaacacagatgaaactttcgtagagggacgctatgaaggttttggtccaaatggttcaatgattattgtggatactttgacatcaaatgttaaccgtacggcagcaaatgtacgtactgcttacggtaagaacggtggcaatatgggagcttcaggatcggtatcctacttatttgataaaaaaggtgtcatcgtttttgctggtgatgatgctgacactgtcttcgaacaattacttgaagcggatgtagacgtagatgatgttgaagcagaagagggaacaataacagtttataccgccccaacagatcttcataaaggtatccaagcacttcgcgataatggtgtagaagaattccaagttactgaacttgaaatgattcctcaatcagaagtagtattggaaggtgatgaccttgaaacttttgaaaagcttattgacgcactcgaatcagatgatgatgttcaaaaagtttatcataatgtagcagatttc

SEQ ID NO: 5648 - protein, 257 aa, Streptococcus agalactiae
MLANMSQQVIKNEIKGDFPMGRKWANIVAKKTAKDGANSKVYAKFGVEIYVAAKQGEPDPESNSALKFVLDRAKQAQVPKHVIDKAIDKAKGNTDETFVEGRYEGFGPNGSMIIVDTLTSNVNRTAANVRTAYGKNGGNMGASGSVSYLFDKKGVIVFAGDDADTVFEQLLEADVDVDDVEAEEGTITVYTAPTDLHKGIQALRDNGVEEFQVTELEMIPQSEVVLEGDDLETFEKLIDALESDDDVQKVYHNVADF

SEQ ID NO: 5649 - DNA, 714 bp, Streptococcus pyogenes
atgggacgtaaatgggcaaatattgttgctaaaaaaactgctaaagatggagcaacatcaaaggtctatgccaaatttggtgttgaaatttatgtggctgccaaacaaggcgagccagatccagagttaaatacagctcttaaatttgtcattgatcgtgcaaagcaagcacaagtgccaaagcatgttattgataaagcgattgataaagctaaaggaaacacagatgaaactttcgtagagggacgctatgaaggttttggtccaaatggttcaatgattattgtggatactttgacatcaaatgttaaccgtacagcggcaaatgtacgtacggcttacggtaagaacggtggcaatatgggagcttcaggatctgtatcctacttatttgataaaaaaggggtcatcgtttttgctggtgatgatgctgacagtgtctttgaacaattacttgaagcggatgtagacgtagatgatgttgaagcagaagagggaacaataacagtttacactgccccaacagatcttcataaaggtatccaagcacttcgcgataatggtgtagaagaattccaagttactgaacttgaaatgattcctcaatcagaagtagttttggaaggtgatgaccttgaaacttttgaaaagcttattgatgcacttgaatcagatgatgatgttcaaaaagtgtatcataatgtagcagatttt

SEQ ID NO: 5650 - protein, 238 aa, Streptococcus pyogenes
MGRKWANIVAKKTAKDGATSKVYAKFGVEIYVAAKQGEPDPELNTALKFVIDRAKQAQVPKHVIDKAIDKAKGNTDETFVEGRYEGFGPNGSMIIVDTLTSNVNRTAANVRTAYGKNGGNMGASGSVSYLFDKKGVIVFAGDDADSVFEQLLEADVDVDDVEAEEGTITVYTAPTDLHKGIQALRDNGVEEFQVTELEMIPQSEVVLEGDDLETFEKLIDALESDDDVQKVYHNVADF

SEQ ID NO: 5651 - DNA, 111 bp, Streptococcus agalactiae
ttgataggtattgttaaagaagtgataggtaaaaaatattattcaaaaagtttttttaggtgtaaaatgataattattagacagttgttggttgatgagggagcaaaatgt

SEQ ID NO: 5652 - protein, 37 aa, Streptococcus agalactiae
MIGIVKEVIGKKYYSKSFFRCKMIIIRQLLVDEGAKC

SEQ ID NO: 5653 - DNA, 687 bp, Streptococcus agalactiae
atgttaacaaagcctattattggtattacaggaaatgaaagagaaatgtcagatattccaggttattattatgattcggtatctaggcatatttcggaaggagttaaaaacgcaggcgggttaccagttatcctaccaataagtgaagcagaaagtgccaaagcttatgttgagatgatagataagctgatcatatctggtggccaaaatgttttaccatcctattatggtgaagagaagataattgagagtgatgattattcacttgcgcgtgatatttttgaatttgcattagtcgaagaagcgttgaaacaaaataaaccaatctttgcgatttgccgtggcatgcagttagtaaatgtggcgcttggtggtacacttaatcaatctattgataatcactatcaagagccttacattggatttgctcattatttaaatgtggaaaaagggagttttctagaaggctttatatcaggtgattttaagatcaattctcttcatagacaaagtgttaaactgttagctgaaggtctgatagttagtgctagagatcctagagatgggacagtagaagcttatgaaagtcgaacagaacaatgtattataggtgttcaatggcatccagaattaatgcttcaccaaattgaaaaccaaaccttatttggttattttgttaatgaaacg

SEQ ID NO: 5654 - protein, 229 aa, Streptococcus agalactiae
MLTKPIIGITGNEREMSDIPGYYYDSVSRHISEGVKNAGGLPVILPISEAESAKAYVEMIDKLIISGGQNVLPSYYGEEKIIESDDYSLARDIFEFALVEEALKQNKPIFAICRGMQLVNVALGGTLNQSIDNHYQEPYIGFAHYLNVEKGSFLEGFISGDFKINSLHRQSVKLLAEGLIVSARDPRDGTVEAYESRTEQCIIGVQWHPELMLHQIENQTLFGYFVNET

SEQ ID NO: 5655 - DNA, 693 bp, Streptococcus pyogenes
atgaccaaaccgattattggaataactgcaaatcaaagactaaatatggctttggataatctcccatggtcatatgcacctactggatttgtacaggcagtcactcaatctggggggctgccgcttcttttacccattggtgatgaagccgccgctaaaacttatgtatctatggttgataaaatcattttaattggtgggcaaaacgttgacccaaaatattatcaagaagagaaggctgcttttgatgatgatttttcaccagagcgagacacatttgagctagctatcatcaaggaggctataacattaaaaaaaccaatcttagggatttgtcgtggtacacagttaatgaatgttgccttaggaggaaatcttaaccaacacattgactcacattggcaagaagcgccttctgatttcttatcacacgaaatgattattgagccagactctatcttatatcctatttatggtcataagacattaattaattcttttcatcgccaaagtttaaaaactgttgctaaggatttaaaagtaatcgctagggatccacgtgatggtaccatcgaagcagtcatatcaaccaacgatgccattccttttttaggtgttcagtggcatcctgaacttctccaaggtgttcgagatgaagatttacaattgttccgcttattcgtcaatgacttc

SEQ ID NO: 5656 - protein, 231 aa, Streptococcus pyogenes
MTKPIIGITANQRLNMALDNLPWSYAPTGFVQAVTQSGGLPLLLPIGDEAAAKTYVSMVDKIILIGGQNVDPKYYQEEKAAFDDDFSPERDTFELAIIKEAITLKKPILGICRGTQLMNVALGGNLNQHIDSHWQEAPSDFLSHEMIIEPDSILYPIYGHKTLINSFHRQSLKTVAKDLKVIARDPRDGTIEAVISTNDAIPFLGVQWHPELLQGVRDEDLQLFRLFVNDF

SEQ ID NO: 5657 - DNA, 102 bp, Streptococcus agalactiae
atgatgtcgtgtacaattaaagaggagaaaaaagatgacaataaaaaaagtgttaagtgtaacaggaattattttagtgacagtagcgtctctagctgcttg

SEQ ID NO: 5658 - protein, 34 aa, Streptococcus agalactiae
MMSCTIKEEKKDDNKKSVKCNRNYFSDSSVSSCL

SEQ ID NO: 5659 - DNA, 498 bp, Streptococcus agalactiae
gtgacagtagcgtctctagctgcttgtagctcaaaatctcatactactaagacgggcaaaaaagaagttaattttgcaactgttggaacaacggcacctttttcttatgtgaaggatgggaaactgactggctttgatattgaagtagccaaagctgtttttaaaggttcagataactataaagtcacttttaaaaaaacagaatggtcatcggtatttaccggcattgattcaggaaagtttcaaatgggtggaaataatatttcttattcatcagagagatctcaaaaatatttattttcatacccaataggctctactccttcagttttagcagttcctaagaatagtaatatcaaagcttataatgatattagtggtcataaaacacaggttgtccaaggaacgacaactgccaagcaattagaaaatttcaataaagagcatcagaaaaatcctgttactctaaaatatactaatgaaaatttacacagattc

SEQ ID NO: 5660 - protein, 166 aa, Streptococcus agalactiae
MTVASLAACSSKSHTTKTGKKEVNFATVGTTAPFSYVKDGKLTGFDIEVAKAVFKGSDNYKVTFKKTEWSSVFTGIDSGKFQMGGNNISYSSERSQKYLFSYPIGSTPSVLAVPKNSNIKAYNDISGHKTQVVQGTTTAKQLENFNKEHQKNPVTLKYTNENLHRF

SEQ ID NO: 5661 - DNA, 282 bp, Streptococcus agalactiae
ttgagtgatggaaaagctgattttaaactttttgacggaccaactgttaacgctatcataaagaatcaaggtctcacgaatttaaaaaccatccctttgactatgagagatcagccttatatttatttcatctttggtcaggatcaaaaagacttgcaaaagtatgtgaataatcgccttaaacaattacgtaaagatgggacactttcaaaaatagctaaagaataccttggaggtgattacgtaccaaatgagaaagatctcgttactcctaaggagaag

SEQ ID NO: 5662 - protein, 94 aa, Streptococcus agalactiae
MSDGKADFKLFDGPTVNAIIKNQGLTNLKTIPLTMRDQPYIYFIFGQDQKDLQKYVNNRLKQLRKDGTLSKIAKEYLGGDYVPNEKDLVTPKEK

SEQ ID NO: 5663 - DNA, 882 bp, Streptococcus agalactiae
ttgattctaataacttcctatgggataatatctttatcacaaaaattgagggaatttattatgaagttaaaacatattgtcttaggattagccttaacaacacttttaggagtcacatttagtaatcaagaagtttcagcaagctcaacttcaagtaaagttgttaaagttggtgttatgaccttttctgacactgaaaaagcacgttgggataaaattgaaaagctagtaggtgataaagctaaaatcaaatttacagaatttacagattatacacaaccaaatcaagcgacagccaataaggatgtggatattaatgcctttcaacattacaatttcttagaaaactggaataaggaaaataagaaaaacttaattccacttgaaaagacttacttagctccaattcgtatctattctgagaaggtaaaatctcttaaaaaattgaaaaaaggagccactattgcaattccaaatgatgcaacaaatggtagccgtgcattgtatgtccttcagtcagcaggtttaatcaaattgaatgtttctggtaagaaggttgcaacagttgctaatatcacatctaataaaaaggatattaatattcaggagttagatgcgagtcaaacaccacgtgcactcaaagatgtagatgcagctattattaataatacatacattgagcaagctaatttaaaaccttcagatgctatctttgttgagaaatcagataaaaattcaaaacaatggattaatatcattgcgggacgtaaaaattggaaaaagcaaaagaacgctaaagctatccaagctatcttggatgcttatcacacagatgaagtgaaaaaagttatcaaagatacttcagctgatattccacaatgg

SEQ ID NO: 5664 - protein, 294 aa, Streptococcus agalactiae
MILITSYGIISLSQKLREFIMKLKHIVLGLALTTLLGVTFSNQEVSASSTSSKVVKVGVMTFSDTEKARWDKIEKLVGDKAKIKFTEFTDYTQPNQATANKDVDINAFQHYNFLENWNKENKKNLIPLEKTYLAPIRIYSEKVKSLKKLKKGATIAIPNDATNGSRALYVLQSAGLIKLNVSGKKVATVANITSNKKDINIQELDASQTPRALKDVDAAIINNTYIEQANLKPSDAIFVEKSDKNSKQWINIIAGRKNWKKQKNAKAIQAILDAYHTDEVKKVIKDTSADIPQW

SEQ ID NO: 5665 - DNA, 1374 bp, Streptococcus agalactiae
atgactttaacaaacgaagaaaatcaaattcaaaagtttctatctgatactattgttcaggatgatatcaatattttaagagatttaattgcaattaagtcaatttttgctcagaaagttggtttaaatgacttatcaagctatcttggagaagttttcataaaagctggcgcagaagtcattatagatgacagctatagcgctccctttatcgtggcaaatttcaaatcatcaaaagtagatgctaagcgtattattttttacaatcattatgatactgtaccagcagatgaggtagaacagtggactgaggacccttttacactttcacttcgatatggtaagatgtatggacgtggtgtagatgatgataaaggtcacattaccgcacgtttatcagcagttaaaaaatatttatcaagacacaaaggggaacttcctctagatatcacttttattgtggaaggagcagaggaatcagcttcagtaggccttgattattatttagaaaagtatcaagagcagctacaaggggctgatttgatcgtgtgggaagatggccctaaaaatcctaaaggacagttggaaattgctggtggaaataaaggcattgtcacttttgatttatcagtaagttcagcggatgttgatattcattcatcctttggtggggttgttgattcctcgacatggtatttaattcaagccctcaatacgttaagggataacaaaggtcatatattggtagaaggtatttatgataaagttattccccctactaagagagagttagaattagttgaaaaatattcttatagatctgcaaaggcgctagaaggtgcttaccaattagttttgcccagtttagcagatagtcataaaacttttttgagaaagctttattttgaaccttctatagccattgaaggtataacctcaggttatcaaggtgaaggcgtcaaaacaattttacctgcttatgctaaatgtaaagcagaggttaggttagtaccagggttaaccccgaaaggtgtactagattcaatacaaaatcatttgaaagagaatggctttaaagacattgagctaacctatacccttggtgaaatgtcttatcgtagtgatatgtcagcgccatctatcctaaaggttgttgatttagctgagcaattttatccagaagggatatctctgttacctacctcaccaggtacaggaccaatgtatttagttcatcaagctctaagagcgccaattgcagctattggcataggacatgccaatagtcgagaccatggcgttgatgaaaatgttagtattgctgattattacacccatattgaattagtggaggctttaatagaatcatatgag

SEQ ID NO: 5666 - protein, 458 aa, Streptococcus agalactiae
MTLTNEENQIQKFLSDTIVQDDINILRDLIAIKSIFAQKVGLNDLSSYLGEVFIKAGAEVIIDDSYSAPFIVANFKSSKVDAKRIIFYNHYDTVPADEVEQWTEDPFTLSLRYGKMYGRGVDDDKGHITARLSAVKKYLSRHKGELPLDITFIVEGAEESASVGLDYYLEKYQEQLQGADLIVWEDGPKNPKGQLEIAGGNKGIVTFDLSVSSADVDIHSSFGGVVDSSTWYLIQALNTLRDNKGHILVEGIYDKVIPPTKRELELVEKYSYRSAKALEGAYQLVLPSLADSHKTFLRKLYFEPSIAIEGITSGYQGEGVKTILPAYAKCKAEVRLVPGLTPKGVLDSIQNHLKENGFKDIELTYTLGEMSYRSDMSAPSILKVVDLAEQFYPEGISLLPTSPGTGPMYLVHQALRAPIAAIGIGHANSRDHGVDENVSIADYYTHIELVEALIESYE

SEQ ID NO: 5667 - DNA, 1068 bp, Streptococcus agalactiae
atgagtaaagaaccaattattaaattagacaacattgatgttactttccaccaaaagaaacgtgagattaatgctgttaaagatgttactatccatattaatcaaggtgatatatatggaattgtcggttattcaggagccggaaaatctacccttgttcgtgttattaatttgctacaagaaccttcagcaggtaaaattactattgatgaccaagttatttacgacaacaaggtgacactgactagcacacaattacgcgaacagcgccgtgaaattggaatgatttttcaacattttaacctaatgtcacagttgacagcagagcagaatgtagcttttgctcttaaacattcaggtttatcaaaagaggcgaaagcagctaaggttgctaaattattagaacttgttggattatccgatcgtgctcaaaactatccttcacaattatcaggagggcaaaaacagcgtgttgccattgcgcgtgcattggctaacgatcctaaaatcttaatttcagatgagtctacctctgcacttgaccctaaaacaacaaaacaaatacttgcccttctccaagatctgaataaaaaattgggacttacgattgttttgattacacatgagatgcaaattgtcaaagacattgctaatcgcgttgctgttatgcaaaatggtaaattgattgaagaaggatcagttttagacattttttcacatcctagagagagtcttacacaagattttataaaaatagctactggtattgatgaggcaatgcttaagattgagcaacaagaagttgtcaaaaatctaccagtaggtagcaaattagttcaactgaaatacgctgggcatagcacggatgagccgcttttaaatcaaatttataaagaatttgaagtaactgctaacatcctctatgggaatattgaaattttagatggtattccagttggagaaatggtagttatcttatcaggtgacgaagaaaaattaagacaagcctgccaagcaattacagattcgcaagttcaattaacgttattgaaagaaggtggtaaagca

SEQ ID NO: 5668 - protein, 356 aa, Streptococcus agalactiae
MSKEPIIKLDNIDVTFHQKKREINAVKDVTIHINQGDIYGIVGYSGAGKSTLVRVINLLQEPSAGKITIDDQVIYDNKVTLTSTQLREQRREIGMIFQHFNLMSQLTAEQNVAFALKHSGLSKEAKAAKVAKLLELVGLSDRAQNYPSQLSGGQKQRVAIARALANDPKILISDESTSALDPKTTKQILALLQDLNKKLGLTIVLITHEMQIVKDIANRVAVMQNGKLIEEGSVLDIFSHPRESLTQDFIKIATGIDEAMLKIEQQEVVKNLPVGSKLVQLKYAGHSTDEPLLNQIYKEFEVTANILYGNIEILDGIPVGEMVVILSGDEEKLRQACQAITDSQVQLTLLKEGGKA

SEQ ID NO: 5669 - DNA, 690 bp, Streptococcus agalactiae
atgatagagtggattcaaacacatttaccaaatgtatatcaaatgggttgggaaggtgcttacggctggcagacagctattgtacaaaccctttatatgactttttggtcgttccttattggaggtttaatgggattgttaggaggtttattccttgttttaactagtcctagaggagttattgctaataaattagtatttggagttttagataaagttgtttctgtttttagagctctgcccttcattattcttcttgctttgattgcgccagtaactcgcgtaattgtaggaacaacacttggttcaccagcagctttggtacctctttctttggcagttttcccattttttgctcgtcaagttcaagttgttttagctgaacttgatggtggagttattgaggctgcacaagcctcaggtggaacactttgggatattattgtagtttatcttcgtgaaggtctaccagatttaattcgagtatcaacggttactttgatttctttagtaggtgaaacagctatggctggcgctattggtgcaggaggattgggttctgttgctattactaaaggatataactattctcgtgatgatattactttagtagcgactattctgattttattattaattttctttatccaatttttaggtgattttttaacacgtcgcttgagtcataaa

SEQ ID NO: 5670 - protein, 230 aa, Streptococcus agalactiae
MIEWIQTHLPNVYQMGWEGAYGWQTAIVQTLYMTFWSFLIGGLMGLLGGLFLVLTSPRGVIANKLVFGVLDKVVSVFRALPFIILLALIAPVTRVIVGTTLGSPAALVPLSLAVFPFFARQVQVVLAELDGGVIEAAQASGGTLWDIIVVYLREGLPDLIRVSTVTLISLVGETAMAGAIGAGGLGSVAITKGYNYSRDDITLVATILILLLIFFIQFLGDFLTRRLSHK

SEQ ID NO: 5671 - DNA, 660 bp, Streptococcus pyogenes
atgtttatgaactcggatggtcatggagatgcaggttggggcttagcgatttggaatactttatacatgaccattgtgccttttattgttgggggggctattggtctcttattaggcttgttattagttttaacaggaccggacggtgttattgaaaacaaaacgatttgttgggttattgataaagttacctctatttttagagccattccttttgttattttgattgctattttagctagctttacctatttgcttttaagaacaactttaggagcaacagcggccttggtacctttaacctttgcgacttttcctttttatgcccgtcaggtccaagttgttttttcagaattagacaagggtgttattgaagcagcacaagcttcaggtgctactttctgggatattgtcaaagtgtatctcagtgaaggtttaccagatcttattcgtgtttctacagtcaccttaatttctttagttggggaaactgccatggcaggagctatcggtgctggaggattaggaaatgtagcgatttcttatggttataatcgttttaacaatgatgtgacttgggtagcgactattattattcttttaattatttttgctatccaatttattggtgatagcttgactagaaggtttagtcataaa

SEQ ID NO: 5672 - protein, 220 aa, Streptococcus pyogenes
MFMNSDGHGDAGWGLAIWNTLYMTIVPFIVGGAIGLLLGLLLVLTGPDGVIENKTICWVIDKVTSIFRAIPFVILIAILASFTYLLLRTTLGATAALVPLTFATFPFYARQVQVVFSELDKGVIEAAQASGATFWDIVKVYLSEGLPDLIRVSTVTLISLVGETAMAGAIGAGGLGNVAISYGYNRFNNDVTWVATIIILLIIFAIQFIGDSLTRRFSHK

SEQ ID NO: 5673 - DNA, 756 bp, Streptococcus agalactiae
ttgccttcacattgtgaagatggcgggtggattttaggacatcttattgaaggtactcaagcagaatatgttcatattccacatgcagatggtagcctttatcatgcacctgaaggtgtttgtgacgatgcattggttatgttatctgatattttaccaacttcatacgaaatcggcgtcttaccttctcacattaaaccaggtgatactgtttgtattgtaggcgctggaccaattggactatctgccttactaactgcacaattctattctcctgccaaaattattatggttgatttatctcaaaaacgacttgaagcctctaaaaaatttggtgcaacacacaccattctatcaacgtctactcaagaagttaaagaagaaattgataaaattaccaaaggccgtggcgttgatgtcgtattagaatgtgttggttatcctgcaacatttgatatttgtcaaaatgtagtttctattggaggacatatcgcaaatgttggtgttcatggtaaacctgttgaatttaacctccaagatttatggataaaaaatataacccttaatactggattagttaatgctaatacaactgaaatgctccttgaagttcttgagacaggcaaaatcgatgcaacacaactagtaacacatcacttcaagctatctgaaatcgaagaagcttataaggtatttaaagctgctgaagaaaacaatactctcaaagttatcatcgaaaacgatattactccagcc

SEQ ID NO: 5674 - protein, 252 aa, Streptococcus agalactiae
MPSHCEDGGWILGHLIEGTQAEYVHIPHADGSLYHAPEGVCDDALVMLSDILPTSYEIGVLPSHIKPGDTVCIVGAGPIGLSALLTAQFYSPAKIIMVDLSQKRLEASKKFGATHTILSTSTQEVKEEIDKITKGRGVDVVLECVGYPATFDICQNVVSIGGHIANVGVHGKPVEFNLQDLWIKNITLNTGLVNANTTEMLLEVLETGKIDATQLVTHHFKLSEIEEAYKVFKAAEENNTLKVIIENDITPA

SEQ ID NO: 5675 - DNA, 204 bp, Streptococcus agalactiae
ttgaaaataaataatttttggaggaactctaatatgagagctgcaacttatctttcagctaatgaattatcacttactgataaggctaaacctcaagtaataaaacccacagatgcggttgtaagwcttgtcaracwaccatttgtggtactgatctacatatccttggtggcgatgttcctgcttgtaaaccaggaacaactt

SEQ ID NO: 5676 - protein, 68 aa, Streptococcus agalactiae
  MISC_FEATURE (1)..(68): Xaa = Any Amino Acid
MKINNFWRNSNMRAATYLSANELSLTDKAKPQVIKPTDAVVXLVXXPFVVLIYISLVAMFLLVNQEQL

SEQ ID NO: 5677 - DNA, 192 bp, Streptococcus agalactiae
atggcaaagaaaggtccaatagataggtatagtgctactgcaaagaaaatagcatatgttttagagacaggtttggtgaagctttcaacatcggttgctcctgagtacgccacagctgcaacaccaagtaggggtaaagttacgcctgttaagcagaacccaatgatagcccacgcccaattagaaccagag

SEQ ID NO: 5678 - protein, 64 aa, Streptococcus agalactiae
MAKKGPIDRYSATAKKIAYVLETGLVKLSTSVAPEYATAATPSRGKVTPVKQNPMIAHAQLEPE

SEQ ID NO: 5679 - DNA, 762 bp, Streptococcus agalactiae
atggatgcccttgcatcaattgcttttgctattatcgttattcaagcaagtaaacagtacggagcaattaccaaaaaagaaattacttctatggcacttaaatctggtgctatcgctacatttcttttagcttttatttatatttttgtaggacgtattggtgcaacttcacaaagcttgtttaaatttgcaaatggttccttcttacttcacaatactccaatagacggtgggcatgttcttagtcaatcagctaacttctatttaggaattgtgggacaagctattttaggtacggctatttttcttgcttgcttaacaacagctactggattaatcactgcttgtgcggaatacttccacaaattacttccaaagattagtcacattacttgggctacaatctttactttaattgctattacgttctattttggtggtttatcagagattatccgttggtcactaccagttctctaccttctctatccattaactatagtcttaattttcttagtcttttttgatcaaaaatttgaaagtagccgcattgtctaccaaacttctattgccgccactgctgtcgctgctttatacgatgccttatcaaaactcggcgaaatgactggtttatttaccattccatccgctttgaccacattctttactaaagttgttcctttaggtgaatattctatgggatggattagttttgcaatttgtggtgtcttagttggtcttattctaaaaaaagtaaaagca

SEQ ID NO: 5680 - protein, 254 aa, Streptococcus agalactiae
MDALASIAFAIIVIQASKQYGAITKKEITSMALKSGAIATFLLAFIYIFVGRIGATSQSLFKFANGSFLLHNTPIDGGHVLSQSANFYLGIVGQAILGTAIFLACLTTATGLITACAEYFHKLLPKISHITWATIFTLIAITFYFGGLSEIIRWSLPVLYLLYPLTIVLIFLVFFDQKFESSRIVYQTSIAATAVAALYDALSKLGEMTGLFTIPSALTTFFTKVVPLGEYSMGWISFAICGVLVGLILKKVKA

SEQ ID NO: 5681 - DNA, 228 bp, Streptococcus agalactiae
  misc_feature (1)..(228): n = a, c, g, or t
atgcctacaattaaccagttggtacgtaaaccacgtaaatctaaagttgaaaaatcagattcacctgctttgaatattggttacaacagtcacagaaaagttcacactaaattatctgcaccacaaaaacgtggtgttgcaactcgtgttggaactatgacacctaaaaaacctaactctgcccttcgtaaatttgctcgtgtacgtttgagcannnnnttaattaat

SEQ ID NO: 5682 - protein, 76 aa, Streptococcus agalactiae
  MISC_FEATURE (1)..(76): Xaa = Any Amino Acid
MPTINQLVRKPRKSKVEKSDSPALNIGYNSHRKVHTKLSAPQKRGVATRVGTMTPKKPNSALRKFARVRLSXXLIN

SEQ ID NO: 5683 - DNA, 342 bp, Streptococcus pyogenes
ttgaacattggttacaacagtcacaaaaaagttcaaactaaaatggctgccccacaaaaacgtggcgttgctactcgtgttggaacaatgacacctaaaaaacctaactcagcccttcgtaaattcgctcgtgtacgtttgagcaaccttatcgaagtaactgcctacatcccaggtatcggacacaacttgcaagagcacagcgttgttcttatccgtggcggacgtgtaaaagaccttccaggggtacgttaccatatcgttcgtggcgcacttgatactgcaggtgttgctgaccgtaaacaaggccgttctaaatacggtgcgaaacgtccaaaagga

SEQ ID NO: 5684 - protein, 114 aa, Streptococcus pyogenes
LNIGYNSHKKVQTKMAAPQKRGVATRVGTMTPKKPNSALRKFARVRLSNLIEVTAYIPGIGHNLQEHSVVLIRGGRVKDLPGVRYHIVRGALDTAGVADRKQGRSKYGAKRPKG

SEQ ID NO: 5685 - DNA, 810 bp, Streptococcus agalactiae
atgaaattaagacgtagcgaacgcatggttgttatttcaaattacctaataaataatccctatacattaactagtttaaatacatttgctagtaaatacggtgccgcgaaatcttcgatttcagaagatattgctattatcaaaaaagcttttgaacaagctcaaatcggagatattaaaactgtgactggtgcaagtggaggtgttatctttacaccaactattgctgaagcagaagcgaaagaaatcgttgaagaattaagacagcgtttatctgaaaacgatcgtattcttccgggaggttacatttatctttcagatctactcagtacaccaaaaatgttacaaagtattggtcgcattatagcgaacgcttacagaggtcaaaaaattgatgctgtcatgacggttgcaacaaaaggtgttcctttagcaaacgcagtagcaaatgttttagatgttccttttgttattgtgagacgtgatttgaagattacggaaggttctactgtgtcagtaaactacgctagtggttcaagtggccgtattgaaaaaatgtttctttctaagcgtagcttaaaacctaacagtcgagttttaatagttgatgatttcttgaaaggtggaggtactgtttcggggatgattagtttactctcagaattcgatagcacattagtaggtgtcgctgtatttgcagaaaatgctcaggaacaacgtgagaagatggcctataaatctcttctgagagtatctgaaattgatgtaaaaaataatagagtctctgtagaagcggggaatatatttgat

SEQ ID NO: 5686 - protein, 270 aa, Streptococcus agalactiae
MKLRRSERMVVISNYLINNPYTLTSLNTFASKYGAAKSSISEDIAIIKKAFEQAQIGDIKTVTGASGGVIFTPTIAEAEAKEIVEELRQRLSENDRILPGGYIYLSDLLSTPKMLQSIGRIIANAYRGQKIDAVMTVATKGVPLANAVANVLDVPFVIVRRDLKITEGSTVSVNYASGSSGRIEKMFLSKRSLKPNSRVLIVDDFLKGGGTVSGMISLLSEFDSTLVGVAVFAENAQEQREKMAYKSLLRVSEIDVKNNRVSVEAGNIFD

SEQ ID NO: 5687 - DNA, 837 bp, Streptococcus pyogenes
atgaaattaagacgaagtgaacgtatggttgtcatttcaaattatttgattaacaatccgtataaattaactagtttaaacacctttgcaactaaatatgaggccgcaaaatcttctatctcagaagatatcgctattatcaagaaagcttttgaagaagctaacattggtgatatcgatacacttacaggagcaagtggaggcgtaatttttacccccagtatttcagaaacagaagcgcgtaccattgttgaagacctgtgtcaaaggttatcagagagtgatcgcatcttacctggaggctatatctatttgtcagacttgctgagtacacctaaaattttacaaaatattggtcgtattattgccaatgcctttaaaggagaaaagattgacgctgtgatgacagttgcaaccaaaggagttcctttagcaaatgcagtggctaatattttaagtgttccttttgtcattgttagacgtgatttaaaaataacagaaggatcgacagtgtctgtcaattatgcgagtgcttctagtgatcgtattgaaaagatgtttctgtcaaagcgtagtttgaaacccaatagtcgtgtattgattgtagatgatttcttgaagggcggggggacgattacaggaatgatcagtctcttgacagaatttgacagcactttagttggtgttgctgtgtttgcagaaaacgctcaatcagagcgtgagcaaatgaccttcaaatcattgctgaaagtttcagagattgatgtcaaaaacaacaatgttgttgtagaagttggtaatattttcgataaatggaaaaaggagagagaatggact

SEQ ID NO: 5688 - protein, 279 aa, Streptococcus pyogenes
MKLRRSERMVVISNYLINNPYKLTSLNTFATKYEAAKSSISEDIAIIKKAFEEANIGDIDTLTGASGGVIFTPSISETEARTIVEDLCQRLSESDRILPGGYIYLSDLLSTPKILQNIGRIIANAFKGEKIDAVMTVATKGVPLANAVANILSVPFVIVRRDLKITEGSTVSVNYASASSDRIEKMFLSKRSLKPNSRVLIVDDFLKGGGTITGMISLLTEFDSTLVGVAVFAENAQSEREQMTFKSLLKVSEIDVKNNNVVVEVGNIFDKWKKEREWT

SEQ ID NO: 5689 - DNA, 939 bp, Streptococcus agalactiae
atgaaaattaaccaaatgaaaaaagacgagctttttgaggggttttaccttataaagaaagcagaagttcgtaaaacgcgtgcaggtaaagactttattgcctttacctttcaagatgatactggcgaaatttcaggaaatatgtgggatgcacagacctataatgtagaagagtttgtagccggtaaaattgttcatatgaaagggcgtcgtgaagtttataatggaactccccaagtcaaccaaattacattaagaaacatcaaagatggtgaacctaatgatcctagagattttaaagaaaaacctccaatcaatgttgacaacgtgagagagtacatggaacaaatgctctttaaaattgaaaatgcaacctggcagcgtgtggtaagagcactttatcgtaaatacaataaggaattttttacctatccagccgccaaaacaaaccaccacgcttttgaatcaggattggcatatcacacggcaacaatggttcgtttggcagatagtatcggagatatctatccagaacttaataaaagtttgatgtttgctggtattatgctacatgatttagccaaggtcattgagttatcgggtcctgataatacagaatatactattcgaggtaatcttatcggtcatatttcacttattgatgaggaattaacaaaaatactagcagagcttaatattgatgatacaaaagaagaggttacagtgttacgccatgttattctgagtcatcatggacaattagaatatggaagcccggttcgtcctagaatcatggaggcagaaattatccatatgatcgataacattgatgcaaatatgatgatgatgacaacagctttaaaccgtgtcaacgaaggtgaaatgacaaatcgcatttttgccatggataaccgttctttttataaaccgaacattaaa

SEQ ID NO: 5690 - protein, 313 aa, Streptococcus agalactiae
MKINQMKKDELFEGFYLIKKAEVRKTRAGKDFIAFTFQDDTGEISGNMWDAQTYNVEEFVAGKIVHMKGRREVYNGTPQVNQITLRNIKDGEPNDPRDFKEKPPINVDNVREYMEQMLFKIENATWQRVVRALYRKYNKEFFTYPAAKTNHHAFESGLAYHTATMVRLADSIGDIYPELNKSLMFAGIMLHDLAKVIELSGPDNTEYTIRGNLIGHISLIDEELTKILAELNIDDTKEEVTVLRHVILSHHGQLEYGSPVRPRIMEAEIIHMIDNIDANMMMMTTALNRVNEGEMTNRIFAMDNRSFYKPNIK

SEQ ID NO: 5691 - DNA, 936 bp, Streptococcus pyogenes
atgaaaattaatcaaatgaaaaaagaccagctttttgaagggttctacctcattaagtcggcagaggttcgtaagacaagagctggtaaagattttattagccttacctttcaggatgacactggcgagatttcaggaaatctgtgggatgcccaaccttataacgttgaagaatttactgctggtaaagtcgtgtttatgaaagggcgacgcgaggtgtataatggtacccctcaggttaatcaaatcaccttgcgaaatgttcgcccaggtgagcccaatgatccaaaggacttcaaagaaaaggcacctgtcagtgtgacagaagtacgtgactatttggaacagatgctctttaaaattgaaaatgcaacgtggcaacgaattgtaagggctctttatcgtaagtatgataaagaattttatacttatcctgcagctaaaacaaaccaccatgcttttgagtcaggcctcgcctaccatactgctacgatggtcagactagcagatagcattggagatatctaccctgacttaaataagagtctactgtttgcaggtattatgttacatgacttagctaaagtcatagaattaacaggaccagataatacagaatacaccgttcgtggtaacttgattgggcatatttctctcattaacgaagaaattacaaaagtaatttcagaactacaaatcgatgataccaaagaagaagtcattgtccttaggcacgtgattttaagccatcacgggcaattagaatacggtagtccggtacgtccacgcatcatggaagctgaaattattcatatgattgacaatattgatgctaatatgatgatgatgacaacagctcttagccgtgttagcgagggcgagatgaccaatcggatttttgccatggataatcggtctttttacaagccaaactat

SEQ ID NO: 5692 - protein, 312 aa, Streptococcus pyogenes
MKINQMKKDQLFEGFYLIKSAEVRKTRAGKDFISLTFQDDTGEISGNLWDAQPYNVEEFTAGKVVFMKGRREVYNGTPQVNQITLRNVRPGEPNDPKDFKEKAPVSVTEVRDYLEQMLFKIENATWQRIVRALYRKYDKEFYTYPAAKTNHHAFESGLAYHTATMVRLADSIGDIYPDLNKSLLFAGIMLHDLAKVIELTGPDNTEYTVRGNLIGHISLINEEITKVISELQIDDTKEEVIVLRHVILSHHGQLEYGSPVRPRIMEAEIIHMIDNIDANMMMMTTALSRVSEGEMTNRIFAMDNRSFYKPNY

SEQ ID NO: 5693 - DNA, 1272 bp, Streptococcus agalactiae
atgcttgtcatcattttgatcattgtactagctagtctgacagtgacgataatttcttaccaaaaaatgacggaattaacaaagtccgttgaaaaacaacttgaagataatgctgataatctatcagaccaactgacatatcagatagaagtggcgcaaaaagatcaaattctaacgttgactaatcagctaaaccgtatgcaacaggaaatttatcagttgcttaccgatatgcgtacagaattaaatcagcatttaacggagagtcgagatcgatcagacaaacgcttggaattgattaactccaatttatctcagtcagttcagaaaatgcaagattccaatgaaaaacgcttggatcaaatgcgccaaactgttgaggaaaagctagaaaaaacgctacaaacgcgtttgcaaacttcttttgaaactgtatcgcgtcaactagagagcgtcaatcaaggtcttggggagatgaaaactgttgcccaagatgttggtacactgaacaaagtcttgtcaaatactaagacaaggggaatattaggggagttacaactcggccaaattatagaagatattatgacagttagtcaatatgagagagaatttcctacggtgtctggctcttctgagcgtgttgaatatgctattaaattacctggaaatggtcagggagattatatctatttgcctattgactctaagtttcctctagaagattattaccgattggaagatgcttatgaattgggtgacaaggttcaaatagaactctatcgtaaatctttactggcaagtattcgtaaatttgcaaaagatataaacaataagtacttaaatcctcctgaaacgacaaattttggtatcatgttcttaccaactgaagggctctattctgaagtggtaagaaatgcaacattctttgatagtctaagacgtgacgaaaatattgtagtagctggaccgtcaaccttatctgctttactaaattcattatctgttggctttaaaaccttaaatattcaaaagaatgctaatgatattagtaaaattttagggaatgtcaaggttgaatttggaaaatttggtggcatgttatcaaaagctcaaaaacaattaaatacagcaagtaaaagtattgatagtttactcacaacgcggacaaacgctattatcagagtcttaaatacagttgaagaacatcaagatcaagcaaccactagcttgttaaaccttcctataacagaagaagaggaaattaatgaaaat

SEQ ID NO: 5694 - protein, 424 aa, Streptococcus agalactiae
MLVIILIIVLASLTVTIISYQKMTELTKSVEKQLEDNADNLSDQLTYQIEVAQKDQILTLTNQLNRMQQEIYQLLTDMRTELNQHLTESRDRSDKRLELINSNLSQSVQKMQDSNEKRLDQMRQTVEEKLEKTLQTRLQTSFETVSRQLESVNQGLGEMKTVAQDVGTLNKVLSNTKTRGILGELQLGQIIEDIMTVSQYEREFPTVSGSSERVEYAIKLPGNGQGDYIYLPIDSKFPLEDYYRLEDAYELGDKVQIELYRKSLLASIRKFAKDINNKYLNPPETTNFGIMFLPTEGLYSEVVRNATFFDSLRRDENIVVAGPSTLSALLNSLSVGFKTLNIQKNANDISKILGNVKVEFGKFGGMLSKAQKQLNTASKSIDSLLTTRTNAIIRVLNTVEEHQDQATTSLLNLPITEEEEINEN

SEQ ID NO: 5695 - DNA, 1269 bp, Streptococcus pyogenes
atggaccttatcttgttccttttggtcttggttctcttaggtttaggggcttatctgttgttcaaagtcaacggccttcaacatcagcttgcccaaaccctagaaggcaacgcggataatttgtctgaccaaatgacctaccagttggatacagctaacaaacaacaattgttagagctaacacagctgatgaaccgacaacaagcaggcctttaccaacaattaacagatattcgtgacgtcttgcaccgtagtttgtctgatagtagggaccggtctgacaaacgcttagaaaaaattaaccagcaggtcaaccaatcgctcaaaaatatgcaagaatctaacgaaaaacgtttggagaaaatgcgccagatcgttgaagaaaaattggaagaaaccttaaaaaatcgtctgcacgcctctttcgattctgtatccaagcaactagaaagtgtcaataaaggcttgggagaaatgcgtagcgtggctcaagatgtgggtactttaaataaggttttgtccaataccaaaacacgaggcattttaggcgaacttcaactaggccaaatcattgaggatatcatgacatcaagccagtacgaaagagaatttgtaacggttagtggttctagtgaacgcgtagaatatgcgattaagctcccaggaaatggtcaaggcggttatatttacctaccgattgactcaaaattccctcttgaagattattaccgattagaagatgcttacgaagttggtgataaactggccatcgaggctagccgaaaagcacttctggcagctatcaaacgctttgccaaagacattcataaaaagtacttgaaccccccagagacgaccaatttcggagttatgttcttaccaacagaaggtctttattcagaagtggtcagaaatgcgtctttctttgatagccttcgtcgggaagaaaatattgtggttgcaggcccttcgaccctgtctgctttgctgaattccttatctgttggtttcaagacccttaatatccaaaaaaatgctgatgacatcagtaaaattttaggcaatgtcaagttagaattcgataaatttggcggcctgcttgccaaggctcaaaaacaaatgaatacagctaataatacgctggatcagctcatttcaacaaggacaaatgccattgttcgagccttgaataccgttgaaacttatcaagaccaagcaacaaaatctctcttgaacatgcccttattagaagaggaaaataatgaaaat

SEQ ID NO: 5696 - protein, 423 aa, Streptococcus pyogenes
MDLILFLLVLVLLGLGAYLLFKVNGLQHQLAQTLEGNADNLSDQMTYQLDTANKQQLLELTQLMNRQQAGLYQQLTDIRDVLHRSLSDSRDRSDKRLEKINQQVNQSLKNMQESNEKRLEKMRQIVEEKLEETLKNRLHASFDSVSKQLESVNKGLGEMRSVAQDVGTLNKVLSNTKTRGILGELQLGQIIEDIMTSSQYEREFVTVSGSSERVEYAIKLPGNGQGGYIYLPIDSKFPLEDYYRLEDAYEVGDKLAIEASRKALLAAIKRFAKDIHKKYLNPPETTNFGVMFLPTEGLYSEVVRNASFFDSLRREENIVVAGPSTLSALLNSLSVGFKTLNIQKNADDISKILGNVKLEFDKFGGLLAKAQKQMNTANNTLDQLISTRTNAIVRALNTVETYQDQATKSLLNMPLLEEENNEN

SEQ ID NO: 5697 - DNA, 630 bp, Streptococcus agalactiae
atgactaaaattgctttatttgctggcggtgacttaacttattttgaatatgattttgactattttgtcggaattgaccgtggaagcctatttttattaaaaaatgggctttctttggacatggcagtgggtgattttgattctataacagaagatgaactgctttatatcaaacactattgtagcaatatcgtttctgctagtgcagaaaaaaatgatacagatacagaattagctttaaaaactattttcaaagaatttccagaagctcaggtgaccgtatttggagcatttggtggcaggattgaccatatgatgtctaatatctttttaccaagtgacagagatctagaaccatttatgtcacaaatcagactcaaagatgaacaaaacatagtgacttatctaccatccgggaaaaatcaagtctcaaggattgaagggatgtcctatgtctcgttcatgcctgagagtgagtctactttgcagatttctggggctaaatatgaattgaacaaaagtaattattttaagaaaaaaatgtattccagtaatgaatttatgacttcgccaattgaagtagagctcaaagatggttacttaatcattatttatagtaaggatagaggt

SEQ ID NO: 5698 - protein, 210 aa, Streptococcus agalactiae
MTKIALFAGGDLTYFEYDFDYFVGIDRGSLFLLKNGLSLDMAVGDFDSITEDELLYIKHYCSNIVSASAEKNDTDTELALKTIFKEFPEAQVTVFGAFGGRIDHMMSNIFLPSDRDLEPFMSQIRLKDEQNIVTYLPSGKNQVSRIEGMSYVSFMPESESTLQISGAKYELNKSNYFKKKMYSSNEFMTSPIEVELKDGYLIIIYSKDRG

SEQ ID NO: 5699 - DNA, 630 bp, Streptococcus pyogenes
atgtctaaagttgctctttttgcgggaggagatctctcttatatcagccgtgattttgattattttgtcggtattgatagagggagcctatttttattagaaaatgggcttcctttgaatatggctgttggtgattttgattcggtttcccaaaaagcgtttacggatataaaagagaaggcagagctttttattactgctcatccagaaaaaaatgatacggatacggaattagcccttaaagaggtctttgctcgttttcctgaggcggaagtgaccatttttggggcttttgggggtcgaatggaccacctcttatccaatattttcttgcctagcgaccctggtattgctccctttatggcacaaatcgccttgcgtgaccaacaaaatatgattacctaccgcccggcaggtcagcaccttatccatcaagaagaagggatgacctatgtggcatttatggcagaaggagaagctgacttgaccattactggtgctaaatttgagttgacgcaagataattttttcaaaaagaaaatctattccagtaatgcctttatccatcaacctattacagttagtttgccaagtggctacttgattattattcaaagtaaagattggagt

SEQ ID NO: 5700 - protein, 210 aa, Streptococcus pyogenes
MSKVALFAGGDLSYISRDFDYFVGIDRGSLFLLENGLPLNMAVGDFDSVSQKAFTDIKEKAELFITAHPEKNDTDTELALKEVFARFPEAEVTIFGAFGGRMDHLLSNIFLPSDPGIAPFMAQIALRDQQNMITYRPAGQHLIHQEEGMTYVAFMAEGEADLTITGAKFELTQDNFFKKKIYSSNAFIHQPITVSLPSGYLIIIQSKDWS

SEQ ID NO: 5701 - DNA, 660 bp, Streptococcus agalactiae
atgtcaaccaataaaattgccccatcgatattagcagcagactatgctaattttgctaacgaattgaaacgtattgaagagacaacagcagaatacgttcatattgatatcatggatggtcaatttgtccctaatattagttttggtgcggatgttgtatccagcatgcgtaaacacagtaaacttgtttttgattgtcatctgatggttgttgatccagaacgttatattgaggcttttgctcaagctggtgctgatatcatgaccattcatgttgaagcaacgaaacatatacatggtgcgcttcaaaagataaaagaggcaggaatgaaagcaggtgtggttattaacccaggaacacccgtagaatctcttattcctatcttagatttggttgaccagattttaattatgactgttaatcctggctttggtggacaagcctttattccagaaatgatgtcaaaagtaaagacagttgcagcatggcgcaaagagtacggtcatcattatgatattgaagttgatggcggtatagataatactacaattaaggcagcagcagaggctggtgcaaatgtctttgttgcaggttcttatctctttaaagcaagtgatttacctgcacaagtagaaaccttaagggtggcgctcgatgac

SEQ ID NO: 5702 - protein, 220 aa, Streptococcus agalactiae
MSTNKIAPSILAADYANFANELKRIEETTAEYVHIDIMDGQFVPNISFGADVVSSMRKHSKLVFDCHLMVVDPERYIEAFAQAGADIMTIHVEATKHIHGALQKIKEAGMKAGVVINPGTPVESLIPILDLVDQILIMTVNPGFGGQAFIPEMMSKVKTVAAWRKEYGHHYDIEVDGGIDNTTIKAAAEAGANVFVAGSYLFKASDLPAQVETLRVALDD

SEQ ID NO: 5703 - DNA, 660 bp, Streptococcus pyogenes
atgtcaactctaaaaattgccccatctattctagcagctgattatgctaattttgcttctgagctagctcgtattgaagaaacagatgccgaatacgttcacattgatattatggatggtcaatttgttcctaacatcagttttggtgcagatgttgtggcaagtatgagaaagcacagtaaattggtctttgattgccatctaatggtggttgatcctgaacgctatgttgaggcttttgcacaagctggtgctgatatcatgaccattcacacagaaagtactcgtcatattcatggagcccttcaaaaaatcaaggcagctggcatgaaagcaggggtagtgattaatccaggaactcctgcaacagccctagaacctttgctagacttagttgaccaagtcctcattatgacagtcaacccaggttttgggggtcaggcctttatcccagaatgtttagaaaaagtggctaccgtagccaaatggcgagatgaaaaaggattgtcctttgacattgaggttgatggcggagtagacaataagaccattcgtgcttgttatgaagcaggggccaatgtctttgtggcaggttcttaccttttcaaggccagtgacctagtgagccaagtccaaaccttaaggacggccttgaatgtc

SEQ ID NO: 5704 - protein, 220 aa, Streptococcus pyogenes
MSTLKIAPSILAADYANFASELARIEETDAEYVHIDIMDGQFVPNISFGADVVASMRKHSKLVFDCHLMVVDPERYVEAFAQAGADIMTIHTESTRHIHGALQKIKAAGMKAGVVINPGTPATALEPLLDLVDQVLIMTVNPGFGGQAFIPECLEKVATVAKWRDEKGLSFDIEVDGGVDNKTIRACYEAGANVFVAGSYLFKASDLVSQVQTLRTALNV

SEQ ID NO: 5705 - DNA, 870 bp, Streptococcus agalactiae
ttgcaaggtagaattgtcaagtcgctagcaggtttttattatgtggaatctgacggtgttgtttatcagacacgtgcgcgtggaaattttagaaaaaaaggtcaaattccctacgttggggattgggttgaattttcttcgcaagatcaatcagaaggatatattctatcaattgaagagcgtaaaaatagcctcgtacgaccacctattgttaatattgatcaagctgtcgttatcatgtctgctaaagaacctgattttaacgctaacttattagaccggttcttagtacttctagaatataagatgattcagcctatcatttatatttccaagttggatttgttagacgatttggttgttattgatgatattcgcgaacattatcagaatataggctacgttttctgttattctcaagaggaactcttgcctctgttagcaaataaagtgactgtttttatgggccagacaggtgtcggaaaatcaacgcttctcaacaaaattgctcctgagttgaaacttgaaactggtgaaatttcgggtagtttaggccgtggccgacacaccacaagagcagttagtttctataacgttcataaaggaaaaattgcagacactcctggtttttcttctttggactatgaagtggataatgcagaggacttaaacgaatcctttccagagcttcgtagacttagtcatttttgtaaattccgctcgtgtacgcatacacatgagcctaaatgtgctgtaaaagaagccttaactcaaggtcagttatggcaagtccgctatgataactacctccaatttttaagtgaaattgagagccgtcgtgaaacatataagaaagttattaaaagaaag

SEQ ID NO: 5706 - protein, 290 aa, Streptococcus agalactiae
MQGRIVKSLAGFYYVESDGVVYQTRARGNFRKKGQIPYVGDWVEFSSQDQSEGYILSIEERKNSLVRPPIVNIDQAVVIMSAKEPDFNANLLDRFLVLLEYKMIQPIIYISKLDLLDDLVVIDDIREHYQNIGYVFCYSQEELLPLLANKVTVFMGQTGVGKSTLLNKIAPELKLETGEISGSLGRGRHTTRAVSFYNVHKGKIADTPGFSSLDYEVDNAEDLNESFPELRRLSHFCKFRSCTHTHEPKCAVKEALTQGQLWQVRYDNYLQFLSEIESRRETYKKVIKRK

SEQ ID NO: 5707 - DNA, 870 bp, Streptococcus pyogenes
ttgcaaggtaaaatcattaaatctctggctggtttttattacgtggagtcagaaggacaggtatatcagacgcgagcgcgtggtaattttaggaagcgcggtgagacaccttatgttggagatatcgtggatttctcagcagaggacaactctgaaggttatattttagcgattcatcctcgtaaaaacagtttggtaagacctcctatcgtcaatattgatcaagcagtggttattatgtctgctaaagaaccagaatttaacagcaatcttctagaccgctttctcatcttgcttgaacacaaagccattcatccagtggtttatatctctaagatggacttattagatagtcccgaggagattaaggctattggtcgacagtatcaggcaatcggttacgattttgtgaccagtcttgaggaattgctgcctttgctagctgataaaattaccgtctttatgggacaaacaggtgttgggaaatcaacccttctcaaccgaatcgcccccgaattggctcttgaaataggagaaatctcagatagtctagggcgtggtcgtcacaccacccgagctgtgagtttttacaatacccatggcggaaaaatcgcggatacgccaggtttttcatcattagactatgatattgctaatgctgaagatttgaacgaggcttttccagagctgcgccggctgagccatgagtgtaagtttagatcctgtacccatacccacgaacccaagtgtgctgtcaaggcagcgcttgaaacgggagagttgtggccagttcgttatgagcattacctgcaatttctcagtgaaattgaaaaccgtcgtgaaacatataaaaaagttatcaaaagaaag

SEQ ID NO: 5708 - protein, 290 aa, Streptococcus pyogenes
LQGKIIKSLAGFYYVESEGQVYQTRARGNFRKRGETPYVGDIVDFSAEDNSEGYILAIHPRKNSLVRPPIVNIDQAVVIMSAKEPEFNSNLLDRFLILLEHKAIHPVVYISKMDLLDSPEEIKAIGRQYQAIGYDFVTSLEELLPLLADKITVFMGQTGVGKSTLLNRIAPELALEIGEISDSLGRGRHTTRAVSFYNTHGGKIADTPGFSSLDYDIANAEDLNEAFPELRRLSHECKFRSCTHTHEPKCAVKAALETGELWPVRYEHYLQFLSEIENRRETYKKVIKRK

SEQ ID NO: 5709 - DNA, 849 bp, Streptococcus agalactiae
atgttggttgacaagaagtggcgttttgaagatagtgcaagttatttcgcttgtcctaaatgtcaaaatcccttgataaaagaaagtaatagcctcaaatgctctgataatcattgttttgatttatccaaatttggatatgttaatcttcttggaggaaagaaggtagatgaacattatgataaaaaatcatttgaaaatcggcagcttgtcttagaaaacgggtattataatcatattttagaagctatttcaaaggttttggaaaataattctcagtttcattcggttttagatattggttgtggagagggcttttattctcgtcaattagttaacaagcatgagaagactttcttggcttttgatatttctaaagattcgattcaattagctgctaaaagtgatcagtctaggcttgtgaaatggtttgtttctgatttagctaaccttcctattcaagactcatcaattgatatcattttagacattttttctcctgcaaattataaagaatttaggcgggtgctgagtgatgatggtatccttgtaaaggttgttcctgtagctgaacatgttcaagaattgcgagaaaaagctagtcaatacttgaaacagaaagattactctaatcaaaaaattctagatcactttagagaaaattttgaaattatttctgagcagaaagttgttcaaagctataactgttctcaacaagaacgtcaagcttttattgatatgacaccgttgttattcagcgtagataaaacgactattgattgggcgagtatatcagaaattacagtaggtgccttaatagtaattggaaaaaagcgcagtgtatctaaa

SEQ ID NO: 5710 - protein, 283 aa, Streptococcus agalactiae
MLVDKKWRFEDSASYFACPKCQNPLIKESNSLKCSDNHCFDLSKFGYVNLLGGKKVDEHYDKKSFENRQLVLENGYYNHILEAISKVLENNSQFHSVLDIGCGEGFYSRQLVNKHEKTFLAFDISKDSIQLAAKSDQSRLVKWFVSDLANLPIQDSSIDIILDIFSPANYKEFRRVLSDDGILVKVVPVAEHVQELREKASQYLKQKDYSNQKILDHFRENFEIISEQKVVQSYNCSQQERQAFIDMTPLLFSVDKTTIDWASISEITVGALIVIGKKRSVSK

SEQ ID NO: 5711 - DNA, 870 bp, Streptococcus agalactiae
atgagaatcgcagataaaaccgttacccgcgctattttggagcgtcatgggtttacatttaagaaatcattcggtcagaactttttgaccgatactaatattttacagaagattgttgacacggcagagattgacaagggtgtcaacgtgattgagattggtcctggtatcggggctttgacagagtttttggctgagaatgcagctgaggttatggcttttgagattgatgatcgtctcattcctatccttgctgatacgcttgcgcgttttgacaatgtccaagtggtcaatcaggatatcctcaaggctgatttgcagacccagattcaggctttcaagaatcctgatctgcctatcaaggtggtcgcaaacctaccttactacatcacaacaccaatccttatgcacttgattgagagcaagattccttttgcggagtttgtggtcatgatacaaaaagaagtggcagatcgtatttcagctatgccaaatactaaagcatacggttctttgtcaatcgcagtgcagtattatatgactgccaaagtatcatttatcgttccgagaactgtttttgttcctgctccaaatgtagattcagctattttgaaaatggtccgtagagatcaaccagtagtgagtgttcaagatgaggatttctttttcagagtgtcaaaagtagccttcgtacatcgtcgtaaaacactttggaataatctaacgagtcattttggaaaatcagaagatactaaagcaaaattggaaaaagcattagaaatagcaaaaattaagccatctattcgcggagaagccttatctatccctgattttgcaagtttagcagatgccttgaaagaggttgggata

SEQ ID NO: 5712 - protein, 290 aa, Streptococcus agalactiae
MRIADKTVTRAILERHGFTFKKSFGQNFLTDTNILQKIVDTAEIDKGVNVIEIGPGIGALTEFLAENAAEVMAFEIDDRLIPILADTLARFDNVQVVNQDILKADLQTQIQAFKNPDLPIKVVANLPYYITTPILMHLIESKIPFAEFVVMIQKEVADRISAMPNTKAYGSLSIAVQYYMTAKVSFIVPRTVFVPAPNVDSAILKMVRRDQPVVSVQDEDFFFRVSKVAFVHRRKTLWNNLTSHFGKSEDTKAKLEKALEIAKIKPSIRGEALSIPDFASLADALKEVGI

SEQ ID NO: 5713 - DNA, 894 bp, Streptococcus pyogenes
gtgatcataaaaagaagagaatatatgagaattgcagattatagcgtgaccaaggctgtccttgatcgtcacggatttacctttaagaaatcttttggtcagaactttttgaccgataccaatattttacagaaaatcgttgacacggctgagattgatcagaatgtcaatgttatcgagattggtcctggaattggggctttgacggaatttttggcagaaaatgctgctgaagtgatggcttttgagattgatgaccgcttggtgccgattttggcagataccttgcgcgattttgataatgtgcaagtggtcaatcaagatattttaaaagctgatttgcagacccaaatcaagcagtttaaaaatcctgatttgcccattaaggtggtggctaatctaccttactacatcacaacgcctattctcatgcacttgattgagagcaaaattccattccaagagtttgtggtcatgatgcagcgtgaagtggcagatcgtatttctgcggagccaaacactaaagcttatggttccttgtccattgcggtgcagtattacatgactgccaaggttgccttcattgtgccgcgcaccgtctttgtacctgcaccaaatgtcgatagtgctatcctcaaaatggtgcgtcgcgaccagcctttgattgaggttaaggacgaagatttctttttcagagtgtctcgtctcagttttgtccatcgtcgcaagaccctgtggaataacttgactagccattttgggaagtctgaagacatcaaggctaaacttgaaaaaggtctggcactagcagatatcaagccttctattcgtggtgaggccttgtcgattcaagattttggcaaattagctgatgctttaaaagaagttggatta

SEQ ID NO: 5714 - protein, 298 aa, Streptococcus pyogenes
VIIKRREYMRIADYSVTKAVLDRHGFTFKKSFGQNFLTDTNILQKIVDTAEIDQNVNVIEIGPGIGALTEFLAENAAEVMAFEIDDRLVPILADTLRDFDNVQVVNQDILKADLQTQIKQFKNPDLPIKVVANLPYYITTPILMHLIESKIPFQEFVVMMQREVADRISAEPNTKAYGSLSIAVQYYMTAKVAFIVPRTVFVPAPNVDSAILKMVRRDQPLIEVKDEDFFFRVSRLSFVHRRKTLWNNLTSHFGKSEDIKAKLEKGLALADIKPSIRGEALSIQDFGKLADALKEVGL

SEQ ID NO: 5715 - DNA, 489 bp, Streptococcus agalactiae
gtggagtataatgtaacggaagcattgactagagctggggtagatttagcaacgcttgcagtcaaagggactgcaactatggtaaccagtaaaattcaatcaataaaggatgtaaaagatgctgcaacattgagagctacttatgatgatttaattaacgaattattagctgaacgggagcaagcaattcgcattgcacagtcatataaagaagagtatgaaaaaattaatatagatgatgaggatattgaatatctatccaatactctcgagcaaggaatctcattgttatataatttttctggtctaaatgaggaacaggaacgaacaatgaaacaattggttacattattgaataaagatactttaaaaacaatgcagttgattggatttaattataagcaagcaataggaggaccactaaccgaagcttgtgcaactgcaattaaaaataagtttataactcagaatagtaaaggcaaaaggaag

SEQ ID NO: 5716 - protein, 163 aa, Streptococcus agalactiae
MEYNVTEALTRAGVDLATLAVKGTATMVTSKIQSIKDVKDAATLRATYDDLINELLAEREQAIRIAQSYKEEYEKINIDDEDIEYLSNTLEQGISLLYNFSGLNEEQERTMKQLVTLLNKDTLKTMQLIGFNYKQAIGGPLTEACATAIKNKFITQNSKGKRK

SEQ ID NO: 5717 - DNA, 561 bp, Streptococcus agalactiae
ttgatgaaaaaaattgatattcaagaagtgatcgttgtcgaagggaaagatgatactgctaatctgcgacgcttttacaatgttgatacctatgaaactagaggttcagcaattgatgaagatgatttagagcgtatcgaacgtttgcacaatttgcggggagttatcgtctttacagacccagattataatggcgagcgtatccgtaaaatcatcatgaatgccattccgacagtccgccatgccttcctcaatcgagacgaggcaaagccaggctcaaagaccaagggacgatctctgggtgtcgagcatgccagctttgaagatttgcagaaggcactctcaaaagtgactcagcatttcgatgatgaagatcatttcgatatcacccaagcagacctcattcgttggggattcattactgctagcgatagccgaaaacgccgtgagtatcttgggaatcaactccgtatcggctactcaaatggtaaacaactcctcaaacgcctcagactcttcggagtgaccaaggcagaagttgaagagtgtatggaggggtat

SEQ ID NO: 5718 - protein, 187 aa, Streptococcus agalactiae
MMKKIDIQEVIVVEGKDDTANLRRFYNVDTYETRGSAIDEDDLERIERLHNLRGVIVFTDPDYNGERIRKIIMNAIPTVRHAFLNRDEAKPGSKTKGRSLGVEHASFEDLQKALSKVTQHFDDEDHFDITQADLIRWGFITASDSRKRREYLGNQLRIGYSNGKQLLKRLRLFGVTKAEVEECMEGY

SEQ ID NO: 5719 - DNA, 609 bp, Streptococcus pyogenes
ttgcaaaagcaacgactgctaatgcaaagagggtattcaagcttgactgaaaaaattaatattcaagaggttcttgttgtagaaggcaaggacgacacggctaacctacgccgtttttacgaggtggatacctatgagactagaggctctgctatcactgaagaagatttagaacgaatcaatcgcctaaacgatttgcgtggtgttatcgttttaacagacccagattataatggtgagcgcattcgtaagctcattatggctgctgtgccaacagctcgtcatgcctttttaaaccgaaacgaggcggttccgagttctaagagtaagggtcgttccttaggggttgaacatgccaattttgaggatctccaaaaggcacttgctcatgtcactcagcaatatgatgatgagtcttattttgacattcgtcaaacagacctgattcgtctagggcttttaatggcgtcagatagccgtaaacgcagggaatacttgggtgaaaagctccgcatcggttatgccaacggcaaacaactgctcaagcgcctcgaattatttggcattaccctagcagaagtggaagaagtgatggagacatatgaggag

SEQ ID NO: 5720 - protein, 203 aa, Streptococcus pyogenes
LQKQRLLMQRGYSSLTEKINIQEVLVVEGKDDTANLRRFYEVDTYETRGSAITEEDLERINRLNDLRGVIVLTDPDYNGERIRKLIMAAVPTARHAFLNRNEAVPSSKSKGRSLGVEHANFEDLQKALAHVTQQYDDESYFDIRQTDLIRLGLLMASDSRKRREYLGEKLRIGYANGKQLLKRLELFGITLAEVEEVMETYEE

SEQ ID NO: 5721 - DNA, 852 bp, Streptococcus agalactiae
atgcttcagtcttatgttataataataaagattaatgcttgtagctacgataagcaaagaaagaacgatgatatgataaaaatatttgatacccatacccaccttaacgtagaaaattttgaaggaaagatagacgaggaaattaatttagctagcgaactcggtgttacaaaaatgaatgttgtcggctttgaccaagataccatttcaaaatctttggaattatcttcccaatatgcacaggtatatagcacaataggatggcatccaactgaagctggttcttatgatgataatattgagtcaatgattatcagtcatttagaaaatcccaaggttattgcacttggtgaaattggtctggattattattggatggaggatcccaaagatattcagatcgaggtgtttaagcgtcaaattgaactttcaaaagagtataaccttccttttgtcgttcatacacgtgatgcgttagaagacacttatgaagtcattaaggaatctggagttgggccttttggtggtataatgcactctttttctggttctttggaaatggctcagaaatttattgatttagggatgatgatttccttttctggtgttgtgacctttaagaaggcattagatgtacaagaagctgcacgagagttgccattagataagatattagtggaaacagatgctccttatttggctcctgtacctaaaagaggtcgagaaaacaaaaccgcttatacgagatatgtcgttgaaaaaatagcagagctacgaggcataactgtggaagaggtagcggaggctacataccaaaatgcagtaaggatatttagacttgatgaaaaaaat

SEQ ID NO: 5722 - protein, 284 aa, Streptococcus agalactiae
MLQSYVIIIKINACSYDKQRKNDDMIKIFDTHTHLNVENFEGKIDEEINLASELGVTKMNVVGFDQDTISKSLELSSQYAQVYSTIGWHPTEAGSYDDNIESMIISHLENPKVIALGEIGLDYYWMEDPKDIQIEVFKRQIELSKEYNLPFVVHTRDALEDTYEVIKESGVGPFGGIMHSFSGSLEMAQKFIDLGMMISFSGVVTFKKALDVQEAARELPLDKILVETDAPYLAPVPKRGRENKTAYTRYVVEKIAELRGITVEEVAEATYQNAVRIFRLDEKN

SEQ ID NO: 5723 - DNA, 885 bp, Streptococcus pyogenes
gtgtcagctagcaaagggttttacgatcaacctaaacggcagaagttctcaccaagttttctgatgtggttaagatctttatgttataataacatcatgacaaataaagtagaaaaactaactatttttgatacccatacgcacctgaatgtagcagaatttcaaggacacgaaactgaagaattgactttggctcaagaaatgggcgtggcctaccataatgtggttggctttgaccaggccactattagtggggcactaactctagccaataaatatgccaatatttatgcaactattgggtggcatccaacagaagcaggttcttattcagaggctgttgaggaggctatcgtctctcaattatcacattccaaagtgattgccttaggtgaaattggcttagactattattggatggaggaccccaaagaggtgcaaatagaggtttttaagcgccaaatgcaattagcaaaagaccatgatttgccttttgtggtgcacacccgcgatgccttggaagatacctatgaggtcatcaaagcagctggtgttggccctcgtggaggcatcatgcattcttactcagggtcattagagatggctgaacgtttcattgaacttggcatgatgatttccttttcaggtgtggtcactttcaaaaaggctcttgatattcaagaggcagcgcagcacttgcctttggataagattttggtggaaacagatgccccttatcttacaccagttccaaaacgtggcaaacaaaatcatacagcttatacccgctatgtggttgataaaatcgcagagctacgggggatgactgtggaagaagttgcaaaagcaacgactgctaatgcaaagagggtattcaagcttgac

SEQ ID NO: 5724 - protein, 295 aa, Streptococcus pyogenes
VSASKGFYDQPKRQKFSPSFLMWLRSLCYNNIMTNKVEKLTIFDTHTHLNVAEFQGHETEELTLAQEMGVAYHNVVGFDQATISGALTLANKYANIYATIGWHPTEAGSYSEAVEEAIVSQLSHSKVIALGEIGLDYYWMEDPKEVQIEVFKRQMQLAKDHDLPFVVHTRDALEDTYEVIKAAGVGPRGGIMHSYSGSLEMAERFIELGMMISFSGVVTFKKALDIQEAAQHLPLDKILVETDAPYLTPVPKRGKQNHTAYTRYVVDKIAELRGMTVEEVAKATTANAKRVFKLD

SEQ ID NO: 5725 - DNA, 279 bp, Streptococcus agalactiae
ttgagtttaatgtgggatgtcctgactggtaaggagtcagtaaggactttaaaaaaacaattggataaagaattgatacatagcgtgtacgcgccacgcaagagatctaagtttcacgatattattacgtcgcatcataaagaaatagacgaagtagccatcaacacaaagacagctattcataaagttgctaatcaattggacgaggcaataaaaggagaatttcgttcaaaggttgaggaggctattgaaagcaatcagcaaaaatataatcattta

SEQ ID NO: 5726 - protein, 93 aa, Streptococcus agalactiae
MSLMWDVLTGKESVRTLKKQLDKELIHSVYAPRKRSKFHDIITSHHKEIDEVAINTKTAIHKVANQLDEAIKGEFRSKVEEAIESNQQKYNHL

SEQ ID NO: 5727 - DNA, 390 bp, Streptococcus agalactiae
atggcactgattgatatcattgaaaaacaattagctgatactcagagaaaaatatcagatttagatgatgcctatcaccatagttgttgccagtttgaagaaaaattagacgatctctcagtaagaaaaaataagattattaatatgcttcaagaaacttacgacgctgttgaatatgatttgagatatagtaatgatagctcagatatgatgacgctcaatcgtattttagattcttatcatgacgacttagagcaagcttaccataaagagtactatgccttgtccgctcaagaagaagaatatagagctaactatattcggcaacgttcagaacatgaactaacctttgaagagttgcaaagggaaaagaaaagagaattaatgaag

SEQ ID NO: 5728 - protein, 130 aa, Streptococcus agalactiae
MALIDIIEKQLADTQRKISDLDDAYHHSCCQFEEKLDDLSVRKNKIINMLQETYDAVEYDLRYSNDSSDMMTLNRILDSYHDDLEQAYHKEYYALSAQEEEYRANYIRQRSEHELTFEELQREKKRELMK

SEQ ID NO: 5729 - DNA, 1290 bp, Streptococcus agalactiae
atggaaaaagtcttgactgatttagatagggtaaatatagcgaagcaagagtatgaattaggtagccaacttgatacactagtcaaaataatgagccaagataaggtactccccatcggtaaagttgctcacgttcaagatggaggcaaagaaaccggggaacaaatttataccatcactccaaatggaactttagacaagccagaggatgttaaggaagttacggttttatttaaggggtcaacagcaccgtttggaggggatgattggaaaacagactggtttaaaaatgatattccaatagctagtaaactattattaaagaaatttggttcacaaagtgtatctcataaacaaggtacaaagcagttagaacaatcagctcatctgctaaaagaagttatgaataaatatcctaacgcaaaaatttcggtctacggacactcgttagggtcaatgaatgcacagtatgctattgcagaattggatgataatcaaatttaccgagttcaaggagcttggatatataacggtccaaacctttatagtattttgacagataaacaaaaagaacaggttgataaaataaaaggggtggtcaataattacgttgattccaaggataaaattggaataggttatcctaaagaaggaagcgataatgctgtcggaattgttaaaatagttgacagtaaagctgtttcaggaggtagctgggttgctaattttaccaatcagcatatttggggaggctaccagtacaatccagatggttctttaaaattagcagaagataaatttgcttacaaagaaaactattcagtagttcatacgaatgtgaatcaaagaatgcatgctattaaagcgaaacttagtagctttaaaagtacgggaaaagaagttagtaagaatcaagctattttcctagatagtcaacaagcaaaagtgatctctagtggtttggtaacgatatcaaaagaagcagttgaagaagttaaaaaagttgagcaaaaagcagttgctaaagcagaagagctttatcaatctttaaaagtagctcctacaggagttactgaactaagtcctcaagaattggaagaagcgtatgctcagtcaggtgttagctatgcgagcattgtcggagaagctcaaacctttttctcaaataaaactcaagcggcagaaagcatttctcacgcttacgttgaattagaaaaccaaattaataaaggagttgaagctatgttgcgacaagatagtaacttgtcaggggagtttaaacaatggcac

SEQ ID NO: 5730 - protein, 430 aa, Streptococcus agalactiae
MEKVLTDLDRVNIAKQEYELGSQLDTLVKIMSQDKVLPIGKVAHVQDGGKETGEQIYTITPNGTLDKPEDVKEVTVLFKGSTAPFGGDDWKTDWFKNDIPIASKLLLKKFGSQSVSHKQGTKQLEQSAHLLKEVMNKYPNAKISVYGHSLGSMNAQYAIAELDDNQIYRVQGAWIYNGPNLYSILTDKQKEQVDKIKGVVNNYVDSKDKIGIGYPKEGSDNAVGIVKIVDSKAVSGGSWVANFTNQHIWGGYQYNPDGSLKLAEDKFAYKENYSVVHTNVNQRMHAIKAKLSSFKSTGKEVSKNQAIFLDSQQAKVISSGLVTISKEAVEEVKKVEQKAVAKAEELYQSLKVAPTGVTELSPQELEEAYAQSGVSYASIVGEAQTFFSNKTQAAESISHAYVELENQINKGVEAMLRQDSNLSGEFKQWH

SEQ ID NO: 5731 - DNA, 408 bp, Streptococcus agalactiae
atgataaaaggaggagagatgaagtcaataaaattacttagttttattgtaataatccttttagggcttggtttcactgtaggaggtttaaaagtgactgaaaacaataaacaacaagaattatgggaaatagctaatagcaaagacgctaaaaatgcttatcaaaagtggatttatgcagaagatgaagatgctttcaaagagaatgctgttattaagtcgtatgatattgacaaagaaagtatcaaaaaaaatcctatgggagggatttcggtaaggttaatcattaataaagatcctaacttatatattacttgtaatttggatagggataatcaagggcatttggtcagtcaaagtagccatcaatctccccagttaactcatttattggaaagtagaggtcat

SEQ ID NO: 5732 - protein, 136 aa, Streptococcus agalactiae
MIKGGEMKSIKLLSFIVIILLGLGFTVGGLKVTENNKQQELWEIANSKDAKNAYQKWIYAEDEDAFKENAVIKSYDIDKESIKKNPMGGISVRLIINKDPNLYITCNLDRDNQGHLVSQSSHQSPQLTHLLESRGH

SEQ ID NO: 5733 - DNA, 1260 bp, Streptococcus agalactiae
atgcttaaacgtctaggtaaagtatttggacctctagtttgtgctttactattgttggtaggattatattttgtttttcctgtttctcagcctcatcatttaggtaaggaaaaaaacagtgcagtagcgttgacgaaggcaggttttaaaagcagagttcaaaaagttagagctttcagtgatcctaaagccaattttgtccctttctttggttcaagtgagtggctaagatttgacgcaatgcatccatcagttttagcagaggcttacaataggtcttatatcccatatcttttaggtcaaaaaggggcggcttctctgacacaatactatggcattcaacagattaaaggacaaatcaaaaataaaaaagctatctatgttatttctccgcaatggtttgttcgcaagggagccaacaaaggtgcttttcaaaactatttcagcaacgatcaaaccattcgatttttgcaaaatcaaacagggacaacctacgataggtatgctgctcgtcgattgttaaaattatatcctgaagcttctatgtcagatttgatagaaaaagttgcagatggccaaaaactatcaaataaagacaaacaaagactaaagtttaatgattgggtatttgagaagacagatgctatttttagctatctaccactaggaaaaacttataatcaggcaataatgcctcatgttggtaaattaccgaaagcattctcatataatcatttatcgcgtattgcatcacaagatgctaaagtagcaacgagatcaaatcaatttggtattgatgatcgcttttaccaaacaagaattaaaaagcacttaaaaaaattgaaagggtcacaacgacatttcaattatactaagtcaccagaatttaatgatttacagttggttcttaatgaattctcaaaacaaaatacagatgtcctttttgtcataccaccagtaaataaaaagtggacagactacacagggcttgatcaaaaaatgtatcaaaaatctgtagaaaaaataaaacaccaacttcaaagtcaaggtttcaatcatatcgctgacctttctcgagatggaggtaagccatactttatgcaagatacaatccatttaggttggaatggttggttagagctagataagcatatcaatccatttttaacagaggaaaacagcaagccgaattatcacattaataataaatttttgaagaaatcttgggcaaaatatacaggacgtccaagtgattacaag

SEQ ID NO: 5734 - protein, 420 aa, Streptococcus agalactiae
MLKRLGKVFGPLVCALLLLVGLYFVFPVSQPHHLGKEKNSAVALTKAGFKSRVQKVRAFSDPKANFVPFFGSSEWLRFDAMHPSVLAEAYNRSYIPYLLGQKGAASLTQYYGIQQIKGQIKNKKAIYVISPQWFVRKGANKGAFQNYFSNDQTIRFLQNQTGTTYDRYAARRLLKLYPEASMSDLIEKVADGQKLSNKDKQRLKFNDWVFEKTDAIFSYLPLGKTYNQAIMPHVGKLPKAFSYNHLSRIASQDAKVATRSNQFGIDDRFYQTRIKKHLKKLKGSQRHFNYTKSPEFNDLQLVLNEFSKQNTDVLFVIPPVNKKWTDYTGLDQKMYQKSVEKIKHQLQSQGFNHIADLSRDGGKPYFMQDTIHLGWNGWLELDKHINPFLTEENSKPNYHINNKFLKKSWAKYTGRPSDYK

SEQ ID NO: 5735 - DNA, 1248 bp, Streptococcus pyogenes
atgcttaagagactctggttaattctaggtcctcttcttattgcctttgttttagtagtgattactatttttagttttcctacacaacttgatcattccatagctcaggaaaaagcaaatgccgttgcgatcacagatagttcttttaaaaatggtttgattaaaagacaagctttatcagatgagacttgtcgttttgtgcctttttttggttctagcgaatggagtcgaatggatagtatgcacccttcggtgcttgcagagcgctacaagcggagctatagaccatttttaattggtaagagaggatcagcatctttgtcgcattattatggtatacaacaaattaccaatgaaatgcaaaagaaaaaagccatctttgtagtatctcctcaatggtttactgctcaagggattaatcctagtgcggttcagatgtacttgtctaacactcaagtgattgaatttttactaaaagctagaactgataaagaatcacagtttgcagcaaagcgtttgcttgagcttaaccctggtgtgtctaaatcaaacttattgaaaaaagtaagtaagggtaagtctcttagtcggttagacagagctattttgaaatgtcaacatcaagtagcattgagagaagagtccctttttagttttttaggcaaatctactaactatgaaaaaagaattttgcctcgcgttaagggattacctaaagtattttcgtataaacaattgaatgcattagcaactaagagaggccaattagcaacaaccaacaaccgttttgggattaaaaatacattttatcgtaaacgaatagcacctaaatacaatctttataagaatttccaagttaattatagttacctggcgtcaccagaatacaatgattttcagcttttattatcagaatttgctaaacgaaaaacagatgtactctttgttataactcctgttaataaagcttgggcggattataccggcttaaatcaagataagtatcaagcggcagttcgtaaaataaaattccagttaaagtcacaaggatttcatcgcattgctgacttctcaaaagatggtggtgagtcctactttatgcaagataccatccatctcggttggaatggctggttagcttttgataagaaagtgcaaccatttctagaaacgaagcagccagtgcccaactataaaatgaacccttatttttatagtaaaatttgggcaaataggaaagacttgcaa

SEQ ID NO: 5736 - protein, 416 aa, Streptococcus pyogenes
MLKRLWLILGPLLIAFVLVVITIFSFPTQLDHSIAQEKANAVAITDSSFKNGLIKRQALSDETCRFVPFFGSSEWSRMDSMHPSVLAERYKRSYRPFLIGKRGSASLSHYYGIQQITNEMQKKKAIFVVSPQWFTAQGINPSAVQMYLSNTQVIEFLLKARTDKESQFAAKRLLELNPGVSKSNLLKKVSKGKSLSRLDRAILKCQHQVALREESLFSFLGKSTNYEKRILPRVKGLPKVFSYKQLNALATKRGQLATTNNRFGIKNTFYRKRIAPKYNLYKNFQVNYSYLASPEYNDFQLLLSEFAKRKTDVLFVITPVNKAWADYTGLNQDKYQAAVRKIKFQLKSQGFHRIADFSKDGGESYFMQDTIHLGWNGWLAFDKKVQPFLETKQPVPNYKMNPYFYSKIWANRKDLQ

SEQ ID NO: 5737 - DNA, 237 bp, Streptococcus agalactiae
atggatattaaatcagaagtattagcaattattgatgacctatttatggaggatgtttcttctatgatggatgaagacttatttgacgcaggagttctagacagcatgggtactgttgaactaattgttgagttggaaagccactttaatattgatattccgattgcggaatttggtcgtaatgactggaacacagctaataaaattgttgctggagtaacggagctctgcaatgct

SEQ ID NO: 5738 - protein, 79 aa, Streptococcus agalactiae
MDIKSEVLAIIDDLFMEDVSSMMDEDLFDAGVLDSMGTVELIVELESHFNIDIPIAEFGRNDWNTANKIVAGVTELCNA

SEQ ID NO: 5739 - DNA, 237 bp, Streptococcus pyogenes
atgtctattgaagaaactgtaattgaattgtttgaccgtttgtttatggaagatgtttcagagatgatggacgaagacttgtttgatgcaggtgtgttggatagtcttgggacagtcgaattgattgttgagttagagtcaacgttcaatattaaagtacctatttcagaatttggtcgtgatgattggaacacagtaactaagattgttcaaggtgtagaggaattgcaacatgct

SEQ ID NO: 5740 - protein, 79 aa, Streptococcus pyogenes
MSIEETVIELFDRLFMEDVSEMMDEDLFDAGVLDSLGTVELIVELESTFNIKVPISEFGRDDWNTVTKIVQGVEELQHA

SEQ ID NO: 5741 - DNA, 1263 bp, Streptococcus agalactiae
gtgatacaggcatttttagaaaaacttcctcacttggatgtttatgggaatccacaatatttcttctaccttatcttagctgtcctaccaatttacatcggcttattctttaagaagcgttttgccttatatgagattatttttagtctaagttttattgtaatgatgttgactggtagtacttttaatcaattgaagtcactattggcatacgttgtcggacagtctctgctagtttttatctataaagcttaccggaaacgatttaatcatactttggtcttttatgtaacggtttgtttatctatttttccgctatttttggtaaaattaattccagctatatctgaggatgggcatcagtcactttttgggtttctaggaatttcttaccttacttttagagctgttgctatgattattgaaatgagagacggtgtcttgaaagaatttactttatgggaattcttaagatttttactcttctttccaactttctcaagtggaccaattgatcgttttaaacgattcaatgaggattacattaatatcccagatcgaaacgaactcctagatatgttaggtcaagcgattcattatttgatgttaggttttctctataagtttattttagcctatatttttggaagtctgattatgcctcctctaaaagaattagcgctagaacagggtggtgtgtttaattggccaacacttggggttatgtatgcctttggttttgatttgttctttgattttgcaggttacacaatgtttgcgttggctatttctaacctaatggggattaagtctccgattaactttgacaaacctttcaaatcacgcgacctaaaagaattttggaatagatggcatatgagcctttctttctggtttagagactttgttttcatgaggcttgttaagcttttagttaaaaataaagtttttaaaaaccgtaatgttacttcaagtgtagcttatattatcaatatgcttcttatgggattctggcatgggttaacttggtactatatagcctatggtctctttcatgggattggcctagttattaatgacgcttgggtacgtaagaagaaaaatattaataaagaaagaagattggctaaaaaaccacttttaccagaaaacaaatggacttatgctttgggtgtcttcatcacctttaatgtagttatgttttctttcttgattttttcaggatttttagatcttttgtggttcccacaaccgcataacaaa

SEQ ID NO: 5742 - protein, 421 aa, Streptococcus agalactiae
MIQAFLEKLPHLDVYGNPQYFFYLILAVLPIYIGLFFKKRFALYEIIFSLSFIVMMLTGSTFNQLKSLLAYVVGQSLLVFIYKAYRKRFNHTLVFYVTVCLSIFPLFLVKLIPAISEDGHQSLFGFLGISYLTFRAVAMIIEMRDGVLKEFTLWEFLRFLLFFPTFSSGPIDRFKRFNEDYINIPDRNELLDMLGQAIHYLMLGFLYKFILAYIFGSLIMPPLKELALEQGGVFNWPTLGVMYAFGFDLFFDFAGYTMFALAISNLMGIKSPINFDKPFKSRDLKEFWNRWHMSLSFWFRDFVFMRLVKLLVKNKVFKNRNVTSSVAYIINMLLMGFWHGLTWYYIAYGLFHGIGLVINDAWVRKKKNINKERRLAKKPLLPENKWTYALGVFITFNVVMFSFLIFSGFLDLLWFPQPHNK

SEQ ID NO: 5743 - DNA, 1254 bp, Streptococcus pyogenes
atgatgatgttttttagccacattccctacatggaaccttacggtaaccccatttactttgtctatcttattttggctttcttaccagtcatcattgggatttttaaacaaaagcgcttaagcacttatgaaaccttggtgagtttggtatttattctctttatgtttggaggagatcattatcaacaattagttgcttttctcttttatcttttgtggcaaatcatcagtgtttttgcttaccagaaataccgtgagaatgctaatagtgcaggagtgttttacttagctattgcgatggccttattcccccttatctgggtcaaagttgctcccctaacaggtccttcttctcaaacactctttagttttctagggatttcatatttgacctttaaaagtattggaatgattattgagatgcgtgacgggactctccaagaggttcgtttaccggattttattcgcttcatgattttcttccccaccttctcaagtggccccattgatcgcttcagacattttcaggaagattatcataaacttcctgaacgtgatgattattttgcaatgctcaataaggcagtcatgtatctcatgttaggttttctatacaagcatatcatttcctattgtttgggtggcatcttacttcctctccttgaaaataaggctttgatggttggtggctactttaataaggaaactattctggttatgtacgtatatggcttgaatctcttttttgactttgctggttattcgatgtttgcgattggtatttcctacctattgggtattcgaacaccagaaaactttaacatgcctttcttatctgcaagtttgaaagatttttggaatagatggcacatgagtttgtccttctggtttagagattatgtgtttatgcgattggttcatctattgattaagcataaaacctttaaaaaccgaaatgtcacttcaggtgttgcctatctggttaatatgctagtcatgggattttggcatggcttaacctggtattatatcgcttatgggcttttccatggtataggacttattattaatgatgcttggattcgtaagaaaaaagaaatcaaccgtcaccgtaagaaaaaaggcttatcacccctctttcaaagcagggcattccatgtcttatgtatcgtggtaactttccacgttgtcatgttttcacttctgttattctctggttttttaaatgacctttggtttaacagaccactacat

SEQ ID NO: 5744 - protein, 418 aa, Streptococcus pyogenes
MMMFFSHIPYMEPYGNPIYFVYLILAFLPVIIGIFKQKRLSTYETLVSLVFILFMFGGDHYQQLVAFLFYLLWQIISVFAYQKYRENANSAGVFYLAIAMALFPLIWVKVAPLTGPSSQTLFSFLGISYLTFKSIGMIIEMRDGTLQEVRLPDFIRFMIFFPTFSSGPIDRFRHFQEDYHKLPERDDYFAMLNKAVMYLMLGFLYKHIISYCLGGILLPLLENKALMVGGYFNKETILVMYVYGLNLFFDFAGYSMFAIGISYLLGIRTPENFNMPFLSASLKDFWNRWHMSLSFWFRDYVFMRLVHLLIKHKTFKNRNVTSGVAYLVNMLVMGFWHGLTWYYIAYGLFHGIGLIINDAWIRKKKEINRHRKKKGLSPLFQSRAFHVLCIVVTFHVVMFSLLLFSGFLNDLWFNRPLH

SEQ ID NO: 5745 - DNA, 1542 bp, Streptococcus agalactiae
atggtacaaatgatacatgatatgattaaaacaattgagcattttgctgagacacaagctgattttccagtgtatgatattttaggggaagtccatacttatggacaacttaaagtagactctgactctctagctgctcatattgatagcctaggccttgttgaaaaatcacctgtcttagtattcggtggtcaagaatatgaaatgttggcgacatttgttgctttaacaaagtcagggcatgcttatataccggttgaccaacactctgctttggatagaatacaggctattatgacagttgctcaaccaagccttatcatttcaattggtgaatttcctcttgaagttgataatgtcccaatcctagacgtttctcaagtttcagctatttttgaagaaaagactccttatgaggtaacacattctgttaaaggtgatgataattactatattattttcacttcagggactactggtttaccaaaaggtgtgcaaatttcacatgacaatttattgagctttacaaattggatgatttctgatgatgagttttcagttcctgaaagaccgcaaatgttggctcaaccgccatattcatttgacttatcagttatgtattgggcaccaacactagctatgggaggcaccctgtttgccctaccaaagacagtagttaatgatttcaaaaaactattcgctaccattaatgaattgccaatacaggtttggacttcgacaccatcatttgctgatatggcgctactatctaacgatttcaattcagagaccttgccacagttaacacatttttattttgatggggaagagttaactgtcaagactgcacaaaaacttcgtcaacgttttccaaaagctcgtatcgttaatgcatatgggccaacagaagcaacagttgctctatccgcagtagcaattactgatgaaatgttagaaacatgcaaacgccttccaattggttacactaaagatgactcaccaacgtatgtgattgatgaagaaggtcataaattaccaaacggagagcaaggtgaaatcattattgctggaccagcagtatcaaaaggctatcttaacaatccagaaaagacagctgaggcatttttccaattcgaaggtctacctgcttaccataccggtgacttaggaagtatgaccgatgaaggtcttctgctttacggtgggcgtatggatttccaaattaaatttaacggctatcgtattgaattagaagatgtttctcaaaacttaaacaaatcgcagtatgtaaaatcagcagtagcagtgccacgttataacaaggatcataaagttcaaaacttattagcctatattgtcttaaaagaaggtgtaagagatgattttgaacgtgatttggatttgacaaaagcaattaaggaagacttaaaggacattatgatggattacatgatgccatctaaatttatctatcgagaggatttacctttgacaccaaatgggaaaattgatatcaaaggtcttatgagcgaggtaaacaag

SEQ ID NO: 5746 - protein, 514 aa, Streptococcus agalactiae
MVQMIHDMIKTIEHFAETQADFPVYDILGEVHTYGQLKVDSDSLAAHIDSLGLVEKSPVLVFGGQEYEMLATFVALTKSGHAYIPVDQHSALDRIQAIMTVAQPSLIISIGEFPLEVDNVPILDVSQVSAIFEEKTPYEVTHSVKGDDNYYIIFTSGTTGLPKGVQISHDNLLSFTNWMISDDEFSVPERPQMLAQPPYSFDLSVMYWAPTLAMGGTLFALPKTVVNDFKKLFATINELPIQVWTSTPSFADMALLSNDFNSETLPQLTHFYFDGEELTVKTAQKLRQRFPKARIVNAYGPTEATVALSAVAITDEMLETCKRLPIGYTKDDSPTYVIDEEGHKLPNGEQGEIIIAGPAVSKGYLNNPEKTAEAFFQFEGLPAYHTGDLGSMTDEGLLLYGGRMDFQIKFNGYRIELEDVSQNLNKSQYVKSAVAVPRYNKDHKVQNLLAYIVLKEGVRDDFERDLDLTKAIKEDLKDIMMDYMMPSKFIYREDLPLTPNGKIDIKGLMSEVNK

SEQ ID NO: 5747 - DNA, 1536 bp, Streptococcus pyogenes
atgattaaggatatgattgacagtattgagcagtttgctcagacacaggctgattttccagtttatgattgtttaggggaacgccgcacttacggacaactcaaaagagattctgatagcattgctgcatttatagatagcttagctttactggcaaaatctccagttttggtttttggggcgcaaacttatgatatgttagctacttttgtagctttaaccaaatctggtcatgcctatatcccagtagatgtgcattcagcaccagaacgtattttagcgattattgagattgcaaagcccagtttaatcattgctattgaggaattccctcttactattgaagggatttcccttgtctcactatcagagattgagtcagcaaaattagcagaaatgccctatgagcgaacacattctgttaaaggagatgataattattacattattttcacctctggaacaacgggccaaccaaaaggggtgcaaatttcacatgacaatcttttgagctttaccaactggatgatcgaagatgcagcatttgatgtacctaaacagccacaaatgctggcgcagccaccctattcctttgacctttctgtcatgtactgggcacctaccttggctttaggtggaaccttatttgcacttccaaaagaattggtggcagactttaaacagttatttacaacgattgcgcaacttccagttggcatttggacatcgactccttcatttgctgatatggccatgcttagcgatgatttttgccaggctaagatgccagctttaacgcatttttattttgatggcgaagaattaaccgtttctacggctcgaaaactctttgaacgtttcccgagtgccaagattatcaatgcctatggaccaacagaagcgactgtagccttatccgctattgaaattaccagagaaatggtggataattatacccgcttgccgattggctaccccaaaccagattctccgacctatattattgatgaagatggtaaggagttatcttcaggggagcagggtgaaattattgttacagggcctgctgtgtcaaaaggttacctcaacaatcctgagaaaaccgcagaagctttctttacttttaaaggacagcctgcttatcatacaggggacattggctcactgacagaagataatattttgttgtatggtgggcgtttggattttcagattaaatatgctggttatcgtattgaactagaagatgtttcccaacagttgaatcaatcaccaatggtagcatcggctgtggctgttccaaggtacaataaagaacataaggttcaaaatctcttggcctatatcgttgtcaaagatggggttaaagagcgttttgatagggaattggagttaaccaaagctatcaaagcctctgttaaggatcatatgatgagttatatgatgccttctaagtttctttatcgagatagtctaccattaactccaaatggtaagatagatattaaaactttgattaatgaggtcaataaccga

SEQ ID NO: 5748 - protein, 512 aa, Streptococcus pyogenes
MIKDMIDSIEQFAQTQADFPVYDCLGERRTYGQLKRDSDSIAAFIDSLALLAKSPVLVFGAQTYDMLATFVALTKSGHAYIPVDVHSAPERILAIIEIAKPSLIIAIEEFPLTIEGISLVSLSEIESAKLAEMPYERTHSVKGDDNYYIIFTSGTTGQPKGVQISHDNLLSFTNWMIEDAAFDVPKQPQMLAQPPYSFDLSVMYWAPTLALGGTLFALPKELVADFKQLFTTIAQLPVGIWTSTPSFADMAMLSDDFCQAKMPALTHFYFDGEELTVSTARKLFERFPSAKIINAYGPTEATVALSAIEITREMVDNYTRLPIGYPKPDSPTYIIDEDGKELSSGEQGEIIVTGPAVSKGYLNNPEKTAEAFFTFKGQPAYHTGDIGSLTEDNILLYGGRLDFQIKYAGYRIELEDVSQQLNQSPMVASAVAVPRYNKEHKVQNLLAYIVVKDGVKERFDRELELTKAIKASVKDHMMSYMMPSKFLYRDSLPLTPNGKIDIKTLINEVNNR

SEQ ID NO: 5749 - DNA, 1185 bp, Streptococcus agalactiae
atgtttagtgatttacgcaaaaaatttgtctttttgaccatgtcaatccttattgtcgttgttctctttctatttgcagttagtaatcgctacaatcaatattgggatgaatatgatgcatataggattgttaaattagttgccaaaaatgattatttaggaataccaggcgatgaaccgattgctttggtgactatagataaccaaaagatggttaagattcaaagcaataatactgatttgacaaatgatgttatcgaaaaatctagtttgaagctccttgagcaaggaaagaagtcacgaaaatggaagtcttttatatattccataaaagaatataaagataaaacctacaccatagctattatggatttggctagttatgaagtcccttatgcaaggcgttttctaattcttgtttttactatttttggattttgtttattagcagctgtaagtctttatctttctcgatttattgtaggacctgtagagacagaaatgactcgcgaaaaacagttcgtttcagatgcgagtcatgagctgaagacccctattgcagctatacgagccaacgttcaggttctggaacagcaaattccagggaatcgttatctggatcatgttgtttcggagactaagcgaatggagtttttaattgaagatttgcttaatttgtctagacttgatgaaaaacgctccaaggtaaatttcaaaaagttaaacttatctgtcttatgtcaagaagtacttctaacatatgaaagtttggcatatgaagaagaaaagtgtttaaatgatacgattgaagatgatgtctggattgttggagaagagagtcagattaagcaaattttaataattcttttggataatgctattaggcattctttgtcaaaatcagcaatccagtttagtcttaaacaagctcgaagaaaagctattctgacaatatcaaatccaagtgctatctattccaaagaggttatggataatctctttgagcgtttttatcaagctaaagatgatcatgcagattctctcagttttggtctaggcttatctattgctaaagcaatcgtggaacgccataaggggagaattagagcatatcaagaaaaagaccaattacgtcttgaagtccagttaccaattgatggattttggaccaataccatgattaat

SEQ ID NO: 5750 - protein, 395 aa, Streptococcus agalactiae
MFSDLRKKFVFLTMSILIVVVLFLFAVSNRYNQYWDEYDAYRIVKLVAKNDYLGIPGDEPIALVTIDNQKMVKIQSNNTDLTNDVIEKSSLKLLEQGKKSRKWKSFIYSIKEYKDKTYTIAIMDLASYEVPYARRFLILVFTIFGFCLLAAVSLYLSRFIVGPVETEMTREKQFVSDASHELKTPIAAIRANVQVLEQQIPGNRYLDHVVSETKRMEFLIEDLLNLSRLDEKRSKVNFKKLNLSVLCQEVLLTYESLAYEEEKCLNDTIEDDVWIVGEESQIKQILIILLDNAIRHSLSKSAIQFSLKQARRKAILTISNPSAIYSKEVMDNLFERFYQAKDDHADSLSFGLGLSIAKAIVERHKGRIRAYQEKDQLRLEVQLPIDGFWTNTMIN

SEQ ID NO: 5751 - DNA, 1257 bp, Streptococcus pyogenes
ttgtttattagaaaaataggaggtgacatgtttaatcgtatccgcattcgttttatcatgattgcttctattgccatttttattattttaagttcaattgttggtattattaacacggcacgctgttaccaaagtcaacaagaaattaaccgtattttacatttaatttcctcaaataaaggtaaattacctggcactacggaaagctctaaacgacttggaacgaaactgtctgaagatagcctaagccagtttcggtattatagtgtcatttttaatgctaatggacatctactttcttctaatactgctaatatttcagctttagatagagaagaagcccaatattttgctagactttttgctaagtctggggaagaaaaaggcagttaccgtcaccaagatagtgtttattcgtacttgattactcagctgccaaatgaagaaaaactggttgtaattttagatactaccttttattttcgtagtgtaggagatttattagctgtttcagtgatgttggcctttggaggatttatcttttttgttgttttagtgagtcttttttccggtatggtcatcaaaccttttgtccaaaattatgagaagcagcgtcgctttattactaatgcaggccacgagttaaaaacaccactagccattatctcagccaataatgaattggtcgaattaatgactggagaatcagaatggaccaagagtacaagtgatcaggtgaagcgattgacaggcttgattaatcaaatgattactttggctcgtttggaggaacagccagatgtggtattacatatggtagacttttcagctattgctcaagatgcagctgaagattttaagagtctggttttgaaagatggtaaacgttttgatttgacgattcaaccgaatattatgattaaagcggaggaaaagtcattgtttgaacttgtgacaattttagttgataatgccaataaatattgtgatcctaaaggcttggtcaaggtatctttaaccactattggaagaagacgaaaacgagcgaaattagaagtttctaatacctatttggaaggaaaatccattgattacagccgcttctttgaacgcttttatcgcgaagacgaatcccataatagcaaagaaaaaggttatggaattggtttatctatggcagaaagtatggttaagttatttaaaggaacgataactgtaaattataaaaacgatgctattgtttttacagtggtgatt

SEQ ID NO: 5752 - protein, 419 aa, Streptococcus pyogenes
LFIRKIGGDMFNRIRIRFIMIASIAIFIILSSIVGIINTARCYQSQQEINRILHLISSNKGKLPGTTESSKRLGTKLSEDSLSQFRYYSVIFNANGHLLSSNTANISALDREEAQYFARLFAKSGEEKGSYRHQDSVYSYLITQLPNEEKLVVILDTTFYFRSVGDLLAVSVMLAFGGFIFFVVLVSLFSGMVIKPFVQNYEKQRRFITNAGHELKTPLAIISANNELVELMTGESEWTKSTSDQVKRLTGLINQMITLARLEEQPDVVLHMVDFSAIAQDAAEDFKSLVLKDGKRFDLTIQPNIMIKAEEKSLFELVTILVDNANKYCDPKGLVKVSLTTIGRRRKRAKLEVSNTYLEGKSIDYSRFFERFYREDESHNSKEKGYGIGLSMAESMVKLFKGTITVNYKNDAIVFTVVI

SEQ ID NO: 5753 - DNA, 672 bp, Streptococcus agalactiae
atgagacttcttgtagttgaggatgaaaaaagtatagcagaggctattcaggctttattggcagataaaggttattctgttgatttagcatttgatggagatgatgggttagaatacattttgacaggtctctatgatttagtcctgttggatattatgttacccaaacgctcaggattatctgttttaaaaagagtgagggaagctggtttagaaaccccaataatctttttaactgcaaaatcacagacttatgataaagttaatggtttagatttaggggcagatgattatatcacaaaaccctttgaagcagatgaattgctagctagaattaggctgagaaccagacaatcttctctaatcagagcaaatcaattgcggcttggaaatataaggcttaacacagattcacatgagctagaatctaaagaaagtagtgtaaaattatccaataaagaatttctcttgatggaagtttttatgcgaaatgcaaagcagattattcctaaaaatcagttgatttctaaggtttggggaccttcagacaattcagaatataaccagttagaagtatttatttcttttttgcgaaaaaaattgcgctttttaaaagcagacattgaaataataaccactaagggctttggatattccttggaggagaggaca

SEQ ID NO: 5754 - protein, 224 aa, Streptococcus agalactiae
MRLLVVEDEKSIAEAIQALLADKGYSVDLAFDGDDGLEYILTGLYDLVLLDIMLPKRSGLSVLKRVREAGLETPIIFLTAKSQTYDKVNGLDLGADDYITKPFEADELLARIRLRTRQSSLIRANQLRLGNIRLNTDSHELESKESSVKLSNKEFLLMEVFMRNAKQIIPKNQLISKVWGPSDNSEYNQLEVFISFLRKKLRFLKADIEIITTKGFGYSLEERT

SEQ ID NO: 5755 - DNA, 132 bp, Streptococcus agalactiae
gtgaaacgtacttatcaaccaagtaaaatccgtcgccaacgtaaacacggattccgtcaccgtatgtcaactaaaaacggacgtcgcgtgcttgctagccgccgtcgtaaaggacgtaaagtgttatcagct

SEQ ID NO: 5756 - protein, 44 aa, Streptococcus agalactiae
MKRTYQPSKIRRQRKHGFRHRMSTKNGRRVLASRRRKGRKVLSA

SEQ ID NO: 5757 - DNA, 132 bp, Streptococcus pyogenes
gtgaaacgtacttatcaaccaagtaaaatccgtcgtcaacgtaaacacggattccgtcaccgtatgtcaactaaaaacggacgtcgcgtgcttgctgcacgtcgtcgtaaaggacgtaaagtattatcagct

SEQ ID NO: 5758 - protein, 44 aa, Streptococcus pyogenes
VKRTYQPSKIRRQRKHGFRHRMSTKNGRRVLAARRRKGRKVLSA

SEQ ID NO: 5759 - DNA, 435 bp, Streptococcus agalactiae
atgaagacttttgtcaataatgcctctaagacagtacttagtttatggtttggcgttatgccaacaattatgactgtcggaacaatagctttgattatttcagtatcaacacctatttttaaaattttaggtacaccattccttccgttccttgaacttttagggattccagaagcagatattgcgagtcaaaccatgattgttggtttttcagatatggttgttccttcgataatggcggctgaaattcacagtgagatgacaagatttattgtcgcaacagtttctattgtgcaattaatttatatgtctgagactggtgcggtgatattaggttccaagatccctatcaacattctagaattatttatcatttttatagagagaacaattatttcattacctattattgttttgatggcacatcttttcttt

SEQ ID NO: 5760 - protein, 145 aa, Streptococcus agalactiae
MKTFVNNASKTVLSLWFGVMPTIMTVGTIALIISVSTPIFKILGTPFLPFLELLGIPEADIASQTMIVGFSDMVVPSIMAAEIHSEMTRFIVATVSIVQLIYMSETGAVILGSKIPINILELFIIFIERTIISLPIIVLMAHLFF

SEQ ID NO: 5761 - DNA, 1137 bp, Streptococcus agalactiae
ttggcagttgatttagattcaggaaaaatcttgtatgaaaaagatgctaacaaacccgctgctattgcttccttgactaaaataatgaccgtttatatggtctataaagaaattgataacggtaacctcaagtggaataccaaagtaaatatatctgactacccttatcaactaacacgcgaatctgatgctagtaatgttcctttagaaaaaaggcgctatactgttaaacagctcgtggacgctgccatgatttctagtgctaacagtgcagccattgctttggctgaacatatttcaggaaccgaaagtaaatttgttgataaaatgactgctcaattggaaaagtggggaattcatgatagccacctagtcaatgcttctggcttaaataatagtatgttaggcaatcacatttatccaaaatcgtcacaaaacgacgaaaataaaatgagtgcacgtgatattgctattgttgcctaccatttggtcaacgaatatccttccattcttaagattactagtaagtccgttgctaaatttgataaagatattatgcattcttataactacatgctaccagatatgcctgtctttagaccaggtattacaggtttgaaaactgggacaacggaattagctggccaatcttttattgctacatctactgaaagtggaatgagactactcactgttattatgcatgctgataaggccgataaagacaaatatgctcgctttacagcaactaactctctcttgaactatatcacaaacacctacgaacctaaccttgtattagctaaaggagctgcatataaaggtaaagaagcaagtgtgagagacggaaaagaacaatcggtcatcgctgttgctaaaaacgatttgaaagtagtacagaagaaaaatatcactaaacaaaatcagttaaaaattaactttaaaaaagagcttactgctcctattacaaaaaaagagaacctagggaaagcttattacgttgaccttaataaggttggaaaaggctatctcataaaggaacctagcgttcatttagtggcaaaagatagtattgagcgcagtttcttcctcaaagtgtggtggaatcattttgtgcgctacgttaacgaaaaactt

SEQ ID NO: 5762 - protein, 379 aa, Streptococcus agalactiae
MAVDLDSGKILYEKDANKPAAIASLTKIMTVYMVYKEIDNGNLKWNTKVNISDYPYQLTRESDASNVPLEKRRYTVKQLVDAAMISSANSAAIALAEHISGTESKFVDKMTAQLEKWGIHDSHLVNASGLNNSMLGNHIYPKSSQNDENKMSARDIAIVAYHLVNEYPSILKITSKSVAKFDKDIMHSYNYMLPDMPVFRPGITGLKTGTTELAGQSFIATSTESGMRLLTVIMHADKADKDKYARFTATNSLLNYITNTYEPNLVLAKGAAYKGKEASVRDGKEQSVIAVAKNDLKVVQKKNITKQNQLKINFKKELTAPITKKENLGKAYYVDLNKVGKGYLIKEPSVHLVAKDSIERSFFLKVWWNHFVRYVNEKL

SEQ ID NO: 5763 - DNA, 1230 bp, Streptococcus pyogenes
atgatcaaacgattaatttccctagtggtcatcgccttattttttgcagcaagcactgttagcggtgaagagtattcggtaactgctaagcatgcgattgccgttgaccttgaaagtggcaaagttttatacgaaaaagatgctaaagaagttgtcccagtcgcctcagtcagtaagctcttgacaacctatctggtttacaaagaagtttctaagggcaagctaaattgggatagtcctgtaactatttctaactacccttatgaactcactacaaactatactattagtaacgttcctcttgataagagaaaatataccgttaaagaacttttaagtgcgttagttgttaataacgccaatagccccgctattgctttagctgaaaaaataggcggaaccgaacccaaatttgttgacaaaatgaaaaaacaattaagacaatggggcatttccgatgcaaaggtcgtcaattcaactggcttaactaaccattttttaggagctaatacttatcctaatacagaaccagatgatgaaaattgtttttgcgccactgatttagctattattgccaggcatctcttattagaatttccagaagtactgaaattatctagcaaatcctccactatttttgctggacaaaccatttacagttataattacatgcttaaaggcatgccttgttatcgagaaggcgtggatggtctttttgttggttattctaaaaaagccggtgcttcttttgtagctactagtgtcgaaaatcaaatgagggttattacagtagttttaaatgctgatcaaagccacgaggatgatttagctatatttaaaacaaccaatcaattgttgcagtaccttttaattaattttcaaaaagtccagttaattgaaaataataaaccagtaaaaacgttatatgtcttagacagtcctgaaaaaactgtcaaacttgtagcccaaaatagtttattttttatcaaaccaatacatacaaagaccaaaaataccgtccatattactaagaaatcatccacaatgatcgcacctctatcaaagggacaagtcttaggtagagcaacccttcaagataaacatcttattggacaaggttatctggatactcctccttctatcaatcttatccttcaaaaaaacatttctaaaagtttctttttaaaggtctggtggaaccgttttgtgaggtatgtcaatacctcttta

SEQ ID NO: 5764 - protein, 410 aa, Streptococcus pyogenes
MIKRLISLVVIALFFAASTVSGEEYSVTAKHAIAVDLESGKVLYEKDAKEVVPVASVSKLLTTYLVYKEVSKGKLNWDSPVTISNYPYELTTNYTISNVPLDKRKYTVKELLSALVVNNANSPAIALAEKIGGTEPKFVDKMKKQLRQWGISDAKVVNSTGLTNHFLGANTYPNTEPDDENCFCATDLAIIARHLLLEFPEVLKLSSKSSTIFAGQTIYSYNYMLKGMPCYREGVDGLFVGYSKKAGASFVATSVENQMRVITVVLNADQSHEDDLAIFKTTNQLLQYLLINFQKVQLIENNKPVKTLYVLDSPEKTVKLVAQNSLFFIKPIHTKTKNTVHITKKSSTMIAPLSKGQVLGRATLQDKHLIGQGYLDTPPSINLILQKNISKSFFLKVWWNRFVRYVNTSL

SEQ ID NO: 5765 - DNA, 1185 bp, Streptococcus agalactiae
atgcctaaattaatcgtatctttcctctgcattttattatccctgacttgtgtaaactctgtgcaagctgaagaacataaagatattatgcaaattacccgagaagccggatatgatgttaaagatattaataaacctaaagcgtctatcgttattgacaataaaggtcatattttgtgggaagataacgctgatttagaacgtgatcccgctagcatgtctaaaatgtttactttatatttactatttgaagacttagctaaaggaaaaacaagcctcaacaccacagtgactgcaacagaaacagaccaagccataagtaagatttatgaaattagtaataataatattcatgctggggttgcttatcctattcgtgaactgattactatgacagctgtcccgtcatctaatgtagcaactattatgattgctaaccacttatcacaaaacaatcctgacgccttcattaaacgaatcaatgaaaccgccaagaaactcggtatgacaaaaactcacttttataaccccagtggggcggtagcgagtgcttttaatggactttactccccaaaagaatacgataacaatgctactaacgttacgactgcacgtgatctatcaattttaacctatcatttccttaaaaaataccctgatatactgaactatacaaaatatcctgaagtcaaggccatggtcggaactccttatgaagaaacatttacaacttataactactctacccccggcgctaaatttggattagaaggagtagatggcttaaaaactggttctagccctagcgctgcttttaatgccttagttacagctaaacgccagaatactcgcttgataactgtggttttaggagttggtgattggtcagaccaagacggagagtactatcgtcatccgtttgtcaacgctcttgtagaaaaaggttttaaagacgctaaaaatatttcttctaaaactcctgtattaaaagccgttaaacctaaaaaagaagttactaaaaccaaaaccaaatctattcaagaacagcctcaaacaaaagaacagtggtggacaaaaacagatcaatttattcaatcacattttgtatctattttaattgttctgggcaccatcgctatcctttgtcttttagctgggatagtattacttataaagcgctctaga

SEQ ID NO: 5766 - protein, 395 aa, Streptococcus agalactiae
MPKLIVSFLCILLSLTCVNSVQAEEHKDIMQITREAGYDVKDINKPKASIVIDNKGHILWEDNADLERDPASMSKMFTLYLLFEDLAKGKTSLNTTVTATETDQAISKIYEISNNNIHAGVAYPIRELITMTAVPSSNVATIMIANHLSQNNPDAFIKRINETAKKLGMTKTHFYNPSGAVASAFNGLYSPKEYDNNATNVTTARDLSILTYHFLKKYPDILNYTKYPEVKAMVGTPYEETFTTYNYSTPGAKFGLEGVDGLKTGSSPSAAFNALVTAKRQNTRLITVVLGVGDWSDQDGEYYRHPFVNALVEKGFKDAKNISSKTPVLKAVKPKKEVTKTKTKSIQEQPQTKEQWWTKTDQFIQSHFVSILIVLGTIAILCLLAGIVLLIKRSR

SEQ ID NO: 5767 - DNA, 1179 bp, Streptococcus pyogenes
ttgaccaaaagaattatactaactatttttacctttatttgcttttcggtgatgcctcttgtccacgccgaagatgtcatggatattacaaggcaagcaggctacacagttagtgaggttaatcgaccaaaatcttctattgtcgttgatgcaaatagttcagatattctttggcaagataatattgatattcctagggatcctgctagtatgtctaagatgtttacgctttacattttatttgaagagctcgctaagggaaaaattacgatggacactactattacggcaactccaaccgatcaagctatcgctaacatttatgagattagcaataataatatcgtcgctggagtagcttatcctattcgtgatcttattactatgacagctgtgccttcatcaaatgcagcaactgttatgattgccaattatttatcaaacaatgatgcttctgcgtttatcgatcgtgttaatgccacagccaaacaattaggcatgactaacactcatttttcaaacgctagtggtgcagcagcacaagcttttcaaggttattataatcctactaaatatgatttatctgcttcaaatattacgaccgctcgagatttgtccaagttactctatgccttcttaaaaaaataccctgaaattatctcctttacaaataaatctgttgtgcacactatggtaggaacgccatatgaagaagaatttcacacctataaccactctctcccagataatcaatttggtatgaaaggagttgatggattaaaaacaggttctagtcccagtgctgcttttaacgccatgataactgccaaaagaggcaaaactcgactcattactattgtcatgggggtcggagattggtcagatcaaaacggggagttttatagacatcctttcgtcaatgccttgactgagaaagggtttaaagatagtaagaccttatccaaaaaagcacgccaaaaactcgaaaaattagtgccacaaaccaaaaaagaaacatcatctaaacagcagcacttcaaagccactaaaaagcaatcgtacttggaaagagtcgaagattttatgaatcacaaccacactttcttgcttatttgcttagctatctttataattactatccttttactaagcctcgttgtctttgcaatgggacgccaa

SEQ ID NO: 5768 - protein, 393 aa, Streptococcus pyogenes
LTKRIILTIFTFICFSVMPLVHAEDVMDITRQAGYTVSEVNRPKSSIVVDANSSDILWQDNIDIPRDPASMSKMFTLYILFEELAKGKITMDTTITATPTDQAIANIYEISNNNIVAGVAYPIRDLITMTAVPSSNAATVMIANYLSNNDASAFIDRVNATAKQLGMTNTHFSNASGAAAQAFQGYYNPTKYDLSASNITTARDLSKLLYAFLKKYPEIISFTNKSVVHTMVGTPYEEEFHTYNHSLPDNQFGMKGVDGLKTGSSPSAAFNAMITAKRGKTRLITIVMGVGDWSDQNGEFYRHPFVNALTEKGFKDSKTLSKKARQKLEKLVPQTKKETSSKQQHFKATKKQSYLERVEDFMNHNHTFLLICLAIFIITILLLSLVVFAMGRQ

SEQ ID NO: 5769 - DNA, 1416 bp, Streptococcus agalactiae
atgtccgaaataaatgaaaaagtagaaccacagccaatagatcttggggaatataaatttggatttcatgacgatgtaaagccaatttattctacgggaaaaggtctaaatgaggctgttattcgtgagttatctgcagctaagggtgaacctgagtggatgttggactttcgtctaaaatccttggaaacgtttaataaaatgccaatgcagacctggggagcagatttatcagatattgattttgatgatattatttattatcaaaaagcatctgataaacctgcgcgtgattgggatgatgttccagaaaaaatcaaagaaacttttgaaagaattgggattccagaagctgaaagagcttatcttgcaggagcatcagcacaatatgaatcagaagtggtttatcataatatgaaagaagaatatgataagctgggtattgtttttacggatactgactctgcacttaaagagtacccagagctattcaaaaaatattttgctaaacttgtccctccaacagataataaattagctgctctgaactctgctgtatggtcaggtggaacatttatttatgtccctaaaggtgttaaggtggatattccacttcaaacttacttccgtattaataatgaaaatactggacaatttgaacgtactctcattattgtcgatgagggagcaagtgttcactatgttgaaggttgtaccgccccaacttattcttcaaatagtttacatgcagctatagttgaaatttttgcacttgatggagcttatatgcgctatacgactattcaaaattggtccgataatgtctataatttagtgacaaaacgtgctaccgctaaaaaagatgcaacagttgagtggatagatggaaatctaggtgctaaaacaacaatgaaatacccatcggtttaccttgatggtgaaggagcacgtggcacgatgttgtctattgcttttgcaaacaaaggacaacaccaagatacgggtgcaaagatgattcataatgctccccatactagttcatccattgtctctaaatcaattgctaagggtggaggaaaagttgattatcgaggtcaagtgacatttaataaagattccaaaaaatcagtgtcacatatagaatgtgacaccatattgatggatgatatttcaaaatcagataccataccgtttaatgagattcataattcacaggttgctttagagcatgaagcaaaggtgtctaagatttctgaagagcaactgtactacttgatgagtcgaggtttatctgaagctgaggcaacagaaatgattgttatggggtttgttgagccctttacgaaagaattaccaatggaatatgcggtagagttaaaccgcttaatttcctatgaaatggaaggttcagttggt

SEQ ID NO: 5770 - protein, 472 aa, Streptococcus agalactiae
MSEINEKVEPQPIDLGEYKFGFHDDVKPIYSTGKGLNEAVIRELSAAKGEPEWMLDFRLKSLETFNKMPMQTWGADLSDIDFDDIIYYQKASDKPARDWDDVPEKIKETFERIGIPEAERAYLAGASAQYESEVVYHNMKEEYDKLGIVFTDTDSALKEYPELFKKYFAKLVPPTDNKLAALNSAVWSGGTFIYVPKGVKVDIPLQTYFRINNENTGQFERTLIIVDEGASVHYVEGCTAPTYSSNSLHAAIVEIFALDGAYMRYTTIQNWSDNVYNLVTKRATAKKDATVEWIDGNLGAKTTMKYPSVYLDGEGARGTMLSIAFANKGQHQDTGAKMIHNAPHTSSSIVSKSIAKGGGKVDYRGQVTFNKDSKKSVSHIECDTILMDDISKSDTIPFNEIHNSQVALEHEAKVSKISEEQLYYLMSRGLSEAEATEMIVMGFVEPFTKELPMEYAVELNRLISYEMEGSVG

SEQ ID NO: 5771 - DNA, 1416 bp, Streptococcus pyogenes
atgtctgatataaatgagaaagtagagccaaagccaattgacttaggggactaccaatttggatttcacgatgatgtagagcccatttattctacaggaaaaggattgagtgaggcagtggttcgcgaactatcagctgccaaaaatgaacctgagtggatgttggagtttcgtttaaaatccttggaaacctttaataaaatgccgatgcaaacctggggagcagacttatcagatattaactttgatgatatcatttactatcaaaaagcatctgataagccagctcgttcttgggatgatgttccagaaaaaataaaagaaacctttgatcgtattggaattccagaagcagaacgtgcttatcttgctggggcatcagctcagtatgagtcagaagtggtttaccataacatgaagggtgaatttgaaaagctagggattatctttacagataccgattccgccctcaaagaatatcctgatttgttcaaacaatactttgccaaactggttccgccaacagacaacaaattagcagcccttaattcagcagcttggtctggtggtacctttatttatgttcctaaaggggtcaaggtagatatccctttgcaaacttatttccgcattaacaatgaaaatactggtcaatttgagcggacattgattattgttgatgaaggagcaagtgttcattatgttgaaggatgtacagctcccacttattcaagtaacagcttacatgctgctatcgttgaaatctttgcgcttgatggtgcatacatgcgttataccaccattcaaaactggtcagacaatgtgtataatctagtaacaaaacgtgcacgcgcccttacggatgcaacagtggaatggattgatggcaatctaggagctaaaaccaccatgaagtacccttctgtttatcttgatgggccaggtgcgcgtggcaccatgctgtctattgcctttgctaatgcaggtcaacaccaagatacaggggctaaaatgattcacaatgctccacatacatcatcatcaattgtgtcaaaatcaattgccaagtctggtggtaaagtagattatcgtggccaagtgacctttaacaagcaatctaaaaaatccgtttcccatattgaatgtgatactattttgatggacgatatttctaaatcagatacaatcccatttaacgaaattcataattcacaggtggcgttagaacatgaagccaaagtgtctaagatttctgaagaacaactctactatctcatgagccgtggcttatcagaaagcgaagccacagagatgattgtcatgggatttgtggagccttttaccaaagaattgccaatggaatacgcggtcgaactcaatcgattgatttcctatgagatggaaggttctgtcggt

SEQ ID NO: 5772 - protein, 472 aa, Streptococcus pyogenes
MSDINEKVEPKPIDLGDYQFGFHDDVEPIYSTGKGLSEAVVRELSAAKNEPEWMLEFRLKSLETFNKMPMQTWGADLSDINFDDIIYYQKASDKPARSWDDVPEKIKETFDRIGIPEAERAYLAGASAQYESEVVYHNMKGEFEKLGIIFTDTDSALKEYPDLFKQYFAKLVPPTDNKLAALNSAAWSGGTFIYVPKGVKVDIPLQTYFRINNENTGQFERTLIIVDEGASVHYVEGCTAPTYSSNSLHAAIVEIFALDGAYMRYTTIQNWSDNVYNLVTKRARALTDATVEWIDGNLGAKTTMKYPSVYLDGPGARGTMLSIAFANAGQHQDTGAKMIHNAPHTSSSIVSKSIAKSGGKVDYRGQVTFNKQSKKSVSHIECDTILMDDISKSDTIPFNEIHNSQVALEHEAKVSKISEEQLYYLMSRGLSESEATEMIVMGFVEPFTKELPMEYAVELNRLISYEMEGSVG

SEQ ID NO: 5773 - DNA, 441 bp, Streptococcus agalactiae
atggcactctctaaattagataatctctacatggcagtggtagctgatcattcaaaacaccctcatcatcatggatttttagaaggcgttgaacaagtgcagttaaataatcctacatgtggagatgttatttccttatctgttaaatttgatggaaatattatttcagatattgcatttgctggtaatggttgtacaatttctacggcttcatcaagcatgatgacagatgcagttattgggaaaacaaaagaagaagcattgcagcttgctgatgtattctccaaaatggttcaaggcgatcaaaatccaaaacaagagaaacttggggatgcagagtttctagctggggtatcaaaatttccacaacgtatcaaatgtgctacgctttcgtggaatgctttaagaaaggctattgagagagataatcaggcagaactc

SEQ ID NO: 5774 - protein, 147 aa, Streptococcus agalactiae
MALSKLDNLYMAVVADHSKHPHHHGFLEGVEQVQLNNPTCGDVISLSVKFDGNIISDIAFAGNGCTISTASSSMMTDAVIGKTKEEALQLADVFSKMVQGDQNPKQEKLGDAEFLAGVSKFPQRIKCATLSWNALRKAIERDNQAEL

SEQ ID NO: 5775 - DNA, 477 bp, Streptococcus pyogenes
atggcactctctaaactgaaccatctatacatggctgtggtagcggaccattcgaaacgtccacatcatcatgggcaactagatggcgtagaggctgttcaactgaataatccgacttgtggtgatgtgatttctttgaccgttaagtttgacgaagataaaattgaagatattgcttttgcaggcaacggctgtaccatttccacagcttcatcaagcatgatgacagatgctgttattggtaaaagtaaagaagaagcactcgcgttagctgatattttttcagagatggtacaaggacaggaaaatcctgctcaaaaagagctaggtgaagcagaattgttggcaggagttgcaaaatttccacagcgtatcaaatgctctaccctagcttggaatgctctcaaggaagccattaaacgaagtgccaatgctcagcacctcacggaccaaaatgtaaaggaagggaaaaatgtc

SEQ ID NO: 5776 - protein, 159 aa, Streptococcus pyogenes
MALSKLNHLYMAVVADHSKRPHHHGQLDGVEAVQLNNPTCGDVISLTVKFDEDKIEDIAFAGNGCTISTASSSMMTDAVIGKSKEEALALADIFSEMVQGQENPAQKELGEAELLAGVAKFPQRIKCSTLAWNALKEAIKRSANAQHLTDQNVKEGKNV

SEQ ID NO: 5777 - DNA, 1230 bp, Streptococcus agalactiae
atgacattactagatagttataaactaaagcaagatttcccaattttaaatcaattagttaatgatgagccgcttatctatttagataatgcagcaacgacacaaaaaccgaatcaagttttagaagctttgcgagactactaccaaaacgacaatgcaaatgtccatcgtggtgttcatactttagcagaacgagcgactgctcagtacgagaatgctcgtgaaaaagcaaggcagtttttaaatgctaaattaagtaaagaaattttattcacacgtggcaccacaacaggattaaattgggtagctaagtttgccgaaagtattttagaacgaggtgatgaggtacttatttccattatggagcatcattctaatattatcccatggcaacaagcttgcgagagaactggcgctaaattggtttatgcctatctaaaagatggttctttagatttagaagatttctataataaattatcctctaaaactaaatttgttagtttggcacatatctcaaatgtacttggctgtgttacaccagtaaaagcaatagcagaacgtgtacatcaagttggggcatacatggttgttgatggagctcaatcagcgccacatatggcgattgatgttcaagaccttgattgtgatttcttcgccttatctggccataagatgcttggtcctactggtattggtgttctttatgggaaagaaagcattttagataagatgccacctgtcgaatttggtggtgaaatgattgattttgtctatgagcaaagtgcaacatggaaggaattgccctggaagtttgaagctggaacgcctaatattgctggagcgatcgcttttggagaagctttagattatttaacggatgttggtatggatgagattcatcaatatgaacaaagtttagtttcttatgtgttgcctaaattacaggctatcgatggtttaactatttacggacctagtgatgctgaatctcatgtaggcgttattgccttcaatttagaaggtttacacccacatgatgtggcaactgcaatggattacgaaggagtggctgttcgtgcaggtcatcattgtgcacaaccccttattaatcatcttggtatccattcggcggttcgagcaagtttctatttctataataccaaagaggattgcgacaaattggtagacgctatccaaaaaactaaggagtttttcaatggcactctc

SEQ ID NO: 5778 - protein, 410 aa, Streptococcus agalactiae
MTLLDSYKLKQDFPILNQLVNDEPLIYLDNAATTQKPNQVLEALRDYYQNDNANVHRGVHTLAERATAQYENAREKARQFLNAKLSKEILFTRGTTTGLNWVAKFAESILERGDEVLISIMEHHSNIIPWQQACERTGAKLVYAYLKDGSLDLEDFYNKLSSKTKFVSLAHISNVLGCVTPVKAIAERVHQVGAYMVVDGAQSAPHMAIDVQDLDCDFFALSGHKMLGPTGIGVLYGKESILDKMPPVEFGGEMIDFVYEQSATWKELPWKFEAGTPNIAGAIAFGEALDYLTDVGMDEIHQYEQSLVSYVLPKLQAIDGLTIYGPSDAESHVGVIAFNLEGLHPHDVATAMDYEGVAVRAGHHCAQPLINHLGIHSAVRASFYFYNTKEDCDKLVDAIQKTKEFFNGTL

SEQ ID NO: 5779 - DNA, 1224 bp, Streptococcus pyogenes
ttgctagacgcaaaagacatcaaacaagactttcaaatcttaaatcaacaagtcaatgatgaaccccttgtttatttggataatgccgccaccacacaaaaaccggcgcttgttcttgaggctttgcaatcctattatcaagaagataatgctaatgtccaccgaggagttcataccttggctgaacgtgcaacgctcaaatatgaggccagtcgccagcaggttgctgactttattcatgctaaatcaagtaaggaagtgctctttaccagaggaacaacaaccagtttgaattgggttgctcggtttgcagagcaggtcttgacgccagaagatgaggtgttgatttcgattatggagcatcatgccaatatcattccttggcaacaagcctgtcaaaaaacaggagcaaggttagtctatgtttatttaaaagatggccaacttgacatggacgatttggcaaacaaattgacgacaaaaacacgttttgttagcctagtacatgtctccaatgttcttggttgcatcaatcccattaaagaaattgccaagctggcacatgctaaaggagcctaccttgttgttgacggtgcccagtcggttccacatttggctattgatgttcaagacttggattgtgatttctttgctttttcagctcataagatgttggggccaacaggtttgggtgttctttacggcaaagaagagcttttgaatcaagtggagcctcttgaatttggcggagaaatgattgattttgtttacgaacaagaggccacttggaaagaattgccctggaagtttgaagcaggaacacctcacatagctggtgctattgggctaagcgcagccatttcttaccttcagagactaggcatggctgatatacatgcgcatgaagcagaactaatagcctatgtcttgccgaaattagaagctattgaggggcttaccatatatggaccaagccagcctagtgcaagatctggtctgatttcttttaatctggatgatttgcatcctcatgacttggcaacagccttggactatgaaggtgttgcagtaagagcagggcaccactgcgcccaacctcttcttagttatttaggtgtaccagcaactgttagagcaagtttttatatctataacaccaaggcagattgtgaccgtctagtcgaagcaattctaaaagcaaaggagtttttcaatggcactctc

SEQ ID NO: 5780 - protein, 408 aa, Streptococcus pyogenes
LLDAKDIKQDFQILNQQVNDEPLVYLDNAATTQKPALVLEALQSYYQEDNANVHRGVHTLAERATLKYEASRQQVADFIHAKSSKEVLFTRGTTTSLNWVARFAEQVLTPEDEVLISIMEHHANIIPWQQACQKTGARLVYVYLKDGQLDMDDLANKLTTKTRFVSLVHVSNVLGCINPIKEIAKLAHAKGAYLVVDGAQSVPHLAIDVQDLDCDFFAFSAHKMLGPTGLGVLYGKEELLNQVEPLEFGGEMIDFVYEQEATWKELPWKFEAGTPHIAGAIGLSAAISYLQRLGMADIHAHEAELIAYVLPKLEAIEGLTIYGPSQPSARSGLISFNLDDLHPHDLATALDYEGVAVRAGHHCAQPLLSYLGVPATVRASFYIYNTKADCDRLVEAILKAKEFFNGTL

SEQ ID NO: 5781 - DNA, 1260 bp, Streptococcus agalactiae
atgtctaaagaagctatattaaattttttacaagccaaaggtgagcctacttggttacaagaattacgactaaaggcttttgaaaaaatagaagaactagaattaccagtaattgaacgtgtaaaatttcatagatggaatttaggtgatggaaccattttagagaatgactatacagctaacgttccagatttcacagagttaggaaacaatcccaagttggttcaaattgggacccaaaccgtccttgaacaagttcctatggaattaatagagaaaggcgttgtctttacagatttctattcggccttggaagaaattccagaagtcatagagcgctactttgggaaagcacgtccttttgaagaagatagacttgctgcctatcacacagcttacttcaacagtggtgcagtgctttatattccagataatgttgaaattactcaaccaatcgaaggtcttttttatcaagatagtcagtctaaagtaccatttaataagcatatccttcttattgttggaaagaatgcaaaagttagttacttagagcgatttgagtcaattggtgatgggacagaacgaacaagtgctaatatttctgtagaagtaattgcccaagcaggtagccaaattaaatttgcttcaattgatcgcctcggagaaaatgtgacaacgtttataagtcgtcgtggtcgtcacagtagcgatgcaacaatagattgggcccttggggtgatgaatgaaggcaatgttgttgctgactttgattctgatttaattggtgatggaagtcacgctaatttaaaagtagttgctgcctcgtcagggcgtcaagttcaaggaattgatacgcgtgttacaaactacggctgtaattcagtaggacatattttacagcatggggttattttagagcgtgggactcttacttttaatggtatcggacatattataaaaggtgcaaagggagcagacgcccaacaagaaagccgagttctcatgttatcagacaaagcacgttcagatgctaatcctatccttttgattgatgaaaatgatgttacagctggtcacgcagcctcaattggtcaggttgacccagaggatttatattatttgatgagccgaggcttgaaccaaaaaacagcagagcaattagttattcgtggatttttaggaacagtcattgctgaaataccagtaaaagaagttcgcgatgaaatgattgccgttattgatacaaaactagaaaaacgt

SEQ ID NO: 5782 - protein, 420 aa, Streptococcus agalactiae
MSKEAILNFLQAKGEPTWLQELRLKAFEKIEELELPVIERVKFHRWNLGDGTILENDYTANVPDFTELGNNPKLVQIGTQTVLEQVPMELIEKGVVFTDFYSALEEIPEVIERYFGKARPFEEDRLAAYHTAYFNSGAVLYIPDNVEITQPIEGLFYQDSQSKVPFNKHILLIVGKNAKVSYLERFESIGDGTERTSANISVEVIAQAGSQIKFASIDRLGENVTTFISRRGRHSSDATIDWALGVMNEGNVVADFDSDLIGDGSHANLKVVAASSGRQVQGIDTRVTNYGCNSVGHILQHGVILERGTLTFNGIGHIIKGAKGADAQQESRVLMLSDKARSDANPILLIDENDVTAGHAASIGQVDPEDLYYLMSRGLNQKTAEQLVIRGFLGTVIAEIPVKEVRDEMIAVIDTKLEKR

SEQ ID NO: 5783 - DNA, 1260 bp, Streptococcus pyogenes
atgacaaaagaaaaactagtggctttttcgcaagcccacgctgagcctgcttggctgcaagaacggcgtttagcggcattagaagccattccaaatttggaattaccaaccatcgaaagggttaaatttcaccgttggaatctaggagatggtaccttaacagaaaatgaaagtctagctagtgttccagattttatagctattggagataacccaaagcttgttcaggtaggcacgcaaacagtcttagaacagttaccaatggcgttaattgacaagggagttgttttcagtgatttttatacggcgcttgaggaaatcccagaagtaattgaagctcattttggtcaggcattagcttttgatgaagacaaactagctgcctaccacactgcttattttaatagcgcagccgtgctctacgttcctgatcacttggaaatcacaactcctattgaagctattttcttacaagatagtgacagtgacgttccttttaacaagcatgttctagtgattgcaggaaaagaaagtaagttcacctatttagagcgttttgaatctattggcaatgccactcaaaagatcagcgctaatatcagtgtagaagtgattgctcaagcaggcagccagattaaattctcggctatcgaccgcttaggtccttcagtgacaacctatattagccgtcgaggacgtttagagaaggatgccaacattgattgggccttagctgtgatgaatgaaggcaatgtcattgctgattttgacagtgatttgattggtcagggctcacaagctgatttgaaagttgttgcagcctcaagtggtcgtcaggtacaaggtattgacacgcgcgtgaccaactatggtcaacgtacggtcggtcatattttacagcatggtgtgattttggaacgtggcaccttaacgtttaacgggattggtcatattctaaaagacgctaagggagctgatgctcaacaagaaagccgtgttttgatgctttctgaccaagcaagagccgatgccaatccaatcctcttaattgatgaaaatgaagtaacagcaggtcatgcagcttctatcggtcaggttgaccctgaagatatgtattacttgatgagtcgaggactggatcaagaaacagcagaacgattggttattagaggattcctaggagcggttatcgctgaaattcctattccatcagtccgccaagagattattaaggttttagatgagaaattgcttaatcgt

SEQ ID NO: 5784 - protein, 420 aa, Streptococcus pyogenes
MTKEKLVAFSQAHAEPAWLQERRLAALEAIPNLELPTIERVKFHRWNLGDGTLTENESLASVPDFIAIGDNPKLVQVGTQTVLEQLPMALIDKGVVFSDFYTALEEIPEVIEAHFGQALAFDEDKLAAYHTAYFNSAAVLYVPDHLEITTPIEAIFLQDSDSDVPFNKHVLVIAGKESKFTYLERFESIGNATQKISANISVEVIAQAGSQIKFSAIDRLGPSVTTYISRRGRLEKDANIDWALAVMNEGNVIADFDSDLIGQGSQADLKVVAASSGRQVQGIDTRVTNYGQRTVGHILQHGVILERGTLTFNGIGHILKDAKGADAQQESRVLMLSDQARADANPILLIDENEVTAGHAASIGQVDPEDMYYLMSRGLDQETAERLVIRGFLGAVIAEIPIPSVRQEIIKVLDEKLLNR

SEQ ID NO: 5785 - DNA, 768 bp, Streptococcus agalactiae
atgtctgtacttgaaatcaaaaatcttcatgtttctattgaagataaagaaattttaaaaggtcttaatttaacgttgaaaacaggagaaattgctgctatcatgggtccaaatggtactgggaagtcgacactttcagcagctattatgggaaatcctaattatgaagttacagcaggtgaaattctttttgatggtgaagatattttagagctagaagtggatgaacgtgctcgtttgggtctatttcttgccatgcaatacccttcagaggttccagggattactaatgctgaatttatccgagcagctatgaatgcgggaaaggctgatgatgataaaatttccatccgccaatttatcactaagttagatgaaaagatggaactacttggcatgaaagaagaaatggcggaacgttatcttaacgaaggtttttcaggtggtgagaagaagcgcaatgaaattttacaactcctaatgttagagcctaagtttgccctcttggatgagattgactctggccttgatattgatgctcttaaagtggtatcaaagggagtcaatgaaatgcgtggtgaaggttttggtgctatgattattacacactatcaacgccttttgaattacattacaccagataaagtacacgttatgatggacgggaaggtagtattgtcaggaggaccagaattagcggttcgccttgagaaagaaggttatgctcaaatcgctgaagagcttggtttagagtataaagaagaagtc

SEQ ID NO: 5786 - protein, 256 aa, Streptococcus agalactiae
MSVLEIKNLHVSIEDKEILKGLNLTLKTGEIAAIMGPNGTGKSTLSAAIMGNPNYEVTAGEILFDGEDILELEVDERARLGLFLAMQYPSEVPGITNAEFIRAAMNAGKADDDKISIRQFITKLDEKMELLGMKEEMAERYLNEGFSGGEKKRNEILQLLMLEPKFALLDEIDSGLDIDALKVVSKGVNEMRGEGFGAMIITHYQRLLNYITPDKVHVMMDGKVVLSGGPELAVRLEKEGYAQIAEELGLEYKEEV

SEQ ID NO: 5787 - DNA, 768 bp, Streptococcus pyogenes
atgtcaattcttgagattaataatttacatgtttcaatagaaggtaaagagattttgaaaggggttaacctaactcttaaaactggggaagtagctgccattatggggccaaatgggacaggaaagtctaccctttcagcagctattatgggaaatcctaactacgaagtgacccaagggcaaattttgcttgacggggtcaatattctcgatctagaagttgatgagcgtgcgagactgggactttttctcgccatgcaatacccttcagaaattccagggattaccaacgctgaatttatgcgtgcagcaatgaatgccggtaaggcagatgaggataagatttccgtgcgagattttatcaccaaacttgatgagaaaatggctttgttaggtatgaaagaagagatggcagagcgttacctcaatgaaggtttttctggtggggagaaaaaacgcaatgaaattcttcaattgctcatgttagagcctaaatttgctttgttagatgagattgattctggtcttgatattgatgccctaaaagtagtctctaaaggggttaatgagatgcgtgggaaagactttggagctatgattatcacccactatcaacgtttgttgaattacattaccccagacctagttcatgttatgatggatggtcgtattgtcttatctggtgatgctgccttggctactcgtcttgaaaaagaaggctacgcaggtattgcacaggatctgggaatcgagtataaggaagaaagt

SEQ ID NO: 5788 - protein, 256 aa, Streptococcus pyogenes
MSILEINNLHVSIEGKEILKGVNLTLKTGEVAAIMGPNGTGKSTLSAAIMGNPNYEVTQGQILLDGVNILDLEVDERARLGLFLAMQYPSEIPGITNAEFMRAAMNAGKADEDKISVRDFITKLDEKMALLGMKEEMAERYLNEGFSGGEKKRNEILQLLMLEPKFALLDEIDSGLDIDALKVVSKGVNEMRGKDFGAMIITHYQRLLNYITPDLVHVMMDGRIVLSGDAALATRLEKEGYAGIAQDLGIEYKEES

SEQ ID NO: 5789 - DNA, 1173 bp, Streptococcus agalactiae
ttgagatgggataaaatgataccttttacaattgagtatatttttgtattgattggagcatttttattatcaatcattctaactcctattattcgagttatatctttgaaggtaggagcggttgataaaccgaacgctcgaagaatcaacaaagtaccaatgccaagtagtggtggtttagcaatatttctctcctttgttgtaacaacattatttttcatgccaatggcggccagtagacactttatagaagtctcttattttcactacattttgcctgtaattattggcggtctcgtagttacaacaacaggattcatagatgacatctttgaattaagacctcgttataaaatgttgggaattattattgcagctattatcatatggaaatttacacattttagatttgatagttttaagattccaataggtggtccactcttggagtttggtcctattttaactttctttttgacagttttatggattatttcaatcactaatgctatcaatctgattgatggtctagatggtctagttagtggtgtttcaattatcagtctagcaacgatggcagtggtttcttatttctttttacctaaaatagatttttttctcacgctaactattgttattttaatcgcctcaatagttggttttttcccttataattatcatccagccattatctacctaggtgatgctggtgccttgtttataggatttatgattggtgtattatcgcttcaaggtttaaaaaactccacagctgttgcagtgataacacctgtcattattttaggagttcctattttggatacagctgttgctattgtgaggcgtaaattatcagggaaaaagatttctgaagctgataagatgcacctgcatcaccgattgctatctatgggatttacacatagaggagcagttttagttgtttatggtattgcaattatcttttcgcttatcgctttgcttttaaatgtttctagtcgtattgggggaatttttcttctattggcgctactattagcgatggaaatttttatagaaggtttaaatatttggggtgagaatcggacaccactatttaatctcttaaagttcattggcaacagtgattacagacaaagtgttattgctaaatatagcgataagcatcaaaaa

SEQ ID NO: 5790 - protein, 391 aa, Streptococcus agalactiae
MRWDKMIPFTIEYIFVLIGAFLLSIILTPIIRVISLKVGAVDKPNARRINKVPMPSSGGLAIFLSFVVTTLFFMPMAASRHFIEVSYFHYILPVIIGGLVVTTTGFIDDIFELRPRYKMLGIIIAAIIIWKFTHFRFDSFKIPIGGPLLEFGPILTFFLTVLWIISITNAINLIDGLDGLVSGVSIISLATMAVVSYFFLPKIDFFLTLTIVILIASIVGFFPYNYHPAIIYLGDAGALFIGFMIGVLSLQGLKNSTAVAVITPVIILGVPILDTAVAIVRRKLSGKKISEADKMHLHHRLLSMGFTHRGAVLVVYGIAIIFSLIALLLNVSSRIGGIFLLLALLLAMEIFIEGLNIWGENRTPLFNLLKFIGNSDYRQSVIAKYSDKHQK

SEQ ID NO: 5791 - DNA, 1167 bp, Streptococcus pyogenes
atgttttcattcacaatagattatgtccttgttctgataggggctttgttaatgtccttattcttaacccctcttgttcgctttttagcctttcgtgtgggtgcagtagacaatcccaatgccagacgggtcaataaggttccgatgccaaccagtggtggattagctatttttatgtcttttttagtagcaagtttgggacttattccgattgcttctaaaggcgccatgttttttggtcagacctacttcagttatattttacctgtcgtgattggtgctacagtaattacccttactggttttttagatgatttgtatgagttaagtcctaaattaaagatgtttggtattctaattggtgcagtgattgtctgggcttttaccgactttaaatttgatagcttcaaaattccttttggagggccgttgttagtttttggtcctttcttaaccttattcttaacagtcctgtggattgtttccatcactaatgctattaacttgattgacggtttggatggtttggttagtggggtctctattattagtttagtgaccatggctattgtatcttatttctttttacctcaaaaggatttctttttgacgttaaccattttggtcttgatttctgctattgcaggattttttccttataattaccatccagctatgatttatttgggtgacacaggagccctctttattggctttatgataggggttttgtctcttcaaggattgaaaaattcaacggctgtggctgtggtgacacctgttattattcttggtgtacccattatggataccatcgtggctattattcgacgtagtttatcaggtcaaaaattctacgagccggataagatgcacctgcatcatcgactcttatcaatgggctttactcatcgaggagctgtcttagtagtttatggtattaccatgcttttttcccttatttctttacttttaaatgtttctagtcgaattggtggcgtcctcttgatgcttggacttttatttggtttagaagtttttattgaaggattggagatctggggtgaaaagcgaacgcctttgtttaacttgttaaagtttattggtaatagtgattatcgtcaagcaatgcttctgaaatggaaagaaaagaaggatttgaaacac

SEQ ID NO: 5792 - protein, 389 aa, Streptococcus pyogenes
MFSFTIDYVLVLIGALLMSLFLTPLVRFLAFRVGAVDNPNARRVNKVPMPTSGGLAIFMSFLVASLGLIPIASKGAMFFGQTYFSYILPVVIGATVITLTGFLDDLYELSPKLKMFGILIGAVIVWAFTDFKFDSFKIPFGGPLLVFGPFLTLFLTVLWIVSITNAINLIDGLDGLVSGVSIISLVTMAIVSYFFLPQKDFFLTLTILVLISAIAGFFPYNYHPAMIYLGDTGALFIGFMIGVLSLQGLKNSTAVAVVTPVIILGVPIMDTIVAIIRRSLSGQKFYEPDKMHLHHRLLSMGFTHRGAVLVVYGITMLFSLISLLLNVSSRIGGVLLMLGLLFGLEVFIEGLEIWGEKRTPLFNLLKFIGNSDYRQAMLLKWKEKKDLKH

SEQ ID NO: 5793 - DNA, 753 bp, Streptococcus agalactiae
atggaaatgaaacaaatcagtgaaacaacactgaaaattacaattagtatggaagatttagaagatcgtggtatggagctgaaagatttcctaatccctcaggagaagactgaggaatttttctattctgtcatggatgaattagacttgccagaaaactttaaaaatagtggtatgttaagttttcgagtaacacctaaaaaagatcgcattgatgtttttgttacaaagtctgaattaagtaaagatttaaatttagaagaattagcagatttgggtgacatttcaaaaatgtctccagaagacttttttaaaacattggaacaatcgatgttggaaaaaggggatacggatgcccatgccaaattagcagaaattgaaaatatgatggataaagcaactcaagaagtagttgaggaaaatgtttctgaagaacaacctgaaaaggaagtagaaacgattggatatgttcactatgtctttgattttgataatattgaagctgtagttcgattttcacaaacgattgattttccaatagaagcttctgaactctataaaaatggtaaaggctatcatatgacaattttgctagacttggaaaaccaaccaagctactttgctaatttgatgtatgctcgaatgcttgaacatgctaatgtgggcacaaaaacacgagcttacttgaaagagcatagtattcaattgattcatgatgatgctatttcaaaattacaaatgattgagatggga

SEQ ID NO: 5794 - protein, 251 aa, Streptococcus agalactiae
MEMKQISETTLKITISMEDLEDRGMELKDFLIPQEKTEEFFYSVMDELDLPENFKNSGMLSFRVTPKKDRIDVFVTKSELSKDLNLEELADLGDISKMSPEDFFKTLEQSMLEKGDTDAHAKLAEIENMMDKATQEVVEENVSEEQPEKEVETIGYVHYVFDFDNIEAVVRFSQTIDFPIEASELYKNGKGYHMTILLDLENQPSYFANLMYARMLEHANVGTKTRAYLKEHSIQLIHDDAISKLQMIEMG

SEQ ID NO: 5795 - DNA, 765 bp, Streptococcus pyogenes
ttgagaatggaaatgaaacaaattagcgagacaacgctaaaaataacaattagtatggacgatttagaagaaagaggaatggagttgaaagatttcttgattcctcaagaaaaaacagaagagtttttctattctgtgatggacgaactcgatcttccagataattttaaagatagtggtatgcttagttttcgagtgactccacgcaaggaccgtctagatgtttttgttaccaaatctgagataaataaagatattaatcttgaagatttagcagagtttggtgatatgtcccaaatgactccggaagattttttcaagagcttggagcaatccatgcgtgaaaagggagatgtcaaagctcatgaaaaattggaaaaaattgaagagataatggaagatgttgttgaagccactctagctaatcagtctgaggcggctgatccatcaactaatcatgagtcagaacctttagactatgtccattatgtattggatttttcaacgattacagaggcagtggcttttgctaaaacgattgatttttcgatagaagcttcagagttatataaggggagcaactgctaccatatgactattttattagatgttcagcaacaaccatcttattttgcgaacgtcatgtatgcgagattgattgagcatgcaaaccctggatcaaaaacaagagcttatttacaagagcatggcttacaattgatgcttgatggtgctgttgagcaattacaaaagattgagttggga

SEQ ID NO: 5796 - protein, 255 aa, Streptococcus pyogenes
LRMEMKQISETTLKITISMDDLEERGMELKDFLIPQEKTEEFFYSVMDELDLPDNFKDSGMLSFRVTPRKDRLDVFVTKSEINKDINLEDLAEFGDMSQMTPEDFFKSLEQSMREKGDVKAHEKLEKIEEIMEDVVEATLANQSEAADPSTNHESEPLDYVHYVLDFSTITEAVAFAKTIDFSIEASELYKGSNCYHMTILLDVQQQPSYFANVMYARLIEHANPGSKTRAYLQEHGLQLMLDGAVEQLQKIELG

SEQ ID NO: 5797 - DNA, 837 bp, Streptococcus agalactiae
atgttaataattgaattactcaaagccctatttttaggagtcgttgagggagtgacagaatggttacctgtttctagtactggccatttaatcttggttcaagagtttatgaagttgaaccaaagcaaatcctttgttgaaatgtttaatattgttatacaacttggggcaattatggcagttattgtcatttattttaaacgccttaacccatttcagccaggtaaatctgctagagaaattcgtttaacttggcaattatggttaaaagtagtgatagcttgtattccatctattttaattgctttaccatttgataattggtttgaagctcattttaatttcatgatcccgattgcaatagccctaatcttttatggttttgtcttcatatgggttgaaaaacgtaatgcacacctcaaaccacaggtaaccgaattggcaagtatgtcttacaagacagctttcttgattggatgcttccaggttctcagtattgttccgggaaccagtcgttctggagctactattttaggagcaattattattggaactagtcgttcggtcgctgctgactttactttcttccttgccatcccaactatgtttggttatagtggacttaaggcggttaaatactttttagatggtaacgtcttgagtttagaccaatctttaatacttttagtagcaagtctgacagctttcgtagttagtttatatgttattcgtttcttgacagactatgtcaaacgacacgatttcaccatctttggtaagtatcgtatagtcttaggaagtttactcatcctctactggttagttgttcatttattc

SEQ ID NO: 5798 - protein, 279 aa, Streptococcus agalactiae
MLIIELLKALFLGVVEGVTEWLPVSSTGHLILVQEFMKLNQSKSFVEMFNIVIQLGAIMAVIVIYFKRLNPFQPGKSAREIRLTWQLWLKVVIACIPSILIALPFDNWFEAHFNFMIPIAIALIFYGFVFIWVEKRNAHLKPQVTELASMSYKTAFLIGCFQVLSIVPGTSRSGATILGAIIIGTSRSVAADFTFFLAIPTMFGYSGLKAVKYFLDGNVLSLDQSLILLVASLTAFVVSLYVIRFLTDYVKRHDFTIFGKYRIVLGSLLILYWLVVHLF

SEQ ID NO: 5799 - DNA, 837 bp, Streptococcus pyogenes
atgttaattatcgaattgctaaaagccattttctttggcatcattgagggaatcacagaatggttaccagtttcaagcactggtcacctcattttggtgcaggaatttatccgactaaatcaggataaggcttttatagaaatgtttaatatcgttattcaattaggggcgattatcgctgttatgttgatttattttgaacgtctcaatccctttcaacctgggaaaacagcaagagaagtacagcttacctggcaattatggctaaaagtggtgattgcgtgtattccttctattttaatagcggttcctcttgataattggtttgaagcacatttttattttatggttccgattgccatcgctttaatcgtctacgggattgcctttatctggattgaaaaacgaaatgctcaacaagaacctgctgtcactgaattagctagaatgtcttacaaaacagctttcttcattggttgttttcaagtcttaagtattgtgcctggtactagtcgatcaggggctaccatcttaggagctattattttaggaactagtcgaacagtggccgctgatttcaccttctttttggccattcctaccatgtttggatatagtggattaaaggctgtaaaatttttccttgatggccatcaccttgattttgcacaagtccttattcttttagtggctagcttgaccgcttttgtggttagtttattggcgattaggttcttgacagattatgttaagaaacacgatttcaccatttttgggaaataccgtattgtgttaggaagccttttacttatttatagcttctttaaatttgttttt

SEQ ID NO: 5800 - protein, 279 aa, Streptococcus pyogenes
MLIIELLKAIFFGIIEGITEWLPVSSTGHLILVQEFIRLNQDKAFIEMFNIVIQLGAIIAVMLIYFERLNPFQPGKTAREVQLTWQLWLKVVIACIPSILIAVPLDNWFEAHFYFMVPIAIALIVYGIAFIWIEKRNAQQEPAVTELARMSYKTAFFIGCFQVLSIVPGTSRSGATILGAIILGTSRTVAADFTFFLAIPTMFGYSGLKAVKFFLDGHHLDFAQVLILLVASLTAFVVSLLAIRFLTDYVKKHDFTIFGKYRIVLGSLLLIYSFFKFVF

SEQ ID NO: 5801 - DNA, 1944 bp, Streptococcus agalactiae
ttgaaagcgattaattgtatttttatgttaaaatggtatacaaacaaaggaaggaggatgataatgaagaaatgttttttggctatttgtttagctcttagtttttttatggtttcagttcaagcagatgaggtggactataacattcctcattatgagggtaatctaactattcacaatgataatagtgctgattttacagagaaggttacttaccaatttgattcgtcctataatggacagtatgtcacattaggtacggcgggtaagttacctgacaattttgatattaataataagccacaggttgaagtttcaattaatggtaaagtaaggaaagttagttaccagatagaagatttggaggatggctaccgtttgaaagtgtttaatggtggtgaagcaggtgatactgttaaagtcaatgttcagtggaaactaaaaaatgttctatttatgcataaggatgttggtgaacttaactggattcctattagcgactgggataaaacgttagagaaagtagatttttggatatcaactgacaaaaaggttgctctttctcgtctttgggggcacttgggttatcttaaaactcctcctaaaataagacaaaataataatcgttaccatttgacagcttttaatgtaaacaaacgattagaatttcatggttattgggatagatcttattttaatctacctacaaacagtaaaaataattacaagaaaaaaattgaatatcaagagaagatgatagagcgtcatggttttatcctaagtttcttgttaaggatattattaccttcattctttattattgtgacactattcatctcaattagggtgttcctgtttagaaaaaaagttaataaatacgggcaattccctaaggaacatcatttatatgaagcacctgaggacctttcaccactagagttaactcaaagcatttatagtatgagttttaaaaattttcaagatgaggagaagaaaactcaccttatcagtcaagaacaactcattcagtcaattctattagacttgattgatagaaaagtattgaattatgatgataacttgttatctctagctaacttagatagagcttctgatgcagaaatagattttatagagtttgcttttgcggattctacgagtttgaagccagatcaactcttttctaattaccaatttagttataaagaaacactacgtgaactgaaaaagcagcacaaggcttcagatctgcaaactcaaatgagacgccgaggaagtaatgccttatcaagaattacgcgtctcacaaggttgatttctaaagacaatataaactctcttagaagaaagggaatttcatccccttatcgtaaaatgtcttcagaagagtctaaagaattatctaggttgaaaagattcagttacctatcacctcttatttcttttgttgttataatttatacgctttttttaaattattttacctatttctgtatctatctcttattgtttggtgttatcctgttgttgaataaaatcatttttatgatgacaagaaaaataagtaacggttatattgtaactgaagatggagcaagtcgtgtctaccaatggactagttttaggaacatgctaagggatatcaaatcgtttgatcgttcagagttagaaagtatcgtattatggaatcgaatattggtttacgctactttattcggctacgctgaccgtgttgagaaagcactcagagtgaaccaaatagatattccagaaagatttgcaaacattgatagtcatcaatttgcgatttcagtcaatcaatctagtaatcatttttcaacgataactgaagatgttagtcacgcttctaattttagtgttaattcaggcggttcttcaggtggtttctcaggcggcggaggcggcggaggtggtggtgccttc

SEQ ID NO: 5802 - protein, 648 aa, Streptococcus agalactiae
MKAINCIFMLKWYTNKGRRMIMKKCFLAICLALSFFMVSVQADEVDYNIPHYEGNLTIHNDNSADFTEKVTYQFDSSYNGQYVTLGTAGKLPDNFDINNKPQVEVSINGKVRKVSYQIEDLEDGYRLKVFNGGEAGDTVKVNVQWKLKNVLFMHKDVGELNWIPISDWDKTLEKVDFWISTDKKVALSRLWGHLGYLKTPPKIRQNNNRYHLTAFNVNKRLEFHGYWDRSYFNLPTNSKNNYKKKIEYQEKMIERHGFILSFLLRILLPSFFIIVTLFISIRVFLFRKKVNKYGQFPKEHHLYEAPEDLSPLELTQSIYSMSFKNFQDEEKKTHLISQEQLIQSILLDLIDRKVLNYDDNLLSLANLDRASDAEIDFIEFAFADSTSLKPDQLFSNYQFSYKETLRELKKQHKASDLQTQMRRRGSNALSRITRLTRLISKDNINSLRRKGISSPYRKMSSEESKELSRLKRFSYLSPLISFVVIIYTLFLNYFTYFCIYLLLFGVILLLNKIIFMMTRKISNGYIVTEDGASRVYQWTSFRNMLRDIKSFDRSELESIVLWNRILVYATLFGYADRVEKALRVNQIDIPERFANIDSHQFAISVNQSSNHFSTITEDVSHASNFSVNSGGSSGGFSGGGGGGGGGAF

SEQ ID NO: 5803 - DNA, 1896 bp, Streptococcus pyogenes
atgaaaaaaattttgatgacgcttgtgctctgcttcagtcttttagggatacgaataaaagcagctgatgtagactatagcatcaccaactatgaaggtcagttactgttatcaaaagaaaatactgctcggtttgagcaaaaagtaacctatcaatttgacacttcttataacggccagtatatttcgctgggccggacaggtcatttgccagcgggctttgctattgaccaaaagcctaaagttgaggtatatcagaatggtcaacaggtacctgttagtcaagagtttagtgaccttggagatggctatcgtttaaaactttataatgctggccaagctggtgataaggttgacgtcaaggttatctggcaactgcaccaccttttaacagcttatcaagacgtggcagagctgaattggacaccgattagtgattgggacaaaacattagaaaaggtgagtttgaccgtcactaccccaactgatattcaggattctaatctatgggctcacagaggatattaccaaaagaaacctcaagtgttaaaagaaggtaacagtcgctatcagattaatgccaagaatgtctcagggcaactggaattgcatgcttattgggataaaaaagcattattgggaaaagagccagttgatgtttcaacgagtaaaaagaataaaattgtagcgttagaaactaagatttccagacgaaggaccttgttacagctgctatttggcaaagtcattcctctggtagaggtaggttttcttctttggcagttaatacagtttacaagattaaagaaacaattcaatcgttatcatttggctaaccatacagatcacagttacgaagtccctgaagatctttcgcctcttgtgttgacacaagcgatttatggacagagttttgcctatttatcccctacagcatcagaaagccagaaattattgatccctaaaggagtgacctttgaggcccttgttcaagctaccttgttggatctgatcgaccaaaaggtgcttttattaacgaaagaagaagggaaagcttatcttgaaatcagtcagttagatcgtgtgacagatgaggaagctgccttcttagatatggcttttggaaacaaggtgacattgccggtggatcaattgtttagtcaataccattatgatgctgataccattaaacaattaaagaaaacgtacaaaggtaaaaagctcgagcaagaagtccgtcaatcgtctgagcaggtgattaaggcgatgaaaaaagcgtcggcagctattacaaacaatgtcctagaaactatcaaaaagttaaacttaccagatacttatcgtcaaatgaccccggcagagaaacgaaaaagcaatagtgtccagggattaggttgtttgttgcttattctaaatagtggtttattgatttacttggctattaaagaaagtgggttagccctcatttaccttgctttaatggtgctaacgatgtgccttggcttttacattagcctgaagttagatcaatacaagaaattgggtattgaaacacctgaggggggtgttcggttacatcaatggcagagctttaaaaacatgatacgagacattgacaaatttgaggatgttgctattgaaggtttggttgtttggaaccgtgttttggtttatgccaccttatttggttacgctaagaaagtggaacgctatttgaaagtccatcgtattgccttacctgaggtttaccaagctgttcgaccaggtgaattatcaatggtaatgtatgctacgacaccaacctttgtgtctagcttgtcttcagctacaacttcctcaaatttctcagtctcttccggaggcgggattagtggtggtggcggcggcggtgccttt

SEQ ID NO: 5804 - protein, 632 aa, Streptococcus pyogenes
MKKILMTLVLCFSLLGIRIKAADVDYSITNYEGQLLLSKENTARFEQKVTYQFDTSYNGQYISLGRTGHLPAGFAIDQKPKVEVYQNGQQVPVSQEFSDLGDGYRLKLYNAGQAGDKVDVKVIWQLHHLLTAYQDVAELNWTPISDWDKTLEKVSLTVTTPTDIQDSNLWAHRGYYQKKPQVLKEGNSRYQINAKNVSGQLELHAYWDKKALLGKEPVDVSTSKKNKIVALETKISRRRTLLQLLFGKVIPLVEVGFLLWQLIQFTRLKKQFNRYHLANHTDHSYEVPEDLSPLVLTQAIYGQSFAYLSPTASESQKLLIPKGVTFEALVQATLLDLIDQKVLLLTKEEGKAYLEISQLDRVTDEEAAFLDMAFGNKVTLPVDQLFSQYHYDADTIKQLKKTYKGKKLEQEVRQSSEQVIKAMKKASAAITNNVLETIKKLNLPDTYRQMTPAEKRKSNSVQGLGCLLLILNSGLLIYLAIKESGLALIYLALMVLTMCLGFYISLKLDQYKKLGIETPEGGVRLHQWQSFKNMIRDIDKFEDVAIEGLVVWNRVLVYATLFGYAKKVERYLKVHRIALPEVYQAVRPGELSMVMYATTPTFVSSLSSATTSSNFSVSSGGGISGGGGGGAF

SEQ ID NO: 5805 - DNA, 1548 bp, Streptococcus agalactiae
atgaaaaaaatattactaagtttattcactgctttgcttatcacctttggaggtatgacaagtatacaagcagatgaatatctacgtgtcggtatggaggcagcctatgctcctttcaactggacacaaaatgataacacaaatggtgcagttcctattgaaggaactgatcaatatgctaatggttatgatgtacaagtcgctaaaaagttagctaaaaagttaaataaaaaagttgttgttgtcaaaacaaaatgggaaggccttgttccagcactaacttctggaaaactcgatatgattattgcaggaatgagtcctaccgaagaacgtaaaaaagaaattaatttttcaaagccttactacatttcagaacctactctagttgttaatgctgaaggaaaatatactaatgctaaaaatattagtgatttcaaaaatgctaaagtaactgcccaacaaggagtctacttatacaacctcattgatcaaatcaatggtgtcaaaaaagaagttgccatgggggacttcaatcaattaagacaagctgtagaatctggtgttgtagacgcctatgtttcagaacgtccagatgcaacttccgctcaaactgctaatcctaaattaaaaatgattgaactgcaccaagggtttaaaacatctgatgccgatacaaatatttctgttgggatgcgtaaaggtgacaatcgtattaatcaagttaatcaagttctcgaaagcatttctagagataaacaaatcgccttgatggataagatgattaaagaacagccatccgttaaaaaagaaaaaaatgggaaaccaaacttctttgaacagatggcaactattttaaaaaacaatggttctcaattcctcagaggaacagctacaaccctcctaatttctatggtaggaacaatcgtcggattatttatcggccttctcatcggtgttttccgtacagcaccaaaatctgacaataagttaaaggctgccttacaaaaattattaggttggttacttaacatctatattgaggtcttccgcgggacacctatgattgtacaatcgatggttatctactacggaacagcacaagcttttggagtttcgctggaccgtacactagcagctatatttattgtttcaatcaatactggtgcttatatgagcgaaattgtacgtggtggtattttctctgttgataaaggacaatttgaagccgcaactgcacttggtttcacccacggacaaaccatgcgaaaaattgttctaccacaagttgtacgtaacatactcccagctactggtaatgagtttgttatcaatatcaaagatacctctgtactgaacgttatctctgttgtcgaactctacttctctggtaatactgttgcaacacaaacctaccaatatttccaaacattcaccattattgcgattatttacttcatcttaaccttcaccgtaacacgtatcttacgttacattgaaaaacgttttgattcagataattacacaaccggtgcgaatcaattacaagtc

SEQ ID NO: 5806 - protein, 516 aa, Streptococcus agalactiae
MKKILLSLFTALLITFGGMTSIQADEYLRVGMEAAYAPFNWTQNDNTNGAVPIEGTDQYANGYDVQVAKKLAKKLNKKVVVVKTKWEGLVPALTSGKLDMIIAGMSPTEERKKEINFSKPYYISEPTLVVNAEGKYTNAKNISDFKNAKVTAQQGVYLYNLIDQINGVKKEVAMGDFNQLRQAVESGVVDAYVSERPDATSAQTANPKLKMIELHQGFKTSDADTNISVGMRKGDNRINQVNQVLESISRDKQIALMDKMIKEQPSVKKEKNGKPNFFEQMATILKNNGSQFLRGTATTLLISMVGTIVGLFIGLLIGVFRTAPKSDNKLKAALQKLLGWLLNIYIEVFRGTPMIVQSMVIYYGTAQAFGVSLDRTLAAIFIVSINTGAYMSEIVRGGIFSVDKGQFEAATALGFTHGQTMRKIVLPQVVRNILPATGNEFVINIKDTSVLNVISVVELYFSGNTVATQTYQYFQTFTIIAIIYFILTFTVTRILRYIEKRFDSDNYTTGANQLQV

SEQ ID NO: 5807 - DNA, 738 bp, Streptococcus agalactiae
atgacacaagctattttagaaattaaacatttgaaaaaatcttacggaagcaatgaagtgttaaaagatatttcgctttcggtcaacaaaggcgaagttatttctatcattggttcttctggatcaggaaaatcaactttcctacgttctattaacctcttagaagaaccaagtggaggagaaatcttatatcacggtcacaatgttcttgaaaaaggctatgatttaaataattatcgtgaaaaacttgggatggtctttcaatcttttaacctctttgaaaatttaaatatcttagagaatgctattgtcgcacagactactgttctaaaacgtgaacgccaagaagctgaaaagattgctaaagaaaacttaaatgctgttggcatgactgagcaatattggaaagctaaaccaaaacaattatcaggtgggcaaaagcaacgtgtcgcaatcgcccgagcactttctgttaacccagaagctatactttttgatgaaccaacttcagccttggatccagaaatggttggtgaggtccttaaaacaatgcaagatctagctaaatctggattaacaatgataattgtgacacacgagatggaatttgctaaagaagtatcagaccgcgttattttcatggacaaaggaatcattgcagagcagggtactcctaaacaacttttcgaaaatccaacacaagaaagaactaaggaatttctacaacgcttcttaaaa

SEQ ID NO: 5808 - protein, 246 aa, Streptococcus agalactiae
MTQAILEIKHLKKSYGSNEVLKDISLSVNKGEVISIIGSSGSGKSTFLRSINLLEEPSGGEILYHGHNVLEKGYDLNNYREKLGMVFQSFNLFENLNILENAIVAQTTVLKRERQEAEKIAKENLNAVGMTEQYWKAKPKQLSGGQKQRVAIARALSVNPEAILFDEPTSALDPEMVGEVLKTMQDLAKSGLTMIIVTHEMEFAKEVSDRVIFMDKGIIAEQGTPKQLFENPTQERTKEFLQRFLK

SEQ ID NO: 5809 - DNA, 885 bp, Streptococcus agalactiae
atgatgtcattaattattcttacggttattttggttttagtgattgttctgttgataacttctttatacgttgttaaacaacagacagtagccatcattgaacgctttggtaaatatcaaaagactgctactagcggtattcatattcgtgtaccattgggtatcgataagattgcagcacgagtgcagttacgtcttttacagagtgaaattatcgttgagacaaaaacaaaagataatgtttttgtcactttaaatattgctacacaatatcgtgtcaatgaaaataacgttacagacgcttattacaaattaataaagccagaagctcagattaaatcttatatcgaagatgctttgcgttcatcagtacctaaacttacattagacgagctatttgaaaagaaagatgaaatagccttggaagttcaacatcaagtggcagaagaaatgtcaacatacggctacatcattgttaagactttaattactaaggttgagccagatgcagaagtaaaacaatccatgaacgaaatcaatgctgcacaacgtaaacgtgtagcagctcaagaattagcgaatgctgataagatcaaaattgtaactgctgcagaagcagaagcagaaaaagatcgtctacatggtgtgggtattgcgcaacaacgtaaagcaattgtagatgggttagctgattcgattcaagaattgaaagatgctaacgtgacattgacagaagaacaaatcatgtctatcttgttaacaaatcaatatttagatactttaaatacatttgctattaatggtaatcaaacgattttcttaccaaataacccagaaggtgttgaagatattcgtacacaagttttatctgctcttaaaacaaga

SEQ ID NO: 5810 - protein, 295 aa, Streptococcus agalactiae
MMSLIILTVILVLVIVLLITSLYVVKQQTVAIIERFGKYQKTATSGIHIRVPLGIDKIAARVQLRLLQSEIIVETKTKDNVFVTLNIATQYRVNENNVTDAYYKLIKPEAQIKSYIEDALRSSVPKLTLDELFEKKDEIALEVQHQVAEEMSTYGYIIVKTLITKVEPDAEVKQSMNEINAAQRKRVAAQELANADKIKIVTAAEAEAEKDRLHGVGIAQQRKAIVDGLADSIQELKDANVTLTEEQIMSILLTNQYLDTLNTFAINGNQTIFLPNNPEGVEDIRTQVLSALKTR

SEQ ID NO: 5811 - DNA, 888 bp, Streptococcus pyogenes
atgttaggaccatttatctttattgcttttggggttattgtaatcctagctattgttgccagtaccctttatgttgttcgtcaacaatctgttgccatcgtggaacgttttggtagataccaaaaaacagccacgagtggtattcatatccgacttccgtttgggattgacaaaattgctgcgcgtgtgcagctgcgtcttttacagtcagaaatcatcgttgaaaccaaaaccaaggacaatgtgtttgtaactttgaatgttgccactcagtatcgtgttaacgaacaaaatgtaacagatgcttactacaaattaatgaaacctgaatctcaaatcaagtcttatattgaagatgccttgcggtcatccgtgccgaagttgaccttagacgaattgtttgagaaaaaagatgaaattgccttggaagtacaacatcaagtggcagaagaaatgtcaacctatggatatattattgtcaaaaccttgattaccaaggtggagcctgatgctgaagtcaaacagtcaatgaatgaaatcaatgcggctcaacgcaaacgtgtagctgctcaagagttggcaaacgcagataaaattaaaattgtgacagcagcagaagcagaggctgaaaaagatcgattgcacggggtagggattgcccaacagcgtaaggccattgtggatggtttggcggagtctattcaagagcttaaagaagcgaatatttccttaaacgaagaacaaatcatgtccattttgttgaccaaccaatacctggataccctcaatacctttgcggcaaaaggaaaccaaaccctttttctaccaaatacaccaagtggggtagaggatatccgtacacaagttttatctgcccttaaaacaaaa

SEQ ID NO: 5812 - protein, 296 aa, Streptococcus pyogenes
MLGPFIFIAFGVIVILAIVASTLYVVRQQSVAIVERFGRYQKTATSGIHIRLPFGIDKIAARVQLRLLQSEIIVETKTKDNVFVTLNVATQYRVNEQNVTDAYYKLMKPESQIKSYIEDALRSSVPKLTLDELFEKKDEIALEVQHQVAEEMSTYGYIIVKTLITKVEPDAEVKQSMNEINAAQRKRVAAQELANADKIKIVTAAEAEAEKDRLHGVGIAQQRKAIVDGLAESIQELKEANISLNEEQIMSILLTNQYLDTLNTFAAKGNQTLFLPNTPSGVEDIRTQVLSALKTK

SEQ ID NO: 5813 - DNA, 1533 bp, Streptococcus agalactiae
atggggatgactatggaaaacggagccaaggaagtttcggacaaaccagcgacgactgttggagaagttggtcaaattctttctaaaggtgtattgatgggagcacgtggaaattcaggtgtaattacatcacaattattccgtggttttggtcaaagtatcaaggataaagaagaattaacgggtcaagatttggcacacgctttccagaatggtgttgaagtagcttataaagccgttatgaaaccagttgaaggaactatcttgacagtatcacgcggtgcagctaccgctgctctaaaaaaagctgaagaaactgatgatgcagttgaagttatgcgcgcaactctcaaaggtgctaagcgtgctcttgctaaaacaccggatatgctacctgttcttaaagaggttggtgttgttgattctggtggtcaaggactcgtctttatttacgaaggtttcctctcagcactgactggggaatatatcgcatcagaagattttaaagcaactcccgcaacaatgactgaaatggttaatgcagagcaccataaagctgtagtaggccacgtagccacagaagatattaaatatggctattgtacagaagtcatggttggtttaaagcaaggaccaacttacgttaaggaatttaactacgaagaatttcaaggttatcttagcaatctaggggattctttactagttgttaatgatgatgaaattgtcaaggttcatgttcatacagaagatccaggtcttgttatgcaagaaggtttgaaatatggatcgcttgtgaaggttaaagttgaaaacatgcgtaaccaacatgatgcccaaatgcaaaaggttgaagttgaagaaactgtcaaagaaactaaagaatatggtattattgctgttgtagctggtgacggtctagctgagatttttaaatcacaaggtgttgattatatcatctctggcggccagactatgaacccatctacagaagatattgtaaaagcgattgaaaaagtaaacgctagaaatgttattattttaccaaacaataagaacatcttcatggctgcacagtcagctgcagatgtcgttgatattccagcagcagtagtagagacacgtacagttccacaaggatttactagcttacttgcttttgatcctgctaagtctcttgaaactaatgtagctgatatgacaaatagcctctcagatgtcattagtggtagtgtgactttagctgttcgtgatacaacgatagatggccttgaaattcatgaaaacgacatccttgggatggttgatggtaaaattctagtatctacaccagatatggaaaaagcacttaaagacacttttgataaaatgattgatgaagatagtgaaatcgtgacaatctatgttggtgaagatggtaagcaagcattagctgagaccttgtcggaatatcttgaggaaacttatgaagatgttgaagttgagatccaccaaggagatcaacctgtatatccatacctcatgagcgttgaa

SEQ ID NO: 5814 - protein, 511 aa, Streptococcus agalactiae
MGMTMENGAKEVSDKPATTVGEVGQILSKGVLMGARGNSGVITSQLFRGFGQSIKDKEELTGQDLAHAFQNGVEVAYKAVMKPVEGTILTVSRGAATAALKKAEETDDAVEVMRATLKGAKRALAKTPDMLPVLKEVGVVDSGGQGLVFIYEGFLSALTGEYIASEDFKATPATMTEMVNAEHHKAVVGHVATEDIKYGYCTEVMVGLKQGPTYVKEFNYEEFQGYLSNLGDSLLVVNDDEIVKVHVHTEDPGLVMQEGLKYGSLVKVKVENMRNQHDAQMQKVEVEETVKETKEYGIIAVVAGDGLAEIFKSQGVDYIISGGQTMNPSTEDIVKAIEKVNARNVIILPNNKNIFMAAQSAADVVDIPAAVVETRTVPQGFTSLLAFDPAKSLETNVADMTNSLSDVISGSVTLAVRDTTIDGLEIHENDILGMVDGKILVSTPDMEKALKDTFDKMIDEDSEIVTIYVGEDGKQALAETLSEYLEETYEDVEVEIHQGDQPVYPYLMSVE

SEQ ID NO: 5815 - DNA, 282 bp, Streptococcus agalactiae
ttgcggaacattccctcaccagaacacggaccgtcaaaaacaataagatcaaaaaaagaattaaaacatttggctagtcgttgggagctttcattagtcacgataacatttctagcaccaaaacgttcgacattttcgactaaaattttactacgtttatttgaaatttcattactaactaatagaccagtattgtttaaatatgatagaaggtgtgttgtttttccaccaggtgcagctgctaaatctagcactttcattccttcttgtggttcagcaatc

SEQ ID NO: 5816 - protein, 94 aa, Streptococcus agalactiae
MRNIPSPEHGPSKTIRSKKELKHLASRWELSLVTITFLAPKRSTFSTKILLRLFEISLLTNRPVLFKYDRRCVVFPPGAAAKSSTFIPSCGSAI

SEQ ID NO: 5817 - DNA, 936 bp, Streptococcus agalactiae
  misc_feature (1)..(936): n = a, c, g, or t
atgaaattaccgaatgaatttattgaaaaatatcagactatacttaaagatgaagcagaagctttttttgacagttttgaacaaaaacccatatcggcatatcgcaccaatcctctcaaagaaaagcaacttgattttccaaatgccatcccaagtaccccttgggggcattatgggaaaatatcaggaaaatcaatagaacacacaactggccttgtttattctcaagaacctgctgctcagatagtggctcagattgctgaaccacaagaaggaatgaaagtgctagatttagcagctgcacctggtggaaaaacaacacaccttctatcatatttaaacaatactggtctattagttagtaatgaaatttcaaataaacgtagtaaaattttagtcgaaaatgtcgaacgttttggtgctagaaatgttatcgtgactaatgaaagctcccaacgactagccaaatgttttaattctttttttgatcttattgtttttgacggtccgtgttctggtgagggaatgttccgcaaagatcctcaagcaatacaatattggcacaaagattaccccactgaatgtgcacagttacaaagagatattttaaaagaagcaatcaaaatgctagctcatggtggtatacttgtatactctacttgtacatggtcaccagaagagaacgaagaagtggttaattggctccttcaagagtatgattacttagaacttgttgatattcctaaactaaatgggatggttgaagggattaatgtaccacaagttgcaaggatgtaccctcatcattttcaaggtgaaggacaattcgttgcaaaactgagagatactagatctaaggaagcacagaaaattaagccaaaagcacagaaaataaataaaatgcagttacaattgtggcaacaatttgcannnnnt

SEQ ID NO: 5818 - protein, 312 aa, Streptococcus agalactiae
  MISC_FEATURE (1)..(312): Xaa = Any Amino Acid
MKLPNEFIEKYQTILKDEAEAFFDSFEQKPISAYRTNPLKEKQLDFPNAIPSTPWGHYGKISGKSIEHTTGLVYSQEPAAQIVAQIAEPQEGMKVLDLAAAPGGKTTHLLSYLNNTGLLVSNEISNKRSKILVENVERFGARNVIVTNESSQRLAKCFNSFFDLIVFDGPCSGEGMFRKDPQAIQYWHKDYPTECAQLQRDILKEAIKMLAHGGILVYSTCTWSPEENEEVVNWLLQEYDYLELVDIPKLNGMVEGINVPQVARMYPHHFQGEGQFVAKLRDTRSKEAQKIKPKAQKINKMQLQLWQQFAXX

SEQ ID NO: 5819 - DNA, 1308 bp, Streptococcus pyogenes
atgatgtcattaccaaaagaatttattaacacttatcaagcaatactaggcaaagaattagaagatttcttggcaagttttaaccaagagccggtcaatgcttttcggattaaccccttaaagaatcaactaaaaacctttgaacaccccattccaaataccttatggggatattatggtaaactatctggcaagtctccagagcatgtgtcggggttggtttattcccaagaaccagcggctcaaatggtggcacaagtagcggctcctcaaaaggggagtcgtgttttagacttggcagctgcaccaggaggaaaatcaactcatttattagcttatttagacaatacaggtcttttagtcagcaatgaaatttctaagaagcgcagcaaggttttagttgaaaatatcgaacgttttggcgctagaaatgttgtggtgactaatgaatccgcagatcgtttagccaaggtattttctcattattttgatactatcgtctttgatggaccatgttctggtgaaggaatgtttcgcaaggaccctgatgctattcaatattggcatcacgggtatcccgcagaatgtgccaagttgcaaaaatctattttagaagacgccttagccatgttaaaaccaggaggagaattgatatactccacctgtacttgggctcctgaagaaaatgaagatgttgtgcagtggctcttagagacttatacctttttagaattggtcgatgttccaaaactaaatggaatggttagtggtatcggacttccagagactgctagaatgtaccctcatcgttatcaaggggaagggcaatttgtggccaagctaaaagataagcgtcaagaaggacaaagcactaaactaaaagcacctaaatccaacttgatcaaagaccagttacgtctttggaaaatgtttgaaaaagaccatctaaaccttaccctatcaggaacactacaaacctttggtgattacctatacctcttgccagatggtcttcctgctttagatggccttaaaattgctcggaacggtttagaattaggcgtcttcaagaagaaacgctttgaaccctcttacgccttgggattagctttaaagcctgatgaggtccgatcatctattgagcttagagaggaagactttagaccttatgtgtcaggtaacgtcattactttgccccaatcttatccaacaggctggtaccaattactcattaatggcaatggtctaggatttgccaaggtcgttgacaagaccatcaaaaataatttccctaaagggttaagattt

SEQ ID NO: 5820 - protein, 436 aa, Streptococcus pyogenes
MMSLPKEFINTYQAILGKELEDFLASFNQEPVNAFRINPLKNQLKTFEHPIPNTLWGYYGKLSGKSPEHVSGLVYSQEPAAQMVAQVAAPQKGSRVLDLAAAPGGKSTHLLAYLDNTGLLVSNEISKKRSKVLVENIERFGARNVVVTNESADRLAKVFSHYFDTIVFDGPCSGEGMFRKDPDAIQYWHHGYPAECAKLQKSILEDALAMLKPGGELIYSTCTWAPEENEDVVQWLLETYTFLELVDVPKLNGMVSGIGLPETARMYPHRYQGEGQFVAKLKDKRQEGQSTKLKAPKSNLIKDQLRLWKMFEKDHLNLTLSGTLQTFGDYLYLLPDGLPALDGLKIARNGLELGVFKKKRFEPSYALGLALKPDEVRSSIELREEDFRPYVSGNVITLPQSYPTGWYQLLINGNGLGFAKVVDKTIKNNFPKGLRF

SEQ ID NO: 5821 - DNA, 762 bp, Streptococcus agalactiae
ttggacgctaaatttgatttcgctaaacaattagtgtataaagctggtcaattcattaaatctgagatgcaaaatacttttgatgttgaggaaaagtctcgatttgatgatttagtgacaagtcttgataaaaaaacacaaaaattattaattcaagaaattattcaacattacccagatgataatatacttgccgaagaagatratgtgcgctcacccattgcacaaggtaatgtttgggttttagaccctattgatggaactgttaattttattgttcaaaaagataactttgctgttatgttagcttattacgaagaaggcgttggacaatttggtatcatctacgacgttatggctgatattctttacagcgggggaggacattttgatgtctatgctaacgataaaaaaattgttccttttcaagagtgtcctttagaacgttgcttacttggagtaaattctgctatgtatgcagaaaatgattgcggtattgcccatttagcttctgaaaccttaggtgttcgtatctatggtggtgctggaattagcatggcaaaagtcatgcagggcaaattattagcttatttttcgtatattcaaccttgggattatgctgcagcaaaaatcatgggggagacattaggatttaccttattaacgcttgacggggaagaacccaactattcaacaagacaaaaagtaatgttcctaccaaagtcgaaattaaatcttatccaatcctaccttaccaaaaaa

SEQ ID NO: 5822 - protein, 254 aa, Streptococcus agalactiae
MDAKFDFAKQLVYKAGQFIKSEMQNTFDVEEKSRFDDLVTSLDKKTQKLLIQEIIQHYPDDNILAEEDBVRSPIAQGNVWVLDPIDGTVNFIVQKDNFAVMLAYYEEGVGQFGIIYDVMADILYSGGGHFDVYANDKKIVPFQECPLERCLLGVNSAMYAENDCGIAHLASETLGVRIYGGAGISMAKVMQGKLLAYFSYIQPWDYAAAKIMGETLGFTLLTLDGEEPNYSTRQKVMFLPKSKLNLIQSYLTKK

SEQ ID NO: 5823 - DNA, 807 bp, Streptococcus pyogenes
ttgagaaaggattcttttcccttggaaactaaatacgcatttgcaaggcaaatcattaaagaagcagggctttttatcaagtcaaaaatgtcagagcagctagatattcaggtgaaaacacaatttgatgatctggttaccaatgttgatcaagaaactcaacagttactgatggatcgtattcatcagacctatccttgtgatgccattttagctgaagaaaatgacgttcgtcaccccattaatcaaggaaatgtttgggtcatcgatcccattgatggaacggttaactttattgtgcagggatcacagtttgcagtgatgattgcctattatgaacaaggaattggtcaatttgggcttatttatgatgtgatggcagatcaattactagctggtggtggtgattttgaagttactttaaacggtgataagcttccagcttaccaagaaaaacctttagagcgtagcttaattggctgcaatgcaggcatgtttgccagaaatgatcgtaaccttgctcatctaattgcaaagactttaggtgtaagggtttatggtggtgcaggtatctgcatggttaaggtcatgaagcaggaattactggcctatttttcatttatccaaccatgggattacgcagcagcaaaagtactaggcgataaactgggttatgttttactaactattgacggatatgagcctgattttcaaacacgtcaaaaaatcatgtttgttcctaaatgccaactcactaggatagcgtcttttctaacaaaggactctgccatcacacttgaagatcaa

SEQ ID NO: 5824 - protein, 269 aa, Streptococcus pyogenes
LRKDSFPLETKYAFARQIIKEAGLFIKSKMSEQLDIQVKTQFDDLVTNVDQETQQLLMDRIHQTYPCDAILAEENDVRHPINQGNVWVIDPIDGTVNFIVQGSQFAVMIAYYEQGIGQFGLIYDVMADQLLAGGGDFEVTLNGDKLPAYQEKPLERSLIGCNAGMFARNDRNLAHLIAKTLGVRVYGGAGICMVKVMKQELLAYFSFIQPWDYAAAKVLGDKLGYVLLTIDGYEPDFQTRQKIMFVPKCQLTRIASFLTKDSAITLEDQ

SEQ ID NO: 5825 - DNA, 300 bp, Streptococcus agalactiae
gtgctgaaattgagggaaaacatgattagtagtaattatagttatcctcttgatccttcatggaatacggaagatattactaaggtacttcgctttttaaatcaagttgaacacgcctatgaaaatagtattaaagttgatgatttgctagatagctataaagaatttaaaaaagttgttaaatccaaggcgcaggaaaaacaaattgaccgtgaattccagagaactagcggttattccacttatcaagctgttaaagcagcacaacaacaagcgaaaggatttatttcacttggacgc

SEQ ID NO: 5826 - protein, 100 aa, Streptococcus agalactiae
MLKLRENMISSNYSYPLDPSWNTEDITKVLRFLNQVEHAYENSIKVDDLLDSYKEFKKVVKSKAQEKQIDREFQRTSGYSTYQAVKAAQQQAKGFISLGR

SEQ ID NO: 5827 - DNA, 288 bp, Streptococcus pyogenes
ttgaggggtgatatgtcaggtaattattattatccacttgacttaagttggagcactgaagaaatatcctcagtgcttcattttttgaataaagtggaattagcatatgaaaaaaaagtagatgcaaaacaactcctagatagttataagacttataaaaccattgtcaaaagtaaagctcaggaaaagcaaatcgatcgtgattttcaaaaagttagtggttattcgacctatcaagttgttaaaaaagcgaaggcaattgagaaaggattcttttcccttggaaac

SEQ ID NO: 5828 - protein, 96 aa, Streptococcus pyogenes
LRGDMSGNYYYPLDLSWSTEEISSVLHFLNKVELAYEKKVDAKQLLDSYKTYKTIVKSKAQEKQIDRDFQKVSGYSTYQVVKKAKAIEKGFFSLGN

SEQ ID NO: 5829 - DNA, 411 bp, Streptococcus agalactiae
atgattaccttatttttatcacccagctgtactagttgtcgaaaagcgcgtgcttggctaagtaagcatgaggttgcttttgaagagcataacattattacaagtccactcaataaagaagaactattacaaattctatcgtttacagaaaatggtacagaagacattatttccacacgttcaaaagtctttcaaaaacttgctattgatgtagacgaattatcaacgtcttcattaatggaattaatttcagaaaatccaagtcttttacgacgcccaattattttagacaaaaaacgtatgcagattggttttaatgaggatgaaattcgtgccttcttaccgcgtgactatcgtaaacaagaactgaaacaggccactattcgtgctgaaattgagggaaaacatgat

SEQ ID NO: 5830 - protein, 137 aa, Streptococcus agalactiae
MITLFLSPSCTSCRKARAWLSKHEVAFEEHNIITSPLNKEELLQILSFTENGTEDIISTRSKVFQKLAIDVDELSTSSLMELISENPSLLRRPIILDKKRMQIGFNEDEIRAFLPRDYRKQELKQATIRAEIEGKHD

SEQ ID NO: 5831 - DNA, 402 bp, Streptococcus pyogenes
atggttaccttatttttatcacctagctgtaccagttgtcgtaaagcaagggcatggttagtaaaacacgaagttgactttcaagagcataatattattacaagtccattaagccgtgatgaattaatgtcaatcctctcttttacagagaatggaacggaggatattatttcaacacgttcaaaggtttttcaaaaacttgatattgatgtagaagagctttcaatttcagatttaattgatttaattgctaaaaatccaagtcttcttcgtcgccctattatcatggatcaaaaacgcatgcaaattggttttaatgaagatgaaattagagcgtttttatcgagagattatcgcaagcaagaactacgtcaagcaacgataaaagcagaaattgagggg

SEQ ID NO: 5832 - protein, 134 aa, Streptococcus pyogenes
MVTLFLSPSCTSCRKARAWLVKHEVDFQEHNIITSPLSRDELMSILSFTENGTEDIISTRSKVFQKLDIDVEELSISDLIDLIAKNPSLLRRPIIMDQKRMQIGFNEDEIRAFLSRDYRKQELRQATIKAEIEG

SEQ ID NO: 5833 - DNA, 930 bp, Streptococcus agalactiae
atgaaaatccattacattaatgattataaagatattcaagctaaagaagattgcgtcttagttttgggctattttgatggcttacatctgggacataaagccctctttgataaagctaaaaaaatcgcgaccgaaaaaaatttgaaaattgtcgtcttaacgtttaatgagacacctcgtctaaccttcgctcgcttccaacctgaattattgctacatcttacctctccagaaaaacgttctgaaaaatttcaagagtatggcgtcgatgagttatatttaatgaattttaccagtcatttttcaaaagtatcttctgacctttttattaagaaatatatttatggtctcagagcaaaagctgctgttgtcggttttgattataagttcggtcataatcgtaccagtggtgattatctagcgcgtaatttcaagggaccagtctatattattgatgaaatttctgaaggtggtgaaaaaatctcttctacacgtattcgtcaattgattacagagggtaatgttgagaaagctaaccaacttttgggttatgagttttcaacctgtggcatggtagtacatggagatgctagaggacgaactatagggttcccaactgctaatctagctcctattaatcgcacttacttacctgcagacggtgtttatatttccaatgttctgattaatggaaaatattatagagcaatgacgagcattggaaaaaatatcacttttggtggtacagaacttcgtttagaagctaatatctttgattttgatggcgacatttatggagaaactattgaaattttctggttaaaaagaatcagagaaatggtaaagtttaatggtattgacgatcttgtaaaacaacttaaaaaagataaagaaattgctttaaattggaaaaaagatagtcaaactctt

SEQ ID NO: 5834 - protein, 310 aa, Streptococcus agalactiae
MKIHYINDYKDIQAKEDCVLVLGYFDGLHLGHKALFDKAKKIATEKNLKIVVLTFNETPRLTFARFQPELLLHLTSPEKRSEKFQEYGVDELYLMNFTSHFSKVSSDLFIKKYIYGLRAKAAVVGFDYKFGHNRTSGDYLARNFKGPVYIIDEISEGGEKISSTRIRQLITEGNVEKANQLLGYEFSTCGMVVHGDARGRTIGFPTANLAPINRTYLPADGVYISNVLINGKYYRAMTSIGKNITFGGTELRLEANIFDFDGDIYGETIEIFWLKRIREMVKFNGIDDLVKQLKKDKEIALNWKKDSQTL

SEQ ID NO: 5835 - DNA, 930 bp, Streptococcus pyogenes
atggaaattgaatatatcaaagattatcgtgatattaaccaagaagatgatacagtcttgatattgggatattttgatggattacaccgtggtcataaagccttatttgacaaagcaagagaggttgcaaataaagaagggttaaaagtagtcgtttttacgtttacagagtctccgaaattggctttttcgcgtttttctcctgagttattgcttcatattacttatccaaagaagcgttatgaaaaatttgccgattacggtgtaaataaattatatttggttgattttacttctaaattctctaaggtctcatctgatcattttataactcattatattaaaaacctgaaagcaaagcatattgttgtcggttttgactataagtttgggcataatcgtacagatagtgattatttaaccagaaattttgaaggacaagtttataccattgaggaaataaaagaagatcatcgaaaaatttctgctacatggataaggaagcttattcaagaaggtaatgtagttaaagcaaaccacttgttaggctatgacttatcgacaaggggaagagtcgttcacggggatgcgcgtggccgtactattggtttcccaacagccaatctagctccaattgacaacacatacttaccagctgatggagtctatgttacaaatgttattgttgctaataaaatctatcgctctatgacgagtttaggtaaaaatgtgacatttggggggaaagagttgcgtctagaagttaacatttttgactttgacgaagagatctatggagaaattattgagattgtttggttagataagattcgagacatggaaaaattcgagggaatcgaagatttgactgatagattggaatatgataaacgaacagcattaaattggaaaaaagatagcaaattatct

SEQ ID NO: 5836 - protein, 310 aa, Streptococcus pyogenes
MEIEYIKDYRDINQEDDTVLILGYFDGLHRGHKALFDKAREVANKEGLKVVVFTFTESPKLAFSRFSPELLLHITYPKKRYEKFADYGVNKLYLVDFTSKFSKVSSDHFITHYIKNLKAKHIVVGFDYKFGHNRTDSDYLTRNFEGQVYTIEEIKEDHRKISATWIRKLIQEGNVVKANHLLGYDLSTRGRVVHGDARGRTIGFPTANLAPIDNTYLPADGVYVTNVIVANKIYRSMTSLGKNVTFGGKELRLEVNIFDFDEEIYGEIIEIVWLDKIRDMEKFEGIEDLTDRLEYDKRTALNWKKDSKLS

SEQ ID NO: 5837 - DNA, 882 bp, Streptococcus agalactiae
atgattacaggaataattaatttaaagaaagaagctggaatgacatcacacgatgctgtattcaagcttcgaaagatattacatacaaaaaaaataggacacggcggaactcttgatccagatgttgttggggttttaccaattgcggttggaaaagccactcgtgttattgaatatatgacagaaagtggcaaaatttatgaaggagaaatcactttaggatatgccacaagtacagaagattctagtggagaggtcatttcaagaactccactaactcaatccgatcttagcgaggatgttgtggatcatgcgatgaaaagttttaccggtccaattacacaagttcctcctatgtattcagcagttaaagtaaatggtaaaaaactctatgaatatgctcgttcaggagaagaagtagagcgacctaaacgacaaataacaatttctgaatttagacgcacaagcccattgtacttcgaaaaaggcatctgccgttttagtttctatgtctcatgcagtaaaggtacctatgttaggacgttagctgttgatctaggaataaaactaggatatgctagccatatgtctttcctaaaaagaacctcatctgcaggattatctattacacaatcattaacgcttgaagaaattaatgaaaaatataagcaagaagatttttcatttttacttccaattgaatatggtgttttagatctcccaaaagttaacctaactgaggaagataaagttgaaatctcatacggacgtcgtatcttattagaaaatgaagcagataccttagcagctttttatgaaaatagagttatcgctatactagaaaaacgtggcaatgaatttaaaccacacaaagtattgtta

SEQ ID NO: 5838 - protein, 294 aa, Streptococcus agalactiae
MITGIINLKKEAGMTSHDAVFKLRKILHTKKIGHGGTLDPDVVGVLPIAVGKATRVIEYMTESGKIYEGEITLGYATSTEDSSGEVISRTPLTQSDLSEDVVDHAMKSFTGPITQVPPMYSAVKVNGKKLYEYARSGEEVERPKRQITISEFRRTSPLYFEKGICRFSFYVSCSKGTYVRTLAVDLGIKLGYASHMSFLKRTSSAGLSITQSLTLEEINEKYKQEDFSFLLPIEYGVLDLPKVNLTEEDKVEISYGRRILLENEADTLAAFYENRVIAILEKRGNEFKPHKVLL

SEQ ID NO: 5839 - DNA, 882 bp, Streptococcus pyogenes
atgataaatggaatcattaatttaaaaaaagaagccggcatgacctctcatgacgcagtttttaaattacggaagttattacaagaaaaaaagattggacatggggggaccttagatcctgatgtggtcggtgttctaccaattgcagttggtaaggctactcgtgtgatcgaatacatgacagaagctggtaaagtttatgaaggacaagtgactctcggttactcaacaacgactgaggatgctagtggagaggtagttgcgaggtcctctttgccagctgtgctaacagaagaactcgttgatcaaacgatgacgactttccttgggaaaatcacacagaccccacctatgtattcagccgtaaaggttaatggccgtaaattatacgagtatgcgcgtgctggtgaaagtgtggaacgtcctagaagagaagtgactatttctctgtttgaacgcaccagccctttgaattttactgaagacggtctttgccgattctcttttaaagttgcttgtagcaaagggacttatgtgcggaccttagcagttgatttaggtcgagctctaggggtagagagtcatatgtccttcttgcagcgatcagcttcagcaggattaaccctcgagactgcctatactttgggagaaattgctgatatggtttctaaacaagagatgtcttttttgttaccgatcgagtatggcgttgctgatcttcctaaaatggttattgatgatactgaattgactgaaatttcatttggtcgccgtcttagtctccctagtcaagagccactgttagctgcttttcatggcgaaaaagtaattgctattttagaaaaaagagatcaagaatacaaacccaaaaaagttcttatt

SEQ ID NO: 5840 - protein, 294 aa, Streptococcus pyogenes
MINGIINLKKEAGMTSHDAVFKLRKLLQEKKIGHGGTLDPDVVGVLPIAVGKATRVIEYMTEAGKVYEGQVTLGYSTTTEDASGEVVARSSLPAVLTEELVDQTMTTFLGKITQTPPMYSAVKVNGRKLYEYARAGESVERPRREVTISLFERTSPLNFTEDGLCRFSFKVACSKGTYVRTLAVDLGRALGVESHMSFLQRSASAGLTLETAYTLGEIADMVSKQEMSFLLPIEYGVADLPKMVIDDTELTEISFGRRLSLPSQEPLLAAFHGEKVIAILEKRDQEYKPKKVLI

SEQ ID NO: 5841 - DNA, 435 bp, Streptococcus agalactiae
atgattatgaagattagaactgctacactagacgatagtgaaaaattagtccctttgtatcaagaattaggatacgcaatatcattatcagagattcaatctattttaaaggttattcttactcattcagattatggctttttgatagctgaggataatggcaaactcctcgccttcgttggatatcataaactttacttttttgaaaaaagtgggacttactatcgtattttagcactagtagttaatgaaaagcaccgtcgtaaaggcatcgctagtcaacttattaatcacgttaaacagctagctaaaacagatggaagtgaagtactggctttaaatagcagtttaaaagaatatcgtcaggaagcttatcatttttatgaaaacctagggttcaagaaggttagtacaggcttttcatactatttagat

SEQ ID NO: 5842 - protein, 145 aa, Streptococcus agalactiae
MIMKIRTATLDDSEKLVPLYQELGYAISLSEIQSILKVILTHSDYGFLIAEDNGKLLAFVGYHKLYFFEKSGTYYRILALVVNEKHRRKGIASQLINHVKQLAKTDGSEVLALNSSLKEYRQEAYHFYENLGFKKVSTGFSYYLD

SEQ ID NO: 5843 - DNA, 450 bp, Streptococcus pyogenes
atgttgagaccattaagtaaaacggactgtcctatgctacaagaaattaatgccaaagcccttggctatttagtttcgcttgacttgttagaaaggcaatatgaacgattgattgaggattgccatcactattttttagcttatgccgacaaggataccaatcaattattaggctatgttcacgctgaacggtatgaaaccctttatgcttctgatggtcttaatctcttgggcttggctgttttaccagcctatcagagaaggggaattgggagtgccttactaagggccctggaatcccaagctaggcaggaaggcattgcctttattcgcctcaattctgccagtcatcgtaaagaagcgcatgctttttaccgaaacctcgactatgcagatgataaaacacaattacgattcatcaaaaacttacaaggagatgacaatgatttt

SEQ ID NO: 5844 - protein, 150 aa, Streptococcus pyogenes
MLRPLSKTDCPMLQEINAKALGYLVSLDLLERQYERLIEDCHHYFLAYADKDTNQLLGYVHAERYETLYASDGLNLLGLAVLPAYQRRGIGSALLRALESQARQEGIAFIRLNSASHRKEAHAFYRNLDYADDKTQLRFIKNLQGDDNDF

SEQ ID NO: 5845 - DNA, 1269 bp, Streptococcus agalactiae
atgaacgaaatcaaatgccctcattgtggaacagcttttgccatcaacgagtctgaataccatcaattactagaacaaattcgcggagatgcttttgacaaagaagtaagtgaacggttggaaaaagaacgtctaatattaggggagcaagcaaaaaatcaattacaggaagttgttgtagaaaaagacaaggagatagctaaacttcagtacaaagtcaaacaatttcttatagaaaaagacaatcttctcaaagacaatgagtaccaactcgctgagcaattaaatcaaaaagacatgatgcttcgcgaccttgaaaaccaaatcgatagactacgtttagagcatgaaaatagcttgcaagaggcgctaacaaaagtcgaacgagaaagagatgcaatacaaaatcagttgcacattcaagaaaaagaaaaagatttagctttagcttcagtaaaaagtgattatgaagtacaactaaaggcagccaatgaacaagtagaattctataaaaacttcaaagctcaacagtctactaaagcagtaggagaaagtttagaacattatgctgaaacagaatttaataaagtgcgacatttggcctttcctaatgcttattttgagaaggacaatacattatcaagtcgtggctcaaagggggactttatctatcgagaaaaggatgaaaatgaccttgagtttttaagtatcatgtttgaaatgaaaaatgagtctgatgatactatcaagaagcataaaaatgaagattttttcaaagaattagataaagatcgtcgtgaaaaatcttgcgaatacgcagttttagtaactatgcttgaagcagacaatgactattataatactggaattgttgatgttagtcacaaataccctaaaatgtacgttatacgtccacaattttttatccaattaattggtattctaagaaatgcagcactcaataccttaaaatataaacaagagcttgctttgatgaaagaacaaaatattgacatcacacattttgaagaagatttagatattttcaaaaatgcatttgctaaaaattataattctgcaagcaaaaatttccagaaagcaatcgatgaaatagataaatctattaaacgtatggaagctgttaaggctgctttaacaacgtctgaaaatcaactacgtcttgcaaataataaattagacgatgtttctgtcaagaaattaacaagaaaaaatccaacaatgaaagcaaaattcgatgctctaaaagac

SEQ ID NO: 5846 - protein, 423 aa, Streptococcus agalactiae
MNEIKCPHCGTAFAINESEYHQLLEQIRGDAFDKEVSERLEKERLILGEQAKNQLQEVVVEKDKEIAKLQYKVKQFLIEKDNLLKDNEYQLAEQLNQKDMMLRDLENQIDRLRLEHENSLQEALTKVERERDAIQNQLHIQEKEKDLALASVKSDYEVQLKAANEQVEFYKNFKAQQSTKAVGESLEHYAETEFNKVRHLAFPNAYFEKDNTLSSRGSKGDFIYREKDENDLEFLSIMFEMKNESDDTIKKHKNEDFFKELDKDRREKSCEYAVLVTMLEADNDYYNTGIVDVSHKYPKMYVIRPQFFIQLIGILRNAALNTLKYKQELALMKEQNIDITHFEEDLDIFKNAFAKNYNSASKNFQKAIDEIDKSIKRMEAVKAALTTSENQLRLANNKLDDVSVKKLTRKNPTMKAKFDALKD

SEQ ID NO: 5847 - DNA, 1338 bp, Streptococcus pyogenes
atgaacgaaataaaatgccctcattgtcataccctatttactatcaatgagtcagagtatagtcaattattggaacaagtcagagggcaagcctttgatgaagaattgaaaaaacggctaatcaatgagatagccttgctggaagaaaaagcgaagcatcaattgcatgaggttgtcgcaaaaaaagaaacagctattaccagcttgacaaaccaattagagcaaattgaaaaagaacaagcctacctcagacaagaagaactggctaaaaaagaccagcttattgcttctttagaagcgaaacttgataaattagcctcgcaaaatgctttggaactggccaatcaattagctgagaaggacaaagaagtggttagtttgactaatcagctggacaaattagcacttgaaaaagatgccacgttccagtcaaaacttgctacaatcgaaaaagaacgcgatggaatcaaaaaccaattggcgcttcaagctaaagaaagtgaattgtcgttggcttcggtgcgcagcgactacgaagcacagttaaaagcggctaacgagcaagttgaattttataaaaatttcaaagcgcagcaatctaccaaagcaatcggagagagtctagaactctatgctgaaacagagtttaacaaagtaagaagctatgctttccccaatgctagctttgtcaaagataaccaattgtctagtcgtgggtcaaaaggggactatatttaccgagaggttgatgccaatggtgtagaaatcctctctatcatgtttgagatgaagaacgaggcagacaccaccaaaacaaaacataaaaatagtgattttttcaaggagttagataaagaccgtcgcgaaaaagattgtgagtatgctgttttggtaagcatgttagaagctgataatgattactacaatacagggattgttgatgtcagtcatgagtatcaaaagatgtatgtggttcgtcctcaactctttattcagttgatagggattctgcgaaatgcggccctgaatagtttacactataagcaagagttggccttggttaaggaacaaaatattgacatcactcacttcgaagaggatttggaccaatttaagaatgcctttgctaagaactatcagtctgccagcaacaactttaaaaaggctattgacgagattgataaatcgattaaacgcatggaggaagtgaaacgctttttaaccactagtgaaaatcagttacgcttagctaataataaattagaggatgtttcagttaaaaaactgacccgccaaaacccaaccatgcgagagaaatttgaagccctcaaggaccag

SEQ ID NO: 5848 - protein, 446 aa, Streptococcus pyogenes
MNEIKCPHCHTLFTINESEYSQLLEQVRGQAFDEELKKRLINEIALLEEKAKHQLHEVVAKKETAITSLTNQLEQIEKEQAYLRQEELAKKDQLIASLEAKLDKLASQNALELANQLAEKDKEVVSLTNQLDKLALEKDATFQSKLATIEKERDGIKNQLALQAKESELSLASVRSDYEAQLKAANEQVEFYKNFKAQQSTKAIGESLELYAETEFNKVRSYAFPNASFVKDNQLSSRGSKGDYIYREVDANGVEILSIMFEMKNEADTTKTKHKNSDFFKELDKDRREKDCEYAVLVSMLEADNDYYNTGIVDVSHEYQKMYVVRPQLFIQLIGILRNAALNSLHYKQELALVKEQNIDITHFEEDLDQFKNAFAKNYQSASNNFKKAIDEIDKSIKRMEEVKRFLTTSENQLRLANNKLEDVSVKKLTRQNPTMREKFEALKDQ

SEQ ID NO: 5849 - DNA, 588 bp, Streptococcus agalactiae
gtgccacaaaatccaacaagtaacccagagaaaaaaacttatttattatctgaattggtagactgctttaaaggtaaagctgtgccttcaaaagcagaagcaggtgatatccgtattattaatttgagtgatatgtctcctttaggaattgactaccataacttaagaacattccaagatgaacaacgatcgcttttaaaatatctacttcaggaaggcgatgttttaatcgcttcaaaaggaactgtcaagaaagttgctatttttgaagagcaagattaccctgtcgttgcctctgctaatattacaatactaaggcctacacaacacattagagggtactacttaaagcttttttttgattcagaagaaggtcaacaggcacttgagaatgctaacaaaggaaaagctgtgatgaatattagcacaaaggaactgttaaatattgcaataccaagtatcccgctttttagacaggattatcttatccaacgttataaacaggggctcaacgattacaaacgtaagatagcacgtgcagagcaggagtgggaacgtatccaaaatgacatcagacaacaacttagc

SEQ ID NO: 5850 - protein, 196 aa, Streptococcus agalactiae
MPQNPTSNPEKKTYLLSELVDCFKGKAVPSKAEAGDIRIINLSDMSPLGIDYHNLRTFQDEQRSLLKYLLQEGDVLIASKGTVKKVAIFEEQDYPVVASANITILRPTQHIRGYYLKLFFDSEEGQQALENANKGKAVMNISTKELLNIAIPSIPLFRQDYLIQRYKQGLNDYKRKIARAEQEWERIQNDIRQQLS

SEQ ID NO: 5851 - DNA, 594 bp, Streptococcus pyogenes
atggaaaatagcattgaggcctatctagcagatagcagagaaaaggtaacattaggcacagttgttgattgttttaaaggaaaagcagtctcaagtaaggttgtgccaggtgatgtgggattgattaatttatctgacatgggcaccttagggattcaatatcaccaattaagaactttccagatggatcgtaggcagctcttgcgttaccttttggaagacggagatgtcttaatcgcctctaagggaaccctaaaaaaagtctgtgtttttcataagcaaaatcgagatgtggtggcatcatcaaatatcactgtcttacgccctcaaaaactgttaaggggctactatatcaagttctttttggactcacctattggtcaagcgctcttggatgtagcggaccatggcaaagatgtgatcaatctctcaacgaaagaattgttggatattccaattcccgttattcctttagtgaaacaggactatttgattaatcactacttgagaggattaacagattatcatcgtaaactcaatcgagcagaacaggagtgggaatatattcagaatgaaattcaaaaaggattaggt

SEQ ID NO: 5852 - protein, 198 aa, Streptococcus pyogenes
MENSIEAYLADSREKVTLGTVVDCFKGKAVSSKVVPGDVGLINLSDMGTLGIQYHQLRTFQMDRRQLLRYLLEDGDVLIASKGTLKKVCVFHKQNRDVVASSNITVLRPQKLLRGYYIKFFLDSPIGQALLDVADHGKDVINLSTKELLDIPIPVIPLVKQDYLINHYLRGLTDYHRKLNRAEQEWEYIQNEIQKGLG

SEQ ID NO: 5853 - DNA, 474 bp, Streptococcus agalactiae
ttgatttggtttcttatttttgctgttggatggcaggtacaaagcgcatctgttgaaatattgtgtcgtggatggttacttccggtgagtgccacaaagtatagtaagatagtttctgtcagtatcagttcaatctttttcggtcttctgcatagcgctaataatcatgtaagccttatctcgattttcaatctgtgtctctttggactatttctatcgctctatgttattttaaaaggtaacatctggggggcgtgtggtattcatggcgcctggaactgtgtacaagggagtgtctttggaatcgaagttagtggagagccaatgttgtctaactccctagtccatgttaaaacctatggtgctgactggattagcggtggaaaatttggtgtggaaggaagcatgattaccagtattgttcttatcgtagcatgttattggctttatcaaaaatcgaattttccttacgac

SEQ ID NO: 5854 - protein, 158 aa, Streptococcus agalactiae
MIWFLIFAVGWQVQSASVEILCRGWLLPVSATKYSKIVSVSISSIFFGLLHSANNHVSLISIFNLCLFGLFLSLYVILKGNIWGACGIHGAWNCVQGSVFGIEVSGEPMLSNSLVHVKTYGADWISGGKFGVEGSMITSIVLIVACYWLYQKSNFPYD

SEQ ID NO: 5855 - DNA, 6834 bp, Streptococcus agalactiae
atgggagggaaaatgaatcaagaagtcttactacaaatgatgagagccactattcctcgtgatagagccttgcttgaggcatttttatattaccaagcagagcattttgatgaggagtgggatagtcttattcatcagtttatgaccaataggcaagaaataaataagtctgttcaagtacttcactttgagacagatgtttcagcttttgtccaggctagtccttatgatactgctcatgatctattgacctatacacaagttttcggccaaagtggtcttcaaaaactagataaactatcgccgtctgaaaaaaacttggtgatagaagtggccttgttcaatctggccactcgttttcaattattggattccaatggacactaccaaaccatatcgccggattcactcttacaaaagagtaggggagctaatttggtcaatgtgtatcgtgtggctaataatttagcggatcgtattagtcgagatattgaacagtttctcttaacttacgagcctgagcttgaaactagagctgatgaaactgttctagaaaatgaagaaactgttgatgagcacaaaacaagtgttcatcaagcaatatcttttcgagaagagggctctctggttattgctagtttggatgtagatttgtctcaactagatgttcaaataggaaaaaccagtcatctgccagcttatgaagagttatccttacgacgtaaatttgagattctaacatattttgaccaaattcgaaatgaacgttccaaagtcccaagttttagacgaggtgattttgacacagagatggaaatgacaccagtctttgatggcgaggaattacttacttatctcgaagctgatggcagtccctatgagctgaaacgaacgctgactacagtcgaagaaaaggaattagaaaaaattggacaagccattaggatagaaaatcaagaaaaattgactcagctagggattgatttatctcagtttgacccagaccgagtcggtattttattggatgcagcaggtcgttttcgtttaaaaaatgcagaccttgctttactaggtggttatcccaaagcctcggtaactcaactagcccttgcgacagaactactccaaatgggactaagtcatgaaaaggttgaatttttctttggtagccagctttccattgaagagctgcgacaagttgcctacgcctttttataccaagaactcagcagagaagatgcggagcaatttgaaaaagataaaggtaatcagccagatttaactctcagagattggaaaagcaagctagagaaagctgagggaaaagaagtagttgatgaagaattcgcggaaaatccactggttcagagagtattggacacttatcctctggggtcattggtttcctataagggacaggactttgaggtcatgtcggtcagcgatgctcgattgaacggtttgattcggattgagttagtcaatgacttttcggatatcattgaacaaaatccagttctttatgtgaggacctgggaagaagtcagtcaggcacttcatcagccaaaggcagaaccacaaacagagttagaagaagcggaccaagaattaaacctattctcatttctggaagaggagccagttcagagtattggactattggaaccagatgattcagaaaatggtcataacgatactgatcttgaagaaacagataatcaaattcctgaagaggaagtcgtcgaaacaattccagagattccagtaacggacttttattttccagaagatttgacggacttttatcctaagactgctagagataaggttgagacaaacattgtggccattcgtttggtaaaaaatctagaagtagagcaccgcaatgcttcaccaagtgaacaagaactccttgccaagtatgtaggctggggtggactagccaatgaattttttgatgactataatccaaaattttctaaggaacgagaagaactgaagagcctagtcacagataaagagtattcggatatgaaacagtcctccctgacagcctattacacagacccatccctgatccgtcagatgtgggataagttggaaagagatggctttacaggtggcaaaatcctagatccttccatgggaacagggaatttctttgcggctatgccaaaacacttaagagaaaagagtgagttgtatggcgtagagttagatactattacaggagctattgccaaacaccttcatcccaatagtcatattgaaattaagggatttgagacggtggcttttaacgacaatagttttgatttggtgatttcaaatgtgccctttgccaatatacgaattgcggataataggtacgataggccttacatgattcatgactactttgtcaaaaagtcacttgatttgcttcatgatggtggacaagtagcgattatctcttccacaggaactatggataagcgaacagaaaacatcttacaagatattcgtgagacaactgaatttcttggtggggttcgactgcctgactctgcctttaaggccattgcaggaacgagtgtcacaacggatatgttattcttccagaaacacttagacaagggatatgtggcagacgatttagccttttcaggttccattcgctatgacaaggatagtcgcatttggctcaatccttattttgatggagaatacaatagccaggtgctaggaacctacgaggtcaggaattttaacggaggaacactttctgttaaggggactagtgatgacttgattgcaagtgttgaaacagctctaaatcacgttaaggccccaagagagattgatagaaatgaggtcatcattaacccagatgtgttgaccaaacaagtcaatgatacctccattccagctgaaatgagggaaaatctaggtcagtacagttttggttatcaggggtctacagtttactatcgagataacaaaggcattcgagtcggaaccaagacggaagaaatcagttactatgtcgatgaagagggcaacttcaaagcatgggacaccaaacattctcaaaagcagattgatcgctttaatgccttagaagtgactgataacactgctctggatgtctatgtgaccgatgatgcagccaaacgtggtcagtttaaggggtattataaaaagacagttttctatgaagctccattgtcttataaagaagtggcacgtatcaaaggaatggtcgatattcgcaatgcctaccaagaagttattgccattcaacgctattatgactatgataaggagacctttaaccacttgttaggcaaactcaatcgtacctatgatagctttgtcaaacactatgggtatttgaatagtgctgtgaaccgcaatctttttgatagtgatgataagtattcgcttcttgctagtttggaagatgaaagtctggatccaagtggaaagtctgttatctatactaaatcccttgcctttgagaaggctctagtgcgtcctgaaaaagaggttaaaaaggtgcatactgcccttgatgccttaaattcgagcttggctgacggacgaggtgttgatttcgcttatatgatgtctatctatcaggttgaatcgcagatgaccttgattgaggagttaggcgacctcattatgcctgatcctgagaagtatttgaatggagaattgacctatgtttctcgccaagactttctttcaggggatgtcgtcactaagttagaagtggtagatctattcgtcaaacaagacaatcaggactttaactggtcacattatgcgggacttctagaagctatcaaaccagcccgtattactttggcagacattgattatcgaatcggttcacgctggattcctctggctgtttatggaaaatttgcccaagaaacctttatggggaaagcctatgaactgtcagaccaagaagtagcgacagtcctagaagtcagtcccattgacggggttatcacttaccaatctaagtttgcctacacctattccaacgcaacggataggagtttaggtgtccctgcttcacgctatgatagtggtcgaaaaatctttgaaaatctcctgaattccaatcaaccaaccatcacaaaacaagttgtcgaaggggataagaaaaagaatgtgacggatgtagagaaaacaacggtcctgcgtgccaaggaaacacacctacaagaactctttcaaggttttgtagcaaagtatccagaagtccaacaaatgattgaagacacctataataggctctacaatcgtacggtatcaaagtcctatgatggtagtcatttaaccattgatggacttgctcagaatatctccttacgtcctcaccaaaagaatgccattcaacgaattgtcgaggaaaaacgtgctctactagctcatgaagttggttcaggtaaaacacttaccatgcttggggcaggattcaaactgaaagaactcggaatggtacataaaccactttatgtggtgccgtctagtctgactgctcagtttggtcaagaaatcatgaaatttttccctaccaagaaagtctatgtgactactaagaaagactttgccaaagccaaacgcaagcagtttgtgtcccgtattattacaggggactatgatgccattgtcattggggattcacaatttgagaagataccgatgagtcgtgaaaaacaggtcacctatatcaatgacaaacttgagcaactccgagaaatcaagctaggaagtgacagtgattacacggtgaaagaagcggaacgttcgattaagggattagaacaccagttggaagaactccaaaaactagagcgagatacctttattgagtttgaaaaccttggaattgattttctttttgtggatgaggctcatcacttcaagaatatccgtccaatcactggacttgggaatgtagctggaatcaccaacacaacttctaaaaagaacgtggatatggagatgaaggtgagacaagtacaggcagagcatggagatagaaatgtcgtttttgcgacaggaacaccagtttctaactctattagtgaacttttcaccatgatggattacattcaacctgatgtcttggaacgatacctggtatcaaattttgactcctgggttggggcttttgggaatatcgaaaactccatggaactagccccgacaggagataagtaccaacccaagaaacggttcaagaaatttgtcaaccttcctgaactcatgcgaatctacaaggaaactgccgatattcagacctcagacatgcttgatttaccagtaccggaagctaagattattgcggtggaaagcgagttaacgcaagctcagaaatactatttggaagagctggtaaagcgttcagacgctatcaagtcaggtagtgttgatccaagtagagataacatgcttaaaatcacaggagaagccagaaaactagctattgatatgcggttgattgaccctacttactccttatcggataatcagaaaatccttcaagtagtcgataatgtcgagcggatttaccgtgatggagctggagacaaagccactcagatgattttctcagatattggaacccctaaaagtaaggaagaagggtttgatgtctacaatgaacttaaggacttgtttgtcgatcgagggataccaaaagaagaaattgcctttgtccatgatgccaatactgatgagaagaaaaactctctgtcacgcaaggtcaatagtggagaagtacggattctcatggcttctacggaaaaagggggaacaggattaaacgtccaatctcgcatgaaagctgtccactatttagacgttccctggaggccctcagacattgtccagcgaaatggacgactaattcgacaaggaaacatgcaccaggaggtagatatttatcactatattactaaagggagctttgacaattacctctggcagacgcaggagaataagctaaagtatatcacccagataatgacctcaaaagatcctgtgagatcagctgaagacattgatgaacaaaccatgaccgcctcagactttaaggcattggcaactgggaacccttatctcaaactcaaaatggagttggaaaatgaactgacagttttagagaatcaaaaacgagcctttaatcgctccaaagacgagtatcgccataccatttcctatagcgagaagcacctccctattatggaaaaacggttgagtcaatatgataaagatattgcccaatctttggcaaccaagtcgcaagattttgtcatgcgatttgacaatcaagcaatggataatcgtgctgaagctggggactatctgcgaaaactcattacctataaccgctcagagaccaaggaagtcaggacacttgccagctttagaggatttgatttaaaaatgactacacgaggtgctagtgagcccttaccagaaaccatttctttaatgattgtaggtgataaccagtatactgtcgcccttgatttgaaatcagacgtgggaaccattcaacggattagtaatgccattgaccatattatagatgaccaagaaaagacgcaagagctggtaaaggatttaaaagataagctacgagtagccaaagtagaagttgataaagtctttccaaaggaagaggactatcagcttgtaaaggctaagtatgatgttttagctcccttggttgaaaaagaagcagagattgaagagatagatgcagctttggccaagtttagtgaagatacaacaccccaaaagaagcaacaaatagcactcgagata

SEQ ID NO: 5856 - protein, 2278 aa, Streptococcus agalactiae
MGGKMNQEVLLQMMRATIPRDRALLEAFLYYQAEHFDEEWDSLIHQFMTNRQEINKSVQVLHFETDVSAFVQASPYDTAHDLLTYTQVFGQSGLQKLDKLSPSEKNLVIEVALFNLATRFQLLDSNGHYQTISPDSLLQKSRGANLVNVYRVANNLADRISRDIEQFLLTYEPELETRADETVLENEETVDEHKTSVHQAISFREEGSLVIASLDVDLSQLDVQIGKTSHLPAYEELSLRRKFEILTYFDQIRNERSKVPSFRRGDFDTEMEMTPVFDGEELLTYLEADGSPYELKRTLTTVEEKELEKIGQAIRIENQEKLTQLGIDLSQFDPDRVGILLDAAGRFRLKNADLALLGGYPKASVTQLALATELLQMGLSHEKVEFFFGSQLSIEELRQVAYAFLYQELSREDAEQFEKDKGNQPDLTLRDWKSKLEKAEGKEVVDEEFAENPLVQRVLDTYPLGSLVSYKGQDFEVMSVSDARLNGLIRIELVNDFSDIIEQNPVLYVRTWEEVSQALHQPKAEPQTELEEADQELNLFSFLEEEPVQSIGLLEPDDSENGHNDTDLEETDNQIPEEEVVETIPEIPVTDFYFPEDLTDFYPKTARDKVETNIVAIRLVKNLEVEHRNASPSEQELLAKYVGWGGLANEFFDDYNPKFSKEREELKSLVTDKEYSDMKQSSLTAYYTDPSLIRQMWDKLERDGFTGGKILDPSMGTGNFFAAMPKHLREKSELYGVELDTITGAIAKHLHPNSHIEIKGFETVAFNDNSFDLVISNVPFANIRIADNRYDRPYMIHDYFVKKSLDLLHDGGQVAIISSTGTMDKRTENILQDIRETTEFLGGVRLPDSAFKAIAGTSVTTDMLFFQKHLDKGYVADDLAFSGSIRYDKDSRIWLNPYFDGEYNSQVLGTYEVRNFNGGTLSVKGTSDDLIASVETALNHVKAPREIDRNEVIINPDVLTKQVNDTSIPAEMRENLGQYSFGYQGSTVYYRDNKGIRVGTKTEEISYYVDEEGNFKAWDTKHSQKQIDRFNALEVTDNTALDVYVTDDAAKRGQFKGYYKKTVFYEAPLSYKEVARIKGMVDIRNAYQEVIAIQRYYDYDKETFNHLLGKLNRTYDSFVKHYGYLNSAVNRNLFDSDDKYSLLASLEDESLDPSGKSVIYTKSLAFEKALVRPEKEVKKVHTALDALNSSLADGRGVDFAYMMSIYQVESQMTLIEELGDLIMPDPEKYLNGELTYVSRQDFLSGDVVTKLEVVDLFVKQDNQDFNWSHYAGLLEAIKPARITLADIDYRIGSRWIPLAVYGKFAQETFMGKAYELSDQEVATVLEVSPIDGVITYQSKFAYTYSNATDRSLGVPASRYDSGRKIFENLLNSNQPTITKQVVEGDKKKNVTDVEKTTVLRAKETHLQELFQGFVAKYPEVQQMIEDTYNRLYNRTVSKSYDGSHLTIDGLAQNISLRPHQKNAIQRIVEEKRALLAHEVGSGKTLTMLGAGFKLKELGMVHKPLYVVPSSLTAQFGQEIMKFFPTKKVYVTTKKDFAKAKRKQFVSRIITGDYDAIVIGDSQFEKIPMSREKQVTYINDKLEQLREIKLGSDSDYTVKEAERSIKGLEHQLEELQKLERDTFIEFENLGIDFLFVDEAHHFKNIRPITGLGNVAGITNTTSKKNVDMEMKVRQVQAEHGDRNVVFATGTPVSNSISELFTMMDYIQPDVLERYLVSNFDSWVGAFGNIENSMELAPTGDKYQPKKRFKKFVNLPELMRIYKETADIQTSDMLDLPVPEAKIIAVESELTQAQKYYLEELVKRSDAIKSGSVDPSRDNMLKITGEARKLAIDMRLIDPTYSLSDNQKILQVVDNVERIYRDGAGDKATQMIFSDIGTPKSKEEGFDVYNELKDLFVDRGIPKEEIAFVHDANTDEKKNSLSRKVNSGEVRILMASTEKGGTGLNVQSRMKAVHYLDVPWRPSDIVQRNGRLIRQGNMHQEVDIYHYITKGSFDNYLWQTQENKLKYITQIMTSKDPVRSAEDIDEQTMTASDFKALATGNPYLKLKMELENELTVLENQKRAFNRSKDEYRHTISYSEKHLPIMEKRLSQYDKDIAQSLATKSQDFVMRFDNQAMDNRAEAGDYLRKLITYNRSETKEVRTLASFRGFDLKMTTRGASEPLPETISLMIVGDNQYTVALDLKSDVGTIQRISNAIDHIIDDQEKTQELVKDLKDKLRVAKVEVDKVFPKEEDYQLVKAKYDVLAPLVEKEAEIEEIDAALAKFSEDTTPQKKQQIALEI

SEQ ID NO: 5857 - DNA, 549 bp, Streptococcus agalactiae
atgacttggaactttgacaccatgaaagaggctttgtctgaaatggagaaggtcgattaccaagagtttatcaaggcttttctctctttggaattaagtatttctaatagaacaatcctcaatcaggtttatcaagattatatggatgaggatgacctatccttgataagtgatgagctacgagttaaagttgatagttatcaggatgaagtacaggcagatatgactgacattctggaaaagctgtaccgaacaggtgaaggctctaattttattatggatttaatgtcctcaaatagtctctcagaaaccttggaacagtatgaggttttggatagtgacgattattcaccacttagccttgaaaccttacaggccatgatccaacaggacttggctatttccagtcaggattattttggagatttggttcaccttgccttgcaaaaagatttactagaccagaaaagtcatttcttacaacactatgtggcaattgtaatggaaggtattccacaagaaagagaccaacgaaccttggtcctagat

SEQ ID NO: 5858 - protein, 183 aa, Streptococcus agalactiae
MTWNFDTMKEALSEMEKVDYQEFIKAFLSLELSISNRTILNQVYQDYMDEDDLSLISDELRVKVDSYQDEVQADMTDILEKLYRTGEGSNFIMDLMSSNSLSETLEQYEVLDSDDYSPLSLETLQAMIQQDLAISSQDYFGDLVHLALQKDLLDQKSHFLQHYVAIVMEGIPQERDQRTLVLD

SEQ ID NO: 5859 - DNA, 189 bp, Streptococcus agalactiae
atgaatccaaaaactatttatgaaaaggattcagaccaggatggtctgacagatgctcaggaactagctttgggaaccgatccgcagtctgttgacacagatggtgatggtcaagctgatttagaggagctacaatctggacattcaccattagtcccacaaaaggagttgtacaatgacttggaactt

SEQ ID NO: 5860 - protein, 63 aa, Streptococcus agalactiae
MNPKTIYEKDSDQDGLTDAQELALGTDPQSVDTDGDGQADLEELQSGHSPLVPQKELYNDLEL

SEQ ID NO: 5861 - DNA, 4893 bp, Streptococcus agalactiae
atgaccaaaacatgtaatcatcactttcttgtcaatcaggaaaaaggcgagaaacacgtctttcgcaagagtaaaaaatatcgcactctatgttccgttgcccttggaaccatggtgacggctgttgttgcttggggaggaacggttgcacatgccgatgaagttacaacttcagttgacaccaccattcaacgaacggagaatccagccacaaatttaccagaagcacaaccaaaccctgtatctgaacaaactgaaagtatggcatcaactggacaatctaacggtgcgattgctgttaccgtaccacatgatacggtaacacaagcagttgaagaagcaaaggctgaaggtgtttctacggttgaagatagtccaatggatttaggaaatacaagatctgcggtagaaaccaaccaacaaatttcaaaagcagatgcagatacccaaaaacaggttgagactattaatgaagtcactaaaacctacaaagctgataaagcgacatacgaatcgaataaagctcgcatcgaacaggaaaataaggagctgtcacaggcctacgagggggccaaccaaactggtaaagagacaaatgcttgggttgatactaaagtcaatgacctaaaagctcggtatgcagatgctgatgtgacagtaaaagaacaagtagtttcatcaggaaatgggacatctgtccttgactatacaaactatggcaaggctgttgaaaccattcaatcaactaacgaacaagctgtagcggattatctaacaaagaaaacaaaggcagatgatattgttgcgaaaaatcaggccattcaaaaagaaaatgaagctggacttgctaatgcaaaggcagataatgaagccattgaaaggcgtaatcaggctggtcaagcagctgttgatgctgaaaaccgtgcaggtcaagccgcagtagatcaagctaatcaggagaaacaacaattagtttcagatcgtgcagccgagattgaagctattacaaaacgtaataaagaaaaagaagccgcagccagaaaagagaatgaagcgattgatgcctataataccaaagaaatggaacgctatcaacgtgacttggccgagatttcaaaaggtgaagaaggttatatttctgaagcccttgctcaagccctcaatctcaacaacggtgaaccccaagcacaacatggggccattacccgaaatcctgatcagatcatttcaactggcgatgctttgctgggaggctactcaagaatattggattcaacaggattctttgtctatgacatgttcaaaacaggtgagactcttagttttaactatcaaaatcttcaacatgcacgatttgatggtaaaaagattagtcgtgtgacttacgatattaccaaccttgtatcaccagctggaaccaatgccgtgaaattggttgtgccaaatgatccaaccgagggttttattgcctatcgaaatgacggaaacggtgactggcgaacagacaagatggagtttcgtgtagttgccaagtattacttggaagacggttcacaagttaccttctccaaagaaaagccaggagtcttcacacactcttccctcaatcataatgacattggtttagaatatgtcaaagattcatctgggaaatttgtgccgattaatggttcaactgttcaagtgactaatgaaggtctagcacgttctttgggttccaaccgtgcaagtgatttgaatttacctgaggaatgggataccacatcaagtcgttatgcttataaaggagctattgtctcaacagttacatcaggtaatacctacacagtaacctttggccaaggcgatatgccacagaatgttggcttgtcatactggttcgccttaaataccctaccagtggcacgtacagtaacaccatatagtcccaaacctcatgtaacggtggaacttgaacccattccagaacctattacggtaacaccagatatctatacaccaaaaacatttacaccagaaaagcctgtaactttcacaccaaagcctttggatgaagtagtgcagcctagtctaactttgaccaaggtaaccttgcctgtcaaacctattccaaaagaacttccaacgccaccacaagtaccaactgtccattatcatgcgtaccgtttgacgacaacttcagagattatgaaagaagtggtcaatagtgaccaagctaatcttcatgagaaaactgtcgcaaaagattcaacggtgatttatcccttaacagttgatgccttatcgcccaatcgtgcccaaacgactagtctcatttttgaggactacttgcctgctggttacctatttgataaggaaacaacacaaaaagagaatggaaactatgtccttagctttgatgagactaagaattttgtgaccttaaccgcaaaggaaaacttgttgcaggaggtaaataaagatttaactcaggtttatcaattgaccgccccaaaactctatggttctgttcaaaatgatggggcaacctattccaatagttacaaactccttttgaacaagggtacaaccaatgcttacacagtcacttcaaatgttgtaacggttcgtacaccaggtgatggggagacaaccacgctcattacaccagataaaaacaatgaaaatgcggatggtgtcctcattaatgacacggtcgtagcccttggtacaaccaaccactatcgtttgacttgggatttggaccagtataagggagatcgttctgctaaagagacaattgcacgaggcttcttctttgtggacgattacccagaggaagtgcttgatgtggtggaaaatggcacggctatcacaacccttgacggtcagaaggtatcaggaattacagttaaaaactatgcttccctaaatgaagcccctaaagaccttcaagataaattggctcgtgctaagattacaccgacaggtgcctttcaagtctttatgccggatgacaaccaagccttttatgaccagtatgttcaaacaggaacttctttagctcttttgaccaaaatgacggttaaagatagtctctatggtcagacaaagacctatacaaacaaggcttatcaagttgatttcggcaatggctatgaaaccaaggaagtgaccaacacccttgtttcaccagaacccaagaaacaaaacctaaacaaggataaagtggatatcaacgggaagcccatgctagtgggaactcaaaatcactatactctttcatgggacttggaccaataccgagggattaaagcagacaactctcagattgcacaaggtttttactttgtggatgattatccagaagaagctttattgccagatgaagcagctattcagtttgtcacatctgatggcaaaacagtttcaggaatcacggtgaagtcttattctcaattattagaagctcctaaaacgctacaagcagccttttccaaacaaaaaattcagcctaaaggagcttttcaagttttcatgcctgaggacccacaagccttttttgaatcttatgtgaccaagggggagaatattaccattgtcactccaatgacggttttggaaaccatgcttaattcagggaagtcttatgaaaacgtggcttatcaggtggactttgggcaagcctatgaaaccaatacggtgaccaattttgtccctaaagtaactccacataagtctaataccaatcaagaaggtatttcaattgatggaaagactgttcttccgaatacggtcaattattacaaaattgtcttggattacagtcaatacaaggatatggtcgtgacggatgatgttcttgccaagggattttacatggtagacgattacccagaagaagcccttaccctaaatcctgatggcattcaagttttggataaggatggcaatcgtgtatctggtatctctgtcagcacctacgctagtttgtcagaagctccgaaagttgttcaagatgccatggctaaacgtcagtttacacctaaaggagccattcaagttcttagtagcgatgatccaaaagtcttttatgatacctatgtgaagactggtcaaaccttagttgtcacgcttccgatgacggtaaaaaatgagttgaccaaaacaggtggtcagtatgaaaatacagcctatcaaattgattttggcttggcctatgtcacggaaacagtggttaataatgttccaaaattagacccacaaaaagatgtggtgatcgacttgtctcataaagatgccagccttgacgggaaagaagtggccttgcatcaaacctttaactatcgcttggttggagcgatgattccaagcaatcgtgcgactgatttatttgaatatggttttgaagataactatgatgaaaagcatgatgagtataatggtgtttatcgcagctatctgatgacggatgtcatcctcaaagacggttctgtcttaaaagaggggacagaagtcacgaaatacaccttgcaacaggtagatacagaaaatggcctcgtgtcaatttcatttgataaatccttcttagagactgtctctgatgattcagcctttcaggcagatgtttaccttcaaatgaaacggattgcggctggtcaggtggagaatacctatctccatacagtgaatggctatgtcattagctcaaatacagttgtaacacatacacctcaacctgaagaaccaagtccaaatcaacccactccacctcaaccaccaattgagactattgaaccgcctgttccagcaagtattttgccaaatacaggggaacaggaatcccttttgggcttgattggagctggtattctacttggtacggcttatggactgaagaaaaaggaggagaag

SEQ ID NO: 5862 - protein, 1631 aa, Streptococcus agalactiae
MTKTCNHHFLVNQEKGEKHVFRKSKKYRTLCSVALGTMVTAVVAWGGTVAHADEVTTSVDTTIQRTENPATNLPEAQPNPVSEQTESMASTGQSNGAIAVTVPHDTVTQAVEEAKAEGVSTVEDSPMDLGNTRSAVETNQQISKADADTQKQVETINEVTKTYKADKATYESNKARIEQENKELSQAYEGANQTGKETNAWVDTKVNDLKARYADADVTVKEQVVSSGNGTSVLDYTNYGKAVETIQSTNEQAVADYLTKKTKADDIVAKNQAIQKENEAGLANAKADNEAIERRNQAGQAAVDAENRAGQAAVDQANQEKQQLVSDRAAEIEAITKRNKEKEAAARKENEAIDAYNTKEMERYQRDLAEISKGEEGYISEALAQALNLNNGEPQAQHGAITRNPDQIISTGDALLGGYSRILDSTGFFVYDMFKTGETLSFNYQNLQHARFDGKKISRVTYDITNLVSPAGTNAVKLVVPNDPTEGFIAYRNDGNGDWRTDKMEFRVVAKYYLEDGSQVTFSKEKPGVFTHSSLNHNDIGLEYVKDSSGKFVPINGSTVQVTNEGLARSLGSNRASDLNLPEEWDTTSSRYAYKGAIVSTVTSGNTYTVTFGQGDMPQNVGLSYWFALNTLPVARTVTPYSPKPHVTVELEPIPEPITVTPDIYTPKTFTPEKPVTFTPKPLDEVVQPSLTLTKVTLPVKPIPKELPTPPQVPTVHYHAYRLTTTSEIMKEVVNSDQANLHEKTVAKDSTVIYPLTVDALSPNRAQTTSLIFEDYLPAGYLFDKETTQKENGNYVLSFDETKNFVTLTAKENLLQEVNKDLTQVYQLTAPKLYGSVQNDGATYSNSYKLLLNKGTTNAYTVTSNVVTVRTPGDGETTTLITPDKNNENADGVLINDTVVALGTTNHYRLTWDLDQYKGDRSAKETIARGFFFVDDYPEEVLDVVENGTAITTLDGQKVSGITVKNYASLNEAPKDLQDKLARAKITPTGAFQVFMPDDNQAFYDQYVQTGTSLALLTKMTVKDSLYGQTKTYTNKAYQVDFGNGYETKEVTNTLVSPEPKKQNLNKDKVDINGKPMLVGTQNHYTLSWDLDQYRGIKADNSQIAQGFYFVDDYPEEALLPDEAAIQFVTSDGKTVSGITVKSYSQLLEAPKTLQAAFSKQKIQPKGAFQVFMPEDPQAFFESYVTKGENITIVTPMTVLETMLNSGKSYENVAYQVDFGQAYETNTVTNFVPKVTPHKSNTNQEGISIDGKTVLPNTVNYYKIVLDYSQYKDMVVTDDVLAKGFYMVDDYPEEALTLNPDGIQVLDKDGNRVSGISVSTYASLSEAPKVVQDAMAKRQFTPKGAIQVLSSDDPKVFYDTYVKTGQTLVVTLPMTVKNELTKTGGQYENTAYQIDFGLAYVTETVVNNVPKLDPQKDVVIDLSHKDASLDGKEVALHQTFNYRLVGAMIPSNRATDLFEYGFEDNYDEKHDEYNGVYRSYLMTDVILKDGSVLKEGTEVTKYTLQQVDTENGLVSISFDKSFLETVSDDSAFQADVYLQMKRIAAGQVENTYLHTVNGYVISSNTVVTHTPQPEEPSPNQPTPPQPPIETIEPPVPASILPNTGEQESLLGLIGAGILLGTAYGLKKKEEK

SEQ ID NO: 5863 - DNA, 600 bp, Streptococcus agalactiae
gtggggggccgtatgtcaaaaaaagagattctactcgattttatagaaaagaacaatggcattgtcacaaacaaagattgtaaagcactaggtattccaacaatatatctgacaagactagagaaagaaggcattatcttccgagttgaaaaaggtattttcctaacccaaaacggagactatgatgaatactacttctttcaatatcgttttcctaaggctattttctcttatatttcggcactgtatctacaacagtttacagatgaaattccacaatattttgatgtgacagttcctagaggctaccgctttaatactcctccagctaatctaaacattcactttgtctctaaagaatacagcgagctgggaatgactactgtacctactcctatgggaaacaacgtaagggtatatgattttgaacgtattatttgtgattttgtaatacatcgagaaaagattgattccgaactctttgtcaagacacttcaatcttatgggaactatcctaaaaaaaatctagcaaaactctatgaatatgcgacaaaaatgaatactttagaaaaagttaaacaaactctggaggttctaata

SEQ ID NO: 5864 - protein, 200 aa, Streptococcus agalactiae
MGGRMSKKEILLDFIEKNNGIVTNKDCKALGIPTIYLTRLEKEGIIFRVEKGIFLTQNGDYDEYYFFQYRFPKAIFSYISALYLQQFTDEIPQYFDVTVPRGYRFNTPPANLNIHFVSKEYSELGMTTVPTPMGNNVRVYDFERIICDFVIHREKIDSELFVKTLQSYGNYPKKNLAKLYEYATKMNTLEKVKQTLEVLI

SEQ ID NO: 5865 - DNA, 843 bp, Streptococcus agalactiae
atgaacaaagctaaattaacagcactctgtcataaaatatcaaagaatactggtttaacctttaattccgtgatgacctattacttcctagaagtcattttgaaaaaattaagtcaaagttcttattcaaatcactatatcttcaaaggaggattcctactgtcgaatgtcatcggagttgaatctcgtagcactgttgatattgactttttattccatcaaataacactctcagaagaaactgttaaacagcaactcaaggaaattttagcagattccgaagaaggtatatcttttgtgattcaatcaatcacaactattaaagaaagtgatgactatggtggctatcgagcaacaatttcgtgccaacttgagaatattaaacaagttatccatttggatattgcgacaggtgatgttgtaactcctcagccgataacatacgactataaagctatttttgatgaagacaattttccaatcattgcttatacaattgaaacaattctagctgaaaaactccaaaccatctattcacgaaacttcttgaacagcagaagcaaagacttttacgatgtttatattctttcaaaattgaagaaaaaagatattgatttcaatcagttaaaaaatgcttgccaaagaactttttcctatcgcgaaactgagctcgatttcgaaaaaattattgaactactcgagagattcaaatctgatcctactcagaatcaacaatggcaaaattattcaaaaaaatatagttatacaaaaggaatttcacttgcaaatgtgcttgatgagatgattagtcttattacaattattatttctactgactctgat

SEQ ID NO: 5866 - protein, 281 aa, Streptococcus agalactiae
MNKAKLTALCHKISKNTGLTFNSVMTYYFLEVILKKLSQSSYSNHYIFKGGFLLSNVIGVESRSTVDIDFLFHQITLSEETVKQQLKEILADSEEGISFVIQSITTIKESDDYGGYRATISCQLENIKQVIHLDIATGDVVTPQPITYDYKAIFDEDNFPIIAYTIETILAEKLQTIYSRNFLNSRSKDFYDVYILSKLKKKDIDFNQLKNACQRTFSYRETELDFEKIIELLERFKSDPTQNQQWQNYSKKYSYTKGISLANVLDEMISLITIIISTDSD

SEQ ID NO: 5867 - DNA, 105 bp, Streptococcus agalactiae
atgccaaacaaggttagtttagtcttattcactcccttaccagatgtcaaaacaacgttctctccatcaagagataccttgccatccatcggagctacaatgact

SEQ ID NO: 5868 - protein, 35 aa, Streptococcus agalactiae
MPNKVSLVLFTPLPDVKTTFSPSRDTLPSIGATMT

SEQ ID NO: 5869 - DNA, 174 bp, Streptococcus agalactiae
atgacactactacctgaaacactcatgaaaaagctcatcatcaaaaggagtatcaagagaatgcctgagacaatccaagtcaaaggatttcccgcaaggacagaaaagaaagtcatacttcccttaatggcttggacgattcctttaaaacctgcgacactttgttttctgaca

SEQ ID NO: 5870 - protein, 58 aa, Streptococcus agalactiae
MTLLPETLMKKLIIKRSIKRMPETIQVKGFPARTEKKVILPLMAWTIPLKPATLCFLT

SEQ ID NO: 5871 - DNA, 2799 bp, Streptococcus agalactiae
atgaaagaggataaaaagctagtcaaacaggctaggcaaaactttcgaagcaacttaaaatcagctcgtatgcattatcggaaagaagttaggaccttaaaacagactgttcctaaaaaaggaagatttcgaaaatcagccaaaaattctctgtttcaggaaaagaaaacagagttaaaaggaaatctactcagtagccaaaaggaagcagaagagaagttcataaaggaaattacctatgtttctcctagactgttgaaggcaaaggaaatcaagaactatcgacttccgcaagctcaagaacgtttgcggacggcaagaaaacatctgtcagaagtgaaactaagtgagaaacagcaggtagttaatcccaagtttactttccaaaaagaaaatccttccctgaagtctcgctttcagtttcaccaagaaaaatcatttgatcggctaagtgcagaaaaagacgtaagttctgccaagcgtgaggttaaacaactcaagaaagtccaaaagactaagaaaaactctaccaaagtcaaagctggattaggcttggctgcatctgaatcccttgacctgatagcacaggaggatgatttagatggtctaagaaccatgaaggatactagtttgaaagccagacgctatggcaggtttacttatcaagcaggtaaggtggcagtaaaaagtggacagactggtgtgcggtttaccaaaacaaaattttctcatggaaaggaacgattccagaacttcaaaaagggaaaaggattcacacgccagaaacctcttaaaccaagaagacgctaccaaacctttttaaatcatgtcagaaaacaaagtgtcgcaggttttaaaggaatcgtccaagccattaagggaagtatgactttcttttctgtccttgcgggaaatcctttgacttggattgtctcaggcattctcttgatactccttttgatgatgagctttttcatgagtgtttcaggtagtagtgtcatacaacaagatgaaatagaattgagtaagagttatacccacatgacgtgggaagatgcggaacatacaagaaccaacgataagggaattaccttttacactaagattgatgaggtcatggtttacatgaatcatcaataccaagactacaagttagatgatttcatagagacaagcggaacaacctacaaagaatttctcagtcaactgtggtcggacttaaacggtggagattctattaaatccatgtctgacttatataaagaacctgcttacaagctgtctgatgaggaccaagaagaactaaacgaattgaccgaagaaggcaactatttagcccttcaagaattggacaatccctttcagggacagaccgatgaggatagtttaagcatgacctaccgatatggttatgaggtcattgatgagaaaccaacgcttcatcatcatatcatcttagaagcaaaagaaggtcaagtcattgtagctccgatggatggcaaggtatctcttgatggagagaacgttgttttgacatctggtaagggagtgaataagactaaactaaccttgtttggcattcattcaggccgagtgagtgaaaatcaacaagtcttggcaggagatattattggtcagaccaaagacggaacgggtctaaaagtcacctatcaaaaggttgatgatgacacggataagttggtctatgtcaatccagcattctactttccaaaagtgattcaggttcagaccaccattcttccaactatcggtcagtttggcggcgatgagttcgagagagccaaggcaatttatgactatcttaaaagcaaaggtgcgaccaatcaagctatcgcagccattctaggtaactggtcggtagaatcctccattaatccaaaacgagctgaaggcgactatttatctccacctgttggtgcgacagatagttcgtgggatgatgagggctggctcacacttaatggtccaactatatacaatggacgttacccaaatattctcaaacgtggtttaggcttaggccaatggacagataccgcggatggttcacgcagacatactttattgttggaatatgccaaaggaaaacatcaaaaatggtatgacttaggcttacaactggatttcatgttgtatggggatagtccttattacaccaactggttaaaggacttcttcaaaaattcaggcagtccagctagtcttgcccagctctttctcatttactgggaaggaaatagtggtgataagctacttgaacgtcaaacacgagccagtgagtggtattaccaaattgaaaaaggctttagtcaacctaacggtgggacagcacaaagcgatccaaaagcacttgaagctgtacgagaagacctttttgaaaactctattccaggaggtggtgacggtatgggttacgcttacggccaatgtacttggggagtcgcagcccgtatcaatcaactgggtctaaaactcaaaggtaaaaacggtgagaagattccaattatcagtaccatgggcaatggccaagattgggtacgaacagccgcaagtctcggtggagagacagggacaagtccacaagaaggagctatcctttcctttgcgggaggaggacatggcaccccaacagaatacggacatgtggcttttgtggagaaagtctacccagacggttcattccttatctcagaaaccaactacaatggcaatccaaactataccttccgtaaattatctggagtggatagtagcttgagttttgcttatacgacgaaa

SEQ ID NO: 5872 - protein, 933 aa, Streptococcus agalactiae
MKEDKKLVKQARQNFRSNLKSARMHYRKEVRTLKQTVPKKGRFRKSAKNSLFQEKKTELKGNLLSSQKEAEEKFIKEITYVSPRLLKAKEIKNYRLPQAQERLRTARKHLSEVKLSEKQQVVNPKFTFQKENPSLKSRFQFHQEKSFDRLSAEKDVSSAKREVKQLKKVQKTKKNSTKVKAGLGLAASESLDLIAQEDDLDGLRTMKDTSLKARRYGRFTYQAGKVAVKSGQTGVRFTKTKFSHGKERFQNFKKGKGFTRQKPLKPRRRYQTFLNHVRKQSVAGFKGIVQAIKGSMTFFSVLAGNPLTWIVSGILLILLLMMSFFMSVSGSSVIQQDEIELSKSYTHMTWEDAEHTRTNDKGITFYTKIDEVMVYMNHQYQDYKLDDFIETSGTTYKEFLSQLWSDLNGGDSIKSMSDLYKEPAYKLSDEDQEELNELTEEGNYLALQELDNPFQGQTDEDSLSMTYRYGYEVIDEKPTLHHHIILEAKEGQVIVAPMDGKVSLDGENVVLTSGKGVNKTKLTLFGIHSGRVSENQQVLAGDIIGQTKDGTGLKVTYQKVDDDTDKLVYVNPAFYFPKVIQVQTTILPTIGQFGGDEFERAKAIYDYLKSKGATNQAIAAILGNWSVESSINPKRAEGDYLSPPVGATDSSWDDEGWLTLNGPTIYNGRYPNILKRGLGLGQWTDTADGSRRHTLLLEYAKGKHQKWYDLGLQLDFMLYGDSPYYTNWLKDFFKNSGSPASLAQLFLIYWEGNSGDKLLERQTRASEWYYQIEKGFSQPNGGTAQSDPKALEAVREDLFENSIPGGGDGMGYAYGQCTWGVAARINQLGLKLKGKNGEKIPIISTMGNGQDWVRTAASLGGETGTSPQEGAILSFAGGGHGTPTEYGHVAFVEKVYPDGSFLISETNYNGNPNYTFRKLSGVDSSLSFAYTTK

SEQ ID NO: 5873 - DNA, 2349 bp, Streptococcus agalactiae
gtgaaaaaattaaaacactcaatgaaatcaaagacctcttctaatgacaaaaagcaaaagacgaaaacacagaaacaggaaatcagcccttctaccgtaaatacgttagcctatcaaggactttttcagaatggccttatgcaggtcagtccaagctatttctcacaaacctatctcttaggagatgttaattaccaaacagttggcttagatgataagggagctatcgtggagaaatattccgatttaatcaattcactggatgataagaccaatttccaactgactattttcaatcaaaaagttaatttggaaaaatttcgtaagagtattctctatcccttgcaggaagatgggtttgatacttatcgtgatgaattgaatcgcatgatggatgccaacttagaggcgggtgagaacaacttttcagctgtcaagtttctttcatttggcaagagcgaccaaacaccaaaactagcttttcgttctctgtcacagattggggaatatttcaagagtggcttttcagagattgatgtatctcttggtttacttggtggagaggagcgagtgaatgtccttgcggatatgttacgaggtgaaaatcatttaccgttttcttataaggatttgactctctcaggtcaatccaccaaacactttattgccccaacctacctttcctttaaacacaagaatcatattgaattggacgatcgattattacagattgtttatgttcgcgactatggcatggagttaggggataaatttattcgagacctcatgcagtcagatttggaagtgatgattagcctacatgccaaaggctctactaagtctgaaaccatgaccaagctacgaaccaagaagaccttgatggaatcacaaaagattggtgaacaacaaaaaatggctcggactggaatctatttggagaaggtcggccatgttcttgagaacaacatcgatgaagctgaagctcttcttcaaaccatgacccaaacaggagataaactgtttgacaccgtatttctaattggcgtgctagcggatactgaagaccaactcaaacaatctcttgatattatcaagcaagtggcagggtctaatgatatgattattgataacttgacctatatgcaagaagctgcctttaatagtctcttgccatttgggaagaactatctcgaaggtgtttctcggtctctattgacttcaaatattgccgtgaatgcaccttggacttccgtagatattcatgacaagggtgggaaattttatggcatcaatcaaatctcaagtaatatcatcagtattgaccgtggcaagttaaatactccatcaggtttgattttagggacttctggagctggcaaagggatggcgacaaaacacgaaatcatctcaactaagctcaaggaagcagatagtgatactgaaattattattgttgacccagaaaatgagtacagtattatcggtcaagcctttggtggggagagtattgatattgccccagactctaccaccttcttaaatgtcttagaactatctgatgagaatatggatgaggacccagttaaggtcaaatccgaatttctcttgtcttggattggaaagctcttggaccgcaaaatggatggtcgtgaaaaatccttgatagatcgtgtgacacgcttgacatataagcattttgacacaccgtccttggtcgaatgggtctttgtcttatctcaacaacctgaacaggaagctaaggacttggcactggatatggaactctatgtggaagggtcgctggacatattttcacatcggaccaatattaaaacagacagtcatttcctgatttacaatgtcaaaaagctaggcgatgagttaaaacaaattgccctcatggttatctttgaccaaatttggaatcgggtggtcaaaaaccaaaagctagggaagaagacctggatttactttgatgaaatgcagctactcttattggacaagtatgcctctgatttctttttcaaactttggagtcgtgtccgtaagtatggggcgataccgacaggtattactcagaatgtagaaacgcttcttttggatgccaatggcagacgcattattgccaatagcgagttcatgattcttttaaaacaggctaagagcgatcgcgaagaattggtgcatatgcttgggctttctaaagagctggagaagtacttggtcaatcctgaaaaaggggcaggcttaattaaggccggttccaccgttgttccgttcaagaataagattccgcaacacaccaagctctttgacatcatgagtacggaccctgaaaaaatgaggaca

SEQ ID NO: 5874 - protein, 783 aa, Streptococcus agalactiae
MKKLKHSMKSKTSSNDKKQKTKTQKQEISPSTVNTLAYQGLFQNGLMQVSPSYFSQTYLLGDVNYQTVGLDDKGAIVEKYSDLINSLDDKTNFQLTIFNQKVNLEKFRKSILYPLQEDGFDTYRDELNRMMDANLEAGENNFSAVKFLSFGKSDQTPKLAFRSLSQIGEYFKSGFSEIDVSLGLLGGEERVNVLADMLRGENHLPFSYKDLTLSGQSTKHFIAPTYLSFKHKNHIELDDRLLQIVYVRDYGMELGDKFIRDLMQSDLEVMISLHAKGSTKSETMTKLRTKKTLMESQKIGEQQKMARTGIYLEKVGHVLENNIDEAEALLQTMTQTGDKLFDTVFLIGVLADTEDQLKQSLDIIKQVAGSNDMIIDNLTYMQEAAFNSLLPFGKNYLEGVSRSLLTSNIAVNAPWTSVDIHDKGGKFYGINQISSNIISIDRGKLNTPSGLILGTSGAGKGMATKHEIISTKLKEADSDTEIIIVDPENEYSIIGQAFGGESIDIAPDSTTFLNVLELSDENMDEDPVKVKSEFLLSWIGKLLDRKMDGREKSLIDRVTRLTYKHFDTPSLVEWVFVLSQQPEQEAKDLALDMELYVEGSLDIFSHRTNIKTDSHFLIYNVKKLGDELKQIALMVIFDQIWNRVVKNQKLGKKTWIYFDEMQLLLLDKYASDFFFKLWSRVRKYGAIPTGITQNVETLLLDANGRRIIANSEFMILLKQAKSDREELVHMLGLSKELEKYLVNPEKGAGLIKAGSTVVPFKNKIPQHTKLFDIMSTDPEKMRT

SEQ ID NO: 5875 - DNA, 141 bp, Streptococcus agalactiae
atgattaacaatatggcctgtaccaagccaccaaacataatggcgagtgattccatcactccagctccatttgatacggcaatctttccagccgattcaaacaagggaacaagagatacaattagaaaaatcaaaatacct

SEQ ID NO: 5876 - protein, 47 aa, Streptococcus agalactiae
MINNMACTKPPNIMASDSITPAPFDTAIFPADSNKGTRDTIRKIKIP

SEQ ID NO: 5877 - DNA, 234 bp, Streptococcus agalactiae
ttgaacggcatagaccatgatgtttttaaggtaaccaatcccaacacttctccagtcatcactaaggaaggtcggaatggtaacaggggcaaaaggaatcatcagatagagttggataaagcgaatggtaatcaagatattgacaaccataatactggccattcgtaccaaccaaatgagaatcgcaaaaaagccaataatcatttttcctacaattccagatcccttaatgcc

SEQ ID NO: 5878 - protein, 78 aa, Streptococcus agalactiae
MNGIDHDVFKVTNPNTSPVITKEGRNGNRGKRNHQIELDKANGNQDIDNHNTGHSYQPNENRKKANNHFSYNSRSLNA

SEQ ID NO: 5879 - DNA, 852 bp, Streptococcus agalactiae
atgatgatgaattttacgtcaccttttgtatttctagcctctgaaaaagtgtcaagcgatagcctttttgaagggtttcaggtcgatttagaatcaactgctaacttggttaagtcactggcggactttaatccgacggtttggtcttacatgacagccattaccaagggtattatgcagcccttgggagtagctattcttgcggtagttcttgtactcgaattttcaaaaatggccaagaaaatcgcaaactcaggcggtgcaatgacctttgaagccatagcacctatgattgtcagctacatcatggtcgcggtcgtgattaccaatacgacggttattgtggaagccattattgccattgcctcatatgttattgaacaagtggcaagtcttgtcacgaatggtggtgctaattatgataccatctcaggcattaagggatctggaattgtaggaaaaatgattattggcttttttgcgattctcatttggttggtacgaatggccagtattatggttgtcaatatcttgattaccattcgctttatccaactctatctgatgattccttttgcccctgttaccattccgaccttccttagtgatgactggagaagtgttgggattggttaccttaaaaacatcatggtctatgccgttcaaggtattttgatttttctaattgtatctcttgttcccttgtttgaatcggctggaaagattgccgtatcaaatggagctggagtgatggaatcactcgccattatgtttggtggcttggtacaggccatattgttaatcattgccttggttggcagtcaacgaaccgcccgaagtattttggggatg

SEQ ID NO: 5880 - protein, 284 aa, Streptococcus agalactiae
MMMNFTSPFVFLASEKVSSDSLFEGFQVDLESTANLVKSLADFNPTVWSYMTAITKGIMQPLGVAILAVVLVLEFSKMAKKIANSGGAMTFEAIAPMIVSYIMVAVVITNTTVIVEAIIAIASYVIEQVASLVTNGGANYDTISGIKGSGIVGKMIIGFFAILIWLVRMASIMVVNILITIRFIQLYLMIPFAPVTIPTFLSDDWRSVGIGYLKNIMVYAVQGILIFLIVSLVPLFESAGKIAVSNGAGVMESLAIMFGGLVQAILLIIALVGSQRTARSILGM

SEQ ID NO: 5881 - DNA, 252 bp, Streptococcus agalactiae
atgaggaaaaatatgaatcaaaaactaacaggctttgtttacggagtggacgccagctccatgttctcccaggccatgtctctattacaaaaaggcttgattgcagtaggagcctttcttgtagtcatgggcattatcaacctttcaaccaacattaaagatggtgggccaggcgtccgaaatgccattttagaaattgttggtggtgtcatggtgggagccgcaggtgcttttgtgacacagattaccatt

SEQ ID NO: 5882 - protein, 84 aa, Streptococcus agalactiae
MRKNMNQKLTGFVYGVDASSMFSQAMSLLQKGLIAVGAFLVVMGIINLSTNIKDGGPGVRNAILEIVGGVMVGAAGAFVTQITI

SEQ ID NO: 5883 - DNA, 1815 bp, Streptococcus agalactiae
atgtattccaggcaaaaagcatttgtctttggactcttgggtctcgcctttggctatttctgccatcgtctaaccctactctatgatagtttaactaatgccccacctatggaacgtattgcctacctcttaggagaggggttaaatcaggttttcaatcctttatggctattttcctttactcaaaaatcttttcttgcctttatccttggggttctaatgatgacgctagtctatctttatgtatcgacaggacagaaagtctatcgggaaggggaagaatatggttctgcacgatttggaaccagtaaggaaaagcggaacttttacagtaagaatcctttcaatgacacgattttggctcgtgatgttcgtctaaccttgttggaaaagaagaaaccccagtttgaccgaaataaaaatttgattgtcattgggggttctggggcaggtaagacctttcgctttgtgaaacccaaccttatccaacttaactgttccaatattgtcgtagatccgaaagaccatttggctgagaagacaggtaaactctttttagaaaacggttatcaggttaaggttttagacttggttaatatgaccaattcagacggttttaatccctttcgttatgtagaaacagagaatgatttgaaccgtatgttaacggtctattttaataataccaaaggaaatggttctcgcagtgatccgttttgggatgaggcttccatgacattggtgagagctattgcctcttacttggtggatttttacaatcctccaggaagttctaagcaagagcaggaagcaagacgtaagcgtggccgttatccagccttttctgagattgggaaactcatcaaactcttatcaaagggagacaatcaggacaaaagtatacttgaagtcctgtttgaagactatgctaagaaatatggtcatgagaactttaccatgagaaactgggcagattttcaaaactataaggataagaccttggattcggtgattgcggtcacaacagctaaatttgccctctttaatattcaatcggtgattgatttgacgcaaagagacactatggatttgaaaacgtggggcactcaaaagaccatggtctatcttgttattccagacaatgatacgacctttcgtttcctatctgctttatttttctctacggttttctccactttgaccagacaggctgatgttgactttaaagggcaactgcctattcatgttagaagctatctggatgagtttgcgaatgtcggagaaatcccagacttcgctgaacaaacctcaacagtccgctctaggaatatgagtcttgtgcctattctccaaaatatcgctcaactccaaggactttataaggaaaaagaagcttggaaaactatactggggaactgtgacagtctcctctatttgggtgggaatgacgaggaaactttcaaattcatgagtggacttttaggcaaacaaaccgttgatgtcagaagcaccagtcgttcttttgggcagacgggttcaagttctacctctcatcagaaaattgctcgtgacttgatgacggctgatgaagttggaactatgaaacgagatgagtgcctcgtacgcattgcaggggttcctgtttttcgaaccaagaaatattttcctctcaaacataaacattggaagttgctcgctgataaggaaaccgatgaccgttggtggaactatcacatcaatcccttggctaaagaggaagaattggacttgtcagactatcaaataagggatttaagcacagaaacgtcactacat

SEQ ID NO: 5884 - protein, 605 aa, Streptococcus agalactiae
MYSRQKAFVFGLLGLAFGYFCHRLTLLYDSLTNAPPMERIAYLLGEGLNQVFNPLWLFSFTQKSFLAFILGVLMMTLVYLYVSTGQKVYREGEEYGSARFGTSKEKRNFYSKNPFNDTILARDVRLTLLEKKKPQFDRNKNLIVIGGSGAGKTFRFVKPNLIQLNCSNIVVDPKDHLAEKTGKLFLENGYQVKVLDLVNMTNSDGFNPFRYVETENDLNRMLTVYFNNTKGNGSRSDPFWDEASMTLVRAIASYLVDFYNPPGSSKQEQEARRKRGRYPAFSEIGKLIKLLSKGDNQDKSILEVLFEDYAKKYGHENFTMRNWADFQNYKDKTLDSVIAVTTAKFALFNIQSVIDLTQRDTMDLKTWGTQKTMVYLVIPDNDTTFRFLSALFFSTVFSTLTRQADVDFKGQLPIHVRSYLDEFANVGEIPDFAEQTSTVRSRNMSLVPILQNIAQLQGLYKEKEAWKTILGNCDSLLYLGGNDEETFKFMSGLLGKQTVDVRSTSRSFGQTGSSSTSHQKIARDLMTADEVGTMKRDECLVRIAGVPVFRTKKYFPLKHKHWKLLADKETDDRWWNYHINPLAKEEELDLSDYQIRDLSTETSLH

SEQ ID NO: 5885 - DNA, 522 bp, Streptococcus agalactiae
atgtttgatagggaatcgaaaaaagaggaggccactatgtcatctgaacaacaagaacgtcaagcgatgcaatacgtagaaagaagtagtttattgacagtcagaaccctcttaaaactcttagaatggtcggctaggcaagccttagctcaagattcagcttataagattggggttcaaaaaatggaagaactccttcaaagtccttacgccattgaagcgattgatgttagtaaagacatactggataagccaatcgatgtggagaaatttaaggagttgatggagtcagaaaaactgccaatcgcaattagttggcaaaaagactatctctacttttatgccaaggataagaccttgctcgatcatcacttggatgaattgttgaagaaactgatgtctaatccagagaagctagaaggtttaacctttgataaaaccttggaccaagagatagaactggccaaagagaaaattagagtgacagaactttcggcagtaaaaaccaaggaggtgaccttg

SEQ ID NO: 5886 - protein, 174 aa, Streptococcus agalactiae
MFDRESKKEEATMSSEQQERQAMQYVERSSLLTVRTLLKLLEWSARQALAQDSAYKIGVQKMEELLQSPYAIEAIDVSKDILDKPIDVEKFKELMESEKLPIAISWQKDYLYFYAKDKTLLDHHLDELLKKLMSNPEKLEGLTFDKTLDQEIELAKEKIRVTELSAVKTKEVTL

SEQ ID NO: 5887 - DNA, 93 bp, Streptococcus agalactiae
atgaagactgcaaaagcaaccatagccacaaagccaagaagcaaccaacttaggcgattttgtacgcccacaatttttaatggaacagtttta

SEQ ID NO: 5888 - protein, 31 aa, Streptococcus agalactiae
MKTAKATIATKPRSNQLRRFCTPTIFNGTVL

SEQ ID NO: 5889 - DNA, 588 bp, Streptococcus agalactiae
gtgacaatgataaggatagtgttgttttatctagccatacagcttaacggtcttctggtgagtttattcctgaaagagtatctgacaatagagggtatagtcttgctacaattggtcctattaagtgtgacttgcttagagattgcccgtcataaaactgttccattaaaaattgtgggcgtacaaaatcgcctaagttggttgcttcttggctttgtggctatggttgcttttgcagtcttcatcagtttcctatttccagttcagactaggaatcaagcagtattggtacaagtaggaaaacaggttcctcctattatctttttattgtttctggtcaatgcaagtattcttgaagagattgtttacaggcaattgctgtgggaaaaattgacattcccttttgaacaaataggcgtgaccagttttctctttgttctatcccatggacctaatcagttagggagttggctcatctatagctgtcttggcttgaccttggctgttgttcgattgaaaactgattgtatgacggcaatcgccttacatttactttggaatagtttggcttatgtcgtaactttcttg

SEQ ID NO: 5890 - protein, 196 aa, Streptococcus agalactiae
MTMIRIVLFYLAIQLNGLLVSLFLKEYLTIEGIVLLQLVLLSVTCLEIARHKTVPLKIVGVQNRLSWLLLGFVAMVAFAVFISFLFPVQTRNQAVLVQVGKQVPPIIFLLFLVNASILEEIVYRQLLWEKLTFPFEQIGVTSFLFVLSHGPNQLGSWLIYSCLGLTLAVVRLKTDCMTAIALHLLWNSLAYVVTFL

SEQ ID NO: 5891 - DNA, 237 bp, Streptococcus agalactiae
gtgaagatgaatgaacgattttgggacaatttagaaatcattctggctgaaaaagacctcacttgggcagaactagctcgcaaagtattcaacggtcaatatgtttatccaagtgaatttaatcgcctctatcaaaaattacggcattacaaatctaatcgtctgatgccacaaataagatgggttgagcgtattgttctagtcttagatattgattatgaagatttatttaagagg

SEQ ID NO: 5892 - protein, 79 aa, Streptococcus agalactiae
MKMNERFWDNLEIILAEKDLTWAELARKVFNGQYVYPSEFNRLYQKLRHYKSNRLMPQIRWVERIVLVLDIDYEDLFKR

SEQ ID NO: 5893 - DNA, 426 bp, Streptococcus agalactiae
atgaacttactacataagaaaagtatcctagattgtactgaattagaagaacgtattcaccaagctgaaaccaatcagctattacaaaagatactgtcgctccccaattttgattgtgactttgaggtaacttttgaagatgattaccacaaagagatgaatgatcccctattctacgaatccaatcttcatcagatttcggattttatggaaactagggatattaaaaatggtgtagatacactattgacgaaagacaatcacctggcctttcgtgcctttggtgaaaattattctgctaggggaaaggagggcattttaacgactctagtgacggtcaagtgctttggtgaaggacggatgcccattgatatgagtcgctatttctcaactcctgaaccaacagttgaaaatagcctaacccta

SEQ ID NO: 5894 - protein, 142 aa, Streptococcus agalactiae
MNLLHKKSILDCTELEERIHQAETNQLLQKILSLPNFDCDFEVTFEDDYHKEMNDPLFYESNLHQISDFMETRDIKNGVDTLLTKDNHLAFRAFGENYSARGKEGILTTLVTVKCFGEGRMPIDMSRYFSTPEPTVENSLTL

SEQ ID NO: 5895 - DNA, 1353 bp, Streptococcus agalactiae
atgaaatttttagatttatttgctgggataggcggttttaggctagggatggaatcacagggtcataaatgcctgggcttttgtgaaattgataaattcgctagaacatcttataaagccatgtttaacacagaaggggaaatagaataccatgacattaaagaggtcacagaccatgactttagacaatttagagggcaagtggacatcatctgcgggggatttccttgccaagcattttcactcgcaggcagacgattgggatttgaagatactcgagggactctcttttttgagattgctcgagcggccaaacaaatccaaccacgttttctatttttggaaaacgtcaaaggcctactcaatcacgacgagggacggacgttcgccacaatcctctccacgctggatgaattggggtatgatgtcgaatggcaggtgcttaacagcaaggacttccaagtcccgcaaaacagagaacgggtctttattatcggacattctagaagataccgttccagattcatatttcctctcagaagagaagacagcccagctcatcttgaaaggctaggaaatatcaatccctctaaacatggtttgaatggtgaagtctatctgacgagtggacttgctcctacactaacaagaggtaaaggagagggtgcaaaaatcgccattccagtcttaacaccagatagactagaaaaacgccaacatggtcgtcgatttaaggacaatcaagaccctatgtttactttgaccagtcaagacaaacacggagttgttgtcgcaggaaatctgccgactagctttgaccagaccggtagagtatttgacatttctggcttgtcaccgaccttgaccaccatgcaaggtggagacaaggtgccaaagattttgctgagggaggagctgccatttctgaaaatcaaggaagccactaaaacagggtacgcaaaggcaactcttggagactctgtcaatctggcttatccagactcaaccaaacgtaggggacgtgtgggaaagggaatatccaatactctgacgacttcagacaatatgggagtagtagttgctgctctggaatatcgacaggataagtggtatgaagtcacaggcattgtcttagaggggaaactttatcgcctgagaataagacgactgacaccaagagagtgcttcagacttcaaggctttcctgattgggcttatgaaagagcagagagtgtttctagtaagagccaactatacaaacaggccggcaatagcgtgactgtcacagttattgaagccattgccagagaatttagaagaacggaagaggaagaaaaacatgaacttactaca

SEQ ID NO: 5896 - protein, 451 aa, Streptococcus agalactiae
MKFLDLFAGIGGFRLGMESQGHKCLGFCEIDKFARTSYKAMFNTEGEIEYHDIKEVTDHDFRQFRGQVDIICGGFPCQAFSLAGRRLGFEDTRGTLFFEIARAAKQIQPRFLFLENVKGLLNHDEGRTFATILSTLDELGYDVEWQVLNSKDFQVPQNRERVFIIGHSRRYRSRFIFPLRREDSPAHLERLGNINPSKHGLNGEVYLTSGLAPTLTRGKGEGAKIAIPVLTPDRLEKRQHGRRFKDNQDPMFTLTSQDKHGVVVAGNLPTSFDQTGRVFDISGLSPTLTTMQGGDKVPKILLREELPFLKIKEATKTGYAKATLGDSVNLAYPDSTKRRGRVGKGISNTLTTSDNMGVVVAALEYRQDKWYEVTGIVLEGKLYRLRIRRLTPRECFRLQGFPDWAYERAESVSSKSQLYKQAGNSVTVTVIEAIAREFRRTEEEEKHELTT

SEQ ID NO: 5897 - DNA, 102 bp, Streptococcus agalactiae
gtgaataagatgatttggtggatactaggtggaatctatctgatttctatcatcattttgattgttgaaatcatccgtgcaccagaaatggatgatcatata

SEQ ID NO: 5898 - protein, 34 aa, Streptococcus agalactiae
MNKMIWWILGGIYLISIIILIVEIIRAPEMDDHI

SEQ ID NO: 5899 - DNA, 135 bp, Streptococcus pyogenes
atggaccaagcaactaaggtgacaagaagcgaagtgagtaagatgttttggtggctattattaggtgtttggggactaaggacaatttggttgattattgaagttatcactgcaccagaaatggaagattatagt

SEQ ID NO: 5900 - protein, 45 aa, Streptococcus pyogenes
MDQATKVTRSEVSKMFWWLLLGVWGLRTIWLIIEVITAPEMEDYS

SEQ ID NO: 5901 - DNA, 816 bp, Streptococcus agalactiae
atgaaacgtattaccgctaatcaatatcagacatcagagcgttattataaactccctaaaattttgtttgagagtgaacgttataaggatatgaagctggaagttaaggtagcctacgcggttttaaaagatcggttggagttgtctttgagtaaaggctggattgatgaggatggggctatttatttgatttattccaattcaaatctgatggcactattaggctgttcaaagtcaaaactactctctatcaagaaaaccttacgtgaatatggcttaattgatgaagtccaacagtcctctagtgaaagaggtcgaatggcaaataaaatttacttgggggaattagaacatgaacctaccccagtcttacatacagacggggctagtgttaaaaaaacactaggggagtctcaaagaaagacggggccggtcttatattcagcccctagtgagactgaaggaagtgagactaaatatagtgaaactgaagggagtgacttagttatgaaggacgaggaggagaggcagctagtagatgagaaaaaagaagaaaactttacttcaaaagtcgatggcgtgaccaagtacgatcgagactatatttggggtttggttcatgaccagttaagacagacaggtctatctcagtctgctagtgactatgccatgatttattttagtgaccggtatcagtatgcattggaacaaatgcgatttgctcggtcagccgaagtaatagctgaatacgtatttaatggtgtgctgtcggagtggaccaagcaactgagacgacaagaagtaaaaggaggtgaa

SEQ ID NO: 5902 - protein, 272 aa, Streptococcus agalactiae
MKRITANQYQTSERYYKLPKILFESERYKDMKLEVKVAYAVLKDRLELSLSKGWIDEDGAIYLIYSNSNLMALLGCSKSKLLSIKKTLREYGLIDEVQQSSSERGRMANKIYLGELEHEPTPVLHTDGASVKKTLGESQRKTGPVLYSAPSETEGSETKYSETEGSDLVMKDEEERQLVDEKKEENFTSKVDGVTKYDRDYIWGLVHDQLRQTGLSQSASDYAMIYFSDRYQYALEQMRFARSAEVIAEYVFNGVLSEWTKQLRRQEVKGGE

SEQ ID NO: 5903 - DNA, 366 bp, Streptococcus pyogenes
gtgttaaattcagcccctagtgagactgaaaagagtgaaactgaaggtagtgaaactaaagagagtaatttagtgattgaggacgaggaggaaagaaaggagtgcactagtgtgaaaaagactgagggtcactttacccgtcaagttgatcaggtcaccaaatatgacaaagattatatttggagtttggttcattcccaattacgtgaaggtggtttatcacaagctgctagtgacttagtcatgagctattttgaagaacgctatgcttatgcgctggaacacatacggttcgcaagaacagctgaagctattgcggaatatgtctttaatggtgtcttatccgaatggaccaagcaactaagg

SEQ ID NO: 5904 - protein, 122 aa, Streptococcus pyogenes
VLNSAPSETEKSETEGSETKESNLVIEDEEERKECTSVKKTEGHFTRQVDQVTKYDKDYIWSLVHSQLREGGLSQAASDLVMSYFEERYAYALEHIRFARTAEAIAEYVFNGVLSEWTKQLR

SEQ ID NO: 5905 - DNA, 123 bp, Streptococcus agalactiae
atgaccatcatgggagttgataatctaaaagcaactcaactggtaaatgaaatggaacaaacaggtttaatccgatttgatgaattcgggaattttggacttttagtcttggagggacaatca

SEQ ID NO: 5906 - protein, 41 aa, Streptococcus agalactiae
MTIMGVDNLKATQLVNEMEQTGLIRFDEFGNFGLLVLEGQS

SEQ ID NO: 5907 - DNA, 99 bp, Streptococcus agalactiae
ttgtctaccccatttttgcgttttggaggtaattatgcaaaaggaagaacagtcatcacgtcatatcgtgaagagccatatcatgaccatcatgggagt

SEQ ID NO: 5908 - protein, 33 aa, Streptococcus agalactiae
MSTPFLRFGGNYAKGRTVITSYREEPYHDHHGS

SEQ ID NO: 5909 - DNA, 159 bp, Streptococcus agalactiae
gtgcttcagttactcttaaataagagtcatatcataattagattgcggaatccctatttaccagtctttgagagcgataagcgattgatagaaactgataaattgatttggtttcctgccaaaaatcctgccaaaaattctttggcaggatttttgttt

SEQ ID NO: 5910 - protein, 53 aa, Streptococcus agalactiae
MLQLLLNKSHIIIRLRNPYLPVFESDKRLIETDKLIWFPAKNPAKNSLAGFLF

SEQ ID NO: 5911 - DNA, 378 bp, Streptococcus agalactiae
ttggaggaaataacaatggcattaaacattgaaaatattattgctgaaattaaagaagctacaattcttgaacttaacgatcttgtaaaagctatcgaagaagaatttggtgtaactgctgctgctcctgtagctgctgccgctgctggtggtgaagctgctgctgctaaagactcatttgacgttgaattaacagctgctggagacaaaaaagttggcgttatcaaagttgttcgtgaaatcacaggcgaaggtcttaaagaagctaaagctatcgttgataacgcaccatcagttatcaaagaaggtgcttcagaagcagaagctaacgaaatcaaagaaaaacttgaagctgcaggtgcttcagttactcttaaa

SEQ ID NO: 5912 - protein, 126 aa, Streptococcus agalactiae
MEEITMALNIENIIAEIKEATILELNDLVKAIEEEFGVTAAAPVAAAAAGGEAAAAKDSFDVELTAAGDKKVGVIKVVREITGEGLKEAKAIVDNAPSVIKEGASEAEANEIKEKLEAAGASVTLK

SEQ ID NO: 5913 - DNA, 378 bp, Streptococcus pyogenes
ttggaggaaatcacaatggcattgaacattgaaaacattattgctgaaattaaagaagcttcaatccttgagcttaacgatcttgtaaaagctatcgaagaagaatttggtgtaactgcagctgctcctgtagctgctgcagctgctggtggtgctgaagaagctgctaaagattcattcgacgttgaattgacatctgctggcgacaaaaaagttggcgttatcaaagctgttcgtgaaatcacaggtcttggtcttaaagaagctaaaggtcttgttgatggagcacctgctaacgttaaagaaggcgttgctgctgcagaagctgaagaaatcaaagctaaacttgaagaagctggagcaacaatcactcttaaa

SEQ ID NO: 5914 - protein, 126 aa, Streptococcus pyogenes
LEEITMALNIENIIAEIKEASILELNDLVKAIEEEFGVTAAAPVAAAAAGGAEEAAKDSFDVELTSAGDKKVGVIKAVREITGLGLKEAKGLVDGAPANVKEGVAAAEAEEIKAKLEEAGATITLK

SEQ ID NO: 5915 - DNA, 537 bp, Streptococcus agalactiae
ttgtgcttatcccaaaaaataaaaacggaggtaaaactaatgagtgaagcaattattgcaaaaaaagctgaacaagttgaacttattgctgagaaaatgaaagcagcagcaagtatcgttgttgttgattcacgtggtcttactgttgagcaagatactaacttacgtcgttcacttcgtgaaagcgatgttgagtttaaagttatcaaaaactcaattttaactcgtgcagctgaaaaagcaggtcttgaagaccttaaagaactttttgttggtccatcagcagttgcgttttctaacgaagatgttattgcaccagctaaagttattagcgatttcgctaaagatgcagaagctcttgaaatcaaaggtggttcagtagacggtaaattcacttcagttgaagaaattaacgctcttgctaaattaccaaacaaagaaggtatgctttcaatgctcctttcagtacttcaagcgccagtacgcaacgttgcatatgctgtcaaagcagttgcagaaaaagacgaagaagtggca

SEQ ID NO: 5916 - protein, 179 aa, Streptococcus agalactiae
MCLSQKIKTEVKLMSEAIIAKKAEQVELIAEKMKAAASIVVVDSRGLTVEQDTNLRRSLRESDVEFKVIKNSILTRAAEKAGLEDLKELFVGPSAVAFSNEDVIAPAKVISDFAKDAEALEIKGGSVDGKFTSVEEINALAKLPNKEGMLSMLLSVLQAPVRNVAYAVKAVAEKDEEVA

SEQ ID NO: 5917 - DNA, 594 bp, Streptococcus pyogenes
gtgattaaagaaaataacgtatttgtactttcgtgtctaggtttaggtgcgattttttttgtacctagcccaaaaataaaaacggaggtaaaactaatgagtgaagcaattattgctaaaaaagctgaacaagtcgaacttattgctgagaaaatgaaagcagcagcaagtatcgttattgttgattcacgtggtcttacagttgatcaagatactgttcttcgtcgttcacttcgtgaaagtggcgttgagttcaaagttatcaaaaactcaattttgactcgtgcagctgaaaaagcaggtcttgatgagttgaaagatgtattcgtaggaccatctgcagtagcattttctaacgaagatgttatcgcaccagctaaagttatcaacgactttactaaaactgctgacgcacttgaaatcaaaggtggtgcaatcgaaggcgctgtttcttcaaaagaagaaatccaagcacttgcaacattgccaaaccgcgaaggaatgctttctatgcttctttctgtacttcaagctccagtccgtaacgttgcatacgctgtcaaagctgttgcagaaaacaaagaaggcgctgct

SEQ ID NO: 5918 - protein, 198 aa, Streptococcus pyogenes
VIKENNVFVLSCLGLGAIFFVPSPKIKTEVKLMSEAIIAKKAEQVELIAEKMKAAASIVIVDSRGLTVDQDTVLRRSLRESGVEFKVIKNSILTRAAEKAGLDELKDVFVGPSAVAFSNEDVIAPAKVINDFTKTADALEIKGGAIEGAVSSKEEIQALATLPNREGMLSMLLSVLQAPVRNVAYAVKAVAENKEGAA

SEQ ID NO: 5919 - DNA, 516 bp, Streptococcus agalactiae
ttgtttggtaatttagcaagagcgttaatttcttcaactgaagtgaatttaccgtctactgaaccacctttgatttcaagagcttctgcatctttagcgaaatcgctaataactttagctggtgcaataacatcttcgttagaaaacgcaactgctgatggaccaacaaaaagttctttaaggtcttcaagacctgctttttcagctgcacgagttaaaattgagtttttgataactttaaactcaacatcgctttcacgaagtgaacgacgtaagttagtatcttgctcaacagtaagaccacgtgaatcaacaacaacgatacttgctgctgctttcattttctcagcaataagttcaacttgttcagctttttttgcaataattgcttcactcattagttttacctccgtttttattttttgggataagcacaaaaaaatcgcacctaaacctagacacgaaagtacaatacgttattttataatgacgttttgtgcctcggtaggaatatta

SEQ ID NO: 5920 - protein, 172 aa, Streptococcus agalactiae
MFGNLARALISSTEVNLPSTEPPLISRASASLAKSLITLAGAITSSLENATADGPTKSSLRSSRPAFSAARVKIEFLITLNSTSLSRSERRKLVSCSTVRPRESTTTILAAAFIFSAISSTCSAFFAIIASLISFTSVFIFWDKHKKIAPKPRHESTIRYFIMTFCASVGIL

SEQ ID NO: 5921 - DNA, 2106 bp, Streptococcus agalactiae
atggcaaataataatttttataatcgtgacccttttggaaatatggatgatatttttaattctctaatgggaaatatggggggctataacagtgagaataagcgatacctaatcaatggacgggaagttactcctgaagaattcagtcaatatcgtcaaactggaaaactccccggtcaagagctaaataaccaaaacactcctacaaaccaagtctctgcagatagtgttttgactaaattaggaactaatttaaccgatcaagcacgtcagcatttgctagatccagttattggacgaaacaaagaaattcaggaaactgcagaaattctagctcgtcgtactaaaaataatcctgttctggttggtgatgcaggtgttggtaaaacagctgttattgaaggtttggcacaagcaattataaatggtgatgtccctgctgctatcaaaaataaagaaatcatttcgatagatatttctagccttgaagctggcacccaatataggggtagttttgaagaaaatattcaaaatatcataaaagaagttaaggaaacaggaaatattattctcttctttgatgaaatacaccaaatattaggagccggttcaactggtggtgatagtggctctaaggggctcgcagatatacttaagcctgcactttcacgtggtgagttaacggttataggtgcaactactcaagatgaatatcgtaacaccattctcaagaatgctgccttagcacgtcgctttaacgaagttaaagtcaatgcaccttctgcacaagatactttcaatatccttatggggataagaaacctctatgagcaacatcataatgttgttttacctgactctgttttgaaagcagctgtagatttatctattcaatacatcccacaaagaagtctccctgataaagcaattgaccttattgatatgactgctgcacacctagctgcgcaacatcccgtaactgaccttaaatccttagaaaaagaaatcgctgagcaaagagacaagcaagaaaaagctgtcaatactgaagattttgaagaagctcttaaggtcaagacacgcattgaagagttacaaaaccagattgataatcataccgaaggacaaaaagtcactgcaactatcaacgatatcgctatgtcaattgagcgtctaactggagttcctgtatcaaatatgggtgctagtgatattgaacgcttaaaagaacttggcaatcgtctaaaaggtaaagtcattggtcaaaatgatgctgttgaggcagttgcgagagctattcgccgaaatcgtgctggtttcgatgatggtaatcgtccgattggtagctttctatttgttggaccaactggagttggtaaaaccgagctagcaaagcaattagcttttgatatgttcggatcaaaggatgctatcgttagacttgatatgtctgaatataatgatcgtacagcagtttctaagctaattggagcgactgctggttacgttggttatgacgacaatagtaatacactaacagaacgtatccgtcgaaatccttattctattgttcttcttgatgaaatcgaaaaagctgacccgcaagttatcacgcttctccttcaagttctagatgatggccgtttaactgatggtcaaggaaacactattaactttaaaaatactgttatcattgcaacctcaaatgcaggttttggaaacgaagcatttacaggtgacagcgataaagacttgaaaattatggaacgaatttctccatatttccgtccagaatttctaaatcgtttcaatggtgttattgaattctctcacctaagcaaagatgacttaagcgaaattgtagatttgatgcttgatgaagttaaccaaacaattggcaaaaaaggaattgaccttgtggtagatgaaaatgttaaatcacacttaattgaactgggttatgacgaagcaatgggagtacgtccattgcgccgtgtcatcgagcaagaaattcgagatcgcatcacagactactatctcgatcatacagacgttaaacacctaaaagctaatttgcaagatggccaaatcgtcatttctgaaaga

SEQ ID NO: 5922 - protein, 702 aa, Streptococcus agalactiae
MANNNFYNRDPFGNMDDIFNSLMGNMGGYNSENKRYLINGREVTPEEFSQYRQTGKLPGQELNNQNTPTNQVSADSVLTKLGTNLTDQARQHLLDPVIGRNKEIQETAEILARRTKNNPVLVGDAGVGKTAVIEGLAQAIINGDVPAAIKNKEIISIDISSLEAGTQYRGSFEENIQNIIKEVKETGNIILFFDEIHQILGAGSTGGDSGSKGLADILKPALSRGELTVIGATTQDEYRNTILKNAALARRFNEVKVNAPSAQDTFNILMGIRNLYEQHHNVVLPDSVLKAAVDLSIQYIPQRSLPDKAIDLIDMTAAHLAAQHPVTDLKSLEKEIAEQRDKQEKAVNTEDFEEALKVKTRIEELQNQIDNHTEGQKVTATINDIAMSIERLTGVPVSNMGASDIERLKELGNRLKGKVIGQNDAVEAVARAIRRNRAGFDDGNRPIGSFLFVGPTGVGKTELAKQLAFDMFGSKDAIVRLDMSEYNDRTAVSKLIGATAGYVGYDDNSNTLTERIRRNPYSIVLLDEIEKADPQVITLLLQVLDDGRLTDGQGNTINFKNTVIIATSNAGFGNEAFTGDSDKDLKIMERISPYFRPEFLNRFNGVIEFSHLSKDDLSEIVDLMLDEVNQTIGKKGIDLVVDENVKSHLIELGYDEAMGVRPLRRVIEQEIRDRITDYYLDHTDVKHLKANLQDGQIVISER

SEQ ID NO: 5923 - DNA, 2097 bp, Streptococcus pyogenes
atgacacatttttctggtaaagatccttttgtaaatatggatgatattttcaatcaattaatggcaaacatgggtggttatcgtagcgaaaatccccgctatctcgttaacggtcgcgaaataactcccgaagaattccaacactatcgtcaaacaggacaactccctgtagcgacaaccaaagcaacaaattctcaaatgttaacacctaaagctgatagtgtattgactcaactcggaactaacttaacacaagaagctcgtcaagggcatcttgaccccgtcattggtcgtaacaaagaaattcaagataccgctgaaatcttggcacgacgaactaaaaataatcctgtccttgtcggagatgctggtgtcggtaaaactgcagtcattgaaggtttagctcaagccattgttaatggagatgtcccagctgctattaaaaacaaggaaatcgtatcaattgatatttctagtcttgaagctggtacacagtatcgtggttcctttgaagagaccattcaaaacttgattcaagaagtaaaagaagctgggaatatcatcttattttttgatgaaattcatcaaatagttggtgctggtgccacaagcagtgattcaggctcaaagggacttgcagatattcttaaaccagccttgtcacgaggagaattaacactgattggtgctactactcaagacgaataccgcaatactattttaaaaaatgctgctcttgctcgtcgctttaatgaagttaaagtgaatgcaccatcagctgaagatacttttcacattttaatgggtattcgtaatctttatgaacaacaccaccatattacccttcctgataatgttctaaaagctgctgttgattattctattcaatacatcccacagcgtagcctgccagataaagcaattgacttactggatatgacagctgctcatttagctgcgcaacacccggtcactgacttaaaaacactcgaaactgaaatagctaaacaaaaagagagtcaagaaaaagctgtcgccaaagaagactttgaaaaagctttagcagcaaaaacacggattgaaacattacaaaagcaaattgagcaacataaccaaagccaaaatgtcactgctacagtcaatgatatcgcagagtctgtagagcgcttaactggtattcctgtctctaacatggggactaatgatttagaaaggctcaaaggaattagcagccgcttaaaaagccatgtcatcggacaagatgaggctgtcgcagcagtagcacgtgctattcgacgaaatcgggcaggttttgatgatggtaaacgtccaataggttctttcctttttgtgggtccaactggtgttggtaaaacagagttagctaaacaattagcacttgatttatttggttccaaagatgctattattcgacttgatatgtccgaatataacgatcgcactgctgtgtcaaaattgattgggacaacggctggttatgttggctacgatgataataataataccctaactgagcgtgttcgtcgtaacccttatgctattgtcttactagatgaaattgaaaaagctgatcctcaaattattacacttcttctacaagtattagatgatggacgattgacagatggacaaggaaatactattaactttaaaaataccgttattattgctacatcaaatgccggttttggccaacaagatacggaaacttctgagtctaacattatggatcgcattgcaccttatttcagaccagagtttttgaaccgttttaatagtatcattaaatttaatcatctgcaaaaagaaagtttagaagaaattgttgatttaatgctagctgaagtaaatcaaaccaccgcaaaaaaaggtattagtttaacgattactgatgacgctaaagctcatttgatagatttagggtacaatcacgctatgggagctcgtccattacgacgtattatcgaacaggaaattcgtgaccgtataactgattattatcttgaccatccagaagtcaaaaaacttcaggcaatcctaaaagaaggacaactagtgattaggcaaaacgatcag

SEQ ID NO: 5924 - protein, 699 aa, Streptococcus pyogenes
MTHFSGKDPFVNMDDIFNQLMANMGGYRSENPRYLVNGREITPEEFQHYRQTGQLPVATTKATNSQMLTPKADSVLTQLGTNLTQEARQGHLDPVIGRNKEIQDTAEILARRTKNNPVLVGDAGVGKTAVIEGLAQAIVNGDVPAAIKNKEIVSIDISSLEAGTQYRGSFEETIQNLIQEVKEAGNIILFFDEIHQIVGAGATSSDSGSKGLADILKPALSRGELTLIGATTQDEYRNTILKNAALARRFNEVKVNAPSAEDTFHILMGIRNLYEQHHHITLPDNVLKAAVDYSIQYIPQRSLPDKAIDLLDMTAAHLAAQHPVTDLKTLETEIAKQKESQEKAVAKEDFEKALAAKTRIETLQKQIEQHNQSQNVTATVNDIAESVERLTGIPVSNMGTNDLERLKGISSRLKSHVIGQDEAVAAVARAIRRNRAGFDDGKRPIGSFLFVGPTGVGKTELAKQLALDLFGSKDAIIRLDMSEYNDRTAVSKLIGTTAGYVGYDDNNNTLTERVRRNPYAIVLLDEIEKADPQIITLLLQVLDDGRLTDGQGNTINFKNTVIIATSNAGFGQQDTETSESNIMDRIAPYFRPEFLNRFNSIIKFNHLQKESLEEIVDLMLAEVNQTTAKKGISLTITDDAKAHLIDLGYNHAMGARPLRRIIEQEIRDRITDYYLDHPEVKKLQAILKEGQLVIRQNDQ

SEQ ID NO: 5925 - DNA, 1044 bp, Streptococcus agalactiae
ttgcttgggatagctcacaacgtgctgggctttacttcggtgttccatttattattttctgctatatttatcacaaactacgttacaagaaatggtgatcttatgggaagatttaaagaacttttagagagtaaaaaaactctcatcctacatggtgccttggggaccgagcttgagagtagaggttgtgatgtttctgggaaactttggtcagccaaatatctgattgaggatccagcagctattcagaccattcatgaagattatattcgtgctggcgctgatattgtgacgacatcaacttatcaggcgactttacaaggactagctcaagttggtgtctctgaaagtcagacagaagatttgattcgcttgactgttcagttggcaaaagctgcgcgtgagcaagtttggaaaagtttgacaaaagaagaaaaatcagagagaatctatcctttgatttctggggatgttggtccctacgctgcctttttagcggatggctctgagtacactggactctacgatattgataagcaaggtcttaaaaacttccatcgccatcgtattgagcttcttttagatgagggtgttgacattctggcacttgaaaccattccaaacgctcaggaggctgaggctcttattgagctacttgccgaggatttccctcaggttgaggcttatatgtcattcacctctcaagatggtaagaccatctcagatggtagtgctgttgcagacttggcgaaagctattgatgttagcccacaggtcgtggcgctgggcattaactgttcaagtccatcgttagttgctgatttcttgcaagcaatagcagagcagactaacaagcctcttgtgacctatccaaactctggagaggtttatgatggggcaagccaatcttggcaatctagccctgatcattcacacaccctacttgaaaatacaagtgactggcaaaaacttggcgcccaagttgtcggaggttgttgccgaactagaccagctgatattgctgacctctctgcacatttaaaa

SEQ ID NO: 5926 - protein, 348 aa, Streptococcus agalactiae
MLGIAHNVLGFTSVFHLLFSAIFITNYVTRNGDLMGRFKELLESKKTLILHGALGTELESRGCDVSGKLWSAKYLIEDPAAIQTIHEDYIRAGADIVTTSTYQATLQGLAQVGVSESQTEDLIRLTVQLAKAAREQVWKSLTKEEKSERIYPLISGDVGPYAAFLADGSEYTGLYDIDKQGLKNFHRHRIELLLDEGVDILALETIPNAQEAEALIELLAEDFPQVEAYMSFTSQDGKTISDGSAVADLAKAIDVSPQVVALGINCSSPSLVADFLQAIAEQTNKPLVTYPNSGEVYDGASQSWQSSPDHSHTLLENTSDWQKLGAQVVGGCCRTRPADIADLSAHLK

SEQ ID NO: 5927 - DNA, 249 bp, Streptococcus agalactiae
atgatagcaataaccttaatacttgagaagaaagactctgcttctgcaaaaaagcgtacgctaagagcatttaaaccaaaaatcacaagggcaaaaaaggaagcaaatgcccaagccggcacatttgggaaccagcgctgcatcagcatggcagcacctaaaaattcagtccccaaggcgaccgtccaacaaatccaatatagccaagcaacagtaaaacctgttccaggactgataaacttagtggca

SEQ ID NO: 5928 - protein, 83 aa, Streptococcus agalactiae
MIAITLILEKKDSASAKKRTLRAFKPKITRAKKEANAQAGTFGNQRCISMAAPKNSVPKATVQQIQYSQATVKPVPGLINLVA

SEQ ID NO: 5929 - DNA, 1152 bp, Streptococcus agalactiae
  misc_feature (1)..(1152): n = a, c, g, or t
ntgccggtgacggggtcattccacacttatgccactaagtttatcagtcctggaacaggttttactgttgcttggctatattggatttgttggacggtcgccttggggactgaatttttaggtgctgccatgctgatgcagcgctggttcccaaatgtgccggcttgggcatttgcttccttttttgcccttgtgatttttggtttaaatgctcttagcgtacgcttttttgcagaagcagagtctttcttctcaagtattaaggttattgctatcattatctttattatcttgggcttaggtgctatgtttggtctagtttcctttgaaggtcagcacaaggctattctcttcactcatctgactgccaatggtgcctttccaaatggtatcgttgcagttgtctcagtcatgttggctgttaactatgccttctctggtactgagttaattggtattgcggctggtgaaacggataatcccaaagaagctgtaccaagggctattaaaacgacaatcggtcgcttggttgttttctttgtactgacaattgttgtcctagcttcgctattgccaatgaaagaggcaggcgtatccacagcaccattcgttgatgtctttgacaagatgggaatcccttttacggcggatatcatgaacttcgttatcttgacagccatcctgtctgctggtaactcaggtctctacgcatcaagccgtatgctctggtcccttgccaatgaaggtatgttgtcaaaatctgttgtgaaaatcaataaacacggtgtcccaatgcgtgctcttctcttgtcaatggcaggagcagtgctgtcgctcttttcaagtatttacgctgcagacacagtttatctagccttggtttcaatcgcgggctttgctgttgttgtcgtatggctagccattccagtcgcacaaatcaatttccgcaaggaattcttgaaagagaatcaactagaagatttgtcttacaaaacaccttttacaccagttctcccttatatcacaatcattttgctcttgatttcgattgtagggattgcttgggatagctcacaacgtgctgggctttacttcggtgttccatttattattttctgctatatttatcacaaactacgttacaagaaatgg

SEQ ID NO: 5930 - protein, 384 aa, Streptococcus agalactiae
  MISC_FEATURE (1)..(384): Xaa = Any Amino Acid
XPVTGSFHTYATKFISPGTGFTVAWLYWICWTVALGTEFLGAAMLMQRWFPNVPAWAFASFFALVIFGLNALSVRFFAEAESFFSSIKVIAIIIFIILGLGAMFGLVSFEGQHKAILFTHLTANGAFPNGIVAVVSVMLAVNYAFSGTELIGIAAGETDNPKEAVPRAIKTTIGRLVVFFVLTIVVLASLLPMKEAGVSTAPFVDVFDKMGIPFTADIMNFVILTAILSAGNSGLYASSRMLWSLANEGMLSKSVVKINKHGVPMRALLLSMAGAVLSLFSSIYAADTVYLALVSIAGFAVVVVWLAIPVAQINFRKEFLKENQLEDLSYKTPFTPVLPYITIILLLISIVGIAWDSSQRAGLYFGVPFIIFCYIYHKLRYKKW

SEQ ID NO: 5931 - DNA, 546 bp, Streptococcus agalactiae
atgactgaaagtgtgacagttaataaaaagagaataaaacaaatcactcaaacacaagaggatatcttaacagcttttggccaacttttggaagagtatccctatgagaaaattcagattagccaaattgccaagaaatctggctatgctagaaggaccttttaccgacactttgacagtcgagatgacctacttacccttttcatcgaaagactaacattaaatctctttaagcaacttggtcaattggagcaacctacttttagccaagttttccaaaatttttttagttattggtctgattataaatcccttcttctcattcttagaaagaatgacctactccctcaatttcaacaatcctggttccgacatattgatttgatagagttaggtcgtggtgatttatcttccaatacctatgctcagcgatttgcgattggtggtattttcagtgttctaattgagtggattcatcaggactgccaaacaagtatcgaagaattaactcaactttccttcgatattatcaatcatttaaaaaat

SEQ ID NO: 5932 - protein, 182 aa, Streptococcus agalactiae
MTESVTVNKKRIKQITQTQEDILTAFGQLLEEYPYEKIQISQIAKKSGYARRTFYRHFDSRDDLLTLFIERLTLNLFKQLGQLEQPTFSQVFQNFFSYWSDYKSLLLILRKNDLLPQFQQSWFRHIDLIELGRGDLSSNTYAQRFAIGGIFSVLIEWIHQDCQTSIEELTQLSFDIINHLKN

SEQ ID NO: 5933 - DNA, 96 bp, Streptococcus agalactiae
gtggattcatcaggactgccaaacaagtatcgaagaattaactcaactttccttcgatattatcaatcatttaaaaaattaaaaagagctttgcag

SEQ ID NO: 5934 - protein, 32 aa, Streptococcus agalactiae
MDSSGLPNKYRRINSTFLRYYQSFKKLKRALQ

SEQ ID NO: 5935 - DNA, 159 bp, Streptococcus agalactiae
ttgataaaaaggaccatttcatcgtcttttcatctgttgaccgcacaggtcttgatgaatcatgggatactattttatctgagttataatttgagagtttatgacaaaaagagctttgcagtagctgttgagactactgcaaagctctttttaattttt

SEQ ID NO: 5936 - protein, 53 aa, Streptococcus agalactiae
MIKRTISSSFHLLTAQVLMNHGILFYLSYNLRVYDKKSFAVAVETTAKLFLIF

SEQ ID NO: 5937 - DNA, 594 bp, Streptococcus agalactiae
atggcagaagaatttttaaatactcataatgcgtctattttattgagtgcagctaacaagtcacattatcctcaggatgatctcccagaagttgctctcgctggtcgttcaaatgttggtaaatcaagctttatcaacacgcttcttggtcgtaaaaacctagcgcgtacgtcgagtaagccaggtaagacacaactgctcaacttttataacattgatgacaaactgcgttttgtcgatgtccctggatatggctacgctaaggtgtctaaaactgagcgtgctaagtggggcaagatgattgaagagtaccttgtaacacgtgataaccttcgtgttgttgttagtttagttgattttcgtcatgatccaagtgcggacgatattcaaatgtatgaatttcttaagtactatgagattccagtaattattgtagcgacaaaggcagataaaatacctcgtggcaagtggaataaacatgagtcgtctattaagaagaaattaaactttgataaaaaggaccatttcatcgtcttttcatctgttgaccgcacaggtcttgatgaatcatgggatactattttatctgagtta

SEQ ID NO: 5938 - protein, 198 aa, Streptococcus agalactiae
MAEEFLNTHNASILLSAANKSHYPQDDLPEVALAGRSNVGKSSFINTLLGRKNLARTSSKPGKTQLLNFYNIDDKLRFVDVPGYGYAKVSKTERAKWGKMIEEYLVTRDNLRVVVSLVDFRHDPSADDIQMYEFLKYYEIPVIIVATKADKIPRGKWNKHESSIKKKLNFDKKDHFIVFSSVDRTGLDESWDTILSEL

SEQ ID NO: 5939 - DNA, 597 bp, Streptococcus pyogenes
atggctgaagaacaagtcttaaatacccataacgcatcaattttattgagcgctgccaataaatctcattacccccaagatgatttgccagaaattgccctcgctggacgttcaaatgttggtaaatcaagttttattaataccatattggggcgcaaaaatttggcaagaacctcaagcaagccaggaaaaacccaactattaaattttttcaatattgatgacaagcttagatttgtggatgtccctggttatggctatgccaaggtttctaaaagtgaacgggccaaatggggaaagatgatcgaagaatacttaaccagcagagacaatctgcgtgcagtcgtgagtttggtggatttacgtcatgccccttcaaaagaagatattcagatgtatgactttttgaagtactatgacattcctgttattgttgtggcaaccaaagcagataagattcctcgtggcaaatggaacaaacatgagtctgtggtcaagaaagctttgaattttgacaaatctgatacttttatagtattttcttcggtagaacgtattggtatcgatgattcttgggatgctattttagagcaggtc

SEQ ID NO: 5940 - protein, 199 aa, Streptococcus pyogenes
MAEEQVLNTHNASILLSAANKSHYPQDDLPEIALAGRSNVGKSSFINTILGRKNLARTSSKPGKTQLLNFFNIDDKLRFVDVPGYGYAKVSKSERAKWGKMIEEYLTSRDNLRAVVSLVDLRHAPSKEDIQMYDFLKYYDIPVIVVATKADKIPRGKWNKHESVVKKALNFDKSDTFIVFSSVERIGIDDSWDAILEQV

SEQ ID NO: 5941 - DNA, 1248 bp, Streptococcus agalactiae
atgaatagaaaagttgaggaaaaaatggctgggaatcgtaataacgatatgaatgtctattgttcattttgtggcaaaagccaagatgaagtaaaaaaaattattgcaggtaatggtgttttcatttgtaatgaatgtgtggccttatcacaagaaattattaaggaagaattagctgaggaagtactggctgatttagcagaagtaccaaaacctaaggaactattagaaatattaaatcaatatgttgtagggcaagatcgtgctaaacgtgctttagcagttgctgtctacaatcattacaagcgtgttagttataccgagagtagtgacgatgatgtagatttgcaaaaatccaacattttgatgattggtccaactggctcaggaaaaaccttcttagcacaaacactggctaaaagccttaatgtaccgtttgctattgcagatgcgacttcattgaccgaagcaggatacgttggagaagatgttgagaatattcttcttaaattgattcaagctgctgattataatgtcgaacgtgctgagcgtggtattatctacgttgatgaaatagataaaattgctaagaaaggcgaaaatgtttctatcacacgtgatgtgtctggtgaaggtgtacagcaagcccttcttaaaattattgagggtacggtagcaagtgttcccccacagggtgggcgtaaacatcctaaccaagaaatgattcaaattaataccaagaacatcctttttattgtcggtggtgcttttgatggtattgaagaccttgtgaagcaacgtttaggcgaaaaagttattggttttggacagacaagccgtaaaattgatgacaacgcttcttatatgcaagagataatttctgaggatattcaaaagtttggactgattccagagtttattggccgtttaccagtagttgcagcgttagaacttcttactgcagaagatctggttcgtattctgacagaaccacgcaatgctttggttaaacaataccaaaccttattatcttatgatggtgtagaattggaatttgaccaggatgctctattggctatcgctgataaggctatcgagcgcaagactggtgcacgtggtttacgttctattattgaagaaacgatgcttgatatcatgtttgaaattccaagccaagaagatgtaacaaaagttcgtatcacaaaggctgctgttgagggtactgacaagcctgttttagagacggct

SEQ ID NO: 5942 - protein, 416 aa, Streptococcus agalactiae
MNRKVEEKMAGNRNNDMNVYCSFCGKSQDEVKKIIAGNGVFICNECVALSQEIIKEELAEEVLADLAEVPKPKELLEILNQYVVGQDRAKRALAVAVYNHYKRVSYTESSDDDVDLQKSNILMIGPTGSGKTFLAQTLAKSLNVPFAIADATSLTEAGYVGEDVENILLKLIQAADYNVERAERGIIYVDEIDKIAKKGENVSITRDVSGEGVQQALLKIIEGTVASVPPQGGRKHPNQEMIQINTKNILFIVGGAFDGIEDLVKQRLGEKVIGFGQTSRKIDDNASYMQEIISEDIQKFGLIPEFIGRLPVVAALELLTAEDLVRILTEPRNALVKQYQTLLSYDGVELEFDQDALLAIADKAIERKTGARGLRSIIEETMLDIMFEIPSQEDVTKVRITKAAVEGTDKPVLETA

SEQ ID NO: 5943 - DNA, 1227 bp, Streptococcus pyogenes
atggcaggaagtagaactaacgatattaaagtatactgttcattttgtggtaaaagccaggatgacgttaaaaaaattatcgcaggaaataatgttttcatctgcaatgaatgcgtagctttatcacaagaaattataaaagaagaattggctgaagaagtccttgccgatttgacagaagttccaaaaccaaaagagctccttgatgttttaaatcaatatgtggttggtcaagatcgtgctaaacgtgctttatcagttgctgtgtacaatcattataagcgtgtctcgtttacagaaagtcgtgatgacgatgatgtggatttacaaaagtccaacattttgatgattggaccaacaggttcaggaaaaaccttcttagcacaaactctggctaaaagcctcaatgtaccatttgctattgcagatgcaacttctttgactgaagcagggtatgttggagaagatgtggaaaatattttactcaaactgattcaggctgctgactataatgtcgaacgagcagagcgtggtattatttatgttgatgaaatagataagattgctaaaaaaggtgagaacgtatctatcacacgtgatgtatctggtgaaggtgtacagcaagcccttcttaaaattattgaaggtacggtagcaagtgttcccccacaaggtgggcggaagcaccctaatcaagaaatgatccaaattgatacaaaaaatatcttgtttattgttggcggggcttttgatggcatcgaggagatcgttaaacaacgtttaggtgaaaaagttattggttttggtcaaaacagccgtaaaattgatgacaatgcttcttatatgcaagagattatttcagaagatattcaaaagtttgggcttattccagaatttattggccgcttaccagttgtggcagcccttgaacaactaaacacatcagatttgattcaaattttgacagaaccaagaaatgccctggtcaagcaatatcaggctcttctttcttacgatggcgtcgaattggcatttgataaggaagccttagaagccattgccaataaagccattgaacgtaagacaggagcacgtggtcttcgttctattatcgaagaaacgatgcttgacatcatgtttgaaattccaagccaagaagatgtcacaaaagtgcgtatcaccaaggctgctgtcgaaggcaagtcaaaacccgttttagagacagct

SEQ ID NO: 5944 - protein, 409 aa, Streptococcus pyogenes
MAGSRTNDIKVYCSFCGKSQDDVKKIIAGNNVFICNECVALSQEIIKEELAEEVLADLTEVPKPKELLDVLNQYVVGQDRAKRALSVAVYNHYKRVSFTESRDDDDVDLQKSNILMIGPTGSGKTFLAQTLAKSLNVPFAIADATSLTEAGYVGEDVENILLKLIQAADYNVERAERGIIYVDEIDKIAKKGENVSITRDVSGEGVQQALLKIIEGTVASVPPQGGRKHPNQEMIQIDTKNILFIVGGAFDGIEEIVKQRLGEKVIGFGQNSRKIDDNASYMQEIISEDIQKFGLIPEFIGRLPVVAALEQLNTSDLIQILTEPRNALVKQYQALLSYDGVELAFDKEALEAIANKAIERKTGARGLRSIIEETMLDIMFEIPSQEDVTKVRITKAAVEGKSKPVLETA

SEQ ID NO: 5945 - DNA, 144 bp, Streptococcus agalactiae
gtgttgacaaggttagtgaaagcattcatcaaaaaaactgttcctaatccatatctttttttctttatagcaggaattgcacataaaacacaaatcacagctaaaaatgcggtaaagaccccaaaaaggctacgttgcattgaa

SEQ ID NO: 5946 - protein, 48 aa, Streptococcus agalactiae
MLTRLVKAFIKKTVPNPYLFFFIAGIAHKTQITAKNAVKTPKRLRCIE

SEQ ID NO: 5947 - DNA, 564 bp, Streptococcus agalactiae
atgttttttaacaagcaatttgaggtaaaatttgttagaatatctagagataagttagtgaggaaaaaagtcatgacaaagcaaataattgccatttgggctgaagatgaagaccatttgattggagttaatggcggtttaccatggaggcttcctaaagagttacatcacttcaaagaaacgaccatggggcaggctttgcttatgggacgaaagacctttgatggaatgaaccgtcgtgttttacctggtagagagacaatcatcttaacaaaagatgaacaattccaagcagatggagtgacagtcctaaatagtgttgaacaagttataaaatggtttcaggaacataataagaccttatttattgtaggtggtgcaagtatttataaagcatttctgccttattgtgaagcaatcataaaaactaaagttcatggaaaatttaaaggtgatacctattttcctgatgttaatctatctgagtttaaagttatctctagagattattttgaaaaggatgagcagaatgctcatgcttttactgtgacatattttgaaaaa

SEQ ID NO: 5948 - protein, 188 aa, Streptococcus agalactiae
MFFNKQFEVKFVRISRDKLVRKKVMTKQIIAIWAEDEDHLIGVNGGLPWRLPKELHHFKETTMGQALLMGRKTFDGMNRRVLPGRETIILTKDEQFQADGVTVLNSVEQVIKWFQEHNKTLFIVGGASIYKAFLPYCEAIIKTKVHGKFKGDTYFPDVNLSEFKVISRDYFEKDEQNAHAFTVTYFEK

SEQ ID NO: 5949 - DNA, 495 bp, Streptococcus pyogenes
atgacaaaggaaattattgctatttgggcagaggatgaagcagggcttattggtattgcgggtaagttaccatggtatttaccaaaagagttagaacattttaaaaagacaacgctacatcaagcaatcttaatgggccgtgtgacttttgaaggaatgaattgcaaaagacttcctcaacgtcaaacccttgtcatgacaagaaatagagattatcaagtagatgaggtgttgacaatgactagtattgaaaaagtcttggagtggtaccatgcgcaggataaaacactttatatcattggtgggaataaggttttagaagcgtttaatggttatttcgatcgtatcataaaaacagttatccatcatcgttttaaaggagatacctaccgaccaaatctagattttagtcatttcacgcaagaaagccaaacgttctatgctcgagacgctaaaaatccttatgattttaccgttactgctttaaaacacaaa

SEQ ID NO: 5950 - protein, 165 aa, Streptococcus pyogenes
MTKEIIAIWAEDEAGLIGIAGKLPWYLPKELEHFKKTTLHQAILMGRVTFEGMNCKRLPQRQTLVMTRNRDYQVDEVLTMTSIEKVLEWYHAQDKTLYIIGGNKVLEAFNGYFDRIIKTVIHHRFKGDTYRPNLDFSHFTQESQTFYARDAKNPYDFTVTALKHK

SEQ ID NO: 5951 - DNA, 837 bp, Streptococcus agalactiae
atgacaaaagccgatttattatttaaagacaatatcacgaaaattatgtctgaaggtgtatttagcgagcaagccagacctagatataaaaatggggaaatggctaattctaagtatattacaggtgcctttgcagagtatgatttatcaaagggtgaatttcctattacaactctacgtccaattccaataaaatctgctattaaagaaattttctggatttatcaagatcagacaaatgatttagcagttttgaatgataaatatggtgtgacatactggaatgattgggaagttggccatactggcacgataggtcagcgctacggtgcagttgttaaaaaacataatattatatcaaaactcttaaaacagcttgaagataacccttggaatcgtcgtaatgttatttcattatgggactatgaagcatttgaagaaacagaaggcctactaccttgtgcttttcaaacgatgtttgatgtgagacgcgttaatggtgagctttatttggatgccacattaacacaacgttctaatgacatgttagttgcacatcatattaatgctatgcagtatgtagcacttcagatgatgattgcaaagcattttggttggagagttgggaagtttttctattttatcaataatcttcatatttatgataaccagtttgaacaagctcaggaactcttaaaacgccaaccgtctgagtgtaaccccaaactagtattgaatgttccagatggaacagacttttttgatattaaaccagatgattttgcgttagttgattatgacccaattaaacctcaattacgttttgatttagcaatc

SEQ ID NO: 5952 - protein, 279 aa, Streptococcus agalactiae
MTKADLLFKDNITKIMSEGVFSEQARPRYKNGEMANSKYITGAFAEYDLSKGEFPITTLRPIPIKSAIKEIFWIYQDQTNDLAVLNDKYGVTYWNDWEVGHTGTIGQRYGAVVKKHNIISKLLKQLEDNPWNRRNVISLWDYEAFEETEGLLPCAFQTMFDVRRVNGELYLDATLTQRSNDMLVAHHINAMQYVALQMMIAKHFGWRVGKFFYFINNLHIYDNQFEQAQELLKRQPSECNPKLVLNVPDGTDFFDIKPDDFALVDYDPIKPQLRFDLAI

SEQ ID NO: 5953 - DNA, 861 bp, Streptococcus pyogenes
atgcttacagaaaggttattagagatgacaaaagctgaccagatttttaaagctaatattcaaaaaattataaacgaaggatcattgagtgagcaagcacgtcctaaatataaagatggtcgaacagctcattctaagtatattactggggcgtttgctgaatatgatttagctaaaggagagtttcccatcacaactttacgacccattccaattaaatctgctataaaggaattattttggatatatcaagatcagtctaacagtttagatgtgctagaagctaaatataatgttcattattggaatgaatgggaagttgaccagacacgtactattgggcaacgttatggtgctgtagtcaaaaaacatgatatcatctcaaaaatactaaagcaattagcagaaaatccttggaatcgtcgtaatgtcatttctctctgggactatgaagcatttgaggagacaaaagggttgttgccatgtgcctttcaaatcatgtttgatgttagacgtgtaggggaagatctttatttagatgctagtttgacgcaacgttctaatgacatattagttgctcatcacatcaatgccatgcaatacgttgccttgcagatgatgattgctaaacattttggatggaaaataggtaagttcttttattttgttaacaatttacatatttatgacaaccaatttgatcaggctcaagaattgctaaaacgacagccagttgctagtcagcctaagcttgttttaaatgttccagataggactaatttctttgatattaaaccagatgattttgaattacaaaattatgatccagtgaagcctcagttgcactttgaccttgctatt

SEQ ID NO: 5954 - protein, 287 aa, Streptococcus pyogenes
MLTERLLEMTKADQIFKANIQKIINEGSLSEQARPKYKDGRTAHSKYITGAFAEYDLAKGEFPITTLRPIPIKSAIKELFWIYQDQSNSLDVLEAKYNVHYWNEWEVDQTRTIGQRYGAVVKKHDIISKILKQLAENPWNRRNVISLWDYEAFEETKGLLPCAFQIMFDVRRVGEDLYLDASLTQRSNDILVAHHINAMQYVALQMMIAKHFGWKIGKFFYFVNNLHIYDNQFDQAQELLKRQPVASQPKLVLNVPDRTNFFDIKPDDFELQNYDPVKPQLHFDLAI

SEQ ID NO: 5955 - DNA, 1275 bp, Streptococcus agalactiae
gtgagaaacaagactttgaaggttaaagctttttttcatatttttagcttctttatggtaaaatggaatttagcaaaaatgacttttattcagaaaggtttaccaatgaaaataggaattgataagattggttttgcaaccagtcaatatgtccttgaaatgactgatttggctattgctcgccaagttgaccctgaaaaattcagcaagggattattgttagattcacttagtattacgccagttacagaagatatcgttacacttgcagcttctgcagctaatgatattttatctgatgaggacaaagaaactattgatatggtgattgtcgctacagaatcaagtatcgatcagagtaaggcggcttctgtctatgtacatcaacttttagagattcaacctttcgcaaggtcattcgagatgaaagaagcatgctatagcgcaactgctgctcttgattacgctaaattacatgtagaaaaacatccagattctaaagtattagtgatagcttcagatattgctaaatatggcattaaatctactggagaatccactcaaggtgcaggcagtatcgctatgcttattagtcaaaatccatccattctagagctaaaagaggaccatctagcgcaaacccgtgatattatggacttttggcgaccaaattattctgatgttccttatgttaatggcatgttttcaacaaaacaatatctagatatgctaaaaactacttggaaagtatatcaaaaacgttttaatactagtctaagtgactatgctgctttttgtttccatattccttttccaaaattagctttaaagggctttaataaaattctagataataacttagatgaacaaaagaaagctgaactacaagaaaattttgagcactctattacctatagtaagaaaattggaaattgctatactggctcattgtatctaggacttctatcgttactagaaaatagtcaaaatttaaaagcaggtgatcaaattgccttcttttcatacggtagcggagctgttgctgaaatttttaccggtcagttagtagacggctaccaaaataaacttcagagcgatcgtatggatcaactcaataaacgtcaaaaaattacagtaactgagtatgagaaactcttctttgaaaaaacaatcctagacgaaaatggaaatgctaacttcaacacctaccggactggcactttttctctagactctatttgcgaacatcaacgtatctacaagaaaattaataat

SEQ ID NO: 5956 - protein, 425 aa, Streptococcus agalactiae
MRNKTLKVKAFFHIFSFFMVKWNLAKMTFIQKGLPMKIGIDKIGFATSQYVLEMTDLAIARQVDPEKFSKGLLLDSLSITPVTEDIVTLAASAANDILSDEDKETIDMVIVATESSIDQSKAASVYVHQLLEIQPFARSFEMKEACYSATAALDYAKLHVEKHPDSKVLVIASDIAKYGIKSTGESTQGAGSIAMLISQNPSILELKEDHLAQTRDIMDFWRPNYSDVPYVNGMFSTKQYLDMLKTTWKVYQKRFNTSLSDYAAFCFHIPFPKLALKGFNKILDNNLDEQKKAELQENFEHSITYSKKIGNCYTGSLYLGLLSLLENSQNLKAGDQIAFFSYGSGAVAEIFTGQLVDGYQNKLQSDRMDQLNKRQKITVTEYEKLFFEKTILDENGNANFNTYRTGTFSLDSICEHQRIYKKINN

SEQ ID NO: 5957 - DNA, 1212 bp, Streptococcus pyogenes
atgggtaagactataaaaataactaaaagaaggacaaatatgacaattggaattgataagattggttttgcaaccagtcaatatgtcttgaaattggaagatttagcgcttgcacgccaagtggatccagcaaaatttagtcaagggctactcattgagtcttttagtgtggcaccaatcactgaagacattattactttagctgcttctgcagcagatcaaattttaaccgacgaagatcgagctaagattgatatggttattttggcaactgaatcgagtactgatcagtcaaaggcatcagctatctatgtacatcacttagttggtatccagccttttgcacgttcctttgaagtaaaacaagcctgctatagcgcaactgctgctctagactatgctaaactgcatgtggcttctaagccagattctcgtgtccttgttattgctagtgatattgctagatacggtgtaggatctcctggggaatcgactcaaggctctggtagtattgctcttttggtaactgctaaccctcgtattcttgctctaaatgaagataatgtggctcaaactagggatattatggacttttggaggcctaactatagtttcacaccttatgttgatggtatttactctaccaagcaatatctcaattgcttagaaaccacgtggcaagcttatcagaaaagagaaaaccttcagttatctgatcttgctgcagtttgtttccatattccatttcccaagttagccctaaaaggtctaaataacattatggataacacagtacctcctgaacacagggaaaaactaatagaagcctttcaagcttctattagttatagcaaacaaattggaaatatttatactggctcactttatctaggattgttatctttacttgaaaatagtaaagtattacaatctggagataaaattggtttttttagctatggttccggtgccgtaagtgaattttattccggtcagttagttgctgggtacgataaaatgttaatgactaatcgacaagctttactggatcaacgaacacgtctttctgtttctaaatacgaagaccttttctacgaacaagtccaattagatgataatggtaatgccaattttgacatttacttaactggaaaatttgctctaacagccatcaaggagcatcgaaggatctatcataccaatgacaaaaac

SEQ ID NO: 5958 - protein, 404 aa, Streptococcus pyogenes
MGKTIKITKRRTNMTIGIDKIGFATSQYVLKLEDLALARQVDPAKFSQGLLIESFSVAPITEDIITLAASAADQILTDEDRAKIDMVILATESSTDQSKASAIYVHHLVGIQPFARSFEVKQACYSATAALDYAKLHVASKPDSRVLVIASDIARYGVGSPGESTQGSGSIALLVTANPRILALNEDNVAQTRDIMDFWRPNYSFTPYVDGIYSTKQYLNCLETTWQAYQKRENLQLSDLAAVCFHIPFPKLALKGLNNIMDNTVPPEHREKLIEAFQASISYSKQIGNIYTGSLYLGLLSLLENSKVLQSGDKIGFFSYGSGAVSEFYSGQLVAGYDKMLMTNRQALLDQRTRLSVSKYEDLFYEQVQLDDNGNANFDIYLTGKFALTAIKEHRRIYHTNDKN

SEQ ID NO: 5959 - DNA, 1281 bp, Streptococcus agalactiae
atgacaaaaatttcctggacaggattttcaaaaaaatcccctgaagaacgtattcattaccttgaagaacaagattttttagctgattcttccctagaaatagtgacgaatcaggacttactctctttatcactagccaatcaaatggctgaaaatgtcatcggtcgaatagccttaccattttcacttgtcccagatgttttggttaacggtaaagtctatcaagtcccatatgtcactgaagaaccgtcagttgttgctgctgcaagttttgctgctaaaattataaaacgatctggtggttttctgacaaccgtccataatcgtaaaatgattggacaagtagccctttatgatgtacaagatagtcaacacactaaagaatctatattaaatcaaaaacagcaattattagaaatagccaacgctgctcatccatcaatagtcaagcgtggaggcggtgcttgcgacctaactattgagattaaagaagactttttgattgtttaccttatggttgatacaaaagaagccatgggtgctaatatggttaacaccatgatggaagcattatcttcgccattagaagacatttcaaaaggcaaaagcttaatgtcaattttatctaactatgctaccgaatctttagtgactgctacatgccgagttgatttaagatttctaagtcgccaaaaagaggaggccatcaagttagctcaaaaaatgacgatggcaagtcaattagctcaagtagacccttatcgtgctagcacacataataaaggtatttttaatggcattgatgctatcgtcttagctactggaaatgattggcgagctattgaagctggagcgcatacctatgctgtcaaagatgggcaatatcgaggattatctagatggtcttataaggttgatgataattgcctagaaggtactctgacgctaccgatgcctgttgcaacaaaaggtggatccattggtattaaccctagtgtccacctagctcacgatctactaggtcgtcctaatgctaaagagttggcaagtattattctttcgattggactagctcaaaattttgcggctcttaaggcattggttagcacaggaattcaagctggtcacatgaaacttcaagcaaagtcgttggcactacttgctggagctaaagaagaacaaatttcagaagtcgttaaacagcttctagactctaaacacatgaatctagagacagcacaaaaaattgtcaataaacttactaaaagtaaaaaaagaatt

SEQ ID NO: 5960 - protein, 427 aa, Streptococcus agalactiae
MTKISWTGFSKKSPEERIHYLEEQDFLADSSLEIVTNQDLLSLSLANQMAENVIGRIALPFSLVPDVLVNGKVYQVPYVTEEPSVVAAASFAAKIIKRSGGFLTTVHNRKMIGQVALYDVQDSQHTKESILNQKQQLLEIANAAHPSIVKRGGGACDLTIEIKEDFLIVYLMVDTKEAMGANMVNTMMEALSSPLEDISKGKSLMSILSNYATESLVTATCRVDLRFLSRQKEEAIKLAQKMTMASQLAQVDPYRASTHNKGIFNGIDAIVLATGNDWRAIEAGAHTYAVKDGQYRGLSRWSYKVDDNCLEGTLTLPMPVATKGGSIGINPSVHLAHDLLGRPNAKELASIILSIGLAQNFAALKALVSTGIQAGHMKLQAKSLALLAGAKEEQISEVVKQLLDSKHMNLETAQKIVNKLTKSKKRI

SEQ ID NO: 5961 - DNA, 1275 bp, Streptococcus pyogenes
atgacaaaaactaatcttaactggagcggtttttcaaagaaaacattcgaagaacgcctccaacttatcgaaaaatttaaactacttaatgctgaaaacttaaatcaactcaaaacagacgttcttttgcctatccaaacagctaatcaaatgactgaaaatgtcttaggacgattggctttgccctttagcatagctcctgattttcttgtcaacggttcaacttatcagatgccttttgtcacggaagaaccttctgttgttgctgcagcatctttcgcagcaaaactaatcaaacgctcaggtggttttaaagctcaaaccctaaaccgacaaatgattggtcaaattgttctttacgatatcgaccaaatagataacgctaaagccgccatccttcataaaacaaaaaagctaattgcattggcaaataaagcttatccttccattgttaaaagaggtggaggcgctagaaccattcatttggaagaaaaaggagaatttttgattttctatctgactgttgatacccaagaagctatgggagcaaatatggtcaatactatgatggaagctcttgttcctgatttaacaagactgtctaaggggcattgtctaatggcgattttatctaattacgcaacagagtcgcttgttactactagttgtgagattcccgtgcgccttttagatcacgataaaacaaaatccctacagttagctcaaaaaatagagctagccagccgactagctcaagtagatccttaccgggctactactcataataaaggtatttttaatggcattgatgcagtggtaatagccacaggaaatgactggcgtgctattgaagcaggggcccatgcttatgcctcaagaaatggtagctatcaaggacttagtcagtggcattttgaccaagataaacaagttctgcttggccaaatgaccctccctatgcctattgctagtaaggggggatctatcgggcttaaccctactgtttctatcgcacatgatcttcttaatcaacctgatgccaaaacattagcccaattgattgcatctgtggggttagctcaaaactttgctgcactaaaagctctgacctcatctggcatccaagctggtcacatgaaactacatgcgaaatcattagctcttttggcgggggcaacccaagacgaaattgctcctttagttaatgctttactagctgataaaccaataaatctagaaaaagcacatttttacttatcccagctaagacagtct

SEQ ID NO: 5962 - protein, 425 aa, Streptococcus pyogenes
MTKTNLNWSGFSKKTFEERLQLIEKFKLLNAENLNQLKTDVLLPIQTANQMTENVLGRLALPFSIAPDFLVNGSTYQMPFVTEEPSVVAAASFAAKLIKRSGGFKAQTLNRQMIGQIVLYDIDQIDNAKAAILHKTKKLIALANKAYPSIVKRGGGARTIHLEEKGEFLIFYLTVDTQEAMGANMVNTMMEALVPDLTRLSKGHCLMAILSNYATESLVTTSCEIPVRLLDHDKTKSLQLAQKIELASRLAQVDPYRATTHNKGIFNGIDAVVIATGNDWRAIEAGAHAYASRNGSYQGLSQWHFDQDKQVLLGQMTLPMPIASKGGSIGLNPTVSIAHDLLNQPDAKTLAQLIASVGLAQNFAALKALTSSGIQAGHMKLHAKSLALLAGATQDEIAPLVNALLADKPINLEKAHFYLSQLRQS

SEQ ID NO: 5963 - DNA, 447 bp, Streptococcus agalactiae
atgaataaaaatcaatacccaaaatgggaagaattacctgaactagatttgtatcttgaccaagtacttctctatgtgaatcaattaattaatcctaaaacaataactaacgataaactactcaccgcttcgatgatcaacaattatgtcaaacataattatatatccaaacctataaaaaaaaaatacaatcgccgtcaagtagcacgattgattgttattacagcttttaaacaagtttttgctattcaagaaatcagtcaaacattagaacttctgacagctgacaatcattctgaagaagcatataacggatttgctgcttgtatgaacaaagaagaggttcacgatttaccaccagttgtcattagtgcctgtcagacgttgaacctttatcaagaaacacaaaaattagttttagaactaggaggaaaaaataaaaatgct

SEQ ID NO: 5964 - protein, 149 aa, Streptococcus agalactiae
MNKNQYPKWEELPELDLYLDQVLLYVNQLINPKTITNDKLLTASMINNYVKHNYISKPIKKKYNRRQVARLIVITAFKQVFAIQEISQTLELLTADNHSEEAYNGFAACMNKEEVHDLPPVVISACQTLNLYQETQKLVLELGGKNKNA

SEQ ID NO: 5965 - DNA, 438 bp, Streptococcus pyogenes
atgatttttccatcattaccttattggaaggacctccctgatttagacttatatttggatcaagtgttactttatgtcaaccagtgcactgatttttcagaagtgtcagataataaatcactaacggcatctatgattaataattacgtcaagcatgggtatgtgactaaacctatcaagaaaaaataccaaaagcaacaactagcgcgcttaattgccatcagtttgtttaaaacggtatttcctattcaagatattagtcgcgtattggaggaacttcaggcacaggctgattctgaaagtctttacaatacttttgtaacctgttggaatcagaaggctcccattgaggaggacattccaccgattgtgcaggttgcctgtcaaacggtcaaagattaccacaaaactatttatttattacaggaggtgacccaa

SEQ ID NO: 5966 - protein, 146 aa, Streptococcus pyogenes
MIFPSLPYWKDLPDLDLYLDQVLLYVNQCTDFSEVSDNKSLTASMINNYVKHGYVTKPIKKKYQKQQLARLIAISLFKTVFPIQDISRVLEELQAQADSESLYNTFVTCWNQKAPIEEDIPPIVQVACQTVKDYHKTIYLLQEVTQ

SEQ ID NO: 5967 - DNA, 654 bp, Streptococcus agalactiae
atgcttaaagaaatgtctatcaaattaagtcctcaactttcctttggcgaagagcttgcaaatagtatcactcacgctgtaggagctttgcttatgctaatcctattaccaatcaccgctgtctatagtcacaaccacttcggattacaagcagcacttggtacctcaatattcgtcacttctttatttttgatgtttttatcatcaagtatttaccactccatgacttataacagtcttcaaaaatatgttctacgcatgattgatcactctatgatttatattgctattgcaggtagttatactcctgtcgcattgtcacttattggcggctggttaggatatctcatcatttttttacaatgggggattacattatttggtatcctttataaaatcttcgctcccaaaatcaatgataaatttagccttgtactttacctcattatgggatggctggttatctttattttccctgctattatcacaaaaactggaccagctttttggggattactcttggctggtggtatttgctatactatcggtgcactcttttatgctcgcaaacgtccttatgatcacatgatttggcacctttttattctattagcttctattttacaatacattggaattgtctacttcatgcta

SEQ ID NO: 5968 - protein, 218 aa, Streptococcus agalactiae
MLKEMSIKLSPQLSFGEELANSITHAVGALLMLILLPITAVYSHNHFGLQAALGTSIFVTSLFLMFLSSSIYHSMTYNSLQKYVLRMIDHSMIYIAIAGSYTPVALSLIGGWLGYLIIFLQWGITLFGILYKIFAPKINDKFSLVLYLIMGWLVIFIFPAIITKTGPAFWGLLLAGGICYTIGALFYARKRPYDHMIWHLFILLASILQYIGIVYFML

SEQ ID NO: 5969 - DNA, 648 bp, Streptococcus pyogenes
atgaaccaaacctttaaacaaagtttacccttatcttttagtgaggaagtagcaaacagcgtgacacacgctatcggagcatttgctatgctcattctacttcctatttcagccagctatgcttatcaaacttatgaccttaaagccgctattggtatctccatctttgtcatcagtctctttttgatgtttttgtcctctacgatttaccactccatggcttatggttcggttcacaaatacattctacgcattattgatcacagtatgatttatattgctatcgcaggaagttatacacctgttgccttatcccttgtttctggttggctaggctatatcattattgttttgcagtggggcattacgctttttgggattttatacaaaatttttgccaaacgtatcaatgaaaaattcagtttgatgctttatatcgttatgggctggctcgttgtgtttatcttgccagtcatcattcaaaaaactagtcttgcttttggtcttctcatgttatttggtggcttgtcttataccattggagcggtattttatgccaaaaaaagaccctacttccacatgatttggcatctctttattttattggcctctgccctccaatttatcgctatcactttctttatgctt

SEQ ID NO: 5970 - protein, 216 aa, Streptococcus pyogenes
MNQTFKQSLPLSFSEEVANSVTHAIGAFAMLILLPISASYAYQTYDLKAAIGISIFVISLFLMFLSSTIYHSMAYGSVHKYILRIIDHSMIYIAIAGSYTPVALSLVSGWLGYIIIVLQWGITLFGILYKIFAKRINEKFSLMLYIVMGWLVVFILPVIIQKTSLAFGLLMLFGGLSYTIGAVFYAKKRPYFHMIWHLFILLASALQFIAITFFML

SEQ ID NO: 5971 - DNA, 912 bp, Streptococcus agalactiae
atgaaaagtgcttatatcttttttaatccaaaatctggtaaagatgaacaagcattggcaaaagaagtaaaatcttatttaatagaacatgattttcaagacgattatgttcgtattattacaccttcatctgttgaggaagctgtcgccttagcaaaaaaagcatctgaagaccatatcgacttggttattcctttagggggagatggcactattaataaaatctgtggtggtgtctacgctggtggtgcttatcctactatcggactagtacctgccgggaccgtcaataacttttcaaaagctttgaacatcccgcaagagaggaatctcgctcttgaaaaccttctaaacggtcatgtaaagtccgtagatatctgtaaagttaatgacgattacatgattagcagtttaacacttggtctccttgctgatattgctgctaatgtcacttctgaaatgaagcgtaaattaggcccttttgctttcttaggtgatgcctaccgtatattaaagcgtaatcgatcatattctatcactcttgcttacgataataatgtacggtctttacgcacgcggttactccttattaccatgaccaattcgattgccggtatgccagccttctctccagaagcaacaattgatgatggactttttagagtctacactatggaacatattcacttcttcaaattattgttgcatctaagacaatttcgtaagggagattttagtcaagcaaaggagataaaacattttcataccaataatctgactatttcaacttttaaacgtaaaaaatcagctatccctaaagttcgtattgatggcgatccaggtgaccaattacctgtaaaagttgaagtcatccctaaagccttaaagtttatcattcctaactcattacca

SEQ ID NO: 5972 - protein, 304 aa, Streptococcus agalactiae
MKSAYIFFNPKSGKDEQALAKEVKSYLIEHDFQDDYVRIITPSSVEEAVALAKKASEDHIDLVIPLGGDGTINKICGGVYAGGAYPTIGLVPAGTVNNFSKALNIPQERNLALENLLNGHVKSVDICKVNDDYMISSLTLGLLADIAANVTSEMKRKLGPFAFLGDAYRILKRNRSYSITLAYDNNVRSLRTRLLLITMTNSIAGMPAFSPEATIDDGLFRVYTMEHIHFFKLLLHLRQFRKGDFSQAKEIKHFHTNNLTISTFKRKKSAIPKVRIDGDPGDQLPVKVEVIPKALKFIIPNSLP

SEQ ID NO: 5973 - DNA, 852 bp, Streptococcus agalactiae
atgacaacatttactgctaaatttattgaccaagagtgggaagtcccagtagaatcaggtcgctaccatatgattgttggggaattttgtccttatgcacaacgtccgcagattgcgcgccaactgcttggtttggataaacatatttctatcagttttgtggatgatgttccaagtgatataggacttatttttagccaaccagaacaggttactggtgctaagtcgcttcgtgatatttatcatttgactgacccgacctaccaaggtccttatactatcccaattttaattgacaagaccgataatcgtattgtctgtaaggaatctgcagatttgcttcgactttttactacagatttctctgatttgcatcaagaggatgctcctgtccttttcagccaagaaactgcttcacttattgataatgacattaaagacattaataagaacttccaaagcttaatgtataagttagcttttcttgataaacaagcagattatgatacttatagtaaggaattcttcacttttctagatcaaaaagaacacttactaggacaacgtcctttcttgctcggagataatctaagtgaggttgatattcatttctttacaccattagtccgatgggatattgctgggcgtgatcttctactacttaatcagaaagcgctagaagactacccaaatattttttcttgggctaaaactttatacaatgactttaatttaaaaacattaaccaatccacaatccataaaaaataactattacttaggcaaatttggaagagctgttcgtcatcataccatcgtcccaacaggtccaaatatggcaaaatgggaaaaa

SEQ ID NO: 5974 - protein, 284 aa, Streptococcus agalactiae
MTTFTAKFIDQEWEVPVESGRYHMIVGEFCPYAQRPQIARQLLGLDKHISISFVDDVPSDIGLIFSQPEQVTGAKSLRDIYHLTDPTYQGPYTIPILIDKTDNRIVCKESADLLRLFTTDFSDLHQEDAPVLFSQETASLIDNDIKDINKNFQSLMYKLAFLDKQADYDTYSKEFFTFLDQKEHLLGQRPFLLGDNLSEVDIHFFTPLVRWDIAGRDLLLLNQKALEDYPNIFSWAKTLYNDFNLKTLTNPQSIKNNYYLGKFGRAVRHHTIVPTGPNMAKWEK

SEQ ID NO: 5975 - DNA, 993 bp, Streptococcus agalactiae
atgacaaatcgaaaagatgatcacataaaatatgctcttaaatatcagtcgcattataatagttttgacgatattgagttaatacattcatccttaccaaaatataatgtcaacgatatcgatttatcaacacattttgctggtcaaagctttgaatttcctttttatatcaatgctatgacaggcggtagtgaaaaagggaaagcagtcaatcataaattggcacaggttgctcaagctacagggattgttatggtgacaggttcatattcggcagctctcaaaaacgatgaagatgattcctacccaacaacagacttgtatcctgatttaaaactggcgacaaatatagggttagacaagcctgtaccagcagcagagtcaaccgttaaggctatgaaccccatttttttacaagttcatgttaatgtgatgcaagaacttttgatgcctgaaggagagcgtgaatttcacatgtggcgttctcacttaaaagaatacgtcgacaatatccaatgcccacttattttaaaagaggttggttttgggatggatttacaatcaataaaggatgcttacgatataggtatcacaactgtagatatttcggggcgtggggggactagttttgcttacatcgaaaatcaacgtggacgcgaccgttcgtatctcaatacctgggggcaaacaacagctcaatccttaataaacgctcaatctatgatggacaaaatggatatcctagcatctggtggcattcgtcatcctttagatatggtaaaatgtttagtgttgggtgctaaagctgttggactttctagaacagttttagaattagttgagcgttatcctgtagatgatgttattgcaattctcaattcttggaaagaagatttaagaatgataatgtgtgcactgaattgtaaaaaaataactgatttacgacaagtcaattatatattgtatggtcaattgaaggaagccaatgctaaa

SEQ ID NO: 5976 - protein, 331 aa, Streptococcus agalactiae
MTNRKDDHIKYALKYQSHYNSFDDIELIHSSLPKYNVNDIDLSTHFAGQSFEFPFYINAMTGGSEKGKAVNHKLAQVAQATGIVMVTGSYSAALKNDEDDSYPTTDLYPDLKLATNIGLDKPVPAAESTVKAMNPIFLQVHVNVMQELLMPEGEREFHMWRSHLKEYVDNIQCPLILKEVGFGMDLQSIKDAYDIGITTVDISGRGGTSFAYIENQRGRDRSYLNTWGQTTAQSLINAQSMMDKMDILASGGIRHPLDMVKCLVLGAKAVGLSRTVLELVERYPVDDVIAILNSWKEDLRMIMCALNCKKITDLRQVNYILYGQLKEANAK

SEQ ID NO: 5977 - DNA, 1077 bp, Streptococcus pyogenes
ttgcctttaatcaggatgctagagatacccttatttccaaatggcaagaagctgatatcgcattactttatcaagaaaggtggggagagaatgactaaccgtaaagatgatcacatcaaatatgctctcaagtaccaatcgccttataatgcttttgatgacatagaactcatacaccattccttacctagctatgatttgtctgatattgatctcagtactcattttgctgggcaagacttcgactttcccttttacatcaatgccatgacaggaggaagtcaaaaaggcaaagctgtcaatgaaaaattggccaaagtagcagcagcaacagggattgtcatggtgacagggtcttatagcgctgctttaaaaaatcctaacgacgattcctatcgtttacatgaggtggcagataacttgaaactagccacgaatattggtctagataaacctgtggcgctaggacaacaaacggttcaagaaatgcagcccctctttttacaggttcatgtgaatgtgatgcaagagttgctgatgccagagggtgagcgcgtctttcatacctggaaaaaacacctcgctgaatacgctagtcaaataccagttcctgtcattctcaaagaagttggttttggcatggatgtcaatagtatcaagctagcacatgacctaggcattcaaacctttgatatttcaggtagaggaggaacttcatttgcttacattgaaaatcaaagagggggagaccgctcttacttaaacgattggggacaaaccactgttcagtgcttactgaatgcacaaggactgatggaccaagtggaaatcttagcttcgggtggtgtcagacaccccttggacatgattaagtgttttgtcttaggagcacgtgcagtgggactctcacgcaccgttttagaattggtcgaaaaatacccaaccgagcgtgtgattgctatcgttaatggctggaaagaagaattaaaaatcattatgtgtgctcttgactgtaaaactattaaagaattaaagggagtcgactacttactatatggacgcttgcagcaggtcaat

SEQ ID NO: 5978 - protein, 359 aa, Streptococcus pyogenes
LPLIRMLEIPLFPNGKKLISHYFIKKGGERMTNRKDDHIKYALKYQSPYNAFDDIELIHHSLPSYDLSDIDLSTHFAGQDFDFPFYINAMTGGSQKGKAVNEKLAKVAAATGIVMVTGSYSAALKNPNDDSYRLHEVADNLKLATNIGLDKPVALGQQTVQEMQPLFLQVHVNVMQELLMPEGERVFHTWKKHLAEYASQIPVPVILKEVGFGMDVNSIKLAHDLGIQTFDISGRGGTSFAYIENQRGGDRSYLNDWGQTTVQCLLNAQGLMDQVEILASGGVRHPLDMIKCFVLGARAVGLSRTVLELVEKYPTERVIAIVNGWKEELKIIMCALDCKTIKELKGVDYLLYGRLQQVN

SEQ ID NO: 5979 - DNA, 990 bp, Streptococcus agalactiae
atggttaaggtgcaaacaggtggcaaattatatattgcaggtgaatacgcgatactgtatcctgggcaagtagctattttaaagaacgttcctatttatatgactgcattagctacttttgcagataactacagcctttattctgatatgtttaactatacggcaagcttacagccagataagcaatatagtctcattcaggaaacgatattgcttatggaagaatggttgattaattttggcaaaaatataaaaccgattcacctcgaaattacgggaaaattagagcgctatggacttaaatttggtataggctctagcggaagtgttgtcgttttgactattaaagctatggctgcgctttatgagatagagatgccaagcgacttgctttttaaattatctgcctatgttctcttaaaaagaggtgataatggctcaatgggagatattgcttgtattgcttatgagcatttaatttcttattcagcttttgatcgtagggctgtttcaaaaatgattgaaacaaaacctttggaacaagtattggaagctgaatggggttatcgtattaccaaaatacaagctttattggagatggattttttagtgggatggacaatgcaaccgtccatttcaaaagaaatgataaatatagttaaatcaactattacgcagcgttttttagatgatacaaagtatcaagttgtccagttactttcagcctttaaagaaggagataaagaagcgattaagagatgtttagaagaaattagcttgctattatttaatcttcatccatctatttacaccgataaacttcaaaagcttaaagaggcaagcaaaggcctagatatagtcacaaaatcttcaggatctggaggaggcgattgtggtatagccatatcctttaataaaaatgataatcaaactctaatcaagcgttgggagagtgctggtattgaactacttagtaaggagacactgtca

SEQ ID NO: 5980 - protein, 330 aa, Streptococcus agalactiae
MVKVQTGGKLYIAGEYAILYPGQVAILKNVPIYMTALATFADNYSLYSDMFNYTASLQPDKQYSLIQETILLMEEWLINFGKNIKPIHLEITGKLERYGLKFGIGSSGSVVVLTIKAMAALYEIEMPSDLLFKLSAYVLLKRGDNGSMGDIACIAYEHLISYSAFDRRAVSKMIETKPLEQVLEAEWGYRITKIQALLEMDFLVGWTMQPSISKEMINIVKSTITQRFLDDTKYQVVQLLSAFKEGDKEAIKRCLEEISLLLFNLHPSIYTDKLQKLKEASKGLDIVTKSSGSGGGDCGIAISFNKNDNQTLIKRWESAGIELLSKETLS

SEQ ID NO: 5981 - DNA, 1053 bp, Streptococcus pyogenes
ttggcaagaactaccgtattatcgtttcaaaaacaaaggatttaccagatgtctaattattgtgtgcaaacaggtgggaaactatacctcacaggcgaatatgctatcttaacaccaggacaaaaagccttaattcactttattccattgatgatgacagcagaaattagcccagcagcccatattcaattagcttcagatatgttttcccataaagcgggcatgacacccgatgcctcttatgcactgattcaagcaacggttaaaacctttgctgattatctaggacagtcaattgaccaactggagccattttccctaattataacgggaaaaatggagcgcgatggcaaaaaatttggcattggttcaagtggtagcgtcaccctcttaaccttaaaggccttatcggcctattatcagattactttaaccccagagttactctttaaactagcggcttataccttgcttaagcaaggagataatgggtctatgggggatattgcctgtatcgcttatcagactttagtcgcctatacctcctttgaccgagaacaggtcagtaattggctgcagaccatgcccttaaaaaaacttctcgtcaaagattggggttaccatatccaagtcattcaaccagccctgccttgtgactttttggttggctggactaaaatacctgctatttcaaggcagatgattcaacaagtgacagcgagcattaccccagctttcttaagaacaagttaccagctaacgcaatcagctatggtagctttgcaagaaggtcataaggaagaactcaagaaaagtttagcaggagcaagtcatctcctaaaagagcttcatccagctatctaccatcctaagctagtaaccttggtagctgcttgtcagaagcaagatgctgttgctaaatcttcaggttctggtggtggagattgtggcatcgcgcttgcctttaatcaggatgctagagatacccttatttccaaatggcaagaagctgatatcgcattactttatcaagaaaggtggggagagaatgac

SEQ ID NO: 5982 - protein, 351 aa, Streptococcus pyogenes
LARTTVLSFQKQRIYQMSNYCVQTGGKLYLTGEYAILTPGQKALIHFIPLMMTAEISPAAHIQLASDMFSHKAGMTPDASYALIQATVKTFADYLGQSIDQLEPFSLIITGKMERDGKKFGIGSSGSVTLLTLKALSAYYQITLTPELLFKLAAYTLLKQGDNGSMGDIACIAYQTLVAYTSFDREQVSNWLQTMPLKKLLVKDWGYHIQVIQPALPCDFLVGWTKIPAISRQMIQQVTASITPAFLRTSYQLTQSAMVALQEGHKEELKKSLAGASHLLKELHPAIYHPKLVTLVAACQKQDAVAKSSGSGGGDCGIALAFNQDARDTLISKWQEADIALLYQERWGEND

SEQ ID NO: 5983 - DNA, 147 bp, Streptococcus agalactiae
ttgcaggcctttactaaggctgataaaccacttgatgacgatgataagcctgcagctgttggcatattattagttgtttcaatctttacaaagccggacctattttgtcgaaagcgatccaagatagctgacattttgtcatgttca

SEQ ID NO: 5984 - protein, 49 aa, Streptococcus agalactiae
MQAFTKADKPLDDDDKPAAVGILLVVSIFTKPDLFCRKRSKIADILSCS

SEQ ID NO: 5985 - DNA, 942 bp, Streptococcus agalactiae
atggacggaaaaagtataagtgttaagtcttatgctaacattgctattatcaaatattggggaaaagcagatgctgaaaaaatgattccagctaccagtagtatttctctaacacttgaaaacatgtacactgaaacacgtttgactgcccttgggaaggatgctaagaaagatgaattttacatctctggtgttcttcaaaatgatcatgaacatgacaaaatgtcagctatcttggatcgctttcgacaaaataggtccggctttgtaaagattgaaacaactaataatatgccaacagctgcaggcttatcatcgtcatcaagtggtttatcagccttagtaaaggcctgcaatgatttttttggtactaaccttagccaatcacagctagctcaagaagccaagtttgcttcaggctcctcttcacgctctttttttggacctgttgctgcttgggataaagatagtggtgatatctataaagttcacactaatttagatttagctatgattatgctggtcttaaatgacaaaagaaagccgatttcaagccgtgaaggtatgaaaatctgcaccgaaacttcaactacttttaatgaatgggtaaggcaatctgaacaagattatcaagatatgttagtatacctaaaaaataatgattttcaaaaggtaggtcaactgacagagcgtaatgcacttgcaatgcactcaacaactaaaacagcaactccagccttttcatatttgacagaagagacatataaagctatggatgttgtgaagaaacttcgcgaaaaaggtcatgaatgttattatacgatggatgcgggtccaaatgttaaagtactttgcttacgtcaagaccttgaggcattagctgctatcttggagaaagattatcgtattattgtttcaacgacaaaggaattagcagatggt

SEQ ID NO: 5986 - protein, 314 aa, Streptococcus agalactiae
MDGKSISVKSYANIAIIKYWGKADAEKMIPATSSISLTLENMYTETRLTALGKDAKKDEFYISGVLQNDHEHDKMSAILDRFRQNRSGFVKIETTNNMPTAAGLSSSSSGLSALVKACNDFFGTNLSQSQLAQEAKFASGSSSRSFFGPVAAWDKDSGDIYKVHTNLDLAMIMLVLNDKRKPISSREGMKICTETSTTFNEWVRQSEQDYQDMLVYLKNNDFQKVGQLTERNALAMHSTTKTATPAFSYLTEETYKAMDVVKKLREKGHECYYTMDAGPNVKVLCLRQDLEALAAILEKDYRIIVSTTKELADG

SEQ ID NO: 5987 - DNA, 942 bp, Streptococcus pyogenes
gtggatccaaatgttataaccgtaacatcctatgctaacattgctattatcaaatattggggaaaagagaatcaagctaagatgattccttcgacctctagcatttctttgactttggaaaacatgttcaccacaaccagcgtttccttcttaccagatactgcaaccagtgatcagttttacattaacggtatcttgcaaaatgacgaagaacataccaaaatttctgctatcattgaccaatttcgccaacctggtcaggcttttgtaaagatggaaactcaaaataatatgccaacagctgcaggtttatcatcaagttccagtggcttatcagccttggttaaagcctgtgaccaattatttgacacccagctagatcagaaagctttagctcaaaaggctaagttcgcctcaggatcatcttctcgttctttttttggcccagtcgctgcttgggacaaagatagtggtgctatttacaaggttgagactgacttgaaaatggccatgattatgctggtcttaaatgctgcgaaaaagccaatttctagccgagagggcatgaagttatgccgcgatacctcaactacatttgatcaatgggtagaacaatcggcaatcgattaccaacatatgcttacctatctcaaaactaataattttgagaaagttggtcagttaacagaagctaatgccttggccatgcatgccacgacaaagacagccaatcctcctttttcttacctaacaaaagagtcttaccaggctatggaggctgtgaaagaactgcgtcaagaaggttttgcttgttattttaccatggacgcaggtccaaatgtgaaggtcctatgtttagaaaaagacttggctcaactagcagaacgacttggcaagaactaccgtattatcgtttcaaaaacaaaggatttaccagatgtc

SEQ ID NO: 5988 - protein, 314 aa, Streptococcus pyogenes
VDPNVITVTSYANIAIIKYWGKENQAKMIPSTSSISLTLENMFTTTSVSFLPDTATSDQFYINGILQNDEEHTKISAIIDQFRQPGQAFVKMETQNNMPTAAGLSSSSSGLSALVKACDQLFDTQLDQKALAQKAKFASGSSSRSFFGPVAAWDKDSGAIYKVETDLKMAMIMLVLNAAKKPISSREGMKLCRDTSTTFDQWVEQSAIDYQHMLTYLKTNNFEKVGQLTEANALAMHATTKTANPPFSYLTKESYQAMEAVKELRQEGFACYFTMDAGPNVKVLCLEKDLAQLAERLGKNYRIIVSKTKDLPDV

SEQ ID NO: 5989 - DNA, 876 bp, Streptococcus agalactiae
atgaaagaaaagtttggtataggaaaggctcatagcaagattatcttgatgggtgagcactcagtagtatatggttatccagccattgctattcctttaaaaaatattgaagtaacttgccttattgaagaggctcctcaattaatagcattagatatgactgatcctttgtcgacagccatttttgctgccttggactatttaggtaaaacttcttctaaaattgcatatcatattgagtcacaagtcccagaaagacgtggtatgggatcatcagctgcagttgctattgcagctattcgtgcagtttttgattattttgatgaagatttggaggcagatttgttagaatgccttgttaatcgagcagaaatgatagcacattcaaatccgagtggattagatgcaaaaacttgtcttagtgaaaatactattaaatttatccgcaatattggtttttcaacagtacccatgcatttgaatgcttatttagttattgctgatacaggaattcatgggcatactaaagaagcagtggataaggtgaaatcatctggcgaggcagtactaccctttttaaaagaattaggttatttagcagaggcatcagaggatgctattcataaaagtgattccaaacaacttggtagcttgatgactaaagcacatcaaagtttaaaacaattgggtgtctcaagtttagaagctgatcatctggtagaggtagctattagttgtggtgctctaggcgctaaaatgagtggcggcggattaggtggttgtattatcgcacttgtaaaagaaaaaagagaagctgagcgcttaagtcagcaattagaaagagaaggagctgtcaacacatggacggaaaaagta

SEQ ID NO: 5990 - protein, 292 aa, Streptococcus agalactiae
MKEKFGIGKAHSKIILMGEHSVVYGYPAIAIPLKNIEVTCLIEEAPQLIALDMTDPLSTAIFAALDYLGKTSSKIAYHIESQVPERRGMGSSAAVAIAAIRAVFDYFDEDLEADLLECLVNRAEMIAHSNPSGLDAKTCLSENTIKFIRNIGFSTVPMHLNAYLVIADTGIHGHTKEAVDKVKSSGEAVLPFLKELGYLAEASEDAIHKSDSKQLGSLMTKAHQSLKQLGVSSLEADHLVEVAISCGALGAKMSGGGLGGCIIALVKEKREAERLSQQLEREGAVNTWTEKV

SEQ ID NO: 5991 - DNA, 891 bp, Streptococcus pyogenes
atgaaaagacaaaaaatgaacgaaaacattggatatggtaaggcacacagtaagatcattttgataggtgagcatgctgttgtgtatggctacccagctattgctttgcctttaacagatattgaggtggtttgtcatatttttccagctgataagccattggtctttgatttttatgatactctatcaacagccatttatgcttccttggattatttgcagcgactacaagaaccaattgcttatgagattgtttcacaagtgccacaaaagcgtggtatggggtcttcggcagccgtttctattgcagctattagagccgttttttcttattgtcaagaacccctctcggatgatttgttggaaattttagtcaacaaggcagaaattattgcccacaccaatcctagtggtttagatgccaagacatgccttagtgaccatgccattaagtttatccgaaacattggctttgaaactatcgaaatcgccttaaatggttatcttatcattgcagatacagggattcacggtcatacacgtgaggccgtcaataaggtagcacagtttgaggaaacgaatttgccctatctggctaaactaggagctttgacacaagcccttgaaagagcgattaaccaaaaaaataaggtggctatcggtcagctcatgacacaagcgcactctgctttaaaggccattggcgttagcatcagtaaagctgaccaacttgtggaggctgccctaagagcaggtgctttaggcgctaagatgacaggcggtggcttgggtggctgtatgattgccctagcagataccaaagacatggccgaaaaaatcagtcacagattaaaagaagaaggagccgtaaacacgtggatccaaatgtta

SEQ ID NO: 5992 - protein, 297 aa, Streptococcus pyogenes
MKRQKMNENIGYGKAHSKIILIGEHAVVYGYPAIALPLTDIEVVCHIFPADKPLVFDFYDTLSTAIYASLDYLQRLQEPIAYEIVSQVPQKRGMGSSAAVSIAAIRAVFSYCQEPLSDDLLEILVNKAEIIAHTNPSGLDAKTCLSDHAIKFIRNIGFETIEIALNGYLIIADTGIHGHTREAVNKVAQFEETNLPYLAKLGALTQALERAINQKNKVAIGQLMTQAHSALKAIGVSISKADQLVEAALRAGALGAKMTGGGLGGCMIALADTKDMAEKISHRLKEEGAVNTWIQML

SEQ ID NO: 5993 - DNA, 1227 bp, Streptococcus agalactiae
atgtttagaaatttacgacttcgttttatcggaatagctgcgctagctattcttgttgtcttattttcagtagtcggtgtcctcaactctgctaatcactatcaaacgaagaatgaaatttatcgtgtgttaactatccttgcagacaacaatggacgtataccgaataaacttgaatttagtaaagaattaggtgatgacctatcaacggacgctattttccaattccgttatttcagtgcgcgaacagatgcaaaaggtaacgtgactagttttgattctagaaatatctttgaagtaagcgataggcaaataaaaaattatgccaagcgtatcgtatcacaaaatagtcattcaggtcatatcacctataattttagtacttattcttatctactaaaaaaggttggtaaaaatgattatttagtggtatttttagatacaaccaaccaatatcttgataatcaaagattattgcaactttcaatatggatgtccttggtaagttttatcgtcttcatggtaattgtttcagttttatcagggagagttatcttaccatttgttgctaactatgaaaagcaaaggcgttttattaccaatgcaggacatgaactaaaaactccacttgctatcatctccgctaataatgaattggtggaaatgatgagtggtgaatcagagtggactaaatctacaaatgatcaaatccaacgtttaacgggtctaattaatggcatggtcagtcttgcccgctttgaagaacagcctgatataagtatggttgacttagacttttcacatattacaaaagatgctgcagaagattttaaaggtccaatcattaaagatggtaaagactttataatgagtatccaaccaggtattcatgtcaaagctgaagaaaaatcattatttgaattggttacattattggttgataatgctaataagtattgtgatcctatggggactgtgacagttaagttatcacgttcaagtcgtttgagacgagctaagcttgaagtttcaaatacttataagaatggtaaagacatagactatagcaagttttttgaacgattttatcgagaggatgagtcacataataacaaaaaatcgggatatggtattggtctttctatcgtaactagtttggtgcatctatttaaaggaagtatcgatgtgaattataaacatgataccattacctttgtcatttacatt

SEQ ID NO: 5994 - protein, 409 aa, Streptococcus agalactiae
MFRNLRLRFIGIAALAILVVLFSVVGVLNSANHYQTKNEIYRVLTILADNNGRIPNKLEFSKELGDDLSTDAIFQFRYFSARTDAKGNVTSFDSRNIFEVSDRQIKNYAKRIVSQNSHSGHITYNFSTYSYLLKKVGKNDYLVVFLDTTNQYLDNQRLLQLSIWMSLVSFIVFMVIVSVLSGRVILPFVANYEKQRRFITNAGHELKTPLAIISANNELVEMMSGESEWTKSTNDQIQRLTGLINGMVSLARFEEQPDISMVDLDFSHITKDAAEDFKGPIIKDGKDFIMSIQPGIHVKAEEKSLFELVTLLVDNANKYCDPMGTVTVKLSRSSRLRRAKLEVSNTYKNGKDIDYSKFFERFYREDESHNNKKSGYGIGLSIVTSLVHLFKGSIDVNYKHDTITFVIYI

SEQ ID NO: 5995 - DNA, 90 bp, Streptococcus agalactiae
ttgagacaaaaattgcaggcaattggtgctaacttggagattattggtcaagaaggtagtagctataaattaagtgaaataaatggtggc

SEQ ID NO: 5996 - protein, 30 aa, Streptococcus agalactiae
MRQKLQAIGANLEIIGQEGSSYKLSEINGG

SEQ ID NO: 5997 - DNA, 585 bp, Streptococcus agalactiae
  misc_feature (1)..(585): n = a, c, g, or t
gtggaacaaagaaggaataaaatgagagtattaattgcagaagatgaagaacagatgtcacgtgtccttagtacggcaattagtcaccaaggttatgttgttgatgtcgcctacgatggtcagactgctattgatttagctaatcaaaatgcatatgatgtcatggttatggatgtcatgatgcctgttaaaacaggtattgaggctgtcaaagaaattagacaatcaggaaataaatctcacattattatgctaacagccatggcagaaattgatgatagagtaacaggtctagatgctggtgcagatgattatttaacaaaacccttctctctaaaagaattattagcaaggcttcgctctatgtcccgaagattggaagatttcacacctaatgtattgtcattgggaagagtaaccttatcagtcggtgaacaagagttgcaatgtgaaaacactattcgtctagcgggtaaagaagctaaaatgttagcatttttcatgttgaaccatgataaagaattatctacacaacaacttttcgaacatgtctggggagcagataaggaccaagaagantgtaga

SEQ ID NO: 5998 - protein, 195 aa, Streptococcus agalactiae
  MISC_FEATURE (1)..(195): Xaa = Any Amino Acid
MEQRRNKMRVLIAEDEEQMSRVLSTAISHQGYVVDVAYDGQTAIDLANQNAYDVMVMDVMMPVKTGIEAVKEIRQSGNKSHIIMLTAMAEIDDRVTGLDAGADDYLTKPFSLKELLARLRSMSRRLEDFTPNVLSLGRVTLSVGEQELQCENTIRLAGKEAKMLAFFMLNHDKELSTQQLFEHVWGADKDQEXCR

SEQ ID NO: 5999 - DNA, 666 bp, Streptococcus pyogenes
atgaaaattttgttagctgaagacgaatggcagatgtctaatgttttgacaactgccatgactcatcaaggttatgacgttgatgtggtttttaacggtcaagaggcaattgataaagccaaagacaatgcatatgatattatgattttagatatcatgatgccgattaagtctggcattgaggctttaaaggagattcgcgcttcaggaaattgctcacatattattatgctgacggctatggcagaaattaatgaccgtgttaccggactagatgcgggagctgatgattatctgactaaacctttctcattaaaagaacttttagctagattaaggtcgatggaaagacgagtagaaagttttactcctcaggtattacaatttgctggtgtcacattaaatattaatgagcaagaattgagtgccggtaatgctatacgattagcttctaaagaaggtaaattaatggcctttttaatgttaaatcaaggaaagtacttggatactaaaacgctttaccaacatgtttggtcagaccaagaagattatgatacttctattgtttgggtttatatttcttatcttcgtcaaaaattattagctattcaagcaaatgtcattattgcaggtgataaagatactagctattgtttattagaaaaa

SEQ ID NO: 6000 - protein, 222 aa, Streptococcus pyogenes
MKILLAEDEWQMSNVLTTAMTHQGYDVDVVFNGQEAIDKAKDNAYDIMILDIMMPIKSGIEALKEIRASGNCSHIIMLTAMAEINDRVTGLDAGADDYLTKPFSLKELLARLRSMERRVESFTPQVLQFAGVTLNINEQELSAGNAIRLASKEGKLMAFLMLNQGKYLDTKTLYQHVWSDQEDYDTSIVWVYISYLRQKLLAIQANVIIAGDKDTSYCLLEK

SEQ ID NO: 6001 - DNA, 624 bp, Streptococcus agalactiae
atggaaacaaatatttatggagattatggtcgatatctaccattaattttagaagatttcagccagcgtatccaattagaaaatgataaagctaaggttgaaacaggctataaattgtacgaacatatcattggtcgtattaaaacgtcagatagtatgatagagaaatgtcgtcgcaaacagttacctgtaacggtagattctgcactaaaaacgattagagatagcattggagtccgtattatttgcggttttgttaacgacatttatcaaattatagaacgtattaaggcattcgatgattgtcgtattgtggttgaaaaagattatatccagcatgttaagccaaatgggtatcgttcttatcatgtgattttagaaattgataccccctatccagactgtttgggtaattcagacggtaaatattacattgaaattcagttgcgtaccattgcgcaagattcttgggctagtttagaacatcaaatgaaatacaagcatgatattgaaaatcccgaacgaattgtaagggaattaaaacgttgtgctgatgaaatggcatccgttgatttaacgatgcaaacgattcgtcaattgatagagagtggaacaaagaaggaa

SEQ ID NO: 6002 - protein, 208 aa, Streptococcus agalactiae
METNIYGDYGRYLPLILEDFSQRIQLENDKAKVETGYKLYEHIIGRIKTSDSMIEKCRRKQLPVTVDSALKTIRDSIGVRIICGFVNDIYQIIERIKAFDDCRIVVEKDYIQHVKPNGYRSYHVILEIDTPYPDCLGNSDGKYYIEIQLRTIAQDSWASLEHQMKYKHDIENPERIVRELKRCADEMASVDLTMQTIRQLIESGTKKE

SEQ ID NO: 6003 - DNA, 648 bp, Streptococcus pyogenes
atgaaagaaagactagaacattattctaccagctctatatatagcggatttgaagtgtacttgccgttggtactacagacaataacagatgtgattattgctgagaatatcaaaagcaaaaaagaaacggggtttaaactatacgaacactttacatcccgtattaaatcggaagcttcgatgattgaaaaatgtcaacgcaaacagcttcctctaacaagcaaatctgcgttaaaaatcattaaagatagtatcggtattcgcattatttgtggttttattgatgatatttatcggatggtagacttgctcaaaagcattcctggtatgtcagttaacactgaaaaagattatattttaaatgccaagcctaatggctatagatcatatcatctcattttggaattagaaacacattttccagatattttaggggaaaaaaaaggatgttattttatagaagtgcagttgcgaaccattgctcaagactcttgggctagcttggaacatcaaatgaagtacaaacatcaagttgctaatgcagaaatgattacaagagagttaaagcgttgtgcagacgagttggcatcttgtgatgttaccatgcaaaccattcgtcaattgattcaagaaacgacggaggaagag

SEQ ID NO: 6004 - protein, 216 aa, Streptococcus pyogenes
MKERLEHYSTSSIYSGFEVYLPLVLQTITDVIIAENIKSKKETGFKLYEHFTSRIKSEASMIEKCQRKQLPLTSKSALKIIKDSIGIRIICGFIDDIYRMVDLLKSIPGMSVNTEKDYILNAKPNGYRSYHLILELETHFPDILGEKKGCYFIEVQLRTIAQDSWASLEHQMKYKHQVANAEMITRELKRCADELASCDVTMQTIRQLIQETTEEE

SEQ ID NO: 6005 - DNA, 204 bp, Streptococcus agalactiae
atggaattttattataagacattaaaaagaaagtttatcaatgatgccgataccatatttattgagcagtctcaatttgaaatttttatatacattgaaacagatcataattctagtagttctcatgtcgttttagattatcaatcacaaaaagaatttgaaaaaataattactaattatcttaactttataactgcctttgct

SEQ ID NO: 6006 - protein, 68 aa, Streptococcus agalactiae
MEFYYKTLKRKFINDADTIFIEQSQFEIFIYIETDHNSSSSHVVLDYQSQKEFEKIITNYLNFITAFA

SEQ ID NO: 6007 - DNA, 213 bp, Streptococcus pyogenes
atgagtcgaaaaggtaatccatacgataatgcactcatggaggccttttataaaacattaaaaagagagcttgtcaatgatgctcatttcgcaactattaagcaagctcagcttgagatttttaaatatagtgagacttactataaccctaaacgtctgcattcagctttagggtatctctcacctgtagaatttgaaaaaatagttactcat

SEQ ID NO: 6008 - protein, 71 aa, Streptococcus pyogenes
MSRKGNPYDNALMEAFYKTLKRELVNDAHFATIKQAQLEIFKYSETYYNPKRLHSALGYLSPVEFEKIVTH

SEQ ID NO: 6009 - DNA, 2973 bp, Streptococcus agalactiae
gtgaaatataaaaactgttacagggaggttgatattatgtttcgtaaatataattttgaaaaaggtttaaagttttccattcgtaaattttcggttggagtagcttcagttgctataggatcattattattcatttctcctcaggtacttgcagatgagacaactagtgttacatctgcaacaactccaacaggtgtaacggccacagatgcaaacttggtcacttctaacaattcaactcctacttccactaataggagtgcaactagcactcaaggaagtaatttgagtaatacttcagaaatcattaagcctgcaactttagcagcaacatcaccaacaactgataatgtagccccatcagtagacaagaggacgtatgctactagtggcgattggacgttacaaaatccatatgctgacagtgttcgaaataaaaatatttctccaagtgttcgtgatgaatcatttaaaagtgctgaaacaacggtggttcgtgacgataactcaaccgtcaaagtgactgcgacaattactcctgtaccagggaatgatgaaggttctggtgttttaacaaatggtggtaatcagtcagaatataaagcaacatcagaaatgtttgttggaaatgtagatcctgcaaaaatacctgctttaggtgtctatacacaaccaggacgtactgaaggaggtagtaaactatctgataagctcaattttaatgggaaggcgccatcaactattttaacattgaaatttgacaaggcagttacagaccctattattgacttatctggtgttggaggtaatgcacatctatcatttacagaaactaccaatgaaaatggtaggattgttgaaaaaattgactatgcacgtggttcatataattcaacgttctttgagttaataactccaggtataagccttgaaaaagcaagttcaggagttaatttaacagttacagcgaatacggttgatgtaacagacaaaaacacctttaatgagtcagttgttaatccatctgacgcagactttgtcaatggtctagatagaacgcctgatgcagtcccagcgggaacaggttcaattcgtttaaaaggaacctttacagaggtttcatttaaattatatcatcaagctgttccatttacagcattttctaaagagaaatatcatacaggagatggatattataatagtactgcgaatattcgaccaactgtagttaaaccagatagtattaatggtttaaataagcacgcaagcgatgttattgatgataaaatttccgataataatgatatttcgaacgatgacttacttcgtttatctgttcgcttacaaaatccgcgtggatcagttgttgtaaattatattgatacagaaggcaatattattggtactgaatacaaagataccaccgatgcaattctaggaacacattacaatacggcagaatcatcaggagaccttagttcagacgcgacagttgagcgtcctttcactattactaaagatggtaaggtgtatgaattagtagcagaaaatattacagtaccagttggtaaggttaattcggatggtacgttggctacaaatggaggctcatttaattatggtactgatgcagcatctggagaagttgcagaaggtactaagtcagtaacttatgtttatagcattaaacaagaatcaaagggcaatgttcatgcccgctatgttattttagggacagagactgagcttgcaagtgttaaaacagttaaatcagaagctccaattgatgaagcatattcagatagagcacctgcaactcttgaaaaagatggtaagttgtatgaatttgtacatgtgcgtgataataagggcgatgctccagcagatggtaaggtgactgaacaagatcagaccattacatatgaatatgttgaagttcctaagggtcgtgtggttgtagattatgttatcgagggtactgctacaaaacttaaagatacctatgtcgataccccaacagcttatattcgtgataaagaaggccaagctactccttataatacagctgagaatgattctgagaaaccattgttacttgacaaagatggaataaaatatgaactagtttcaattcaagagggatcagcagcggagaaaggaacacttcgagaaggggaacaacatgttgtctatcaatatcgtaaagtggtagaggttccaagcgttaaagttggaaatgttcatgcccgctatgttattttagggacagagactgagcttgcaagtgttaaaacagttaaatcagaagctccaattgatgaagcatattcagatagagcacctgcaactcttgaaaaagatggtaagttgtatgaatttgtacatgtgcgtgataataagggcgatgctccagcagatggtaaggtgactgaacaagatcagaccattacatatgaatataagcttaagaaagatgaatcagaggctgtagggaatgtagtgattaactatgtggacgaaacaggtaatgttatcaaaaaaccaatactagatacacacgaatcaaaggttgggacaccatatgataccacagattataaattcgctgaaattaaatttaatggtaagatttataaactcgtttctgcaaaaactatgggaaatgaattcggaaaggtcactgaaggcacaacagaagtgacttatgtgtatcgagaatcagtaaaatctaccctaccaaaggaaatgggaatttctattccaagcgaatcagagtctcctaagtttatatctacccaaactacagaaaatagacctaacaaaggagtattaacttcatctaaaaaaccaaccaataaatctgttcttccaactacaggcgaggaaagtaatagaactctcggagttgttgggattactctagtagcaacaacagctactttggcagctagcagtttaaaacgacgtaaaaat

SEQ ID NO: 6010 - protein, 991 aa, Streptococcus agalactiae
MKYKNCYREVDIMFRKYNFEKGLKFSIRKFSVGVASVAIGSLLFISPQVLADETTSVTSATTPTGVTATDANLVTSNNSTPTSTNRSATSTQGSNLSNTSEIIKPATLAATSPTTDNVAPSVDKRTYATSGDWTLQNPYADSVRNKNISPSVRDESFKSAETTVVRDDNSTVKVTATITPVPGNDEGSGVLTNGGNQSEYKATSEMFVGNVDPAKIPALGVYTQPGRTEGGSKLSDKLNFNGKAPSTILTLKFDKAVTDPIIDLSGVGGNAHLSFTETTNENGRIVEKIDYARGSYNSTFFELITPGISLEKASSGVNLTVTANTVDVTDKNTFNESVVNPSDADFVNGLDRTPDAVPAGTGSIRLKGTFTEVSFKLYHQAVPFTAFSKEKYHTGDGYYNSTANIRPTVVKPDSINGLNKHASDVIDDKISDNNDISNDDLLRLSVRLQNPRGSVVVNYIDTEGNIIGTEYKDTTDAILGTHYNTAESSGDLSSDATVERPFTITKDGKVYELVAENITVPVGKVNSDGTLATNGGSFNYGTDAASGEVAEGTKSVTYVYSIKQESKGNVHARYVILGTETELASVKTVKSEAPIDEAYSDRAPATLEKDGKLYEFVHVRDNKGDAPADGKVTEQDQTITYEYVEVPKGRVVVDYVIEGTATKLKDTYVDTPTAYIRDKEGQATPYNTAENDSEKPLLLDKDGIKYELVSIQEGSAAEKGTLREGEQHVVYQYRKVVEVPSVKVGNVHARYVILGTETELASVKTVKSEAPIDEAYSDRAPATLEKDGKLYEFVHVRDNKGDAPADGKVTEQDQTITYEYKLKKDESEAVGNVVINYVDETGNVIKKPILDTHESKVGTPYDTTDYKFAEIKFNGKIYKLVSAKTMGNEFGKVTEGTTEVTYVYRESVKSTLPKEMGISIPSESESPKFISTQTTENRPNKGVLTSSKKPTNKSVLPTTGEESNRTLGVVGITLVATTATLAASSLKRRKN

SEQ ID NO: 6011 - DNA, 444 bp, Streptococcus agalactiae
atgattatggagaatcctcttcaaaaagcacgaatacttgttaatcaacttgaaaagtatttagatcattatgcaaaagaatatgatgttgaacatttagcgggtccacaaggacacctagtgatgtatctctataaacatcctgataaggatatgtctataaaagctgttgaagaaatcttacacatttctaagtctgtagcttctaatttggtaaaacggatggaaaaaaatggttttattgcgattgtaccatctaagacagataagcgtgtaaaatatctttatttgactcacttaggtaaaaaaaaggctacacaatttgaaattttcttagaaaaattgcatagtactatgttagcaggtattactaaagaagagattcgtaccaccaaaaaggttattaggacattagctaaaaatatggcaatggaaaatcttgat

SEQ ID NO: 6012 - protein, 148 aa, Streptococcus agalactiae
MIMENPLQKARILVNQLEKYLDHYAKEYDVEHLAGPQGHLVMYLYKHPDKDMSIKAVEEILHISKSVASNLVKRMEKNGFIAIVPSKTDKRVKYLYLTHLGKKKATQFEIFLEKLHSTMLAGITKEEIRTTKKVIRTLAKNMAMENLD

SEQ ID NO: 6013 - DNA, 207 bp, Streptococcus pyogenes
atgtcacaagtgataggtgatttacgtgaattgatacatcaaatcgaacaaattagtgatgagattgcaaaaaaatatgatgtagagcatctagcaggtcctcaaggttatgttcttgtttttttagctaaacaccaaaatcaagaaatatttgtcaaagatattgaaaaacaacttcgtatctttcaaagtcagttgctagtcatt

SEQ ID NO: 6014 - protein, 69 aa, Streptococcus pyogenes
MSQVIGDLRELIHQIEQISDEIAKKYDVEHLAGPQGYVLVFLAKHQNQEIFVKDIEKQLRIFQSQLLVI

SEQ ID NO: 6015 - DNA, 2070 bp, Streptococcus agalactiae
atgaaaaagaaaattattttgaaaagtagtgttcttggtttagtcgctgggacttctattatgttctcaagcgtgttcgcggaccaagtcggtgtccaagttataggcgtcaatgactttcatggtgcacttgacaatactggaacagcaaatatgcctgatggaaaagttgctaatgctggtactgctgctcaattagatgcttatatggatgacgctcaaaaagatttcaaacaaactaaccctaatggtgaaagcattagggttcaagcaggcgatatggttggagcaagtccagccaactctgggcttcttcaagatgaaccaactgtcaaaaattttaatgcaatgaatgttgagtatggcacattgggtaaccatgaatttgatgaagggttggcagaatataatcgtatcgttactggtaaagcccctgctccagattctaatattaataatattacgaaatcatacccacatgaagctgcaaaacaagaaattgtagtggcaaatgttattgataaagttaacaaacaaattccttacaattggaagccttacgctattaaaaatattcctgtaaataacaaaagtgtgaacgttggctttatcgggattgtcaccaaagacatcccaaaccttgtcttacgtaaaaattatgaacaatatgaatttttagatgaagctgaaacaatcgttaaatacgccaaagaattacaagctaaaaatgtcaaagctattgtagttctcgcacatgtacctgcaacaagtaaaaatgatattgctgaaggtgaagcagcagaaatgatgaaaaaagtcaatcaactcttccctgaaaatagcgtagatattgtctttgctggacacaatcatcaatatacaaatggtcttgttggtaaaactcgtattgtacaagcgctctctcaaggaaaagcctatgctgatgtacgtggtgtcttagatactgatacacaagatttcattgagaccccttcagctaaagtaattgcagttgctcctggtaaaaaaacaggtagtgccgatattcaagccattgttgaccaagctaatactatcgttaaacaagtaacagaagctaaaattggtactgccgaggtaagtgtcatgattacgcgttctgttgatcaagataatgttagtccggtaggcagcctcatcacagaggctcaactagcaattgctcgaaaaagctggccagatatcgattttgccatgacaaataatggtggcattcgtgctgacttactcatcaaaccagatggaacaatcacctggggagctgcacaagcagttcaaccttttggtaatatcttacaagtcgtcgaaattactggtagagatctttataaagcactcaacgaacaatacgaccaaaaacaaaatttcttccttcaaatagctggtctgcgatacacttacacagataataaagagggcggggaagaaacaccatttaaagttgtaaaagcttataaatcaaatggtgaggaaatcaatcctgatgcaaaatacaaattagttatcaatgactttttattcggtggtggtgatggctttgcaagcttcagaaatgccaaacttctaggagccattaaccccgatacagaggtatttatggcctatatcactgatttagaaaaagctggtaaaaaagtgagcgttccaaataataaacctaaaatctatgtcactatgaagatggttaatgaaactattacacaaaatgatggtacacatagcattattaagaaactttatttagatcgacaaggaaatattgtagcacaagagattgtatcagacactttaaaccaaacaaaatcaaaatctacaaaaatcaaccctgtaactacaattcacaaaaaacaattacaccaatttacagctattaaccctatgagaaattatggcaaaccatcaaactccactactgtaaaatcaaaacaattaccaaaaacaaactctgaatatggacaatcattccttatgtctgtctttggtgttggacttataggaattgctttaaatacaaagaaaaaacatatgaaa

SEQ ID NO: 6016 - protein, 690 aa, Streptococcus agalactiae
MKKKIILKSSVLGLVAGTSIMFSSVFADQVGVQVIGVNDFHGALDNTGTANMPDGKVANAGTAAQLDAYMDDAQKDFKQTNPNGESIRVQAGDMVGASPANSGLLQDEPTVKNFNAMNVEYGTLGNHEFDEGLAEYNRIVTGKAPAPDSNINNITKSYPHEAAKQEIVVANVIDKVNKQIPYNWKPYAIKNIPVNNKSVNVGFIGIVTKDIPNLVLRKNYEQYEFLDEAETIVKYAKELQAKNVKAIVVLAHVPATSKNDIAEGEAAEMMKKVNQLFPENSVDIVFAGHNHQYTNGLVGKTRIVQALSQGKAYADVRGVLDTDTQDFIETPSAKVIAVAPGKKTGSADIQAIVDQANTIVKQVTEAKIGTAEVSVMITRSVDQDNVSPVGSLITEAQLAIARKSWPDIDFAMTNNGGIRADLLIKPDGTITWGAAQAVQPFGNILQVVEITGRDLYKALNEQYDQKQNFFLQIAGLRYTYTDNKEGGEETPFKVVKAYKSNGEEINPDAKYKLVINDFLFGGGDGFASFRNAKLLGAINPDTEVFMAYITDLEKAGKKVSVPNNKPKIYVTMKMVNETITQNDGTHSIIKKLYLDRQGNIVAQEIVSDTLNQTKSKSTKINPVTTIHKKQLHQFTAINPMRNYGKPSNSTTVKSKQLPKTNSEYGQSFLMSVFGVGLIGIALNTKKKHMK

SEQ ID NO: 6017 - DNA, 408 bp, Streptococcus agalactiae
atgataaaaccaattgttagagatactttctttttacaacaaaaatcacaaatggctagtagagcagatgtgagcttagcaaaagatttacaggagactttgcatgctaatcaaaattattgtgtaggtatggcagcaaatatgattggtagtctgaagcgtgtcattatcatcaatgtgggtattacaaatttagtaatgtttaaccctgtagtagttgcaaaatcggatccatatgagacagaagaatcttgcctttctctcgtaggttgcagaagtacacaacgatattgtcacattacgatttcttatcgtgatatcaattggaaggaacagcaaatcaagttgacagattttccagctcaaatttgtcaacacgagttagatcatttggaaggcatattaata

SEQ ID NO: 6018 - protein, 136 aa, Streptococcus agalactiae
MIKPIVRDTFFLQQKSQMASRADVSLAKDLQETLHANQNYCVGMAANMIGSLKRVIIINVGITNLVMFNPVVVAKSDPYETEESCLSLVGCRSTQRYCHITISYRDINWKEQQIKLTDFPAQICQHELDHLEGILI

SEQ ID NO: 6019 - DNA, 408 bp, Streptococcus pyogenes
atgattagagaaatcataacagatcattttttattacagcaaaaagcgcaagtcgccaagaaagaagatctatggattggccaagatttacaagataccttagccttttatagacaggaatgtcttgggatggctgccaatatgattggtgaacaaaagcgcattgttattgtgagtatgggatttattgatttggttatgtttaatcctgtgatggtttctaaaaagggaatttaccaaactaaagaatcttgtttgtcgttatctggctatcgcaaaacacagcggtatgataagattactgttgagtatttggaccataattggcgaccaaagcgattaagcttaacaggcttaactgctcaaatatgccagcacgaattagatcatctagaaggtattttaatt

SEQ ID NO: 6020 - protein, 136 aa, Streptococcus pyogenes
MIREIITDHFLLQQKAQVAKKEDLWIGQDLQDTLAFYRQECLGMAANMIGEQKRIVIVSMGFIDLVMFNPVMVSKKGIYQTKESCLSLSGYRKTQRYDKITVEYLDHNWRPKRLSLTGLTAQICQHELDHLEGILI

SEQ ID NO: 6021 - DNA, 1347 bp, Streptococcus agalactiae
atgacaagcggaaagacatatgtagcaagtgttttagagaaagtgaagaagcaaaatgagcatgaggaagaatttctacaagcggttgaagaggtttttgagtcactagtaccagtttttgataaataccctcagtacattgaagaaaatcttttagaacgtttggttgagcctgagcgcgtgatttcttttagagttccatgggtagatgataaaggccaggttcaagttaaccgaggatatcgtgtacaattttcatcagctattggtccttataaaggtggtttacgttttcaccctacagtaacacaatctattgtcaaatttttaggatttgaacaaatttttaagaattcactgacaggtctaccaattggtggtggcaaaggagggtcaaactttgatccaaaagggaaatcagataatgaagtgatgcgtttcacacaaagttttatgactgaacttcaaaaatacattggaccagatttagatgtgccagctggcgatattggagtaggtggacgtgaaattggttatctttatggtcaatataagcgtttaaatggttatcaaaatggggttttaaccggaaaaggactgacttatggtggctctttggctcgtacagaagcaactggttatggggcagtctattttgctaaagaaatgctagcagcgcgtggtcaagatttaactggcaaagttgcactggtttcgggatctggtaacgtggctatttatgctactgaaaaattacaagagttgggtgcaactgttgtagctgtatcagattcttcaggttatgtttatgatccagacggtattgaccttgaaacattgaaacagataaaagaggttgaaagagcacgtattgttaaatatacggagaaacatccaaaagctaatttcacaccagcagatcaaggtagtatctggtctattaaagctgatttagctttcccgtgtgctactcaaaacgaattagacgaagaagacgctaagttattagttgaaaatggtgtcttggcagtaacagaaggagcaaatatgccatctaccttgggtgctattaaagttttccaaaaggcaggggttgcttttggtcctgctaaagctgccaatgcagggggagtagctgtttcagcgcttgaaatggcacaaaattctagtcgtagggcatggacttttgaagaagttgatcaagaattgcaacgtattatgaaaactatttttgtgaatgcttccgaagcggctgatgaatttggcgatagtggtaacctggttctaggtgctaacattgcaggctttttaaaagttgctcaagctatgtctgcacaaggtattgtt

SEQ ID NO: 6022 - protein, 449 aa, Streptococcus agalactiae
MTSGKTYVASVLEKVKKQNEHEEEFLQAVEEVFESLVPVFDKYPQYIEENLLERLVEPERVISFRVPWVDDKGQVQVNRGYRVQFSSAIGPYKGGLRFHPTVTQSIVKFLGFEQIFKNSLTGLPIGGGKGGSNFDPKGKSDNEVMRFTQSFMTELQKYIGPDLDVPAGDIGVGGREIGYLYGQYKRLNGYQNGVLTGKGLTYGGSLARTEATGYGAVYFAKEMLAARGQDLTGKVALVSGSGNVAIYATEKLQELGATVVAVSDSSGYVYDPDGIDLETLKQIKEVERARIVKYTEKHPKANFTPADQGSIWSIKADLAFPCATQNELDEEDAKLLVENGVLAVTEGANMPSTLGAIKVFQKAGVAFGPAKAANAGGVAVSALEMAQNSSRRAWTFEEVDQELQRIMKTIFVNASEAADEFGDSGNLVLGANIAGFLKVAQAMSAQGIV

SEQ ID NO: 6023 - DNA, 618 bp, Streptococcus agalactiae
ttgtcaactatttgctatggtatcattattaggagcaattttaaaggtaattatttgacttttactgactttcgttctataatgagacaaatatttgattggagtatctatatgaaatggttcccacttgttggaggtataattgccttattagctggcttctatctctttataaatcctgtaacggttgttgcaactctgggttggttcattgctttatttatctttatttatggcatttcaaatttagtacgctacttgcaagctgattcttatcaccgtagcccttggtatctggttcagagtatccttgctattatttttggtatcattttactatccagctcagcaatgtcactttcaaatactgtcatgactattttagcatactggctactggtatctggtattttacgacttttgggtggtttccaaatgcaaaaaattaatttcccaggtgccaaatcctataaacgttcggcttatattgcactcattttaggtattattttactggttcaacctaccttatcagcagccatcattggaagatttgtagcctttatattaatagcaattggagcttcggctatttacacttttactcgtattaattat

SEQ ID NO: 6024 - protein, 206 aa, Streptococcus agalactiae
MSTICYGIIIRSNFKGNYLTFTDFRSIMRQIFDWSIYMKWFPLVGGIIALLAGFYLFINPVTVVATLGWFIALFIFIYGISNLVRYLQADSYHRSPWYLVQSILAIIFGIILLSSSAMSLSNTVMTILAYWLLVSGILRLLGGFQMQKINFPGAKSYKRSAYIALILGIILLVQPTLSAAIIGRFVAFILIAIGASAIYTFTRINY

SEQ ID NO: 6025 - DNA, 1767 bp, Streptococcus agalactiae
atgagaaaaaaatctatttttttgagattatggtcttacctaactcgctacaaagctactcttttcttagcgatttttttgaaagttttatctagttttatgagtattctggagccttttattttagggttagcgataacagagttgactgctaaccttgttgatatggctaagggagtttctggggcagaattgaacgttccttatattgctggtattctgattatttattttttcagaggtgttttctatgaattaggttcttatggctcaaattattttatgactactgtcgttcaaaaaagtatccgtgatatccgtcatgatttgaatcgtaaaatcaataaagttcctgtatcgtattttgataagcaccaatttggagatatgttgggacgttttacaagtgatgttgaaacggtctcaaatgctttacaacagagctttttacagattatcaatgcttttttaagtattattctagtagtcgttatggtactttatctaaatgtaccattagccatgattatcattgcttgtattcctgtaacttattttagtgcacaagcgatactaaaaagatcccaaccttactttaaagaacaggcaaagattctgggagaactgaatggttttgtacaagagaaattaactggtttcaatatcataaaattatatggtagagaagaggcgtctagtcaagaatttcgtgatataacggataatctacgtcatgtaggtttcaaagctagcttcatttcaggaattatgatgccagtattgaatagtatctctgattttatttatcttatcattgcatttgttggcggtttacaagttattgctggtaccttaacaattggtaacatgcaggcatttgtgcagtatgtttggcaaattagtcaacccgttcaaaccattacacaattagcaggtgttttgcaaagtgcaaaatcttccttagaacgtatttttgaagtcttagatgaagaagaggaagccaatcaagtcactgaaaaattgagccatgacttaaccggtcaagtcagctttcatggtgtcgattttcactattctccggataagccacttatccgcgactttaacttagatgtagaaccagggcaaatgattgcaattgtagggccaacaggtgcaggtaagacaacacttataaacttactcatgagattctacgatgttagtgaaggtgctatcaccgtagatggtcacgatattagacacctatcacgccaagatttccggcaacaatttggcatggtgttgcaagatgcttggttatatgaaggtacaataaaagaaaatcttagattcggtaatcttgaagccagtgatgaggatatagttgctgctgccaaagctgcgaatgttgaccactttattcgaacgttacctggtggctacaatatggtgatgaatcaagaatcaagcaatatctccttaggacaaaagcaactgttgactattgcacgtgctttattagcagatcctaaaattttaattttagatgaagcgacttcatctgttgatacaaggttggaattgcttattcaaaaagctatgaaaaaattgatggaaggaagaactagttttgtcattgcacaccgtctatcaacgattcaagaggcagacaacattttagttctaaaggatggtcaaatcatcgaacaaggtaatcaccagaaactcctagcagataaaggattttattacgaattatataatagccaattttcaaatagtaaa

SEQ ID NO: 6026 - protein, 589 aa, Streptococcus agalactiae
MRKKSIFLRLWSYLTRYKATLFLAIFLKVLSSFMSILEPFILGLAITELTANLVDMAKGVSGAELNVPYIAGILIIYFFRGVFYELGSYGSNYFMTTVVQKSIRDIRHDLNRKINKVPVSYFDKHQFGDMLGRFTSDVETVSNALQQSFLQIINAFLSIILVVVMVLYLNVPLAMIIIACIPVTYFSAQAILKRSQPYFKEQAKILGELNGFVQEKLTGFNIIKLYGREEASSQEFRDITDNLRHVGFKASFISGIMMPVLNSISDFIYLIIAFVGGLQVIAGTLTIGNMQAFVQYVWQISQPVQTITQLAGVLQSAKSSLERIFEVLDEEEEANQVTEKLSHDLTGQVSFHGVDFHYSPDKPLIRDFNLDVEPGQMIAIVGPTGAGKTTLINLLMRFYDVSEGAITVDGHDIRHLSRQDFRQQFGMVLQDAWLYEGTIKENLRFGNLEASDEDIVAAAKAANVDHFIRTLPGGYNMVMNQESSNISLGQKQLLTIARALLADPKILILDEATSSVDTRLELLIQKAMKKLMEGRTSFVIAHRLSTIQEADNILVLKDGQIIEQGNHQKLLADKGFYYELYNSQFSNSK

SEQ ID NO: 6027 - DNA, 1737 bp, Streptococcus agalactiae
atggcatatatttggtcttatttgaaaaggtaccccaattggttatggcttgatttactaggagctatgctttttgtgacggttatcctaggaatgcccacagccttagcgggtatgattgataatggcgttacaaaaggtgatcggactggagtttatctgtggacgttcatcatgtttatatttgttgtactaggtattattgggcgtattacgatggcttacgcatctagtcgcttaacgacaacaatgattagagatatgcgtaatgatatgtatgctaagcttcaagaatactcccatcatgaatatgaacagataggtgtatcttcactagtgacacgtatgacaagcgatacttttgttttgatgcaatttgctgaaatgtctttacgtttaggcctagtaactcctatggtaatgatttttagcgtggttatgatactaattacgagtccatctttagcttggcttgtagcggttgcgatgcctcttttggtaggagttattttatatgtagctataaaaacaaaacctttatctgaaagacaacagactatgcttgataaaatcaatcaatatgttcgtgaaaatttaacagggttacgcgttgttagggcctttgcaagagagaattttcaatcacaaaaatttcaagtcgctaaccaacgttacacagatacttcaactggtctttttaaattaacagggctaacagaaccacttttcgttcaaattattattgcaatgattgtggctatcgtttggtttgctttggatcccttacaaagaggtgctattaaaataggggatttagttgcttttatcgaatatagcttccatgctctcttttcatttttgctatttgccaatctttttactatgtatcctcgtatggtggtatctagccatcgtattagagaggtaatggatatgccgatttctattaatcctaataccgaaggtgttacggatacgaaacttaaagggcatttagaatttgataatgtaacattcgcttatccaggagaaacagagagtcccgttttgcatgatatttcttttaaagctaagcctggagaaacaattgcttttattggttcaacaggttcaggaaaatcttctcttgttaatttgattccacgtttttatgatgtgacacttggaaaaatcttagtagatggagttgatgtaagagattataaccttaaatcacttcgccaaaagattggatttatcccccaaaaagctcttttatttacagggacaataggagagaatttaaaatatggaaaagctgatgctactattgatgatcttagacaagcggttgatatttctcaagctaaagagtttattgagagtcaccaagaagcctttgaaacgcatttagctgaaggtgggagcaatctttctgggggtcaaaaacaacggttatccattgctagggctgttgttaaagatccagatttatatatttttgatgattcattttctgctctcgattataagacagacgctactttaagagcgcgtctaaaagaagtaaccggtgattctacggttttgatagttgctcaaagggtgggtacgattatggatgctgatcagattattgtccttgatgaaggcgaaattgtcggtcgtggtacccacgctcaattaatagaaaataatgctatttatcgtgaaatcgctgagtcacaactgaagaaccaaaacttatcagaaggagag

SEQ ID NO: 6028 - protein, 579 aa, Streptococcus agalactiae
MAYIWSYLKRYPNWLWLDLLGAMLFVTVILGMPTALAGMIDNGVTKGDRTGVYLWTFIMFIFVVLGIIGRITMAYASSRLTTTMIRDMRNDMYAKLQEYSHHEYEQIGVSSLVTRMTSDTFVLMQFAEMSLRLGLVTPMVMIFSVVMILITSPSLAWLVAVAMPLLVGVILYVAIKTKPLSERQQTMLDKINQYVRENLTGLRVVRAFARENFQSQKFQVANQRYTDTSTGLFKLTGLTEPLFVQIIIAMIVAIVWFALDPLQRGAIKIGDLVAFIEYSFHALFSFLLFANLFTMYPRMVVSSHRIREVMDMPISINPNTEGVTDTKLKGHLEFDNVTFAYPGETESPVLHDISFKAKPGETIAFIGSTGSGKSSLVNLIPRFYDVTLGKILVDGVDVRDYNLKSLRQKIGFIPQKALLFTGTIGENLKYGKADATIDDLRQAVDISQAKEFIESHQEAFETHLAEGGSNLSGGQKQRLSIARAVVKDPDLYIFDDSFSALDYKTDATLRARLKEVTGDSTVLIVAQRVGTIMDADQIIVLDEGEIVGRGTHAQLIENNAIYREIAESQLKNQNLSEGE

SEQ ID NO: 6029 - DNA, 471 bp, Streptococcus agalactiae
atgattatccgtccgattattaaaaatgatgaccaagcagttgcacaattaattcgacaaagtttacgcgcctatgatttagataaacctgatacagcatattcagaccctcacttagatcatttgacctcatactacgaaaaaatagagaagtcaggattctttgtcattgaggagagagatgagattattggctgtggcggctttggtccgctgaaaaatctaattgcagagatgcagaaggtgtacattgcagaacgtttccgtggtaaggggcttgctactgatttagtgaaaatgattgaagtagaagctcgaaaaattgggtatagacaactttatttagagacagccagtactttgagtagggcaactgcggtttataagcatatgggatattgtgccttatcgcaaccaatagcaaatgatcaaggtcatacagctatggatatttggatgattaaagattta

SEQ ID NO: 6030 - protein, 157 aa, Streptococcus agalactiae
MIIRPIIKNDDQAVAQLIRQSLRAYDLDKPDTAYSDPHLDHLTSYYEKIEKSGFFVIEERDEIIGCGGFGPLKNLIAEMQKVYIAERFRGKGLATDLVKMIEVEARKIGYRQLYLETASTLSRATAVYKHMGYCALSQPIANDQGHTAMDIWMIKDL

SEQ ID NO: 6031 - DNA, 1866 bp, Streptococcus agalactiae
atgagcgattttttagtagatggattgactaagtcggttggtgataagacggtctttagtaatgtttcatttatcatccatagtttagaccgtattgggattattggtgtcaatggaactggaaagacaacactattagatgttatttcgggtgaattaggttttgatggtgatcgttcccctttttcatcagctaatgattataagattgcttatttaaaacaagaaccagactttgatgattctcagacaattttggacaccgtactttcttctgacttaagagagatggctttaattaaagaatatgaattattgcttaatcactacgaagaaagtaagcaatcacgtctagagaaagtaatggcagaaatggattctttagatgcttggtctattgagagcgaagtcaaaacagtattatccaaattaggtattactgatttgcagttgtcggttggtgaattatcaggaggattacgaagacgtgttcaattagcgcaagtattattaaatgatgcagatttattgctcttagacgaacctactaaccacttagatattgacactattgcatggttaacgaattttttgaaaaatagtaaaaagacagtgctttttataactcatgatcgttattttctagacaatgttgcaacacgtatttttgaattagataaggcacagattacagaatatcaaggcaattatcaggattatgtccgacttcgtgcagaacaagacgagcgtgatgctgctagtttacataaaaagaaacagctttataaacaggaactagcttggatgcgtactcagccacaagctcgtgcaacgaaacaacaggctcgtattaatcgttttcaaaatctaaaaaacgatttacaccaaacaagcgatacaagcgatttggaaatgacatttgaaacaagtcgaattgggaaaaaggttattaattttgaaaatgtctctttttcttacccagataaatctatcttgaaagactttaatttgttaattcaaaataaagaccgtattggcatcgttggagataatggtgttggaaagtcaaccttacttaatttaattgttcaagatttacagccggattcgggtaatgtctctattggtgaaacgatacgtgtaggttacttttcacaacaacttcataatatggatggctcaaaacgtgttattaattatttgcaagaggttgcagatgaggttaaaactagtgtcggtacaacaagtgtgacagaactattggaacaatttctctttccacgttcgacacatggaacacaaattgcaaaattatcaggtggtgagaaaaaaagactttaccttttaaaaatcctgattgaaaagcctaatgtgttactacttgatgagccgacaaatgacttagatattgctacattaactgttcttgaaaattttttacaaggctttggtggtcctgtgattacagttagtcacgatcgttactttttagataaagtggctaataaaattattgcgtttgaagataacgatatccgtgaattttttggtaattatactgattatttagatgaaaaagcatttaatgagcaaaataatgaagttatcagtaaaaaagagagtaccaagacaagtcgtgaaaagcaaagtcgtaaaagaatgtcttactttgaaaaacaagaatgggcgacaattgaagacgatattatgatattggaaaatactatcactcgtatagaaaatgatatgcaaacatgtggtagtgattttacaaggttatctgatttacaaaaggaattagatgcaaaaaatgaagcacttctagaaaagtatgaccgttatgagtaccttagtgagttagacaca

SEQ ID NO: 6032 - protein, 622 aa, Streptococcus agalactiae
MSDFLVDGLTKSVGDKTVFSNVSFIIHSLDRIGIIGVNGTGKTTLLDVISGELGFDGDRSPFSSANDYKIAYLKQEPDFDDSQTILDTVLSSDLREMALIKEYELLLNHYEESKQSRLEKVMAEMDSLDAWSIESEVKTVLSKLGITDLQLSVGELSGGLRRRVQLAQVLLNDADLLLLDEPTNHLDIDTIAWLTNFLKNSKKTVLFITHDRYFLDNVATRIFELDKAQITEYQGNYQDYVRLRAEQDERDAASLHKKKQLYKQELAWMRTQPQARATKQQARINRFQNLKNDLHQTSDTSDLEMTFETSRIGKKVINFENVSFSYPDKSILKDFNLLIQNKDRIGIVGDNGVGKSTLLNLIVQDLQPDSGNVSIGETIRVGYFSQQLHNMDGSKRVINYLQEVADEVKTSVGTTSVTELLEQFLFPRSTHGTQIAKLSGGEKKRLYLLKILIEKPNVLLLDEPTNDLDIATLTVLENFLQGFGGPVITVSHDRYFLDKVANKIIAFEDNDIREFFGNYTDYLDEKAFNEQNNEVISKKESTKTSREKQSRKRMSYFEKQEWATIEDDIMILENTITRIENDMQTCGSDFTRLSDLQKELDAKNEALLEKYDRYEYLSELDT

SEQ ID NO: 6033 - DNA, 1875 bp, Streptococcus pyogenes
atgagccattttttggtggagaaattaacaaaaacggtgggagataagaccgtctttcaagatatttcctttattattcatgactttgaccgtattgggattattggggttaatggaacaggaaaaacaactcttttagatgtgttgtcgggaaggcttggttttgacggagatcattcaccattttctaaagccaatgattacaaaatcgcttacttaacacaagaccctgaatttaacgatgcagcttctgttttagatacggtattatcagctgatgttaaagctattcaactgattcgtcagtacgaactattgatggcgaattatactgaggataaacaagaaagcttagagtccctcatgtctgaaatggatcgattagatgcttggtctattgaaagtgatgtcaaaacagtcctatcaaaattaggcatcacggatttggaacaaaaagtgggagacctatcaggtggtatgagaagacgtgtccagttagctcaagtgttgctaggagctgctgacttactcttgttggatgagccgaccaaccatctcgatattgacaccatcgcttggttaacaacctatctcaagacagctaaaaaaaccgtcctttttattacccatgaccgttatttccttgatcatgtggctacccgtatttttgaattggataaagcgggactgacagaatatcaaggcaattaccaagactatgtgcgcttaaaagcagaacaagacgaacgagatgctgctaatttacacaagaagaagcaactctataaacaagaattagcctggatgaggacgcaaccacaggcgcgtgcaaccaaacagcaggctagaatcaatcgtttcagtgacttgaaaaaagaagttcaccaagacagttctgcggataaattggagatgactttcgaaacgagccgaattgggaagaaggtgattcactttgaagacctttcttttgcttatggcgaccgacagttgattaaggattttaacttgattattcaaaataaagatcgtattggaattgttggagataacggcgtcggaaaatctaccctgttaaatatcattaacggtgatctcaaaccaacttctgggaagcttgatattggagatactattcgtgtaggttatttctctcagcagctcaaagatatggatgagaccaaacgggtcattaattaccttcaagaagtggctgatgaggttaaaacaagtgtgggaacaacgagtatcagtgagcttttagaacaatttctttttccgagatcaagtcatggcacgctgattgctaaattatctggtggggagaaaaaacggctctacttgctaaaactgctcattgaaaagccaaatgttcttctccttgatgagccaacaaatgatttagacattgccaccttgaaggtcttagaaaactttttagctaactttgcaggaccagtcattacggttagtcacgatcgttatttcctagacaaagtagctactaagattttagcctttgaagaaggcgatattcgtgttttttatggcaattacagtgattaccttgatgaaaaagtttttgaaaaagaaacagttgaggcagacttagctaaaacaacagtcactgaagaagtgccacttcctcaaaaagaggaaagaaagcgcatgtcctaccttgaaaaacaagaatgggctcagatagaagataaaatagcaactattgaggctaatattgaagaaattgaaaaccaaatgttaactgtagttagtgattatggccagttagctcaattacaaaaggaactcgatcagcgcaataatgatttattattggcgtatgaacggtttgagtatttgagtggactagacata

SEQ ID NO: 6034 - protein, 625 aa, Streptococcus pyogenes
MSHFLVEKLTKTVGDKTVFQDISFIIHDFDRIGIIGVNGTGKTTLLDVLSGRLGFDGDHSPFSKANDYKIAYLTQDPEFNDAASVLDTVLSADVKAIQLIRQYELLMANYTEDKQESLESLMSEMDRLDAWSIESDVKTVLSKLGITDLEQKVGDLSGGMRRRVQLAQVLLGAADLLLLDEPTNHLDIDTIAWLTTYLKTAKKTVLFITHDRYFLDHVATRIFELDKAGLTEYQGNYQDYVRLKAEQDERDAANLHKKKQLYKQELAWMRTQPQARATKQQARINRFSDLKKEVHQDSSADKLEMTFETSRIGKKVIHFEDLSFAYGDRQLIKDFNLIIQNKDRIGIVGDNGVGKSTLLNIINGDLKPTSGKLDIGDTIRVGYFSQQLKDMDETKRVINYLQEVADEVKTSVGTTSISELLEQFLFPRSSHGTLIAKLSGGEKKRLYLLKLLIEKPNVLLLDEPTNDLDIATLKVLENFLANFAGPVITVSHDRYFLDKVATKILAFEEGDIRVFYGNYSDYLDEKVFEKETVEADLAKTTVTEEVPLPQKEERKRMSYLEKQEWAQIEDKIATIEANIEEIENQMLTVVSDYGQLAQLQKELDQRNNDLLLAYERFEYLSGLDI

SEQ ID NO: 6035 - DNA, 1209 bp, Streptococcus agalactiae
atgatgagattaaattatttgccttctgagtttcagaaggctttaccaatattaaaaaagataaaaaaagccggttatgaagcatactttgtaggtggtagtgttcgggatgttttacttgaccgtccaattcatgatgttgatatagcaacgtcatcttatccagaagaaacaaagcagatttttaaaaggacagttgatgttggtattgaacatggaacagtcttagtattggaaaaaggtggtgaatatgagattaccacttttaggactgaggaggtttatgttgattataggcgtccgagtcaggtcaattttgttaggtcgctagaagaagatctaaaacgtcgagatttcacagttaatgcctttgctttaaatgaagatggagaagttattgatctctttcatggattggatgatttagataatcaccttcttagagcagtaggactcgccagtgagcgttttaatgaagatgctcttcgaattatgcgtggtttgcgtttttctgctagtctaaattttgatatcgaaacaacaacttttgaggcaatgaaaaagcacgcgtcattattggagaaaatatctgttgagcgttcttttattgaatttgataaacttctattagcaccttattggcgtaaaggaatgctggcactaatagatagtcatgcttttaattatctaccatgcttaaaaaatagggaattacaattaagcgcctttttgtcccagttagataaagattttttatttgagacatcagaacaagcttgggcatcactcatcttgagtatggaagttgaacacacaaagacttttttaaaaaaatggaagacatcaactcactttcaaaaagatgttgagcatatagtggatgtttatcgtattcgtgaacaaatgggattgactaaagaacatctttatcgttatggaaaaactataataaaacaagcggaaggtattcgcaaagcaagaggcttgatggttgatttcgaaaaaatagaacaactagatagtgagttagcaatccatgataggcatgagatagttgtcaatggtggcaccttaatcaagaaattaggaataaaacctggtccacagatgggagatattatctctcaaattgaattagccattgttttaggacaactgattaatgaagaagaggctattttacattttgttaagcagtacttgatggat

SEQ ID NO: 6036 - protein, 403 aa, Streptococcus agalactiae
MMRLNYLPSEFQKALPILKKIKKAGYEAYFVGGSVRDVLLDRPIHDVDIATSSYPEETKQIFKRTVDVGIEHGTVLVLEKGGEYEITTFRTEEVYVDYRRPSQVNFVRSLEEDLKRRDFTVNAFALNEDGEVIDLFHGLDDLDNHLLRAVGLASERFNEDALRIMRGLRFSASLNFDIETTTFEAMKKHASLLEKISVERSFIEFDKLLLAPYWRKGMLALIDSHAFNYLPCLKNRELQLSAFLSQLDKDFLFETSEQAWASLILSMEVEHTKTFLKKWKTSTHFQKDVEHIVDVYRIREQMGLTKEHLYRYGKTIIKQAEGIRKARGLMVDFEKIEQLDSELAIHDRHEIVVNGGTLIKKLGIKPGPQMGDIISQIELAIVLGQLINEEEAILHFVKQYLMD

SEQ ID NO: 6037 - DNA, 1206 bp, Streptococcus pyogenes
atgaaattaatgacaatgccttctgagtttcagaaggctttacccatattgactaaaataaaagaagctggttatgaagcctattttgtgggaggaagcgtcagagatgttttactcgagcgtcccattcatgatgtagatattgcaactagttcctatcctgaagagactaaagcgatttttaacagaactgtcgatgttggcattgaacatggtacagtgctcgtgcttgaaaatggcggtgagtatgaaattacaacctttaggacagaagatatctatgttgattatcgccgtcctagtcaggtttcttttgtgcgctctttagaggaagacttaaaacgaagagactttaccgtcaatgccttggccttggatgaaaatggtcaagttattgataaatttagaggactcattgatttaaagcaaaaacggttacgagcagtgggtaaagcagaggaacgttttgaagaagatgcactacgcattatgagaggctttcgatttgcggcgagtctggattttgacattgaagctataacttttgaagctatgaggagccattcacctctattggaaaagatttctgtggaacgttcttttactgaatttgataaattattgatggcaccgcactggcgaaaagggatttctgccatgattgcttgtcaggcttacgactatttaccaggcttgaagcagcaggaagcaggcttgaatcatctgatagtttctttgaaagataactttacctttagtgattatcaccaagcttgggcttatgtgatgattagtttagccattgaggatcctaaaagcttcctaaaagcatggaagacttcaaatgattttcagcgttatgtcacaaagttgattgctctttatagaattcgtcaggaaagatcttttgaaaaattggatatttaccagtacggcaagaaaatggcgagtctagtggaagacctccgaaaagctcaaagcttatccgttgacatggatcgtattaatactttagatcaggcactggttattcatgacaaacacgatatcgtccttaatggttctcacctgattaaggattttgggatgaaatcaggtcctcagctagggcttatgcttgagaaagttgaattagcgattgtagaggggcgcctagataatgatttcactacaattgaagcatttgttagagaggaattagcaaca

SEQ ID NO: 6038 - protein, 402 aa, Streptococcus pyogenes
MKLMTMPSEFQKALPILTKIKEAGYEAYFVGGSVRDVLLERPIHDVDIATSSYPEETKAIFNRTVDVGIEHGTVLVLENGGEYEITTFRTEDIYVDYRRPSQVSFVRSLEEDLKRRDFTVNALALDENGQVIDKFRGLIDLKQKRLRAVGKAEERFEEDALRIMRGFRFAASLDFDIEAITFEAMRSHSPLLEKISVERSFTEFDKLLMAPHWRKGISAMIACQAYDYLPGLKQQEAGLNHLIVSLKDNFTFSDYHQAWAYVMISLAIEDPKSFLKAWKTSNDFQRYVTKLIALYRIRQERSFEKLDIYQYGKKMASLVEDLRKAQSLSVDMDRINTLDQALVIHDKHDIVLNGSHLIKDFGMKSGPQLGLMLEKVELAIVEGRLDNDFTTIEAFVREELAT

SEQ ID NO: 6039 - DNA, 846 bp, Streptococcus agalactiae
atgaaattagcacttattacggatacctcagcttacttgcctgaggctatcgaaaatcatgaagatgtctatgttttagatattccaattatcattgatggtaaaacttatattgagggacaaaatctgacattagaccaatattatgataagctagcggcatcaaaagaattacctaaaacaagtcagcctagcttagctgaactagatgatctcttatgtcaattggagaaagaagggtatacacacgtccttggtttattcattgcagcggggatatcaggtttctggcagaatattcagtttcttattgaagaacatccaaatttgacaattgcttttccggatactaaaataacttcagcaccacagggcaatttagttagaaatgctttgatgtgttcacgtgaagggatggattttgatgtcatagttaacaagatacaatcacaaattgaaaaaattgaaggatttattgttgttaatgatttgaatcatctagtaaaaggtggtagattgtcaaacggttcagctatcattggtaaccttttaagtatcaagccggtcttacattttaatgaagaaggtaaaatcgttgtctatgagaaagtgcgtacagagaaaaaagccttaaaacgcttggctgagattgtcaaagaaatgacagcagatggtgaatatgatattgctattattcactctagagcacaagataaggcagaacaattatataatttgttagctaaagctggtcttaaagacgatttagaaattgtatcatttggtggcgttattgcaactcatcttggtgaaggtgcggttgcctttggtattacccccaaaaat

SEQ ID NO: 6040 - protein, 282 aa, Streptococcus agalactiae
MKLALITDTSAYLPEAIENHEDVYVLDIPIIIDGKTYIEGQNLTLDQYYDKLAASKELPKTSQPSLAELDDLLCQLEKEGYTHVLGLFIAAGISGFWQNIQFLIEEHPNLTIAFPDTKITSAPQGNLVRNALMCSREGMDFDVIVNKIQSQIEKIEGFIVVNDLNHLVKGGRLSNGSAIIGNLLSIKPVLHFNEEGKIVVYEKVRTEKKALKRLAEIVKEMTADGEYDIAIIHSRAQDKAEQLYNLLAKAGLKDDLEIVSFGGVIATHLGEGAVAFGITPKN

SEQ ID NO: 6041 - DNA, 846 bp, Streptococcus pyogenes
atgaaattagcagtaattactgacagtacagcaacactaccaacagatctgaaacaagataaagctatttttagccttgatataccagttatcattgacgatgagacctattttgaaggtcgaaatttgagtatagatgatttttatcaaaagatggctgactcccaaaatcttcccaagacaagtcagccaagtttatctgaactagataatcttttaggacttttatcttctaaaggttatacacatgttattggcttgttcttagctggaggaatctcaggcttttggcaaaatattcaatttttagctgaagaacatcctgagattgaaatggcatttccagacagtaagatcacatctgctcctttaggtagtatggtaaaaaatgtgctagattggtcacgtcaaggaatgacatttcaagctattttaaacaagctgcaagaacagattgatgggacgacagcctttattatggttgatgaccttaatcatctggttaaaggcggacgcctgtcaaatgggtctgctcttcttggaaatcttttgagtattaaacctattttacgctttgatgaagagggaaaaatcgttgtttatgaaaaagtgagaacagaaaagaaagccatgaaacgcttggttgagattttaaatgacttgatagcagacggtcagtataatgtgtttattattcactcaaaagcacaagacaaagctgattatttgaaacgactcttacaagacagtggttatcaatatgacattgaagaggttcattttggagcggtgattgctactcatttaggagaaggagccattgcatttggcgtaacaccgaggctt

SEQ ID NO: 6042 - protein, 282 aa, Streptococcus pyogenes
MKLAVITDSTATLPTDLKQDKAIFSLDIPVIIDDETYFEGRNLSIDDFYQKMADSQNLPKTSQPSLSELDNLLGLLSSKGYTHVIGLFLAGGISGFWQNIQFLAEEHPEIEMAFPDSKITSAPLGSMVKNVLDWSRQGMTFQAILNKLQEQIDGTTAFIMVDDLNHLVKGGRLSNGSALLGNLLSIKPILRFDEEGKIVVYEKVRTEKKAMKRLVEILNDLIADGQYNVFIIHSKAQDKADYLKRLLQDSGYQYDIEEVHFGAVIATHLGEGAIAFGVTPRL

SEQ ID NO: 6043 - DNA, 378 bp, Streptococcus agalactiae
atggaagtcattcgtgaacaagaatttgtcaatcaataccactatgatgcgcgcaatttagaatgggaagaggaaaatggtaccccaaaaacaaattttgaagttactttccaattagctaatagagatgaagcagcaaaagtaacgagcattgtagcagtgttacaatttgttattgtacgtgatgagtttgttatttctggtgtcatttcacaaatggctcatatccaagggcgccttatcaatgagcctagtgagtttagtcaagatgaagttgagaatctagcagctcctcttttagaaatcgttaaacgtctgacttatgaagttacagaaattgctttagatagaccaggagtaacattggagtttaatagt

SEQ ID NO: 6044 - protein, 126 aa, Streptococcus agalactiae
MEVIREQEFVNQYHYDARNLEWEEENGTPKTNFEVTFQLANRDEAAKVTSIVAVLQFVIVRDEFVISGVISQMAHIQGRLINEPSEFSQDEVENLAAPLLEIVKRLTYEVTEIALDRPGVTLEFNS

SEQ ID NO: 6045 - DNA, 378 bp, Streptococcus pyogenes
atgcaattagttcgtgaaaaagaatttgtcaaccagtaccattatgatgctagaaatttagagtgggaaaaagaaaacggaacaccagagaccaattttgaagtgacttttcagttgattgataaagatgagcagcaaaaagaaacagtaattgtatctgtattgcaatttgttattgtcaaagaagaatttgttattagtggggtcatctcacaaatggttcgtattttagatcgtttagtggataaaccaagcgaatttacgcaagaggaagttgaatccttagctgctcctttgctagatatggttaagcgattgacttatgaagtcacagaaattgccttggatcgtccaggtattcatttggagtttaaaaat

SEQ ID NO: 6046 - protein, 126 aa, Streptococcus pyogenes
MQLVREKEFVNQYHYDARNLEWEKENGTPETNFEVTFQLIDKDEQQKETVIVSVLQFVIVKEEFVISGVISQMVRILDRLVDKPSEFTQEEVESLAAPLLDMVKRLTYEVTEIALDRPGIHLEFKN

SEQ ID NO: 6047 - DNA, 531 bp, Streptococcus agalactiae
atgactatgaaaactattgaagaaatttacaaaaattatcctaatatcccctatatctcacctgaaagagacttggctgaaattaattttagtaaagttgttcctaggaaaaatatggaagaaactagtgaaggactcttgcctggagatattatcttattatggcgtatacagtttggaactttcacaactgaaacaagtttttcaaaatattttgaatacatttatggtataaatggaaaagaacacctagaatttttaataaaaaatggatttgtaagaatggagtcaccgcttgattctttagatcacttatctgctccacttttaaaactattcttaaaagaaaaaaacgtaaaaggcttgtcaaagatgaaacgctctgatttagatcaggcaatagctattgcttttacagaagaggaattagggaagttgtttgttgtcagagggttggcacttacagaaaaaggtttagcagccttgagtaacaatcaagaagtgattgatagacatcctaagaagaagttc

SEQ ID NO: 6048 - protein, 177 aa, Streptococcus agalactiae
MTMKTIEEIYKNYPNIPYISPERDLAEINFSKVVPRKNMEETSEGLLPGDIILLWRIQFGTFTTETSFSKYFEYIYGINGKEHLEFLIKNGFVRMESPLDSLDHLSAPLLKLFLKEKNVKGLSKMKRSDLDQAIAIAFTEEELGKLFVVRGLALTEKGLAALSNNQEVIDRHPKKKF

SEQ ID NO: 6049 - DNA, 333 bp, Streptococcus agalactiae
gtgttaagagctgtgttgatagctgccattggaatgtttacgagcaacatcaagaaacctgtaatcaaaacacctaacaatgggtatagaagaattgatttaataccttcaagcgattttgggagacctgaaagtaattttctaagtagtaggataactccaccagctaagaaaccacctactaaagcccctaagaaacctgatggcacacctgctaatgctaaggttgctttcccaccttctgcaaaaggtactttaccgaatgccagtccacttgatgcaattgaaccagctacgaagccagctactagtcctggtttttcagctattgaa

SEQ ID NO: 6050 - protein, 111 aa, Streptococcus agalactiae
MLRAVLIAAIGMFTSNIKKPVIKTPNNGYRRIDLIPSSDFGRPESNFLSSRITPPAKKPPTKAPKKPDGTPANAKVAFPPSAKGTLPNASPLDAIEPATKPATSPGFSAIE

SEQ ID NO: 6051 - DNA, 1962 bp, Streptococcus agalactiae
atgaaaatccaagacctactaaaaaaagaagttatgattatggatttaaaagcaaccagtaaagaggctgcaattgatgaaatgattacaaaattagttgacacaggtgttgtgacaaactttgctatttttaaagatggtatcatgaagcgtgaggcacaaacatcaactggattaggtgatggtatcgctatgccacatagtaaaaatgctgccgttaaagaagctactgtcctttttgcaaaatctgcatcaggtgttgattacgaagcacttgatggacagccaactgatttattctttatgattgctgcgccagatggtgctaatgatacgcatttagctgccttggcagaactatctaaatatcttttaaaagaagggttcgctgatcaattacgtcaagcaaaaacgccagatgacattattgctacttttgatagtaatagcatttctcaagaaacagtagctccacaaacagtacaatcaacaagtaaaggttcagattatattgttgcagtaacagcttgcactacgggaattgcccacacgtatatggcagaagaagctttaaagaaaaaagcagctgaaatgggtgtaggtattaaagttgaaacaaatggcgcttctggtgtaggaaataagttgacttcaagtgatattgcaagggctaagggtgttattattgcagcagataaggctgtagagatggatcgttttgatggcaaacctttggtatcacgtccggtagctgatggtattaaaaaaagtgaagacttaattaacattattctcgataataaggcacaaacctatcatgcaaaaaatcaaaatgataaacaatcaggtgaatctgatggaaaatcaggcttaggctctgctttttataaacaccttatgggtggtgtatcacaaatgttaccattcgttattggtggtggtattatgattgcgattgctttcctttttgataacatacttggtgtaccaaaagaccaattaagtaatttaggttcataccatgaaattgcagccttattcaaaaatatcggtggcgcagcatttgcatttatgttaccagtattggcaggttatatcgcttattcaatagctgaaaaaccaggactagtagctggcttcgtagctggttcaattgcatcaagtggactggcattcggtaaagtaccttttgcagaaggtgggaaagcaaccttagcattagcaggtgtgccatcaggtttcttaggggctttagtaggtggtttcttagctggtggagttatcctactacttagaaaattactttcaggtctcccaaaatcgcttgaaggtattaaatcaattcttctatacccattgttaggtgttttgattacaggtttcttgatgttgctcgtaaacattccaatggcagctatcaacacagctcttaacactttcttacaaggtttatctggtagttcagcagtcttgatgggcttactagttggtggtatgatggctgtagatatgggtgggcctgttaataaagcagcttatgtttttggtacaggtactcttgcagcaactgttgcaaatggcggctctgttgttatggcagctgtaatggctggaggaatggttccaccgttagcagtatttgtggcaactttattatttaaagataaatttaataatgaagaacgtcaatctggtctaacaaatatcgttatggggttatcttttatcactgaaggtgctattccgtttggtgctgctgacccagctcgtgcaatccctagctttattgtaggttcagccttaactggagcacttgttggtttagctggtatcaagttgatggctcctcatggagggatttttgtcatcgcattaacaagtaatcctttactttatattctatttattctaattggagcggtagtctcaggtgtactctttggcttgttccgtaaaataaaa

SEQ ID NO: 6052 - protein, 654 aa, Streptococcus agalactiae
MKIQDLLKKEVMIMDLKATSKEAAIDEMITKLVDTGVVTNFAIFKDGIMKREAQTSTGLGDGIAMPHSKNAAVKEATVLFAKSASGVDYEALDGQPTDLFFMIAAPDGANDTHLAALAELSKYLLKEGFADQLRQAKTPDDIIATFDSNSISQETVAPQTVQSTSKGSDYIVAVTACTTGIAHTYMAEEALKKKAAEMGVGIKVETNGASGVGNKLTSSDIARAKGVIIAADKAVEMDRFDGKPLVSRPVADGIKKSEDLINIILDNKAQTYHAKNQNDKQSGESDGKSGLGSAFYKHLMGGVSQMLPFVIGGGIMIAIAFLFDNILGVPKDQLSNLGSYHEIAALFKNIGGAAFAFMLPVLAGYIAYSIAEKPGLVAGFVAGSIASSGLAFGKVPFAEGGKATLALAGVPSGFLGALVGGFLAGGVILLLRKLLSGLPKSLEGIKSILLYPLLGVLITGFLMLLVNIPMAAINTALNTFLQGLSGSSAVLMGLLVGGMMAVDMGGPVNKAAYVFGTGTLAATVANGGSVVMAAVMAGGMVPPLAVFVATLLFKDKFNNEERQSGLTNIVMGLSFITEGAIPFGAADPARAIPSFIVGSALTGALVGLAGIKLMAPHGGIFVIALTSNPLLYILFILIGAVVSGVLFGLFRKIK

SEQ ID NO: 6053 - DNA, 1944 bp, Streptococcus pyogenes
atgaaaattcaagatttattgagaaaagatattatgattctcgatttacaggctatttctaaagaagttgccattgacgagatgattactaaattagttgaaaaagatattgtacatgattttgatgtctttaaaaagagtatcatgacacgtgaagaacaaacatcaacagggcttggtgatgggattgccatgcctcattctaaaaatattgtagtagataaaccagcggtcttgtttgcgaaatcaaataaaggtgtggattacaaggctttagatggtcaaccaacggatctcttctttatgattgctgcgcctcaaggagcaaatgatactcacttggctgcactagcagaattatcacaataccttttgaaagacggctttgctgataaacttcgtgctgcagcgacaccagaagcagtcattgctgtttttgatgaagcgtcaacagctaaagaagaagtggttgctccaacaagtggtcaagactttatcgttgctgttacagcttgtccgacaggaattgctcacacttatatggcagaagaggctttgaaaaaacaagctgcagaaatgggagtagctattaaagttgaaacaaacggtgcttctggtgtggctaatcgtttaaccgctgaagatattcagagagctaaaggagttattgttgcagctgataaagcggttgaaatggaccgttttgatggtaaacaattcattgctcgccctgttgcagatggtatcaagaaaagtcaggaattgatttctttgattttaaacaatgaaggaaacacttatcatgctaaaaatggaaaatctgaaacagcagtatcaactgagaaaacaagtttaggcggtgctttctataaacacttgatgggcggtgtctcacaaatgttgccatttgttattggtggcgggattatgattgctctagcatttttattggataacatgcttggtgtgccaaatgatcagcttggaagtcttggatcctatcatgaaatagcagctatttttatgaacattggtggagcagccttttccttcatgttaccagtactagcaggttatatcgcttattctattgctgaaaaaccgggcttagtagctggttttgtggcaggtgccattgcctcaaatggtcttgcttttggtaaggtaccatttgcagcaggaggagaagtgagcttgggcttaacgggcgtgccatcaggtttccttggggcgcttgtgggtggtttccttgccggtggtgttattcttgcccttcgtaaattgttggcaggcctaccacgttctctagaaggggttaaatctatcctcctttacccattacttggcgtccttgtcactggtttcttgatgctttttgtcaatattccaatggcagctattaacacagcccttaatgatttcttacaaggtctttcaggaagctctgctgtccttatgggacttcttgttggtggaatgatggctgttgacatgggtggtcctgttaataaggcagcttatgtttttggtacaggaactttagcagctactgtggcaaatggtggttcggtcgttatggccgctgttatggcaggtggtatggtacctcctcttgctgtttttgtagccactctcttgtttaaagataaatttaccaaagaagaacgtgaatcaggcttgacaaatattgttatgggactttcattcatcaccgaaggagcaattccgtttggtgcagctgacccagcacgtgcgattcctagctttatcgcaggttctgccttgacaggagctcttgttggtttggctggtattaaattaatggcgccacatggtggtatcttcgtaatcgctttaacaagcaatccaatcttatatcttgtctttgttgtgattggtgcccttgtatcaggtatcttatttggcgctcttcgcaaaaaagcc

SEQ ID NO: 6054 - protein, 648 aa, Streptococcus pyogenes
MKIQDLLRKDIMILDLQAISKEVAIDEMITKLVEKDIVHDFDVFKKSIMTREEQTSTGLGDGIAMPHSKNIVVDKPAVLFAKSNKGVDYKALDGQPTDLFFMIAAPQGANDTHLAALAELSQYLLKDGFADKLRAAATPEAVIAVFDEASTAKEEVVAPTSGQDFIVAVTACPTGIAHTYMAEEALKKQAAEMGVAIKVETNGASGVANRLTAEDIQRAKGVIVAADKAVEMDRFDGKQFIARPVADGIKKSQELISLILNNEGNTYHAKNGKSETAVSTEKTSLGGAFYKHLMGGVSQMLPFVIGGGIMIALAFLLDNMLGVPNDQLGSLGSYHEIAAIFMNIGGAAFSFMLPVLAGYIAYSIAEKPGLVAGFVAGAIASNGLAFGKVPFAAGGEVSLGLTGVPSGFLGALVGGFLAGGVILALRKLLAGLPRSLEGVKSILLYPLLGVLVTGFLMLFVNIPMAAINTALNDFLQGLSGSSAVLMGLLVGGMMAVDMGGPVNKAAYVFGTGTLAATVANGGSVVMAAVMAGGMVPPLAVFVATLLFKDKFTKEERESGLTNIVMGLSFITEGAIPFGAADPARAIPSFIAGSALTGALVGLAGIKLMAPHGGIFVIALTSNPILYLVFVVIGALVSGILFGALRKKA

SEQ ID NO: 6055 - DNA, 909 bp, Streptococcus agalactiae
atgatttatacagtaacattaaatccatcgattgattttattgttcgtctagatacactattgttgggtagtgttaaccgtatgactagcgatgataaatatgtaggtggtaaaggaattaatgttagtcgcatattaaaacgcttaaaaattgacaatactgctacaggttttatcggtggatttacaggacattttgttgaagatggacttgtattagaaggtatcaaaactgactttgtttctgttaatgaagatacacgtatcaacgttaaagtaaaagcaaaaattgaaactgaaatcaatggcgggggtcctaggataacaaatgaacaacttcatcgtctagagaaacttctttcgagactaacacctgaggacacagtagttttcgcaggttcagcaccagctagccttggaaataaggtctataatacattgattccaattgctaaaaagacaggagcggaagttgtttgcgattttgaaggtcagacacttttagacgctcttgcttatcagcctcttttagtaaaaccgaataaccatgaattagcagatatttttggcgtagagctagaaggtctgcctgatatcgaaaaatatgcacataagattctagataaaggagctaagaatgttatcgtttctatggcaggggatggtgcattgttagtaactccagaagcttcatattttgcaaaaccgattaagggtgaagtgaaaaattccgttggggctggtgattcaatggtagctggctttacaggagaatttgttaagtcaaaaaatccagtagaagcactaaaatggggcgtagcttgtggtacagcaaccactttctcagatgatttagcaacagctgagtttatccaagatatttataataaagttgaggtagaaaaatta

SEQ ID NO: 6056 - protein, 303 aa, Streptococcus agalactiae
MIYTVTLNPSIDFIVRLDTLLLGSVNRMTSDDKYVGGKGINVSRILKRLKIDNTATGFIGGFTGHFVEDGLVLEGIKTDFVSVNEDTRINVKVKAKIETEINGGGPRITNEQLHRLEKLLSRLTPEDTVVFAGSAPASLGNKVYNTLIPIAKKTGAEVVCDFEGQTLLDALAYQPLLVKPNNHELADIFGVELEGLPDIEKYAHKILDKGAKNVIVSMAGDGALLVTPEASYFAKPIKGEVKNSVGAGDSMVAGFTGEFVKSKNPVEALKWGVACGTATTFSDDLATAEFIQDIYNKVEVEKL

SEQ ID NO: 6057 - DNA, 909 bp, Streptococcus pyogenes
atgatttataccgtgaccttaaacccttctattgactttattgtcagaattgaccaaataaatcttgggtcagtgaatcgcatggcgagtgatgataagtttgctggaggtaaaggcattaatgtgagtcgcatcttgcaacgtttagacattgctagcacggcgacagggttcttgggtggttttacaggacgttttatcgaagaaagtttgagtgcagaaggcgttaaaactgattttgtaaaaggtgatcaagatactcgaatcaatgttaaaatcaagtcacaagaagagaccgaattaaatggtcaaggacctatcattagtcaggaacaactggaggatttgaaaactaagctttcccagctaacagcagaggatacagttgtctttgcaggttcagcgccagctaatcttggcaatgctgtttataaggaattacttcctttagttaggcaaagcggtgctcaggtggtttgtgattttgaaggacagactttaatagatgcgcttgcatataatcctctgttggttaaacctaataatcatgaactagaagctatttttggtacgattctgaccagtcttgatgatgttgaaacctatgcccgtcgtcttttagagatgggtgctcaaaacgtcatcatttcaatggctggtgatggtgctttgctggttactaaagaagcgacttattttgctaaaccgattaagggagaagttaaaaattctgtcggtgctggtgattcgatggttgctggctttacaggcgaatttatgaagagtcaaaatccaatagaagccttaaaatggggcgtggcttgtggtacagcgacggctttctctgatgacttggcgacaattgcatttattaaggaaacatatcataaagttgaggtagaaaaacga

SEQ ID NO: 6058 - protein, 303 aa, Streptococcus pyogenes
MIYTVTLNPSIDFIVRIDQINLGSVNRMASDDKFAGGKGINVSRILQRLDIASTATGFLGGFTGRFIEESLSAEGVKTDFVKGDQDTRINVKIKSQEETELNGQGPIISQEQLEDLKTKLSQLTAEDTVVFAGSAPANLGNAVYKELLPLVRQSGAQVVCDFEGQTLIDALAYNPLLVKPNNHELEAIFGTILTSLDDVETYARRLLEMGAQNVIISMAGDGALLVTKEATYFAKPIKGEVKNSVGAGDSMVAGFTGEFMKSQNPIEALKWGVACGTATAFSDDLATIAFIKETYHKVEVEKR

SEQ ID NO: 6059 - DNA, 807 bp, Streptococcus agalactiae
atgcttgacattgaaagaaaaagagatataattaaattgcaaacgatttcaattcaaggagggactatgctaaagtcaaagagaaaagaaattatcttatcacgacttgagcaaaataagagtgttactttagatgaattaacgtctatcttagagacttctgaatctacagttcgcagggatttagatgaacttgaatctgcaggttttttaaaaagggtgcatggtggtgctgaattaccatactcacttggccaggaattaagtaatcaagaaaaagctatcaaaaacgttcaaaaaaaattggatattgctagacaaactgcaaagctgatagcaaagcaagatgttatatttattgatgccggaactacgacagaattattaattgattttctccctcacgagcaattaacggtggtgacgaattctattcatcatgctgcaaagttagttgatagagggataaaaacaatcattatcggaggagcggttaaacattcaacagatgctagtattggccaggtagccattaatcagattaggcagataacggttgacaaagcttttctggggatgaatggtatagatgaagtttatttaactacaccagatttagaagaagctgctattaaagaagctattattaataatagtcaacaaacctttattctaatggattcatctaaaattggacaagttacatttgctaaagtgaaagagataaatgacattaatttagtaactaataagactgattcagaacttatgacaataataaaagagaaaatgaaggtgattcaagta

SEQ ID NO: 6060 - protein, 269 aa, Streptococcus agalactiae
MLDIERKRDIIKLQTISIQGGTMLKSKRKEIILSRLEQNKSVTLDELTSILETSESTVRRDLDELESAGFLKRVHGGAELPYSLGQELSNQEKAIKNVQKKLDIARQTAKLIAKQDVIFIDAGTTTELLIDFLPHEQLTVVTNSIHHAAKLVDRGIKTIIIGGAVKHSTDASIGQVAINQIRQITVDKAFLGMNGIDEVYLTTPDLEEAAIKEAIINNSQQTFILMDSSKIGQVTFAKVKEINDINLVTNKTDSELMTIIKEKMKVIQV

SEQ ID NO: 6061 - DNA, 711 bp, Streptococcus pyogenes
atggcaaagatcactgaagaaaactatgtttctttagaggatttaatgcaattactcaactcctctgagtctactatccgtagagatctaggagagttggagcaagaaggacggctacatcgtgttcatggaggtgctgaactttttcactctttacaagaggaactttcgaaccaagaaaagtctgtcaaaaacagtcatattaaaaaagctattgcgcaaagagcctctcagcttatctatgacaacgatgtgatctttattgatgctgggacaacgactgaatttttattaccttttttacaagctaaaaatttaactgtagttactaattctattcatcatgctgctagattagttgaactctctattgagacgattattgtagggggttatgtcaaacaaacgaccgatgccagtattggtaacgtagctttggaacagattaggcagatgaattttgacaaggcatttcttggaatgaatggtgttgatgattcttacctgacgactcctgatatggaagaagcagttattaaaaaagcggttctgtcaaatgcaaaattagcttacattttagtagatggcactaaaattggtcaggtatcgtttgtaaaagtagctcctattaatgatgtgactattattacattaggaggatcagcaagtattcttaaacaaataaaggaaaaggcaaaggtgattgaatta

SEQ ID NO: 6062 - protein, 237 aa, Streptococcus pyogenes
MAKITEENYVSLEDLMQLLNSSESTIRRDLGELEQEGRLHRVHGGAELFHSLQEELSNQEKSVKNSHIKKAIAQRASQLIYDNDVIFIDAGTTTEFLLPFLQAKNLTVVTNSIHHAARLVELSIETIIVGGYVKQTTDASIGNVALEQIRQMNFDKAFLGMNGVDDSYLTTPDMEEAVIKKAVLSNAKLAYILVDGTKIGQVSFVKVAPINDVTIITLGGSASILKQIKEKAKVIEL

SEQ ID NO: 6063 - DNA, 1233 bp, Streptococcus agalactiae
atgacgcttcgagaattaacaatagaagaatttaaagaacattcaggaaattatgattcacaatcatttttacaaacacctgagatggctaaacttttagaaaaacgcggctatgatgttaggtatttgggatatcaagtagaaaataaactagagataatcagtttatcttatattatgccagtcactggtggttttcaaatgaaaattgattcaggaccagttcattcaaattctaagtatctaaaacaattttataaagcattgcaaggctatgccaaatccaacggtgttctagaattaatagttgagccttatgatgattaccaattattcactagttcgggagttcctagtaatcagggaaatgataatctgattgaagattttaccagttcaggttatcaccatgatggtttaacaactggttttactggtaaatatttatcttggcactatgttaaaaatttagaaggtgtcacttctgaaacgttactatcttcattctctaagacaggacgagctttggttaagaaagcaatgtcttttggaatcaaggttcgcgttcttaaacgtgatgagctacatttatttaaagagataacaacttctacgtcaaatagacgtgattatatggataagtccttagattattatcaagatttttacgatagctttgaaggcaaggctgaatttgtgattgccactttaaattttagagaatacgaccataacttgcaaataaaagctgaagcattggaaaataagcttaaattgcttgatgaacgttttagggaaaatgcagactctcctaagtatcataggcaacgctctgaaataattaatcaactggctagttttgaaacacgacgacaagaagttcagtcatttattcaaaagtatgataaccaagacgttgttttagctggtagtctatttgtttatagtcttaaggagacagtttatttcttttcaggatcctacacagaatttaataaattttatgcaccagcagttcttcaggaatatgttatgcaagaggctctcaaaagaggttctactttctataacctcctaggtattcagggaacttttgatggttcagatagtattcttcgctttaaacagaattttaatggttgtatcattcgtaaaatgggaacttttaactattatccaagtccttttaaatacaaaggaattcagcttcttaaaaaggttttgaagagaaat

SEQ ID NO: 6064 - protein, 411 aa, Streptococcus agalactiae
MTLRELTIEEFKEHSGNYDSQSFLQTPEMAKLLEKRGYDVRYLGYQVENKLEIISLSYIMPVTGGFQMKIDSGPVHSNSKYLKQFYKALQGYAKSNGVLELIVEPYDDYQLFTSSGVPSNQGNDNLIEDFTSSGYHHDGLTTGFTGKYLSWHYVKNLEGVTSETLLSSFSKTGRALVKKAMSFGIKVRVLKRDELHLFKEITTSTSNRRDYMDKSLDYYQDFYDSFEGKAEFVIATLNFREYDHNLQIKAEALENKLKLLDERFRENADSPKYHRQRSEIINQLASFETRRQEVQSFIQKYDNQDVVLAGSLFVYSLKETVYFFSGSYTEFNKFYAPAVLQEYVMQEALKRGSTFYNLLGIQGTFDGSDSILRFKQNFNGCIIRKMGTFNYYPSPFKYKGIQLLKKVLKRN

SEQ ID NO: 6065 - DNA, 1638 bp, Streptococcus agalactiae
gtgtttatgatgaaaaaaggacaagtaaatgatactaagcaatcttactctctacgtaaatataaatttggtttagcatcagtaattttagggtcattcataatggtcacaagtcctgtttttgcggatcaaactacatcggttcaagttaataatcagacaggcactagtgtggatgctaataattcttccaatgagacaagtgcgtcaagtgtgattacttccaataatgatagtgttcaagcgtctgataaagttgtaaatagtcaaaatacggcaacaaaggacattactactcctttagtagagacaaagccaatggtggaaaaaacattacctgaacaagggaattatgtttatagcaaagaaaccgaggtgaaaaatacaccttcaaaatcagccccagtagctttctatgcaaagaaaggtgataaagttttctatgaccaagtatttaataaagataatgtgaaatggatttcatataagtctttttgtggcgtacgtcgatacgcagctattgagtcactagatccatcaggaggttcagagactaaagcacctactcctgtaacaaattcaggaagcaataatcaagagaaaatagcaacgcaaggaaattatacattttcacataaagtagaagtaaaaaatgaagctaaggtagcgagtccaactcaatttacattggacaaaggagacagaattttttacgaccaaatactaactattgaaggaaatcagtggttatcttataaatcattcaatggtgttcgtcgttttgttttgctaggtaaagcatcttcagtagaaaaaactgaagataaagaaaaagtgtctcctcaaccacaagcccgtattactaaaactggtagactgactatttctaacgaaacaactacaggttttgatattttaattacgaatattaaagatgataacggtatcgctgctgttaaggtaccggtttggactgaacaaggagggcaagatgatattaaatggtatacagctgtaactactggggatggcaactacaaagtagctgtatcatttgctgaccataagaatgagaagggtctttataatattcatttatactaccaagaagctagtgggacacttgtaggtgtaacaggaactaaagtgacagtagctggaactaattcttctcaagaacctattgaaaatggtttagcaaagactggtgtttataatattatcggaagtactgaagtaaaaaatgaagctaaaatatcaagtcagacccaatttactttagaaaaaggtgacaaaataaattatgatcaagtattgacagcagatggttaccagtggatttcttacaaatcttatagtggtgttcgtcgctatattcctgtgaaaaagctaactacaagtagtgaaaaagcgaaagatgaggcgactaaaccgactagttatcccaacttacctaaaacaggtacctatacatttactaaaactgtagatgtgaaaagtcaacctaaagtatcaagtccagtggaatttaattttcaaaagggtgaaaaaatacattatgatcaagtgttagtagtagatggtcatcagtggatttcatacaagagttattccggtattcgtcgctatattgaaatt

SEQ ID NO: 6066 - protein, 546 aa, Streptococcus agalactiae
MFMMKKGQVNDTKQSYSLRKYKFGLASVILGSFIMVTSPVFADQTTSVQVNNQTGTSVDANNSSNETSASSVITSNNDSVQASDKVVNSQNTATKDITTPLVETKPMVEKTLPEQGNYVYSKETEVKNTPSKSAPVAFYAKKGDKVFYDQVFNKDNVKWISYKSFCGVRRYAAIESLDPSGGSETKAPTPVTNSGSNNQEKIATQGNYTFSHKVEVKNEAKVASPTQFTLDKGDRIFYDQILTIEGNQWLSYKSFNGVRRFVLLGKASSVEKTEDKEKVSPQPQARITKTGRLTISNETTTGFDILITNIKDDNGIAAVKVPVWTEQGGQDDIKWYTAVTTGDGNYKVAVSFADHKNEKGLYNIHLYYQEASGTLVGVTGTKVTVAGTNSSQEPIENGLAKTGVYNIIGSTEVKNEAKISSQTQFTLEKGDKINYDQVLTADGYQWISYKSYSGVRRYIPVKKLTTSSEKAKDEATKPTSYPNLPKTGTYTFTKTVDVKSQPKVSSPVEFNFQKGEKIHYDQVLVVDGHQWISYKSYSGIRRYIEI

SEQ ID NO: 6067 - DNA, 1122 bp, Streptococcus pyogenes
atgaaaaaatttcatcgttttttggtctcaggagtaatccttttaggttttaatggtctagtacctactatgccatctacacttatttcgcaacaggaaaatcttgttcatgcagctgttttaggcgataactatccgagtaagtggaaaaaaggcaatggaatcgattcgtggaacatgtatatccgccaatgcacttcttttgcagcttttcgtttaagctctgctaatggttttcagttacctaaaggctacggtaatgcctgcacgtggggacatatcgcgaaaaatcagggttatcctgtgaataagacaccaagcataggggctatcgcttggtttgataaaaacgcttatcagtcaaatgctgcttacggtcatgtagcatgggtagctgatatccgtggagacactgtcactatcgaagagtataattacaacgctggacaaggccctgaaagataccataagcgtcaaattccaaaatctcaggtaagtggttatatccattttaaagacttatcatctcagacaagtcattcctacccaagacaactaaaacacatttctcaagcttcatttgacccctctggaacttatcactttacaaccagattaccagtcaaaggacaaaccagtatcgatagccctgatcttgcttactatgaagcaggtcaatctgtttattacgataaagtcgtgactgctggaggttatacatggcttagctacctcagtttttctggaaaccgacgctatattcccattaaagagcccgcacagtctgtggttcaaaatgacaatacaaaaccttccattaaggtcggtgatactgttaccttccctggcgtttttcgtgtagatcagcttgttaataatttgatcgttaataaagaattagccggaggagacccaactccactaaactggattgatcccacaccattagatgaaacagataaccaaggaaaagttttaggagatcaaattctccgtgtgggtgaatattttatcgtcactggtagttataaagtattaaaaattgatcaaccaagtaatggtatttatgttcaaatcggatctcgtggaacatgggtaaatgctgataaagctaacaaatta

SEQ ID NO: 6068 - protein, 374 aa, Streptococcus pyogenes
MKKFHRFLVSGVILLGFNGLVPTMPSTLISQQENLVHAAVLGDNYPSKWKKGNGIDSWNMYIRQCTSFAAFRLSSANGFQLPKGYGNACTWGHIAKNQGYPVNKTPSIGAIAWFDKNAYQSNAAYGHVAWVADIRGDTVTIEEYNYNAGQGPERYHKRQIPKSQVSGYIHFKDLSSQTSHSYPRQLKHISQASFDPSGTYHFTTRLPVKGQTSIDSPDLAYYEAGQSVYYDKVVTAGGYTWLSYLSFSGNRRYIPIKEPAQSVVQNDNTKPSIKVGDTVTFPGVFRVDQLVNNLIVNKELAGGDPTPLNWIDPTPLDETDNQGKVLGDQILRVGEYFIVTGSYKVLKIDQPSNGIYVQIGSRGTWVNADKANKL

SEQ ID NO: 6069 - DNA, 921 bp, Streptococcus agalactiae
atgttagtttatattgctggttcaggcgctatgggatgtcgttttggatatcaaatttctaaaacaaatcatgatgttattttacttgataattgggcagaccatattatggctattaaagaaaatggcttgaaggtaacaggtgatacagaggaccttgttaaacttcctatcatgaagccaactgatgcgacagaagaagcagatttaattattttgtttactaaagcaatgcagttgccaaatatgcttcaagatattaaaaaaattattggtaagaaaacaaaggtcttatgtcttttaaatggattaggacatgaagatgtcattcgtcaatatatccctgaacacaatattttgatgggagtaacagtttggactgcagggttgaaaggaccagggcatgctcatctggaaggagttggttctgtaaatcttcaaagtatcgatcctaacaatcaagaagcaggtcatcgcgttactgaattgcttaatgaagcaaaattacaggctacttatgacgaaaatgttttgccaaatatttggagaaaagcttgtgttaacggaacgatgaattcaacttgcgccttgctagattgtacaattggtcaactctttgctagtgaagacggcgtaaatatggtacatgaaattatccatgaatttgttactgttggaaaagcagaaggtgtagagcttgatgaagaagaaataacaaagtacgttatggatacatctgttaaagcagcccatcattacccttcaatgcatcaagacttagttcaaaatcagcgcttaactgaaattgatttcttaaatggcgcagtgaataaaaaaggtgaaaacctaggcattgatacaccttactgtcgattaatcacacaattaattcacactaaagaaaatgtacttagcataaaa

SEQ ID NO: 6070 - protein, 307 aa, Streptococcus agalactiae
MLVYIAGSGAMGCRFGYQISKTNHDVILLDNWADHIMAIKENGLKVTGDTEDLVKLPIMKPTDATEEADLIILFTKAMQLPNMLQDIKKIIGKKTKVLCLLNGLGHEDVIRQYIPEHNILMGVTVWTAGLKGPGHAHLEGVGSVNLQSIDPNNQEAGHRVTELLNEAKLQATYDENVLPNIWRKACVNGTMNSTCALLDCTIGQLFASEDGVNMVHEIIHEFVTVGKAEGVELDEEEITKYVMDTSVKAAHHYPSMHQDLVQNQRLTEIDFLNGAVNKKGENLGIDTPYCRLITQLIHTKENVLSIK

SEQ ID NO: 6071 - DNA, 921 bp, Streptococcus pyogenes
atgttagtttatattgctggctcaggagccatggggtgccgttttggttaccaaatttcaaaaacaaataacgatgtgattttgttagataactgggaagatcatatcaatgccattaaagaaaacggtttagtggtgacaggggatgtggaagaaacagttaagcttcctattatgaaaccgactgaagccactcaagaagccgatttgattatcttgtttacaaaagcaatgcagttgccacaaatgcttcaagacattaaaggcattattggaaaagaaaccaaagtgctttgccttttaaatggtcttggacacgaagacgttattcgtcagtacattccagagcacaacattttgatgggggtcactgtctggactgctggtctagaaggtcctggtcgtgctcatcttcaaggtgtgggagcacttaacttacaaagcatggatccaagcaatcaagaagctggacaccaagtggctgatttgttaaatgaagctaacttgaatgcgacttatgatgagaatgttgtgccaaacatctggcgaaaagcttgcgtgaatggtaccatgaactcaacttgtgcccttctagattgtacaattggtgaattatttgccagtgaagacggtctcaaaatggtaaaagaaatcatccatgagtttgttatcgttggtcaagcagaaggtgtcgaactaaacgaagaagaaatcacacaatatgtaatggatacatctgttaaagctgctcaccattacccatcaatgcaccaagaccttgtgcaaaatcaccgattgactgaaattgattttatcaatggtgcagtcaataccaaaggtgaaaagcttggtatcaatactccatactgccgtatgattacagagctagttcacgctaaagaagcagtgttgaacatccaa

SEQ ID NO: 6072 - protein, 307 aa, Streptococcus pyogenes
MLVYIAGSGAMGCRFGYQISKTNNDVILLDNWEDHINAIKENGLVVTGDVEETVKLPIMKPTEATQEADLIILFTKAMQLPQMLQDIKGIIGKETKVLCLLNGLGHEDVIRQYIPEHNILMGVTVWTAGLEGPGRAHLQGVGALNLQSMDPSNQEAGHQVADLLNEANLNATYDENVVPNIWRKACVNGTMNSTCALLDCTIGELFASEDGLKMVKEIIHEFVIVGQAEGVELNEEEITQYVMDTSVKAAHHYPSMHQDLVQNHRLTEIDFINGAVNTKGEKLGINTPYCRMITELVHAKEAVLNIQ

SEQ ID NO: 6073 - DNA, 495 bp, Streptococcus agalactiae
atgtctttacaaattttgtgtgatacaaaacctactgcaaaaggaataacgagccaagataagataacaatcaacatacttgctcctgcttcaaatgaagcaatcggacctactgcaccaacaagcccaaaaccagacgaagctggtgtccccaccaatttaaacaatgggactgttagagaacttactgtagcagtcataagcattggaatcgccattactggatgctttaggaaatttggcatcatcatcttcattgcacctaaagcaatagcaattggaactccagacttattagccttcatcgttgcccaaactagcactgctgttgttgaagcaactcccattgaagctgcacttgctgacataccattaagaccaatcgctagaccaatcgctactgttgaaataggacttacaataagcattgaaaaagccatcgcaattagaattgacatcgcaattggttgtaaagtagtaaaagaattaattcct

SEQ ID NO: 6074 - protein, 165 aa, Streptococcus agalactiae
MSLQILCDTKPTAKGITSQDKITINILAPASNEAIGPTAPTSPKPDEAGVPTNLNNGTVRELTVAVISIGIAITGCFRKFGIIIFIAPKAIAIGTPDLLAFIVAQTSTAVVEATPIEAALADIPLRPIARPIATVEIGLTISIEKAIAIRIDIAIGCKVVKELIP

SEQ ID NO: 6075 - DNA, 1068 bp, Streptococcus agalactiae
atgacaaatacggtaacaccaaaagagacggctggttcttttatcaataaagtgttaggtgggacagcaactgcaatcgttgtagcactcatcccaaatgctatcctagccacttttttgaaaccatttttatcttacggacttgctgcagagttcttacacatcgtgcaggtattccaatttttcacaccaattatggcaggatttttgattggtcaacagtttaaattcaccccaatgcaacagcttgctgttggaggtgctgcatatattggttctggtgcgtgggcttacacagaagttattcaaaaaggagttgctactggtagtttccaattgcgtgggattggtgatctcatcaatatgatgctaacagcagctttagcagttttagcagttaagtggtttggtaataaatttggttccctaaccattatcttgttacctattatcataggtacaggcgtaggctatttaggatggaaattactcccttacgtttcatatgtgacaacacttattggtcaaggaattaattcttttactactttacaaccaattgcgatgtcaattctaattgcgatggctttttcaatgcttattgtaagtcctatttcaacagtagcgattggtctagcgattggtcttaatggtatgtcagcaagtgcagcttcaatgggagttgcttcaacaacagcagtgctagtttgggcaacgatgaaggctaataagtctggagttccaattgctattgctttaggtgcaatgaagatgatgatgccaaatttcctaaagcatccagtaatggcgattccaatgcttatgactgctacagtaagttctctaacagtcccattgtttaaattggtggggacaccagcttcgtctggttttgggcttgttggtgcagtaggtccgattgcttcatttgaagcaggagcaagtatgttgattgttatcttatcttggctcgttattccttttgcagtaggttttgtatcacacaaaatttgtaaagacattctgaaactttataaagacgatattttcgtttttgaaggtcaaaat

SEQ ID NO: 6076 - protein, 356 aa, Streptococcus agalactiae
MTNTVTPKETAGSFINKVLGGTATAIVVALIPNAILATFLKPFLSYGLAAEFLHIVQVFQFFTPIMAGFLIGQQFKFTPMQQLAVGGAAYIGSGAWAYTEVIQKGVATGSFQLRGIGDLINMMLTAALAVLAVKWFGNKFGSLTIILLPIIIGTGVGYLGWKLLPYVSYVTTLIGQGINSFTTLQPIAMSILIAMAFSMLIVSPISTVAIGLAIGLNGMSASAASMGVASTTAVLVWATMKANKSGVPIAIALGAMKMMMPNFLKHPVMAIPMLMTATVSSLTVPLFKLVGTPASSGFGLVGAVGPIASFEAGASMLIVILSWLVIPFAVGFVSHKICKDILKLYKDDIFVFEGQN

SEQ ID NO: 6077 - DNA, 990 bp, Streptococcus agalactiae
atgaacaaaacaatttatgatatcactattgtaggaggcggaccagtaggtctctttgctgctttttatgctggactacgcggagtatccgttaaaattattgaaagcctttcggaattaggaggccagccagctatcctttatcctgagaaaaaaatctatgatattcctggttatccggtgattactggacgtgaattaattgataaacatattgaacaattagagagatttaaagattctattgaaatctgtttaaaagaagaagttttatcatttgaaaaagtagatgatgttttcacaattcaaacagataaagatcaacatttgtcacgtgctattgtttttgcttgtggcaacggtgcttttgctccgcgtttactaggtttggaaaatgaagaaaattatgcagataataatttattctataacgttacaaagttagaacagtttgcaggtaaacatgttgttatttgtggtggaggcgactcagctgttgattgggccaatgaattagataagattgcagctagtgtagcgattgttcatcgtagagatgcttttagagcgcatgagcatagtgtggatatactaaaggcatcaggtgttagaattttaaccccttatgtcccaattggtttaaatggagatagtcagagagttagcagcttggtcgttcaaaaagttaaaggtgatgaagtaattgaattacctttagacaacttgattgttagttttggcttttctacttctaataaaaatttacgttattggaatttggattataaacggtctagtatcaatgtttcttcactttttgagacgactcaagaaggcgtgtatgctattggagatgctgctaattatccaggaaaggtagaattgattgcaacaggatatggggaagcaccagtcgctataaaccaagctatcaattatatttatcctgatcgagataaccgtgtagtccattcaacatcattgataaaa

SEQ ID NO: 6078 - protein, 330 aa, Streptococcus agalactiae
MNKTIYDITIVGGGPVGLFAAFYAGLRGVSVKIIESLSELGGQPAILYPEKKIYDIPGYPVITGRELIDKHIEQLERFKDSIEICLKEEVLSFEKVDDVFTIQTDKDQHLSRAIVFACGNGAFAPRLLGLENEENYADNNLFYNVTKLEQFAGKHVVICGGGDSAVDWANELDKIAASVAIVHRRDAFRAHEHSVDILKASGVRILTPYVPIGLNGDSQRVSSLVVQKVKGDEVIELPLDNLIVSFGFSTSNKNLRYWNLDYKRSSINVSSLFETTQEGVYAIGDAANYPGKVELIATGYGEAPVAINQAINYIYPDRDNRVVHSTSLIK

SEQ ID NO: 6079 - DNA, 990 bp, Streptococcus pyogenes
gtgaaagataaagcatatgatattacgattattggtggtggtccaataggtttatttgcagccttttatgcaggtcttaggggcgtaacagtaaagattattgagagtttgtcagaacttggtggacagcctgccattctttatcctgagaaaatgatttatgatattccagcttatccatctttaacaggtgttgagttgacagaaaatttaataaaacaattgagccgttttgaagatcgtacaaccatttgtttaaaagaagaagtattaacctttgacaaggttaaaggtggtttttcgattaggactaataaggcagagcatttttcaaaagccattatcattgcttgtggaaatggcgcttttgcaccaagaactttagggttagaaagtgaggaaaactttgctgatcataaccttttttataatgttcaccagttggaccagtttgcgggacaaaaagttgtgatttgtggtggtggagattcagcagttgattgggctttggctttagaagatattgctgagagtgtgacggttgtgcaccgtcgtgatgctttcagagcacatgaacacagtgtggaattattgaaagcatcaacggtcaacctcttaacaccttatgtgccaaaagcattgaaaggaattggaaacctggctgaaaaattagttattcaaaaagtgaaagaagatgaagtgttagaacttgaattggacagtcttattgttagttttggtttttcaacttctaataagaatttgaaaaattggaatctcgactataagcgttcaagtattactgtttcaccactttttcaaacaagtcaagaaggtatttttgccattggtgatgcagccgcttataatgggaaagtggatttgattgctactggttttggcgaagcaccaacagcagttaatcaggccattaactatatttatccagatcgagataaccgtgtggtgcattcaacctctttaattgac

SEQ ID NO: 6080 - protein, 330 aa, Streptococcus pyogenes
VKDKAYDITIIGGGPIGLFAAFYAGLRGVTVKIIESLSELGGQPAILYPEKMIYDIPAYPSLTGVELTENLIKQLSRFEDRTTICLKEEVLTFDKVKGGFSIRTNKAEHFSKAIIIACGNGAFAPRTLGLESEENFADHNLFYNVHQLDQFAGQKVVICGGGDSAVDWALALEDIAESVTVVHRRDAFRAHEHSVELLKASTVNLLTPYVPKALKGIGNLAEKLVIQKVKEDEVLELELDSLIVSFGFSTSNKNLKNWNLDYKRSSITVSPLFQTSQEGIFAIGDAAAYNGKVDLIATGFGEAPTAVNQAINYIYPDRDNRVVHSTSLID

SEQ ID NO: 6081 - DNA, 753 bp, Streptococcus agalactiae
atgatgaagattgatattttaactttatttcctgaaatgtttgcccctctggaacattctatagttggtaaggcaaaagaaagaggacttcttgaaattaattatcacaatttcagagaaaatgctgagaagtctcgacatgttgatgatgagccttacggtggggggcaagggatgcttttacgtgctcaacctatttttgatacaattgataaaatagatgctcaaaaagcacgtgttattttgctagacccagcgggcagaacatttgatcaggattttgcagaagaactatccaaagaagatgaattaatttttatttgtggtcactatgaaggttatgatgaacgtataaaatcattagtaacagacgaagtatctttgggagattttgttcttacgggaggagaattggcggctatgacaatggtcgatgctaccgttcgtctgattccagaagttataggtaaagaaacaagtcatcaggatgattcattttcatcgggcctattagaatatcctcagtatacgcgcccatatgattatttaggcatgacagttcctgatgttctcatgagtggtcatcatgaaaatatccgaaaatggcgtttagaacaaagtttgcgaaaaacactagaacgtcgaccagacttgttagaaaattatgcaatgacggatgaagagagacttatcttagagaaaattaaaacagaaatagaaagaacagatacagtaaatgaacaaaacaattta

SEQ ID NO: 6082 - protein, 251 aa, Streptococcus agalactiae
MMKIDILTLFPEMFAPLEHSIVGKAKERGLLEINYHNFRENAEKSRHVDDEPYGGGQGMLLRAQPIFDTIDKIDAQKARVILLDPAGRTFDQDFAEELSKEDELIFICGHYEGYDERIKSLVTDEVSLGDFVLTGGELAAMTMVDATVRLIPEVIGKETSHQDDSFSSGLLEYPQYTRPYDYLGMTVPDVLMSGHHENIRKWRLEQSLRKTLERRPDLLENYAMTDEERLILEKIKTEIERTDTVNEQNNL

SEQ ID NO: 6083 - DNA, 729 bp, Streptococcus pyogenes
atgaagattgatattttaaccctttttcctgaaatgtttgcccctctagagcattccattgtaggcaaggcaaaagaaaaaggtctgttagacattcactaccataactttcgagattatgctgaaaaagctcgtcatgtggatgacgaaccctatggtgggggccaaggcatgttattgagagcgcagcccatttttgacaccattgaacagattgaagccaaaaaaccaaggattattcttttagatccagcaggtaaaccctttactcaggcttatgctgaagaattagctcttgaggaagagttaatttttatttgtggtcattatgaaggttatgatgagcggattaagaccttggtgacggatgaaatttcattaggcgactttgtattaacaggaggtgagttggcggccatgactatggtggatgcgaccgtcaggttaattccacaggtacttgggaaagaaagtagccatcaggacgattctttttcatcaggacttttagaataccctcaatacacaagaccttatgattatcgtggtatgacagttccagatgttctaatgagtggtcatcacgaacgtattcgcttgtggcgtctagaagaaagtctcaaaaaaacttatttaaggcggccagatttacttgaacattacaatttttccgaggaagagcgcaagctattggataagattaaagaagcattggatcaaggagaagat

SEQ ID NO: 6084 - protein, 243 aa, Streptococcus pyogenes
MKIDILTLFPEMFAPLEHSIVGKAKEKGLLDIHYHNFRDYAEKARHVDDEPYGGGQGMLLRAQPIFDTIEQIEAKKPRIILLDPAGKPFTQAYAEELALEEELIFICGHYEGYDERIKTLVTDEISLGDFVLTGGELAAMTMVDATVRLIPQVLGKESSHQDDSFSSGLLEYPQYTRPYDYRGMTVPDVLMSGHHERIRLWRLEESLKKTYLRRPDLLEHYNFSEEERKLLDKIKEALDQGED

SEQ ID NO: 6085 - DNA, 681 bp, Streptococcus agalactiae
ttggttcgaatccagctaccccagtttacatggtccgttggtcaaggggttaagacaccgccttttcacggcggtaacacgggttcgaatcccgtacggactatcgtggccagttgcattttagcggctggtttttcttttattttcaaaaatatcggagttactatggaatactttaacgttggaaaaattgtcaatacacaaggattacaaggcgaaatgcgtgtattaagcgtgactgactttgtagaagaacgctttaaaaaaggtcaagtgttagctttattcgatgaaaagaatcagtttgttatggatattgaaattgctagtcatcgtaagcagaagaattttgacattataaaattcaaaggaatgtatcatattaatgatattgaaaaatataaaggtttcacactgaaggtggcagaggatcaactgagcgaccttaaagatggtgaattttattatcatgaaattattggcttagatgtctatgaaggggaagagctgattggaaaaatcaaagaaattttacaaccaggagcaaatgacgtttgggttgtggaacgtcatggaaaacgtgatcttttattaccctatatcccgccagtagtattagaagtggacctttctaatcagcgtgttcaagttgaattgatggaaggtttagatgatgaagat

SEQ ID NO: 6086 - protein, 227 aa, Streptococcus agalactiae
MVRIQLPQFTWSVGQGVKTPPFHGGNTGSNPVRTIVASCILAAGFSFIFKNIGVTMEYFNVGKIVNTQGLQGEMRVLSVTDFVEERFKKGQVLALFDEKNQFVMDIEIASHRKQKNFDIIKFKGMYHINDIEKYKGFTLKVAEDQLSDLKDGEFYYHEIIGLDVYEGEELIGKIKEILQPGANDVWVVERHGKRDLLLPYIPPVVLEVDLSNQRVQVELMEGLDDED

SEQ ID NO: 6087 - DNA, 516 bp, Streptococcus pyogenes
atggaatattttaatgttggaaaaattgtcaacacgcaaggcctgcaaggagagatgcgcgtgttgtctgtcagtgattttgctgaggaacgctttaaaaaaggctcacaattagctttatttgatgataaagatcggtttgttcaagaagtgacaattgttagtcaccgtaaacaaaagcattttgatattatcaaatttaaagacatgtatcatattaatgctattgaaaagtacaagggatacactttaaaggtctcaaaagacaatcaaggggatttacaagaaggagaattttattaccatcagattattggcatggctgtttatgaaaaggatgtccttattggacatgttaaggaaatcttgcagccaggtgctaatgatgtttggatagtgaaacgccaaggaaaacgagacttgctcttaccatatattcccccagtagttcttaacgtagatgttcctaacaagcgcgtggatgttgaattgatggaaggcttagacgatgaagat

SEQ ID NO: 6088 - protein, 172 aa, Streptococcus pyogenes
MEYFNVGKIVNTQGLQGEMRVLSVSDFAEERFKKGSQLALFDDKDRFVQEVTIVSHRKQKHFDIIKFKDMYHINAIEKYKGYTLKVSKDNQGDLQEGEFYYHQIIGMAVYEKDVLIGHVKEILQPGANDVWIVKRQGKRDLLLPYIPPVVLNVDVPNKRVDVELMEGLDDED

SEQ ID NO: 6089 - DNA, 1308 bp, Streptococcus agalactiae
atgcagacaacgaaaaaagaaaggaatacgcacatgtcagaattgctagataagatattatctcggaacaatatgctcgaagcttacaagcaagtgaaatcaaacaaaggttctgctggtatcaatggggtcactatcgagcagatggatgactatcttcaccaaaattggcgagaaaccaagcaactcatcaaagagaggagctataaacctcaaccggttctcagggttgaaatcccaaaaccaaacggaggagttcgtaacctaggtatcccgacggctatggatagaatgattcagcaggccatcgttcaagttttgagtccactctgcgaaaaacatttttcagagtatagctatgggttcagacccaatcgctcctgcgaaacagccattgttcagctacttgagtatttaaacgatggctacgagtggattgtggacattgacttggaaaagttcttcgatactgttccgcaagacagattgatgtccctggttcataatatcattcaagatggcgatacggagtcactgattcgtaagtacctccattcgggagttgttattaacggacagcgacataagactttagtcgggacacctcaaggcgggaatctatcacccctcctatctaatattatgcttaatgagttagacaaagggttggaaaagcgaggtcttcgctttgtccgttacgccgatgactgtgtcatcactgtcggaagcgaagcagctgctaagcgggtcatgcattcggtcagtagctatattgagaagcgattagggttgaaagtcaacatgactaagaccaagattgtcagaccgaacaaactcaaatacctcggatttggtttctggaaatctccaaaaggttggaagtgtcgtcctcaccaagacagcgttcagagctttaagcgaaaactgaagcaactgacgatgaggaaatggagcattgacctgataactcgcattgaacgattgaactgggtcattcgaggatggataaactatttctcgcttggcaatatgaagagtatcatgacacaaatagatgagcgtctgcgaacccgtattcgagtgattatctggaagcaatggaagaagaaagcaaagcgcctatggggactcttaaaactaggagttgctagatggatagccgataaagtttctggatggggtgaccactatcagttggtagctcagaagtcggtactcaaacgtgctatatcaaaaccagccctcgcaaagcgaggactggtcagttgcttagattactatcttgaacgacatgcgttaaaagttagt

SEQ ID NO: 6090 - protein, 436 aa, Streptococcus agalactiae
MQTTKKERNTHMSELLDKILSRNNMLEAYKQVKSNKGSAGINGVTIEQMDDYLHQNWRETKQLIKERSYKPQPVLRVEIPKPNGGVRNLGIPTAMDRMIQQAIVQVLSPLCEKHFSEYSYGFRPNRSCETAIVQLLEYLNDGYEWIVDIDLEKFFDTVPQDRLMSLVHNIIQDGDTESLIRKYLHSGVVINGQRHKTLVGTPQGGNLSPLLSNIMLNELDKGLEKRGLRFVRYADDCVITVGSEAAAKRVMHSVSSYIEKRLGLKVNMTKTKIVRPNKLKYLGFGFWKSPKGWKCRPHQDSVQSFKRKLKQLTMRKWSIDLITRIERLNWVIRGWINYFSLGNMKSIMTQIDERLRTRIRVIIWKQWKKKAKRLWGLLKLGVARWIADKVSGWGDHYQLVAQKSVLKRAISKPALAKRGLVSCLDYYLERHALKVS

SEQ ID NO: 6091 - DNA, 3270 bp, Streptococcus agalactiae
ttgcgtaaaaaacaaaaactaccatttgataaacttgccattgcgcttatatctacgagcatcttgctcaatgcacaatcagacattaaagcaaatactgtgacagaagacactcctgctaccgaacaagccgtagaacccccacaaccaatagcagtttctgaggaatcaccatcatcaaaggaaactaaaacctcacaaactcctagtgatgtaggagaaacagtagcagatgacgctaatgatctagcccctcaagctcctgctaaaactgctgatacaccagcaacctcaaaagcgactattagggatttgaacgacccttctcatgtcaaaaccctgcaggaaaaagcaggcaagggagttgggaccgttgttgcagtgattgatgctggttttgataaaaatcatgaagcgtggcgcttaacagacaaaactaaagcacgttaccaatcaaaagaaaatcttgaaaaagctaaaaaagagcacggtattacctatggcgagtgggtcaatgataaggttgcttattaccacgactatagtaaagatggtaaaaacgctgttgatcaagaacacggcacacacgtgtcagggatcttgtcaggaaatgctccatctgaaatgaaagaaccttaccgcctagaaggtgcgatgcctgaggctcaattgcttttgatgcgtgtcgaaattgtaaatggactagcagactatgctcgtaactacgctcaagctatcagagatgctgtcaacttgggagctaaggtgattaatatgagctttggtaatgctgcactagcttacgccaaccttccagacgaaaccaaaaaagcctttgactatgccaaatcaaaaggtgttagcattgtgacctcagctggtaatgatagtagctttgggggcaagccccgtctacctctagcagatcatcctgattatggggtggttgggacacctgcagcggcagattcaacattgacagttgcttcttacagcccagataaacagctcactgaaactgctacggtcaaaacagacgatcatcaagataaagaaatgcctgttctttcaacaaaccgttttgagccaaacaaggcttacgactatgcttatgctaatcgtggtacgaaagaggatgattttaaggatgtcgaaggtaagattgcccttattgaacgtggcgatattgatttcaaagataagattgcaaacgctaaaaaagctggtgctgtaggggtcttgatctatgacaatcaagacaagggcttcccgattgaattgccaaatgttgaccagatgcctgcggcctttatcagtcgaagagacggtctcttattaaaagacaatccccaaaaaaccattaccttcaatgcgacacctaaggtattgccaacagcaagtggcaccaaactaagccgcttctcaagctggggtctgacagctgacggcaatattaagccggatattgcagcacccggccaagatattttgtcatcagtggctaacaacaagtatgccaaactttctggaactagtatgtctgcaccattggtagcgggtatcatgggactgttgcaaaagcaatatgagacacagtatcctgatatgacaccatcagagcgtcttgatttagctaagaaagtattgatgagctcagcaactgccctatatgatgaagatgaaaaagcttatttttctcctcgccaacagggagcaggagcagtcgatgctaaaaaagcttcagcagcaacgatgtatgtaacagataaggacaatacctcaagcaaggttcacctgaacaatgtttctgataaatttgaagtaacagtaacagttcacaacaaatctgataaacctcaagagttgtattaccaagtaactgttcaaacagataaagtagatggaaaacactttgccttggctcctaaagcattgtatgagacatcatggcaaaaaatcacaattccagccaatagcagcaaacaagtcaccgttccaatcgatgctagtcgatttagcaaggacttgcttgcccaaatgaaaaatggctatttcttagaaggttttgttcgtttcaaacaagatcctacaaaagaagagcttatgagcattccatatattggtttccgaggtgattttggcaatctgtcagccttagaaaaaccaatctatgatagcaaagacggtagcagctactatcatgaagcaaatagtgatgccaaagaccaattagatggtgatggattacagttttacgctctgaaaaataactttacagcacttaccacagagtctaacccatggacgattattaaagctgtcaaagaaggggttgaaaacatagaggatatcgaatcttcagagatcacagaaaccatttttgcaggtacttttgcaaaacaagacgatgatagccactactatatccaccgtcacgctaatggcaaaccatatgctgcgatctctccaaatggggacggtaacagagattatgtccaattccaaggtactttcttgcgtaatgctaaaaaccttgtggctgaagtcttggacaaagaaggaaatgttgtttggacaagtgaggtaaccgagcaagttgttaaaaactacaacaatgacttggcaagcacacttggttcaacccgttttgaaaaaacgcgttgggacggtaaaaataaagacggcaaagttgttgctaacggaacctacacctatcgtgttcgctacacgccgattagctcaggtgcaaaagaacaacacactgattttgatgtgattgtagacaatacgacacctgaagtcgcaacatcggcaacattctcaacagaagatagtcgtttgacacttgcatctaaaccaaaaaccagccaaccggtttaccgtgagcgtattgcttacacttatatggatgaggatctgccaacaacagagtatatttctccaaatgaagatggtacctttactcttcctgaagaggctgaaacaatggaaggcgctactgttccattgaaaatgtcagactttacttatgttgttgaagatatggctggtaacatcacttatacaccagtgactaagctattggagggccactctaataagccagaacaagacggttcagatcaagcaccagacaaaaaaccagaagctaaaccagaacaagacggttcaggtcaaacaccagataaaaaaaagaaactaaaccagaaaaagatagttcaggtcaaacaccaggtaaaactcctcaaaaaggtcaatcttctcgtactc

SEQ ID NO: 6092 - protein, 1090 aa, Streptococcus agalactiae
MRKKQKLPFDKLAIALISTSILLNAQSDIKANTVTEDTPATEQAVEPPQPIAVSEESPSSKETKTSQTPSDVGETVADDANDLAPQAPAKTADTPATSKATIRDLNDPSHVKTLQEKAGKGVGTVVAVIDAGFDKNHEAWRLTDKTKARYQSKENLEKAKKEHGITYGEWVNDKVAYYHDYSKDGKNAVDQEHGTHVSGILSGNAPSEMKEPYRLEGAMPEAQLLLMRVEIVNGLADYARNYAQAIRDAVNLGAKVINMSFGNAALAYANLPDETKKAFDYAKSKGVSIVTSAGNDSSFGGKPRLPLADHPDYGVVGTPAAADSTLTVASYSPDKQLTETATVKTDDHQDKEMPVLSTNRFEPNKAYDYAYANRGTKEDDFKDVEGKIALIERGDIDFKDKIANAKKAGAVGVLIYDNQDKGFPIELPNVDQMPAAFISRRDGLLLKDNPQKTITFNATPKVLPTASGTKLSRFSSWGLTADGNIKPDIAAPGQDILSSVANNKYAKLSGTSMSAPLVAGIMGLLQKQYETQYPDMTPSERLDLAKKVLMSSATALYDEDEKAYFSPRQQGAGAVDAKKASAATMYVTDKDNTSSKVHLNNVSDKFEVTVTVHNKSDKPQELYYQVTVQTDKVDGKHFALAPKALYETSWQKITIPANSSKQVTVPIDASRFSKDLLAQMKNGYFLEGFVRFKQDPTKEELMSIPYIGFRGDFGNLSALEKPIYDSKDGSSYYHEANSDAKDQLDGDGLQFYALKNNFTALTTESNPWTIIKAVKEGVENIEDIESSEITETIFAGTFAKQDDDSHYYIHRHANGKPYAAISPNGDGNRDYVQFQGTFLRNAKNLVAEVLDKEGNVVWTSEVTEQVVKNYNNDLASTLGSTRFEKTRWDGKNKDGKVVANGTYTYRVRYTPISSGAKEQHTDFDVIVDNTTPEVATSATFSTEDSRLTLASKPKTSQPVYRERIAYTYMDEDLPTTEYISPNEDGTFTLPEEAETMEGATVPLKMSDFTYVVEDMAGNITYTPVTKLLEGHSNKPEQDGSDQAPDKKPEAKPEQDGSGQTPDKKKKLNQKKIVQVKHQVKLLKKVNLLVL

SEQ ID NO: 6093 - DNA, 1332 bp, Streptococcus agalactiae
atggaagttaaaaaattctcggaaaaagattttgtaaatgaaataaataaaataaaacagaaacaatttttaagtcaaattgaacagtatgaaagctatatcgctcctcaaatgagaacgaaaggctataagaggatcaatcagtctgaacgtacggttgttttctcttttggagaaataacatttagtaggagtcgctggacaaatggctttgaaactagaataccagtagatgagtggttaggtcttgaaaaatataagagatattcaatagaattcttatatcatgttgcaaaattggctacaatgatgccttatcgtcaagtttgcaaagtaatagatagcactttgcaaacaatcataacaaaagactgtgttttaaaagcagtaaaatttgtagaaaaattgttaaaagaaaaagaacgctatcgtttttatttggaagagccacccgaacgtaaaaaagtgaaaaaactgtatgttgagggtgatggagtcatgattaaaagcacagattctagagaggaaagaaggtatttagatttaacacattttgttattcatacaggctcaaaaaaagtttctactaaaagatatgaattgcgggacaagcacgaaatattacagcttaattatgataaagctaaatataatcttttagattatatttataataactatgaagtagatgacgatactattttaatcactaactctgatatgggtaaaggctatactagtagagtttttaaggaattaggaaaagcacttaaggtaaagaaacatgagcatttttgggatatctatcatgttaaagaaaagttaagttcataccttagaaaatatccaattgaattaaccgattttgctttagatgcggtaaaaaaatataattctgataagcttgaattagtttttgatactgttgaatcactgatttgtgatgaacttgaagatcaagaatttcagaagtttaagaaaaaagtattaaataatttcaaatatataaaaccagctcatcttagaaatctttcaaatcgtggtattggtatcatggaatcacaacacagaaagataacgtatagaatgaagcgacgtggcatgtattggtcaaagtggggaatctccacaatggcaaatatgattatacttgaaagagctaacggtttacgagaattatttttcggttcttggagaaaggtatacagtgagtataaagaaggttcatttagtgcagggcgactttttaaaaagacagatgaattagataaattttctaagccccttctaaaaaatggcagaaaatggagtataacaggaatcaaaacaaaa

SEQ ID NO: 6094 - protein, 444 aa, Streptococcus agalactiae
MEVKKFSEKDFVNEINKIKQKQFLSQIEQYESYIAPQMRTKGYKRINQSERTVVFSFGEITFSRSRWTNGFETRIPVDEWLGLEKYKRYSIEFLYHVAKLATMMPYRQVCKVIDSTLQTIITKDCVLKAVKFVEKLLKEKERYRFYLEEPPERKKVKKLYVEGDGVMIKSTDSREERRYLDLTHFVIHTGSKKVSTKRYELRDKHEILQLNYDKAKYNLLDYIYNNYEVDDDTILITNSDMGKGYTSRVFKELGKALKVKKHEHFWDIYHVKEKLSSYLRKYPIELTDFALDAVKKYNSDKLELVFDTVESLICDELEDQEFQKFKKKVLNNFKYIKPAHLRNLSNRGIGIMESQHRKITYRMKRRGMYWSKWGISTMANMIILERANGLRELFFGSWRKVYSEYKEGSFSAGRLFKKTDELDKFSKPLLKNGRKWSITGIKTK

SEQ ID NO: 6095 - DNA, 615 bp, Streptococcus agalactiae
atgggaaaaatggttaagaaaaaagtaaagaaaaaaagtggttgtggtggatgtttaagtttaataatagtgataattattgttagtagtgttataaatttatttacaggttctgaaagcagtaatacttctaaaaagaataagacaaatcctagtggtgcgacaagtgcaaaagtcgttaaacacaaaaaaactgatgaagaacgagcagaagattatataaaaacgttaggattaaacccgagtgattatataaaagaaatggattattcaaaggttgattttaggggggatttatcatcagtatcaggtaattataataattttactgttgaaaacatcaatcaaacttttgaaaaaggtgataaatctttaaaagatattattgaaatttttggaaagcctgatacaatttgggttaattacgttgacaatcagtacaatactgatttgtactggaaaaaagatgacacagatgattctaattatattcatgcagaatggtctgagccaaaagatgaatatgatgttcaaagtttaagtggcacggcttcaaattcaggtactggcaagtttcagtcattcattggattagatggatttgagcctgcacag

SEQ ID NO: 6096 - protein, 205 aa, Streptococcus agalactiae
MGKMVKKKVKKKSGCGGCLSLIIVIIIVSSVINLFTGSESSNTSKKNKTNPSGATSAKVVKHKKTDEERAEDYIKTLGLNPSDYIKEMDYSKVDFRGDLSSVSGNYNNFTVENINQTFEKGDKSLKDIIEIFGKPDTIWVNYVDNQYNTDLYWKKDDTDDSNYIHAEWSEPKDEYDVQSLSGTASNSGTGKFQSFIGLDGFEPAQ

SEQ ID NO: 6097 - DNA, 258 bp, Streptococcus agalactiae
atgactatgtttataagaaagaggatgaatatggcatttgaaccaaaaaattcggaactaacaaaagttctaaaagaaagtttagatgaagaaaagaaagaaattttctcatctgaaatgaatattagggactttgaacgtacaaaacaatatcaatttacacttcaaccttcagtccgaaaaaaaattgataggctatcaaaagaaaaaggctatcgttcagcatcatcttttataaatgacttttttaaaaatttg

SEQ ID NO: 6098 - protein, 86 aa, Streptococcus agalactiae
MTMFIRKRMNMAFEPKNSELTKVLKESLDEEKKEIFSSEMNIRDFERTKQYQFTLQPSVRKKIDRLSKEKGYRSASSFINDFFKNL

SEQ ID NO: 6099 - DNA, 375 bp, Streptococcus agalactiae
ttgtgtcttttaaaacagattgtaacacacaaagttttgtctacttttatagtatacatccatctttctgaaagacttgaagaatttaaaacagaggcatttgactttaaaactcgagcaagttatgtcacagcaaaattattctttttaggtaatatgataaagcataataccaactcttcaaaagaattaataagatcactaaagaatgataaatcagttcttgcaatgattcctcataaagagttatttaaccgctcaacattggacaaaaagtctctatcttatatgatgtctgataaagaattatattcaagagatagtaaattcttcaaagaaattgattttacatttaggaaaattactgataaacta

SEQ ID NO: 6100 - protein, 125 aa, Streptococcus agalactiae
MCLLKQIVTHKVLSTFIVYIHLSERLEEFKTEAFDFKTRASYVTAKLFFLGNMIKHNTNSSKELIRSLKNDKSVLAMIPHKELFNRSTLDKKSLSYMMSDKELYSRDSKFFKEIDFTFRKITDKL

SEQ ID NO: 6101 - DNA, 288 bp, Streptococcus agalactiae
atgtctagaaaagtacgtcgtcacttcaccgatgattttaagcaacaaattgttgacctttacaatgttggtagaaagcgtagcagtctcatcaaggtatatgagctaaccccttccaccttcgataagtgggttagacaagccaaaacaactggttcattcaagtctattgataatctgacagatgaacagcgggagctaattgaactcagaaaacacaataaagaactcgaaatgcaattagatatcctaaagcaagcagtggtgattatggcacaaaaagggaaa

SEQ ID NO: 6102 - protein, 96 aa, Streptococcus agalactiae
MSRKVRRHFTDDFKQQIVDLYNVGRKRSSLIKVYELTPSTFDKWVRQAKTTGSFKSIDNLTDEQRELIELRKHNKELEMQLDILKQAVVIMAQKGK

SEQ ID NO: 6103 - DNA, 777 bp, Streptococcus agalactiae
atgtgtcgctggctgaatatgccacactcaagttattactatcaagccgtggagtcagtatctgaaacggagtttgaagaaactattaaaagaattttcctcgatagcgagtccagatacggatccagaaaaatcaaaatatgcttgaataacgaaggtatcacactttcacgtcgtcggattcgacgcattatgaagcgactcaatttggtttctgtttatcagaaagccaccttcaaaccacattctagaggcaagaatgaagcccctattcccaaccacttagacaggcaatttaagcaagaaagaccactacaggccttagtcactgacttaacctatgttcgtgtaggcaatcgttgggcttatgtttgcctcatcattgacctatacaaccgtgaaatcatcggcctgtctcttggttggcacaagaccgctgaactcgttaagcaagccatacaaagcatcccttacgccctgaccaaagtcaagatgttccattcagatcgtrgcaaagagtttgataatcagttaattgatgaaatattggaagcctttggaatcacacgttcgcttagtcaggctggttgtccttatgacaatgccgtagctgaaagtacgtatcgtgctttcaaaattgaatttgtttatcaagaaacctttcaattgctggaagaactagctcttaagactaaagactatgttcattggtggaattaccaccgcattcatggtagtctcaactaccaaacaccaatgactaaaagattaattgcc

SEQ ID NO: 6104 - protein, 259 aa, Streptococcus agalactiae
  MISC_FEATURE (1)..(259): Xaa = Any Amino Acid
MCRWLNMPHSSYYYQAVESVSETEFEETIKRIFLDSESRYGSRKIKICLNNEGITLSRRRIRRIMKRLNLVSVYQKATFKPHSRGKNEAPIPNHLDRQFKQERPLQALVTDLTYVRVGNRWAYVCLIIDLYNREIIGLSLGWHKTAELVKQAIQSIPYALTKVKMFHSDRXKEFDNQLIDEILEAFGITRSLSQAGCPYDNAVAESTYRAFKIEFVYQETFQLLEELALKTKDYVHWWNYHRIHGSLNYQTPMTKRLIA

SEQ ID NO: 6105 - DNA, 1167 bp, Streptococcus agalactiae
atggattttttcaattttagatttaaagattcagacagtactagtagtttttggtattatattttgagatcatgttataataaaaaattgtctagcgatttatggagtgatattgagaaattaatttcagtacatctaaaaaacattataacactatataataacgaaacaattttaagtggcaaagatattgagagtatatatatcgaaacattaagcactgattactcaagaaatgattactctaccagtgaggagctaacgcaaaaagcactccataattttttgtggaatcataatggtatacctattgttccagaactagataatttattattactaattcaaaaagatttaaaaatagtcgaagatgagttttgttcttatttaactaatcaaatagagatccaggaacaatcaaaagatgattattttaaagatataactaatttgggaaataattacttattaaaatctcgaattatttttgaactcttgtataaaagtaatatttctagtgcattcacatgtaattcttttgttgcactacatgattttcataacgaaaattgtttcaattcctatgaaggatttcttagctacatttatgacttagaaagtaataatgaatttaatgttgaaacatcaatattgaattttaattatacattacctagaatagataaattacaacgtaatattcatggaaccctgaatgataaaaatattatttttggaatagattatgattctttaattgatatacaaaaagataaaaatgttaccctgcctgttgaatttaccaaatcatacaggatattacagaacggaaatatatttcaatatccaattccctctgaactaacttttataaaattttatggtcatggtctgggtgaagcagactattcttattttcaatcaatttttgactcaattaatctttattccagtgacactgtactaattttctattggagttgttataacgagaatattagggaacaaattaaatctcaacaagttcatgcagtacataaattaattgaaaaatatggagatacttttaataataagaatcatggcagaaatttattcacaaaacttcaattagaaaatcgtttaattattcaagaaatactttataatgatattctaaatccatat

SEQ ID NO: 6106 - protein, 389 aa, Streptococcus agalactiae
MDFFNFRFKDSDSTSSFWYYILRSCYNKKLSSDLWSDIEKLISVHLKNIITLYNNETILSGKDIESIYIETLSTDYSRNDYSTSEELTQKALHNFLWNHNGIPIVPELDNLLLLIQKDLKIVEDEFCSYLTNQIEIQEQSKDDYFKDITNLGNNYLLKSRIIFELLYKSNISSAFTCNSFVALHDFHNENCFNSYEGFLSYIYDLESNNEFNVETSILNFNYTLPRIDKLQRNIHGTLNDKNIIFGIDYDSLIDIQKDKNVTLPVEFTKSYRILQNGNIFQYPIPSELTFIKFYGHGLGEADYSYFQSIFDSINLYSSDTVLIFYWSCYNENIREQIKSQQVHAVHKLIEKYGDTFNNKNHGRNLFTKLQLENRLIIQEILYNDILNPY

SEQ ID NO: 6107 - DNA, 1209 bp, Streptococcus agalactiae
gtgagaatccaaatggcaacaaaaagtagtaaaaaatacaaaggtgtttattgtgataataagggaaagatattttatcagattgatcttggaatcgacccagtaactggcaaaagggtacaaaagaaagctagaaaaaatcaatatggtaaaacctttgaaacaatgaaagaagcatatgacgaattagttcgtataaaatatgaatttgccaacaaagtcagtttagaaaattacaatatgacttttgaaaactatatgaacaaaatttatttaagagcatataagcaaaaggttcagtctgtgacatataagacggctcttcctcatcataaactttttattcaatattttggtttaaagccattaaaagcaataactcctagagattgcgaagcttttagattgcatatcatagagaattattctgaaaactatgcgaaaaatttatggtcaaggtttaaagcttgtatgggttatgcagaaagacttggctatatttcaaatatgccttgtaaagcattagataatcctagaggtaaacatccagaaactccattttggacctatgcggagtttcagacatttatcaaatcatttgacttacatgattatgaagaattgcaacgatttactgccatctggttatattatatgacaggtgtacgagtgagcgaaggtttatctttatgttgggaggatattgattttgataaaaaatttctaaaggtacatacaaccttagagaaagatgaaaatggtaattggtatcgtaaagaccaaacaaagactccagcaggtgaacgacttattgaattggatgatattactattgaagtacttcaagtttggcgaaaaaatcagtttgcaaatcaagatacagattttatcatttcaagatttggagatcctttttgcaaatcaaccatttgtcgcatcatcaaacggaaagctcaacaggtaggagttccagtaattacaggaaaaggtctcagacatagccatgcatcctatctaatcaatgtcttgaaaaaagatattttatatgtagccagacgtatgggacatgccgataaatcaacaactttgaatacttacagtcactggtttaatgctttagataaaacagtttctgaagaaatcacacaaaatatcaaaagtgcaggattggattcaattttatgccaaaattcctgccaaacttcaaat

SEQ ID NO: 6108 - protein, 403 aa, Streptococcus agalactiae
MRIQMATKSSKKYKGVYCDNKGKIFYQIDLGIDPVTGKRVQKKARKNQYGKTFETMKEAYDELVRIKYEFANKVSLENYNMTFENYMNKIYLRAYKQKVQSVTYKTALPHHKLFIQYFGLKPLKAITPRDCEAFRLHIIENYSENYAKNLWSRFKACMGYAERLGYISNMPCKALDNPRGKHPETPFWTYAEFQTFIKSFDLHDYEELQRFTAIWLYYMTGVRVSEGLSLCWEDIDFDKKFLKVHTTLEKDENGNWYRKDQTKTPAGERLIELDDITIEVLQVWRKNQFANQDTDFIISRFGDPFCKSTICRIIKRKAQQVGVPVITGKGLRHSHASYLINVLKKDILYVARRMGHADKSTTLNTYSHWFNALDKTVSEEITQNIKSAGLDSILCQNSCQTSN

SEQ ID NO: 6109 - DNA, 381 bp, Streptococcus pyogenes
ttgaaagttcatacaaccttggaaaaggatgaaaatggaaattggtatcgtaaagaccaaacaaaaacgccagcaggagaacgtcttattgagttagatgatgtgacaatagtagtattggaaaattggagaagaaatcaagtagtcaatactgacacagatttcattatttcacggtttggtgaaccattttgtaaatcaacgatttgtcgagttattaagcacaaagctcaaagtattggagttcccgtaataactggaaaaggattgcgacatagttatgcttcctatcttattaatgttttgaaaaaagacattctgtacgttgcaaagtgtatgggacatgctgataagtctacaactttgaatacatatagtcac

SEQ ID NO: 6110 - protein, 127 aa, Streptococcus pyogenes
LKVHTTLEKDENGNWYRKDQTKTPAGERLIELDDVTIVVLENWRRNQVVNTDTDFIISRFGEPFCKSTICRVIKHKAQSIGVPVITGKGLRHSYASYLINVLKKDILYVAKCMGHADKSTTLNTYSH

SEQ ID NO: 6111 - DNA, 225 bp, Streptococcus agalactiae
atgagaactgctacatataaagatttaatgaacttaggatttcctgaacatacctctagagacattattcgtgaagctaaaaaaattgctgtaaaaaagtttgaagaagctcgcaaagttgaccataatgcggtacaattaagtaaatcgccctttgacaatcgaagactaggtatcgcaccagcagaaattgtggaacaattaatagggattccactatctaaa

SEQ ID NO: 6112 - protein, 75 aa, Streptococcus agalactiae
MRTATYKDLMNLGFPEHTSRDIIREAKKIAVKKFEEARKVDHNAVQLSKSPFDNRRLGIAPAEIVEQLIGIPLSK

SEQ ID NO: 6113 - DNA, 225 bp, Streptococcus agalactiae
ttgatgtaccgacgtttaagggatttgagagaagacaatgatttcactcaaaaatacgttgccgaaaagctttcgtttacccactctgcttattcaaaaattgagagaggagaacgtattttatcggcagatgtaataataaaactttcaaatctatataacgttagtacagattatttgttggggcaaactgactttccccaccgaataaagaataatttaaaa

SEQ ID NO: 6114 - protein, 75 aa, Streptococcus agalactiae
MMYRRLRDLREDNDFTQKYVAEKLSFTHSAYSKIERGERILSADVIIKLSNLYNVSTDYLLGQTDFPHRIKNNLK

SEQ ID NO: 6115 - DNA, 1863 bp, Streptococcus agalactiae
atggtcatcactaagcattatgctgttcatgggaaaaaataccgccgtcaattgattaagtatattcttgatcctaagaaaaccaggaatttatcattgatttcagattttgggatgagtaattatcttgattttcctgactatgtggaactggtgaagatgtatcaaaataattttctttcaaatgaccaactctacgactcacggtttgatagacaagagaaaaagcaacagaaaatacatgctcatcatattattcagtctttctcacctgaagataaattaagcccagaggaaatcaatcgtattggctatgaaacgataaaagagttgataggtggtcaatataaattcattgttgccactcatgttgatcaggaccattgtcataatcacattattatcaactcaatcaatagccaatctcaaaaaaagttgaagtgggactacgctcttgaaagaaatttacaaatgatttcggatagaatttctaaagtagcgggtgctaaaatcattccacctaaacgttattctcatagagattatgaggtctatcgacgttctaatcacaaatacgaattgaagcagcggttattttttctcatggaacattcaattgatttcaatgattttatgcaaaaagctgagcaactaaatgtcaaaatagatttctcaaggaaacatagccgattttttatgacagatagaaatatgaagcaagtcatccaaggagataagctgaataagagagaaccctattcaaaagaatattttcaacgttactttgccaagaaaaagattgaactgattttagaatttttattgctaagatccaactcatttgatgatttagttgagaaagctcggttactgggattagaattgaagagcaagaaaaaaacgatagattttgttctttctgatggaaaaagctgcatttccataccaaataagtcattaagaaagaaaaatctttatgatactacgtattttgatagttatttcaaggaacatgatgtgtttgaagtgcttcataataatgaagtaaaaatagaatttgaaaagtttgagacacaacagctttcagaaatattgactgtagaagaaataaccgaagcttatgaaacgtataaaactaagagagatgctgtacatgagtttgaagttgagatcacggaggagcaaattgaaaaaattgtgctagatggtctatttgttaaagtttggatgggtattggacaagaaggactaatcttcattccaaatcatcaacttaatatcttagaacaagaaaataagaagcagtatcaggtgtttattcgagaaacatcttcttatttcatttatcataaagaggactcagaaatgaatcgatttatgaaaggaagggacttgattcgccaactaacgtttgacaataagtctttaccttataagagacgaataagtctggtcagtcttcaacaaaaaattgaagaaatcaatttattgatgacattaaacattcaaaataaatcctttctagaattaaaagatgaattggttggagacatcgcacagctagatattgaattgacaaatcttcaagacaaaaacaccaccttaaacaagatggcagaagtagttgttaacctacaaagtgataatcaagataccaagcaattagctaagtatgaatgttccaagatgaatttatcgcagaatgtaacaattggacagattgaatctgagattgaaatgatacagaatcagctagacaataaaatcgaagaatacgaaaatgcggttagaaagttggatgaatatgtaagagttttaaatatggataaatacaagacagacgatttttccattcatattgaa

SEQ ID NO: 6116 - protein, 621 aa, Streptococcus agalactiae
MVITKHYAVHGKKYRRQLIKYILDPKKTRNLSLISDFGMSNYLDFPDYVELVKMYQNNFLSNDQLYDSRFDRQEKKQQKIHAHHIIQSFSPEDKLSPEEINRIGYETIKELIGGQYKFIVATHVDQDHCHNHIIINSINSQSQKKLKWDYALERNLQMISDRISKVAGAKIIPPKRYSHRDYEVYRRSNHKYELKQRLFFLMEHSIDFNDFMQKAEQLNVKIDFSRKHSRFFMTDRNMKQVIQGDKLNKREPYSKEYFQRYFAKKKIELILEFLLLRSNSFDDLVEKARLLGLELKSKKKTIDFVLSDGKSCISIPNKSLRKKNLYDTTYFDSYFKEHDVFEVLHNNEVKIEFEKFETQQLSEILTVEEITEAYETYKTKRDAVHEFEVEITEEQIEKIVLDGLFVKVWMGIGQEGLIFIPNHQLNILEQENKKQYQVFIRETSSYFIYHKEDSEMNRFMKGRDLIRQLTFDNKSLPYKRRISLVSLQQKIEEINLLMTLNIQNKSFLELKDELVGDIAQLDIELTNLQDKNTTLNKMAEVVVNLQSDNQDTKQLAKYECSKMNLSQNVTIGQIESEIEMIQNQLDNKIEEYENAVRKLDEYVRVLNMDKYKTDDFSIHIE

SEQ ID NO: 6117 - DNA, 693 bp, Streptococcus pyogenes
gtggaacatcaaattgagaggttaattgctgaggacatttatatcaaggtgtcttttagtgtaaagcagagtggtcttattttcattcctaactatcaattggatattaggaaagaagaaaatcataaaaaatataaagtctatattcgtgagaccgcacaattcttcatttacaacaaggaggcgtctgaacttaatcgctatatgcgagggcatgagctcatttgccagttaaccaatgatagcaagagtattccaaaaagaagacgacaaaccattgatacacttaagaaaaagattgaagaaataagtctcctcattgagttagatacggagaataagccttatcaagatattaaagatgacattgttaaagatatggctcaattagatttgaccattacagagttgcaggaccatattgctcatctcaataaggttgcggaggtcttgcttaatctgaacaacaacgatatagagaaccgccgtttggccagatatgactatgccaagatgaacttgactgcagctataaaaatagaagaagttgagaaagagattgaaacttctcaaaatgaacttaatatatccatagatgagtatgaatatctagtaagaaggttggaaaagtttggagagatcttgagtgatagcaaaattatcgatacttctcgaaatgaaatacaatgggag

SEQ ID NO: 6118 - protein, 231 aa, Streptococcus pyogenes
VEHQIERLIAEDIYIKVSFSVKQSGLIFIPNYQLDIRKEENHKKYKVYIRETAQFFIYNKEASELNRYMRGHELICQLTNDSKSIPKRRRQTIDTLKKKIEEISLLIELDTENKPYQDIKDDIVKDMAQLDLTITELQDHIAHLNKVAEVLLNLNNNDIENRRLARYDYAKMNLTAAIKIEEVEKEIETSQNELNISIDEYEYLVRRLEKFGEILSDSKIIDTSRNEIQWE

SEQ ID NO: 6119 - DNA, 360 bp, Streptococcus agalactiae
atgggaaatctagttagagagatacgtaaggaagtcaatttctcaatagaagagtatcaacagatacaaaattttatggaacaggagggatatgaacaattttccccttttgctagaggtaaattattgaaaatagaccaccaaccatctcagcagcttgaagaatggataaaatatttacagcaccaaaaagtagaacagatttaccgggatgtacatgaaatacttgttctggcaaagttgtctcaatcagttactatggaacatcttgaaatcatcctgacttgtatcaaagacttgatgaaggaaattgaggtaactattccattaagctattcattcaaagacaagtacatgggg

SEQ ID NO: 6120 - protein, 120 aa, Streptococcus agalactiae
MGNLVREIRKEVNFSIEEYQQIQNFMEQEGYEQFSPFARGKLLKIDHQPSQQLEEWIKYLQHQKVEQIYRDVHEILVLAKLSQSVTMEHLEIILTCIKDLMKEIEVTIPLSYSFKDKYMG

SEQ ID NO: 6121 - DNA, 1314 bp, Streptococcus agalactiae
atgaataatatgtcagacttattatccctaccagacattaaaacaatagaaccgccacaagaaaatgaaaccgatatgatgtttaaagttgaagcagtcggaccacctgaacgttgtcctgaatgtggttttgacaagttgtacaaacacagttcaagaaatcaactaattatggatttgcccattcgtttaaagcgagtgggcttacatttgaaccgtagacgatacaagtgtcgtgaatgcggatctaccatatctgtagatgaaaagcgtagtatgaccaaaaggcttttaaagtccattcaagagcaatccatgtctaagacctttgtagaagtcgcagaaagcgttggtgttgacgagaaaaccattaggaacgtttttaaggactatgtggcactcaaagaacgtgaataccagtttgaaactcctaagtggcttgggatagacgagatacatattatccgtagacctcggcttgtattgactaatattgaacgcaggactatttatgacatcaagcctaaccgtaacaaggaaacagtcatccaacgtctttcagaaatcagtgacaggacttacattgagtacgtcacaatggatatgtggaagccctacaaagacgcagtgaacactatccttccacaagctaaagttgtcgtagataagtttcatgtagttagaatggctaatcaagccttagataacgtcagaaagtctttgaaagcccatatgagccaaaaagaaagacgtacccttatgcgtgaaaggtttatccttctaaagcgtaaacacgatctaaatgaacgtgaatcattcctcttagatacttggttaggtaatcttcctgctttaaaagaagcctatgaactcaaagaagagttttactggatatgggatactcctgatccagatgaaggtcatcttcgttatagtcaatggagacaccgttgtatgtccagcaactctaaagacgcatataaagacctcgtgagagccgtagacaactggcatgttgaaatattcaactactttgataaaaggctcactaatgcttatacggagtcaattaacagcattattaggcaggtagagcgaatgggtagaggttactcgtttgatgccttacgagccaaaatccttttcaatgagaagctccataaaaagcgtaagccacgatttaattcaagtgctttcaataaagctatgttatacgatactttcaattggtatgaagtgaatgatcacgacattacagacaacttaggtgtcgatttttccacacttattaagaatttggagaagggtgattta

SEQ ID NO: 6122 - protein, 438 aa, Streptococcus agalactiae
MNNMSDLLSLPDIKTIEPPQENETDMMFKVEAVGPPERCPECGFDKLYKHSSRNQLIMDLPIRLKRVGLHLNRRRYKCRECGSTISVDEKRSMTKRLLKSIQEQSMSKTFVEVAESVGVDEKTIRNVFKDYVALKEREYQFETPKWLGIDEIHIIRRPRLVLTNIERRTIYDIKPNRNKETVIQRLSEISDRTYIEYVTMDMWKPYKDAVNTILPQAKVVVDKFHVVRMANQALDNVRKSLKAHMSQKERRTLMRERFILLKRKHDLNERESFLLDTWLGNLPALKEAYELKEEFYWIWDTPDPDEGHLRYSQWRHRCMSSNSKDAYKDLVRAVDNWHVEIFNYFDKRLTNAYTESINSIIRQVERMGRGYSFDALRAKILFNEKLHKKRKPRFNSSAFNKAMLYDTFNWYEVNDHDITDNLGVDFSTLIKNLEKGDL

SEQ ID NO: 6123 - DNA, 1638 bp, Streptococcus agalactiae
atgaataaatttaaggtaaacatttcaggaatgacttgtacgggttgtgaaaaacacgtagaatcagcacttgaaaagataggtgctaaaaatattgagtctagttatcgtcgtggtgaagcagtatttgaactgcccgatgatattgaggttgaaagtgcaataaaggcgattgatgaagcaaattaccaagccggagaaattgaagaagtatcatcactagaaaacgtggcgttaattaatgaagacaattatgaccttcttattattggttctggtgctgctgccttttcttcggcaattaaagctatagaatacggtgcaaaagttggaatgattgagcgtggaacggttgggggaacctgtgtgaatattggctgtgttccgtcaaaaactcttcttagggcaggggaaatcaatcatttatcaaaagacaatccgtttataggtttacaaacatccgctggagaagtggatttagctagtttaatcacgcaaaaggataaattggtgagcgaacttcggaatcaaaaatatatggatttaattgatgaatataattttgatttaattaaaggtgaagcaaaattcgttgatgctagtacggttgaggtcaatgggacaaagttatctgcaaaacgctttttaattgcaacaggtgcatcgccttcgttgccccaaatttcaggacttgaaaaaatggactatttaactagtacaacacttcttgagttaaagaaaataccaaaacgattaactgtaattggttcaggatacattggaatggagcttggacaactatttcatcatttaggttcagaaataacgcttatgcaaagaagtgagcgacttttaaaggagtatgatcctgagatttcagagtcagttgaaaaagcgttaattgaacagggtataaaccttgtcaaaggggcaacttttgagcgtgttgaacaaagtggagagataaaaagggtttacgtaacagtaaatggcagtagagaagtcattgaatcagatcagttacttgttgccactggaagaaaaccaaatacggattctttaaatttaagtgcagcaggtgttgaaactggaaaaaataatgaaatcctgatcaatgattttggtcaaacaagtaatgaaaagatttatgcagcaggagatgtgactttaggaccacaatttgtatatgtagcagcctatgaaggtggaattattactgataatgctattggtggattaaacaaaaaaatagatttatcggtagttcctgctgttacgtttacgaatccgacggttgcaacggttggtttaacagaagaacaagcaaaagagaaagggtatgatgtgaagacatctgtattacctttagatgctgttccaagagcaattgtaaaccgtgaaacaaccggtgtatttaaactagtagcagatgcagaaacactaaaagtattaggggttcatattgtatctgaaaatgcaggagatgtcatctatgcagcatcattagctgttaaatttggcttaacgatagaagatttaacagaaaccctagcaccatatttaacaatggctgaagggctaaaattagttgcacttacgttcgataaagatatttcgaaattatcttgttgtgcaggc

SEQ ID NO: 6124 - protein, 546 aa, Streptococcus agalactiae
MNKFKVNISGMTCTGCEKHVESALEKIGAKNIESSYRRGEAVFELPDDIEVESAIKAIDEANYQAGEIEEVSSLENVALINEDNYDLLIIGSGAAAFSSAIKAIEYGAKVGMIERGTVGGTCVNIGCVPSKTLLRAGEINHLSKDNPFIGLQTSAGEVDLASLITQKDKLVSELRNQKYMDLIDEYNFDLIKGEAKFVDASTVEVNGTKLSAKRFLIATGASPSLPQISGLEKMDYLTSTTLLELKKIPKRLTVIGSGYIGMELGQLFHHLGSEITLMQRSERLLKEYDPEISESVEKALIEQGINLVKGATFERVEQSGEIKRVYVTVNGSREVIESDQLLVATGRKPNTDSLNLSAAGVETGKNNEILINDFGQTSNEKIYAAGDVTLGPQFVYVAAYEGGIITDNAIGGLNKKIDLSVVPAVTFTNPTVATVGLTEEQAKEKGYDVKTSVLPLDAVPRAIVNRETTGVFKLVADAETLKVLGVHIVSENAGDVIYAASLAVKFGLTIEDLTETLAPYLTMAEGLKLVALTFDKDISKLSCCAG

SEQ ID NO: 6125 - DNA, 390 bp, Streptococcus agalactiae
atgatttatcgcattagtgagtttgcagataaatgtggagttaataaagaaacgatcagatattacgagcgaaaaaatttattacaagaacctcaccgaacggaagctggttatcggatatattcatatgatgacgttaagcgtgttgggtttattaaacgaatacaggaatttggtttctctttaagcgagatttataaattacttggtgttgtagataaagatgaagttcgttgtcaagatatgttcgaatttgtttctaaaaaacaaaaggaagtgcaaaaacaaatagaggatttaaaacgaattgaaactatgttagacgacttaaaacaacgatgtccagatgaaaagaaattacattcgtgtccaataatagaaacattaaca

SEQ ID NO: 6126 - protein, 130 aa, Streptococcus agalactiae
MIYRISEFADKCGVNKETIRYYERKNLLQEPHRTEAGYRIYSYDDVKRVGFIKRIQEFGFSLSEIYKLLGVVDKDEVRCQDMFEFVSKKQKEVQKQIEDLKRIETMLDDLKQRCPDEKKLHSCPIIETLT

SEQ ID NO: 6127 - DNA, 480 bp, Streptococcus agalactiae
ttggagcgaattcctgttcagtttaaaggttgtgatgattattataacgaaaatgttggataccctctaagcaggattaatttggagcattatctaactgaaggtggtgtgctctactttgtagtgtactcgaaagacgttagtcctactgtcacttatgcttcactaacaccaaaagtcattaagaacgtattgccagctagtgacaagaaaaaaagaattaagaaaaaagaagatatctttctcctgttctggatggctataatagcgaaattattgattttaccttatcccgctctccaaacctcatacaagtcaagaccatgcttgagaaggtcttccctgaggaaacttacccaaataccattctccatagtgaccaaggttggcaataccaacatgaagtctatcaccgctttcttgcaagtaaaggcatacatccttccatgtctcgcaaagggaccagcacggataatggta

SEQ ID NO: 6128 - protein, 160 aa, Streptococcus agalactiae
MERIPVQFKGCDDYYNENVGYPLSRINLEHYLTEGGVLYFVVYSKDVSPTVTYASLTPKVIKNVLPASDKKKRIKKKEDIFLLFWMAIIAKLLILPYPALQTSYKSRPCLRRSSLRKLTQIPFSIVTKVGNTNMKSITAFLQVKAYILPCLAKGPARIMV

SEQ ID NO: 6129 - DNA, 93 bp, Streptococcus agalactiae
atgggtgtcaacaatcggatgcgatcattgaaaacaatgttatgcttcaaaagggatattaacaggaaatatacaactaaaggacgctttaac

SEQ ID NO: 6130 - protein, 31 aa, Streptococcus agalactiae
MGVNNRMRSLKTMLCFKRDINRKYTTKGRFN

SEQ ID NO: 6131 - DNA, 2127 bp, Streptococcus agalactiae
atgtctagagggaaagcaaaacagtctgaaaaagaaatgaaagcctatcgtgttcaaggatttacttgtactaactgtgcagccatttttgaaaataatgttaaagaacttcccggtgttcaggatgcgaaagtaaatttcggagcatctaaagtttatgttaaagggacgacaaccattgaagaattagaaaaagcaggagcatttgaaaatttaaaaattcgagatgaaaaagaacaaagggtaggaggagaacctttttggaagcagaaagaaaacattaaggtatatatatcagctcttttacttgtagttagctggttcttaggagagcagtatggtgaagagcatgttctaccgacaattggttatgcagcgtccattttaatcggtggatattcgttatttattaaaggtctcaaaaatttaagaagattaaatttcgatatgaatacgcttatgactattgccattataggagctgcaattattggtgaatggggtgaaggggcaaccgttgttatcctatttgcgattagtgaagcattagagcgttattcaatggataaagcacgtcaatctattgaatctttaatggatattgccccaaaagaagcgttaattcgacgaggcaatgaagaaatgatgattcatgttgatgagattcaagttggagacatcatgatagttaagcccggtcaaaagttagcaatggatggaatagtggttaaaggtacatcgacattaaatcaggctgcgattacaggtgaaagtgttccagtaacgaaaatcacaaatgatgaagtatttgcaggaaccttgaatgaagaagggttacttgaggttaaagtaacaaaacgagttgaagatactactctttcaaaaatcattcacttggtagaagaagcccaagcagaacgggccccctctcaagcgtttgtcgataaatttgcaaaatactatacaccagctattgtcatactagctcttttaattgcagtagttccaccattatttggcggagactggagccaatggatttatcaaggattagctgtattagtggttggttgtccttgtgccttagtagtctcaactccagttgctgtggttacagcaataggaaatgcagcgaaaaatggtgtattaattaaaggtggtatccatttagaagcagcaggacacttaaaagcgatagcatttgataaaacaggaacattaaccaaagggattccagctgtaacagacattgtgacatatggtagaaatgaaaatgaattaataaccataacatcagccattgaaaaaggatcgcagcaccctcttgcttcagcgattatgcgaaaagcagaagaaaatggattaaaattcaatgaagtaacagtagaggattttcaatccattacaggtaaaggcgttaaagccaaaataaataatgaaatgtattatgtgggaagtcaaaatctttttgaggaattacacggaagcatttcaagcgataaaaaagaaaaaattgccgatatgcaaactcaaggtaaaacggtgatggtgttaggaacagaaaaagaaattctttcgtttattgccgtagccgatgaaatgagggaatcgtctaaagaagttatcggcaagttgaacaatatgggaatcgaaacagtgatgctaacaggcgataaccaaagaacggcaacagccatcggaaaacaagttggtgtttcggatattaaagctgacttacttccagaagataagcttaattttattaaagaacttcgagaaaaacatcaaagtgtggggatggtcggagatggcgtgaatgatgctccagcccttgcggcatctaccgttggtgtagcaatgggtggtgctggaactgatacagctttagaaacggctgacatcgccttaatgtctgatgatttgagtaaattgccatatacaataaaattaagccgtaaggctttagcaatcatcaagcaaaacattaccttctctttggcgattaaattagtggcattacttttggtcatgcccggttggttaacactttggatagcgatatttgctgatatgggagcaactttacttgtaacattaaacagtttacgcttattgaaaatcaaagaa

SEQ ID NO: 6132 - protein, 709 aa, Streptococcus agalactiae
MSRGKAKQSEKEMKAYRVQGFTCTNCAAIFENNVKELPGVQDAKVNFGASKVYVKGTTTIEELEKAGAFENLKIRDEKEQRVGGEPFWKQKENIKVYISALLLVVSWFLGEQYGEEHVLPTIGYAASILIGGYSLFIKGLKNLRRLNFDMNTLMTIAIIGAAIIGEWGEGATVVILFAISEALERYSMDKARQSIESLMDIAPKEALIRRGNEEMMIHVDEIQVGDIMIVKPGQKLAMDGIVVKGTSTLNQAAITGESVPVTKITNDEVFAGTLNEEGLLEVKVTKRVEDTTLSKIIHLVEEAQAERAPSQAFVDKFAKYYTPAIVILALLIAVVPPLFGGDWSQWIYQGLAVLVVGCPCALVVSTPVAVVTAIGNAAKNGVLIKGGIHLEAAGHLKAIAFDKTGTLTKGIPAVTDIVTYGRNENELITITSAIEKGSQHPLASAIMRKAEENGLKFNEVTVEDFQSITGKGVKAKINNEMYYVGSQNLFEELHGSISSDKKEKIADMQTQGKTVMVLGTEKEILSFIAVADEMRESSKEVIGKLNNMGIETVMLTGDNQRTATAIGKQVGVSDIKADLLPEDKLNFIKELREKHQSVGMVGDGVNDAPALAASTVGVAMGGAGTDTALETADIALMSDDLSKLPYTIKLSRKALAIIKQNITFSLAIKLVALLLVMPGWLTLWIAIFADMGATLLVTLNSLRLLKIKE

SEQ ID NO: 6133 - DNA, 786 bp, Streptococcus agalactiae
atggggtattttaaatctattgaacaatttctattttcctatatctctttacataccatagaaaaggattctgtaaaccgtaaaatatttgcaggagctaaaccgttagatacactctctgacaaactccttaatgatagttcaaaagttaaaaatataaatcttaaatctattacaagtttttttggagattttaacagtcagaaattctatccacgtaatatggatttacttgctgatggtattgatgacgaaacgtattattatattgttgagtcattgtcaacttttgtaggattaagaaatggctattttcataagcataatttaaatgattggacaacaattgaagaaactagaaaccatgcattgttaattttttatctagtactaggagggtatagaatatcggagcaagataaactagatctcggtttgattaaaactgtagaaagtggctacttaaatctatgtgagtatattcataatagaaaaattgataatatgcttgagataccaatcttttattttgggagagatcgtaacgagtttgatttttacatttcgaataaagacccttttatcacaaatgacagtaatcaggagccaatttattctggagcatattttaaacgacttggaaactcaaaaagtttgtttaagctaacagatagtaatatccctgaggaaatctgggaaggaaaattaataattggtcggcagggacctagttttaaaccatctggtcctttggaaaaatattcgaagatggtaaatttttcaaaa

SEQ ID NO: 6134 - protein, 262 aa, Streptococcus agalactiae
MGYFKSIEQFLFSYISLHTIEKDSVNRKIFAGAKPLDTLSDKLLNDSSKVKNINLKSITSFFGDFNSQKFYPRNMDLLADGIDDETYYYIVESLSTFVGLRNGYFHKHNLNDWTTIEETRNHALLIFYLVLGGYRISEQDKLDLGLIKTVESGYLNLCEYIHNRKIDNMLEIPIFYFGRDRNEFDFYISNKDPFITNDSNQEPIYSGAYFKRLGNSKSLFKLTDSNIPEEIWEGKLIIGRQGPSFKPSGPLEKYSKMVNFSK

SEQ ID NO: 6135 - DNA, 597 bp, Streptococcus agalactiae
ttgatgttaaatcaatattttctgcattttgaagagagtaaaatagttactcccttatatgctttcgacattgattatctgaatattcctaaatatgtcggtctatcaaaggagcagattctggaaaactaccgcatcctcctgacctatttgaatatcccatggtttctcgcattggatatgccggatttccctagttcggctagtgggcttttccactttttcgaggtcaagaagctttttatgctggactacctgatcttgatcttttctggaatgggcacgctatggtttgtacgacatctaaataggagacgagaatcttggcggctcctaccctacttccgccagggaacccttattccccttgctatccttttggctctcctggttagcttcgacacgctgtttgtgcttttccataaagttttctttaacaatgacgcctggctcttcaatgccactactgatcctattatcttagctttacctgccgagttctttatgcacagtttcctcttggcctttggattaatcgaagtcttcctaatcctggggtacttcactactaaatatcgaatctctgccccaagccgt

SEQ ID NO: 6136 - protein, 199 aa, Streptococcus agalactiae
MMLNQYFLHFEESKIVTPLYAFDIDYLNIPKYVGLSKEQILENYRILLTYLNIPWFLALDMPDFPSSASGLFHFFEVKKLFMLDYLILIFSGMGTLWFVRHLNRRRESWRLLPYFRQGTLIPLAILLALLVSFDTLFVLFHKVFFNNDAWLFNATTDPIILALPAEFFMHSFLLAFGLIEVFLILGYFTTKYRISAPSR

SEQ ID NO: 6137 - DNA, 2085 bp, Streptococcus agalactiae
atgagaaataacaaaaaacattcgtcacatagtcatcataatcacggcgacattgatcactcaaaacacgaccataatgaaatggaacatagtcagatggatcacagcaatatggatcacagtgaaatggatcatggcgcaatgggagggcatgcccaccaccatcacggtagctttaaggagattttcttgaagtcactcccattaggaattgcaatcttactcattacgcctatgatggatattcagttgcctttccaaattatctttccttatgcagacgttgtagcagctgtattggcaacaattctatacatttttggcggaaaaccattctacatgggtgcgaaagatgagtttaattcaaaagctccaggcatgatgtccttgattactttgggaataacggtttcttatgcctatagtgtttacgcagtggccgctcgttatgtgaccggagagcatgtcatggacttcttctttgagtttacaaccttaattttaatcatgttattaggacactggattgaaatgaaggcattgggtgaagcaggggacgcgcaaaaagcattggctgagttggtgccgaaagatgctcatgttgttttagaagacgattcgattgagactcgccctgtgtctgaacttcagattggagatgttatccgtgttcaagcaggagaaaatgttccagctgatggtatcattatccgcggagaatctcgtgtaaacgaagcgcttgtgactggggaatcgaaaccaattgaaaaaaaaaccggagatgaggtcatcggtggatcaaccaatggtggcggagtcctctatgtggaaataaagcagacgggcgatcagtccttcatttctcaggttcagacattaatcagccaagcgcaaagccaaccttctcgagcagagaatgtggctcaaaaagtagctagctggttgttctacattgcggttgtagtagctttaatcgccctactaatctggacgatcattgcggatctgcctacagccgttatctttactgtgactgcgttagttattgcctgcccacatgctttgggtcttgctattcccttggtagtatcacgtagtactagtttgggtgcaagccgaggattactggttaaaaatagagaagctttggaattaactactaaagcggatgttatggtattggataaaacaggtactttaacaactggtgaatttaaagtgttggacgtcactgttttgagtgataaatattctgaagaagaaattacaggcttgttggcgggtatagaggcgggctccagtcacccgattgcccaatcgattgtgaaccacgctgaagcgaaaggcattaagtcagtttcctttgactccattgaaatcgtttcgggagcaggaatagaaggggaggcgaacggccaccactatcaattaatcagccaaaaggcatacggaaaagcattgcgtatggatattccgaaaggcgctactttaagtatccttgtagaaaataatgaagcaatcggcgctgtcgcattgggagatgaactgaaagaaaccagcagaaacttgatcgaggtgctgaaaaaatacggaattgaaccactcatggctactggtgataacgaggaagctgcacaaggagttgcagaagttctaggtattcaataccaagccaatcaatctccggaagataagtacaagctggtcgagtccatgaaaaaccaaaacaagacggttatcatggtaggagacggggtcaatgacgcaccttcccttgccttggcagacgtaggtattgcaatcggagctggaacgcaagtagctttggattctgcggatattatccttactcagtctgatccaggggatattgaatcctttatcgagttagcaaacaagacgacacgtaaaatgaaacaaaacttggtatggggagcaggctacaattttatcgcgattccaattgctgctggcctccttgctcctatcggcattaccttgggtccggccttcggcgccgtcctcatgtccttatcgaccgttattgttgccatcaatgctatgacattgaaattagagccgaaa

SEQ ID NO: 6138 - protein, 695 aa, Streptococcus agalactiae
MRNNKKHSSHSHHNHGDIDHSKHDHNEMEHSQMDHSNMDHSEMDHGAMGGHAHHHHGSFKEIFLKSLPLGIAILLITPMMDIQLPFQIIFPYADVVAAVLATILYIFGGKPFYMGAKDEFNSKAPGMMSLITLGITVSYAYSVYAVAARYVTGEHVMDFFFEFTTLILIMLLGHWIEMKALGEAGDAQKALAELVPKDAHVVLEDDSIETRPVSELQIGDVIRVQAGENVPADGIIIRGESRVNEALVTGESKPIEKKTGDEVIGGSTNGGGVLYVEIKQTGDQSFISQVQTLISQAQSQPSRAENVAQKVASWLFYIAVVVALIALLIWTIIADLPTAVIFTVTALVIACPHALGLAIPLVVSRSTSLGASRGLLVKNREALELTTKADVMVLDKTGTLTTGEFKVLDVTVLSDKYSEEEITGLLAGIEAGSSHPIAQSIVNHAEAKGIKSVSFDSIEIVSGAGIEGEANGHHYQLISQKAYGKALRMDIPKGATLSILVENNEAIGAVALGDELKETSRNLIEVLKKYGIEPLMATGDNEEAAQGVAEVLGIQYQANQSPEDKYKLVESMKNQNKTVIMVGDGVNDAPSLALADVGIAIGAGTQVALDSADIILTQSDPGDIESFIELANKTTRKMKQNLVWGAGYNFIAIPIAAGLLAPIGITLGPAFGAVLMSLSTVIVAINAMTLKLEPK

SEQ ID NO: 6139 - DNA, 204 bp, Streptococcus agalactiae
atgaaacaagaaatcttattagatggcgtaaaatgtgcaggttgtgcgaacacggtacaagaaagattttcagctattgaaggggttgaatctgtagaggttgatttagcgactaaaaaagcagtacttgaaagtcaaacagagattgataccgaaacgctcaatgctgctttagcagaaactaactattcagtattaagtgca

SEQ ID NO: 6140 - protein, 68 aa, Streptococcus agalactiae
MKQEILLDGVKCAGCANTVQERFSAIEGVESVEVDLATKKAVLESQTEIDTETLNAALAETNYSVLSA

SEQ ID NO: 6141 - DNA, 171 bp, Streptococcus agalactiae
ttgaatcgtcttaaccgtaaagcattgagcaagaccgatacggagctgaaactcacggcgactgccccgccaacattggactcatcaatagtccgccaaaaatatacaaaagacccatcgcaactggaatacctacaaggttgtaagcaaaagcccagaacaagttttgtt

SEQ ID NO: 6142 - protein, 57 aa, Streptococcus agalactiae
MNRLNRKALSKTDTELKLTATAPPTLDSSIVRQKYTKDPSQLEYLQGCKQKPRTSFV

SEQ ID NO: 6143 - DNA, 474 bp, Streptococcus agalactiae
atgaaggctgttaaagcacttagaagacgcggtgttgaagtaatcatgattactggagataacaaacgaacagccaaagcgattgctaagcaagtgggtatagacagtgtattaagtgaagtattacctgaagataaagcagaggaagtcaaaaaactacaagaggcaggcaagaaggtagcgatggttggagacggcattaacgatgcacccgcattagctcaagcaaatgtcggaattgcagttggatcaggtacagacgtggcgattgaatcggctgatattgtccttatgcgtaatgatttaaccgctgtattgactacgattgatttaagtcatgcaacgctacgaaacattaaacaaaacttgttctgggcttttgcttacaaccttgtaggtattccagttgcgatgggtcttttgtatatttttggcggactattgatgagtccaatgttggcggggcagtcgccg

SEQ ID NO: 6144 - protein, 158 aa, Streptococcus agalactiae
MKAVKALRRRGVEVIMITGDNKRTAKAIAKQVGIDSVLSEVLPEDKAEEVKKLQEAGKKVAMVGDGINDAPALAQANVGIAVGSGTDVAIESADIVLMRNDLTAVLTTIDLSHATLRNIKQNLFWAFAYNLVGIPVAMGLLYIFGGLLMSPMLAGQSP

SEQ ID NO: 6145 - DNA, 444 bp, Streptococcus agalactiae
atgagcacaatagaacttaatacttctatcacagatgctgaatgggaagtaatgcgtgtagtttgggcaaatgatttagtaactagtaaaacagtcatctctgtattgaaagaaaaaatggactggacagaatccactatcaaaacgatcttaggtcgattagttgaaaaaggcgtactaaatacagagcaagaaggtagaaagtttatttacactgccaatattgtagagaaagaagccgtaagggattttgcagaagatatttttaaccgtatttgcaaaaagaaagtcggaaatgtaataggaagcatcattgaagatcatgtcttaagcttcgatgatatagatcgactagagaaaatattagagataaaaaaatctttcgcagtagaagaagtggattgtcagtgtacagaagggcaatgcgattgccatgaaggctgt

SEQ ID NO: 6146 - protein, 148 aa, Streptococcus agalactiae
MSTIELNTSITDAEWEVMRVVWANDLVTSKTVISVLKEKMDWTESTIKTILGRLVEKGVLNTEQEGRKFIYTANIVEKEAVRDFAEDIFNRICKKKVGNVIGSIIEDHVLSFDDIDRLEKILEIKKSFAVEEVDCQCTEGQCDCHEGC

SEQ ID NO: 6147 - DNA, 111 bp, Streptococcus agalactiae
gtgtatcaggagtttttcttctctagaagaacaaaaaagattgaagaaaaattgtcccaaatggactttttcttcaatctgaaagccccatttaaggggcttttttatcta

SEQ ID NO: 6148 - protein, 37 aa, Streptococcus agalactiae
MYQEFFFSRRTKKIEEKLSQMDFFFNLKAPFKGLFYL

SEQ ID NO: 6149 - DNA, 618 bp, Streptococcus agalactiae
atgggacagacaatcatatctgctattggtgtttatatttccaccagtatcgattatttaattgttttaattattttatttgcacagctatcacagaataaacagaaatggcatatttatgcggggcagtatctaggcactggcttacttgtaggggcgagtttagttgctgcttatgtcgtcaatttcgtgcctgaagcatggatggttggattgcttggtttaatccctatctatttagggattcgctttgcaattgttggagaaggtgaggaagaagaagaggaagaaattattgaaagattagaacaaagcaaggcaaatcaactgttttggacagtaacattgctgacaattgcatctggcggagataatttaggtatctatataccttattttgcttcgttagattggtcacagaccctcgtggtgttgcttgtgtttgcaatcggcataattatcttttgcgagcttagttgggtgctatcttctattccgttaatatccgagacaattgaaaaataccagcgaatcattgtgccgttagtattcattccacttggactatacatcatgtatgaaagtggcacgattgagacttttctgaactttatttta

SEQ ID NO: 6150 - protein, 206 aa, Streptococcus agalactiae
MGQTIISAIGVYISTSIDYLIVLIILFAQLSQNKQKWHIYAGQYLGTGLLVGASLVAAYVVNFVPEAWMVGLLGLIPIYLGIRFAIVGEGEEEEEEEIIERLEQSKANQLFWTVTLLTIASGGDNLGIYIPYFASLDWSQTLVVLLVFAIGIIIFCELSWVLSSIPLISETIEKYQRIIVPLVFIPLGLYIMYESGTIETFLNFIL

SEQ ID NO: 6151 - DNA, 624 bp, Streptococcus pyogenes
atgaggtgttttatgattcaaaatgttgttacttcaataatcctgtattctgggacagccgtagacttacttattatcctaatgttattttttgccaaaagaaaaagcagaaaagacatcattaacatctatttaggacaatttctaggctctgttagtctaatattgctaagtttgctttttgcatttgtcttagattatattcctagtaaagagattttaggtttgctcggtttgattccaattttcctaggcctcaaagttttgcttttaggagattctgatggagaagctattgccaaagaaggtttgagcaaagataataaaaacctgatttttctagtcgctatgattacttttgcaagttgtggtgctgacaatattggtgtctttgtcccatattttactaccttaaatttagcgaatttgatagtggctttacttacctttctagtcatgatttatctcttggttttttctgcccaaaaattggcacaagtcccttctgttggagaaactttggaaaaatatagcagatggtttattgccgttgtttatttaggattggggatgtatatcctgattgaaaacaacagctttgacatgctatgggctgtgttaggc

SEQ ID NO: 6152 - protein, 208 aa, Streptococcus pyogenes
MRCFMIQNVVTSIILYSGTAVDLLIILMLFFAKRKSRKDIINIYLGQFLGSVSLILLSLLFAFVLDYIPSKEILGLLGLIPIFLGLKVLLLGDSDGEAIAKEGLSKDNKNLIFLVAMITFASCGADNIGVFVPYFTTLNLANLIVALLTFLVMIYLLVFSAQKLAQVPSVGETLEKYSRWFIAVVYLGLGMYILIENNSFDMLWAVLG

SEQ ID NO: 6153 - DNA, 240 bp, Streptococcus agalactiae
  misc_feature (1)..(240): n = a, c, g, or t
atgacttacacagaaaatcttcaaaaatggttagattttgagcagcttcctgactatcttcgtcaagaattactatcaatggatgaaaaaacaaaagaagatgctttttacacaaacttagaatttggtactgctggtatgcgtggttatattggtgctggtacaaatcgtattaatatttatgttgtccgtcaagcaaccgaaggattggcaaaattaatcgaaactaannnnnttaat

SEQ ID NO: 6154 - protein, 80 aa, Streptococcus agalactiae
  MISC_FEATURE (1)..(80): Xaa = Any Amino Acid
MTYTENLQKWLDFEQLPDYLRQELLSMDEKTKEDAFYTNLEFGTAGMRGYIGAGTNRINIYVVRQATEGLAKLIETXXXN

SEQ ID NO: 6155 - DNA, 1716 bp, Streptococcus pyogenes
atgacttacacagaaaattttcaaaaatggttagattttgagcagcttcctgactatcttcgtcaagaattactatcaatggatgaaaaaacaaaagaagatgctttttacacaaacttagaatttggtactgctggtatgcgtggttatattggtgctggtacaaatcgtattaatatttatgttgtccgtcaagcaaccgaaggattagcaaaattaatcgaaactaagggagaggaagctaaaaaacgtggtgtagctatcgcttatgattcgcgccacttctctccagaatttgcttttgagtctgcacaggtcttggcacagcatggaattaaatcttacgtatttgaagctcttcgtccaacaccagaactctcttttgctgttcgccatttaaatgcctatgctggtattatggttactgcaagccacaatccagcacctttcaatggttataaagtctatggacaagacggaggtcaactaccaccagctgatgctgatgcactaacagactttatccgcgctattgaaaatccatttgcagttgaacttgctgatttagatgaaaacaaatcatcaggtcttattcaagttatcggtgaagatgttgatatggaataccttagagaggttaaagatgttaatatcaatcaagatttaatcaataactttggaaaagacatgaaaattgtctatactcctctccacggaactggtgagatgttgacacgccgtgcccttgctcaagccggttttgaatctgttgttgtagtcgaatcacaagctaaggcagatccagacttttctactgttaaatcgcctaaccctgaaagccaagctgcctttgctcttgctgaagaactcggacgagaagttgaggcagatgtcttagtagctactgatcctgatgcagaccgcctaggcgttgaaattcgccaaccagatggttcttataaaaacctttctggaaatcaaattggagcgattattgcgaaatacatcctggaagctcataaaacagcaggaacacttccagaaaatgctgctctcgctaaatcaatcgtatcaacagaattagtaacaaaaattgccgaaagttatggcgctacaatgtttaacgttttaactggattcaaattcatcgctgagaaaattcaagagtttgaagaaaaacataaccacacctatatgtttggttttgaagaaagcttcggatatcttattaaaccatttgtccgtgataaagacgctattcaagcagttcttttggttgctgagatcgcagcttattaccgttcgcgtggtttaacacttgcagatggtattgatgaaatttacaaagaatatggctattttgctgaaaaaacgatttcagtaacactttcaggtgtggatggagctgctgaaattaagaagattatggacaaattccgtgaaaatggtccaaaacaatttaacaatactgatattgtattattagaagatttccaaaaacaaaccgctactaaaaatgatggaacaatatctaacttaacaactcctccaagtaatgttttgaagtacacgttagctgatgattcatggattgcagttcgcccttcaggaactgaaccaaaaatcaagttctatattgccacaataggtgatactcttgacatcgctcaagaaaaaattgctaacattgaaacagaaatcaatacctttgttggc

SEQ ID NO: 6156 - protein, 572 aa, Streptococcus pyogenes
MTYTENFQKWLDFEQLPDYLRQELLSMDEKTKEDAFYTNLEFGTAGMRGYIGAGTNRINIYVVRQATEGLAKLIETKGEEAKKRGVAIAYDSRHFSPEFAFESAQVLAQHGIKSYVFEALRPTPELSFAVRHLNAYAGIMVTASHNPAPFNGYKVYGQDGGQLPPADADALTDFIRAIENPFAVELADLDENKSSGLIQVIGEDVDMEYLREVKDVNINQDLINNFGKDMKIVYTPLHGTGEMLTRRALAQAGFESVVVVESQAKADPDFSTVKSPNPESQAAFALAEELGREVEADVLVATDPDADRLGVEIRQPDGSYKNLSGNQIGAIIAKYILEAHKTAGTLPENAALAKSIVSTELVTKIAESYGATMFNVLTGFKFIAEKIQEFEEKHNHTYMFGFEESFGYLIKPFVRDKDAIQAVLLVAEIAAYYRSRGLTLADGIDEIYKEYGYFAEKTISVTLSGVDGAAEIKKIMDKFRENGPKQFNNTDIVLLEDFQKQTATKNDGTISNLTTPPSNVLKYTLADDSWIAVRPSGTEPKIKFYIATIGDTLDIAQEKIANIETEINTFVG

SEQ ID NO: 6157 - DNA, 570 bp, Streptococcus agalactiae
atgaaaaagaaaaacaaatcctctaacattgctataattgcaatcttttttgctattatgcttgtcattcattttttgtcatcatttatttttagtttttggttagtccctattaaacctactttgatgcatatcccagttattattgcatctatagcctatggacctcgtattggtgcaactctaggcgccttaatgggggggatcagcgtagctaacagcagcattgttctattaccaacgagttacctcttctcaccttttgttgaaaatggtaatttttattcgctaattattgcacttgtaccacgtattctaatcgggattattccttatttcgtttacaaattactacacaaccgctttggtttggctatctcaggtgctataggctctctaacaaacacagtatttgttttatctggaatttttatctttttttcaagtacttataatgggaatatcaagctaatgctcgctgggattatttcatctaattcattagctgagatggtcattgcagctatcattgtatatctaactgttcctcgtattctcaatattaaacat

SEQ ID NO: 6158 - protein, 190 aa, Streptococcus agalactiae
MKKKNKSSNIAIIAIFFAIMLVIHFLSSFIFSFWLVPIKPTLMHIPVIIASIAYGPRIGATLGALMGGISVANSSIVLLPTSYLFSPFVENGNFYSLIIALVPRILIGIIPYFVYKLLHNRFGLAISGAIGSLTNTVFVLSGIFIFFSSTYNGNIKLMLAGIISSNSLAEMVIAAIIVYLTVPRILNIKH

SEQ ID NO: 6159 - DNA, 579 bp, Streptococcus pyogenes
ttggagagtaaaatgaatcaccgtaaatcagcagatatttctcgtattgctatcttttttgccatcatgttagtcattcattttgtgagcagtcttgtctttaatatttggcctattccaatcaaaccaacgcttgtccatatcccagttattattgcttctgtcttatatggcccaaggataggtgctattttaggaggattaatggggattataagtgtcattacaaataccatcattctactgcctacaaattatctcttttcaccttttgtcgatcatggaactttcgcttctttaataattgctattatcccacgtattctgattggtattaccccttattattgctataaattgattcctaatcagtttggtttaatagtatccggtatcattggttctctaacaaatactatatttgtattatctgggatatttatttttttcgcgacagtttttgatggaaatattaaagcactactaacagccatcatctcatcaaacgctattgttgagatgatcatctcagctattattacctttgtacttattccaacactatcaagactaaaaagg

SEQ ID NO: 6160 - protein, 193 aa, Streptococcus pyogenes
LESKMNHRKSADISRIAIFFAIMLVIHFVSSLVFNIWPIPIKPTLVHIPVIIASVLYGPRIGAILGGLMGIISVITNTIILLPTNYLFSPFVDHGTFASLIIAIIPRILIGITPYYCYKLIPNQFGLIVSGIIGSLTNTIFVLSGIFIFFATVFDGNIKALLTAIISSNAIVEMIISAIITFVLIPTLSRLKR

SEQ ID NO: 6161 - DNA, 540 bp, Streptococcus agalactiae
atgattaaacgtattacactagccgtcaccggttcaatttcggcctataaagcagcagaccttacaagtcaattaactaaaattggctatgatgttcatatcataatgacacaagctgccacagaatttattacaccgttaactctgcaagtattatcaaaaaatcctattcatttagatgttatggatgagcataacccaaaaatcatcaaccatatcgaattagcaaaacgcacagatttatttatcgttgcacctgcctctgctaatactattgctcatctagcatatggcttcgctgataacatcgtaacaagcgttgctcttgctatgcccgatgaaactccaaaacttatcgcaccagcaatgaatacaaagatgtatcataatacaatcacccaacgtaacattgatattttgaaaaaaataggttatcaggaaattgaacctcgtattagtttgcttgcctgtggtgataccggtcaaggagccctggctgatatctctactatacttaaatgtatacaagaagttgcaaat

SEQ ID NO: 6162 - protein, 180 aa, Streptococcus agalactiae
MIKRITLAVTGSISAYKAADLTSQLTKIGYDVHIIMTQAATEFITPLTLQVLSKNPIHLDVMDEHNPKIINHIELAKRTDLFIVAPASANTIAHLAYGFADNIVTSVALAMPDETPKLIAPAMNTKMYHNTITQRNIDILKKIGYQEIEPRISLLACGDTGQGALADISTILKCIQEVAN

SEQ ID NO: 6163 - DNA, 543 bp, Streptococcus pyogenes
atgactaaacatattaccttagctgtttctggtagtatatctgcctataaagcagcagatcttacgagtcaattaactaaaattggctatgatgttcacatcataatgactcaggctgctacacaatttattacaccattaaccctgcaagtgttatcaaaaaatgctattcatttagatgttatggatgagcatgacccaaaagttatcaaccatatcgaattagcaaaacgcacagatttatttattgttgcacctgcctctgctaatactattgctcatctagcatatggattcgctgataatcttgtaacaagtgttgctcttgccctaccagctaccacaccaaaattaatagccccagccatgaataccaaaatgtatcaaaaccctattactcaagaaaatattaaacgcttatcgacaatagggtttacagaaattcctccaaaatctagcttattagcctgtggagataaaggacctggtgctttggctgatattgatgttatcttagctactattgatacgatttggaaactt

SEQ ID NO: 6164 - protein, 181 aa, Streptococcus pyogenes
MTKHITLAVSGSISAYKAADLTSQLTKIGYDVHIIMTQAATQFITPLTLQVLSKNAIHLDVMDEHDPKVINHIELAKRTDLFIVAPASANTIAHLAYGFADNLVTSVALALPATTPKLIAPAMNTKMYQNPITQENIKRLSTIGFTEIPPKSSLLACGDKGPGALADIDVILATIDTIWKL

SEQ ID NO: 6165 - DNA, 699 bp, Streptococcus agalactiae
atgtacaatatggctatgaaaattttgattacatcaggtggaactaccgagaaaattgataccgttaggagtatcacgaatcacgcaacaggaactttaggaaaaataattgcagaaaaatatttacgagaaggacatcaggtgacactcgtgactactaaaaatgcagtcaaaccagaatctgctaccaacttatccacatttgagattgaggacgttgactcattaataaaaaccttgaagccattagtgaaagagcatgatattttaattcatagcatggcagtgtctgactatacccccgtctacatggctgatttcgaaaaggttaaatcaagcgatcatttagatacttttttgcgcaaagataaccacgaagggaaaatatcatctgaatcagaatatcaagtcctttttctcaaaaaaacaccaaaagttatcagccttgtgaaaaaatggaatcctcaaattactctagtaggttttaaactacttgtgaacgttactaaagaaaatctttttaaagttgctcgtcatagcttaatcaaaaataaagctacgtttattttagctaatgacctcattgatattacctcaaaacatcacatagcctacctacttgaccatgataatgtgtataaagctaccaccaaagaagatattgctcaattaatttacgaaaaggtaaaaaaatatgat

SEQ ID NO: 6166 - protein, 233 aa, Streptococcus agalactiae
MYNMAMKILITSGGTTEKIDTVRSITNHATGTLGKIIAEKYLREGHQVTLVTTKNAVKPESATNLSTFEIEDVDSLIKTLKPLVKEHDILIHSMAVSDYTPVYMADFEKVKSSDHLDTFLRKDNHEGKISSESEYQVLFLKKTPKVISLVKKWNPQITLVGFKLLVNVTKENLFKVARHSLIKNKATFILANDLIDITSKHHIAYLLDHDNVYKATTKEDIAQLIYEKVKKYD

SEQ ID NO: 6167 - DNA, 690 bp, Streptococcus pyogenes
atgactatgaaattaataataacatcaggtggaacaactgaacctatagatgcagtacgaggtatcactaatcactcaactgggcaacttggaaaattaatcacagagcgatttttacaatatcatcatgacgttaccctagtcactactaaaacagccactaaacccctgccaaataagcgcctaaggattattgaagtggaaacagttaacgacttaatggctgcactcaaagatcaggttcctcaccatgacattctaattcatagtatggctgtttctgactatactccagtctacatgactgatttggaacaagtctctcaagctgataaccttaattgttttctatgtgaacataacagtgagccgaaaatctcatctgcatctgattatcaggttctttttttgaaaaaaacacccaaagttatctcttatgttaaacagtggaatcctaatattaaactagtcggctttaaacttctagttaatgtgcctcaagaagagttaattaaagtagccagagcaagtctagctaaaaatcatgctgattatattctcgccaatgatttagttgatatccaaacaggtatgcacaaggctcttttgatatccaataacgaagttgcatctgcagataccaaagaggcaattgctgacttattatatgaaaggatgaccaaacatgac

SEQ ID NO: 6168 - protein, 230 aa, Streptococcus pyogenes
MTMKLIITSGGTTEPIDAVRGITNHSTGQLGKLITERFLQYHHDVTLVTTKTATKPLPNKRLRIIEVETVNDLMAALKDQVPHHDILIHSMAVSDYTPVYMTDLEQVSQADNLNCFLCEHNSEPKISSASDYQVLFLKKTPKVISYVKQWNPNIKLVGFKLLVNVPQEELIKVARASLAKNHADYILANDLVDIQTGMHKALLISNNEVASADTKEAIADLLYERMTKHD

SEQ ID NO: 6169 - DNA, 918 bp, Streptococcus agalactiae
ttgagggaaacttactggaaaatttcaagcgattgcgataaaataaatcttgcagagttttctagagaaaggatgtcagatttattggaatggcaagatctagcgcagttacctgtatctatttttaaagactatgttacagatgctcaagacgcggaaaaaccttttatatggacagaagtatttttaagggagattaatcgctcaaatcaagaaattattttgcatatttggccgatgactaagacagtcattctggggatgttagatcgagaattaccacatttagaattagctaaaaaagaaatcatcagtcgtggctatgaaccagttgttcggaattttggtggtctcgcagttgtagctgatgaaggaattttaaatttttcattggttattccagatgtttttgagagaaaattgtctatctcagatgggtatcttataatggtcgattttattagaagtatattttcagatttttatcaacctattgagcactttgaagtagagacctcctattgtcctggtaagtttgatcttagtataaatggcaaaaaatttgctggcttggctcagcgccgtataaagaatggtattgcggtatcaatttaccttagcgtttgtggcgatcaaaaagggcggagtcaaatgatttcagatttttataagattggtctaggtgatacgggtagtccaattgcttatccaaatgtagatcctgaaattatggctaatctatctgatctattagattgtcctatgacagtagaagatgttattgatcgtatgttgattagccttaaacaagtaggttttaatgatcgtttactgatgattagacccgatttagttgcagagtttaatagatttcaggctaagtctatggctaataaggggatggtgagcagagatgaa

SEQ ID NO: 6170 - protein, 306 aa, Streptococcus agalactiae
MRETYWKISSDCDKINLAEFSRERMSDLLEWQDLAQLPVSIFKDYVTDAQDAEKPFIWTEVFLREINRSNQEIILHIWPMTKTVILGMLDRELPHLELAKKEIISRGYEPVVRNFGGLAVVADEGILNFSLVIPDVFERKLSISDGYLIMVDFIRSIFSDFYQPIEHFEVETSYCPGKFDLSINGKKFAGLAQRRIKNGIAVSIYLSVCGDQKGRSQMISDFYKIGLGDTGSPIAYPNVDPEIMANLSDLLDCPMTVEDVIDRMLISLKQVGFNDRLLMIRPDLVAEFNRFQAKSMANKGMVSRDE

SEQ ID NO: 6171 - DNA, 849 bp, Streptococcus pyogenes
gtgaaaggaagaattgtgataactattagagatttagcgtcactgccgatttttgtttacggtgatggaaataaaaaagttccaggagctttgagtccttttgtgtggacagaggtgtttttaaaaactatcaatcaagaacctaatcaactgatcttacatatttggccgatgacaagaacagttatattaggaatgttagatagacagcttccctactttgagctggctaaaacagagattggcaataatggttatgttcctgttactcgtaatattggcggtttggctgttgtcgctgatgatgggattttgaatttttcgcttgttattccagaccatttttcggaatctatcagtattagtaatgcttatttaataatggttgatgtcattagagagagtttttcggattattatcagcgtattgaatatcacgaaattaaaaattcttattgccctggtaattttgatcttagtattgcaggccgcaagtttgcaggtatcgcccagcgtcgtatcaaaaagggaattgttgtgtctatttacttgagcgtttgtggggatcaagcagcgcgtggtcaactcatcaaggatttttatgaggccggaacacaaggagaagttaccaaggttaattaccctcaaattgatccagaatgcatggcaactctttcagaactccttgagacgccttttacagtggcagaagtccttgaacgtcttcgattgaccttgcgacagcttggcttttccctcacggaaaaaagtccagatcaagccttactgactaattttgatgctgtctatgaacggatgcagctagaagtcgtcagaaaggaaggcaaa

SEQ ID NO: 6172 - protein, 283 aa, Streptococcus pyogenes
VKGRIVITIRDLASLPIFVYGDGNKKVPGALSPFVWTEVFLKTINQEPNQLILHIWPMTRTVILGMLDRQLPYFELAKTEIGNNGYVPVTRNIGGLAVVADDGILNFSLVIPDHFSESISISNAYLIMVDVIRESFSDYYQRIEYHEIKNSYCPGNFDLSIAGRKFAGIAQRRIKKGIVVSIYLSVCGDQAARGQLIKDFYEAGTQGEVTKVNYPQIDPECMATLSELLETPFTVAEVLERLRLTLRQLGFSLTEKSPDQALLTNFDAVYERMQLEVVRKEGK

SEQ ID NO: 6173 - DNA, 1197 bp, Streptococcus agalactiae
atgaataatgtccaaggtaatttatttcgtccattaacacttcccaatggattgagcttagaaaatcgttttgttctatcacctatggtaactaattcttctacatcagaaggttttgtaactgatgacgacatagcatatgctgttcgtcgtgctaaatccgctccattacaaattactggagcagcatatatcacagaatatggtcagttatttgaatatggttttagcgtttcaaaggatgaggacattcctggtttgactaaattggctaaagcaatgaagtctaagggagcgaaagctgttttgcagctgacgcatgctggacgtttctcaagtcacactttggcaagacacggatatgtatatggtcccagccctatgcaattgcaatcgccatacccacatcaggttaaagaactaacacacaaagatatactaaggattattgatgaatatgtccaggctacaagacgagctatacaagctggatttgatggtgttgaaatatcttctgcacaacgattactaattcaaacttttttctcaaccttctcaaatcaaagaaaagatgaatatggtcctcaaactttgactaatcgctgtcgtttaggcttagaagtttttaaagcggtacaaaaagttatcagagaagaagcggagtcagattttatccttggttttagagcgacgcctgaagaaactcgcggttcacaaattggatatagcattgaagagtttatggaatttcttgaaaaaattttagcgattgctcaggtagattatcttgccattgcaagctgggggcatgatgtctttagaaatactatacgttctgagggagtttacaaagggcagctggttaatcaagttatatttgaacattttggtgatagagttccaattatggcaactggaggtattaatagtgcttcaaaggtgtttgaagccttacaacatgctcatatgataggagcttccacgcccttagtagttgatccggaatttttacaaaaaataaaagctaagtgttctgatcagattaatttaaggattaaagtgagtgatttagaaggtttggcgattccaaaagcctcctttaaagatattgttcctttgatggattatggagaatctttaccaaaggaagctcgagaagtttttagagaacttcgaagcaattatagggaggaaaga

SEQ ID NO: 6174 - protein, 399 aa, Streptococcus agalactiae
MNNVQGNLFRPLTLPNGLSLENRFVLSPMVTNSSTSEGFVTDDDIAYAVRRAKSAPLQITGAAYITEYGQLFEYGFSVSKDEDIPGLTKLAKAMKSKGAKAVLQLTHAGRFSSHTLARHGYVYGPSPMQLQSPYPHQVKELTHKDILRIIDEYVQATRRAIQAGFDGVEISSAQRLLIQTFFSTFSNQRKDEYGPQTLTNRCRLGLEVFKAVQKVIREEAESDFILGFRATPEETRGSQIGYSIEEFMEFLEKILAIAQVDYLAIASWGHDVFRNTIRSEGVYKGQLVNQVIFEHFGDRVPIMATGGINSASKVFEALQHAHMIGASTPLVVDPEFLQKIKAKCSDQINLRIKVSDLEGLAIPKASFKDIVPLMDYGESLPKEAREVFRELRSNYREER

SEQ ID NO: 6175 - DNA, 1197 bp, Streptococcus pyogenes
atgaaagaaagatttagtcctttatttgagcctttgactttgccaaatgggagtcaattggataatcgctttgttttgtctcctatggtgaccaactcatctacaaaagacggttatgtcacccaagatgatgtatcctatgctttgagacgagcagcttctgcccctctacaaattacaggagcggcctatgtggatccttatggtcaattgtttgaatatggttttagtgttacaaaagatgccgatatttctggcttgaaagagctagctcaagcgatgaaggcaaagggagctaaagctgtcttacaactgacccacgctggccggtttgctagccatgccttgactaaatatggctttgtctatgggcctagttacatgcagttgagatctccccaacctcatgaagtcaaacctttaacaggtcagcaaatagaggaattgattgcagcttacgctcaggccactcggcgggcaattcaagcaggctttgatggcgtggaagtatcttcggcgcagcgcttattgattcaaacgttcttttcgactttttcgaacaagaggacagatagttatggttgtcaaacactttttaatcgctctaagttaactctagctgttttgcaagctgttcaacaggtgattaaacaagaagctcctgatgggtttatttttggatttcgtgctacaccagaagaaactaggggaaatgatattggttatagtattgacgagtttttgcagttgatggattgggtacttaatgttgcaaaacttgattatttagcgatagcaagttggggccgtcatgtatttcgaaatactgttcgttctcctggcccttattatggaaggcgagttaatcaggtagttagagattatttaagaaataagctacctgttatggctacagggggaatgaacacacctgacaaagctattgaagcactagctcatgctgattttattggagtatctacaccttttgtcgtggatccagaatttgctcataaaatcaaagaagggtgtgaagagagtattcatttaaggattcgacctgctgatttgaaaagtttagcgattcctcaggcttctttcaaagatattgtacctttgatggactacggggaatcattgcctaaagaatcaagaactttatttcgtagtcttactcacaattataaggagattaaa

SEQ ID NO: 6176 - protein, 399 aa, Streptococcus pyogenes
MKERFSPLFEPLTLPNGSQLDNRFVLSPMVTNSSTKDGYVTQDDVSYALRRAASAPLQITGAAYVDPYGQLFEYGFSVTKDADISGLKELAQAMKAKGAKAVLQLTHAGRFASHALTKYGFVYGPSYMQLRSPQPHEVKPLTGQQIEELIAAYAQATRRAIQAGFDGVEVSSAQRLLIQTFFSTFSNKRTDSYGCQTLFNRSKLTLAVLQAVQQVIKQEAPDGFIFGFRATPEETRGNDIGYSIDEFLQLMDWVLNVAKLDYLAIASWGRHVFRNTVRSPGPYYGRRVNQVVRDYLRNKLPVMATGGMNTPDKAIEALAHADFIGVSTPFVVDPEFAHKIKEGCEESIHLRIRPADLKSLAIPQASFKDIVPLMDYGESLPKESRTLFRSLTHNYKEIK

SEQ ID NO: 6177 - DNA, 984 bp, Streptococcus agalactiae
atgaaattaagtgtccttgattatgggcttattgattatggaaaaactgcaagtgatgcaatacaagaaacgattcttttatcacaagaggcggagcgactaggctatcatcaattttgggtggctgaacatcacggtgttaaggcattcagtattagcaatccagaattaatgataatgcatttggctaaccagactaaatctatcaaaattggctctggaggtataatgcctctgcactatagtagttttaaactcgcggagactctcaagacattagagacatgtcatccgaatcgagtaagtattggtttaggaaattcactagggacagttaaagtttcaaatgcacttcgtagcttacataaagcacatgattacgaagaggtactggaggaattgaagtcatggcttattgatgaatcatccagtaaggaaccattagttcaaccgactctttctagcttcccagacttatatgtgttggggagtggtcaaaaatcagcttatttagcggctaaacttggcttaggctttaccttcggtgtttttccttttatggacaaagacccattgacagaagctaaaaagctttcatctctttattatcatcagtttgaagaatattatcctaataagtctcctaatttgatggtagctgcatttgtagttatagctgatacttcagaagaagctgaaaacatagcaaagactttagatatctggatgctaggaaataaagacttcaatgaatttgcaacatttcctactattgaagaagctaatcattaccaattgactcctgaacaaaaagcaaaaattaaatcaaatcgcgaccgtatgattgtaggtgatccaaaacaagttaaagaaagtcttgacgctttagttaatgctagtcaagcagaagaactacttttgattcctcttgttccaggacttgaccaacgaatcaaatccttaaaattattatcacagttatat

SEQ ID NO: 6178 - protein, 328 aa, Streptococcus agalactiae
MKLSVLDYGLIDYGKTASDAIQETILLSQEAERLGYHQFWVAEHHGVKAFSISNPELMIMHLANQTKSIKIGSGGIMPLHYSSFKLAETLKTLETCHPNRVSIGLGNSLGTVKVSNALRSLHKAHDYEEVLEELKSWLIDESSSKEPLVQPTLSSFPDLYVLGSGQKSAYLAAKLGLGFTFGVFPFMDKDPLTEAKKLSSLYYHQFEEYYPNKSPNLMVAAFVVIADTSEEAENIAKTLDIWMLGNKDFNEFATFPTIEEANHYQLTPEQKAKIKSNRDRMIVGDPKQVKESLDALVNASQAEELLLIPLVPGLDQRIKSLKLLSQLY

SEQ ID NO: 6179 - DNA, 996 bp, Streptococcus pyogenes
atgaaagtcagtattcttgattatggggtgattgataaagaaaaaacaccccaagaagctttattagaaacgcgctgcttagcacaagtagccgacaaacttggttttcatcgtttttgggtagcagagcatcataatatttatgcctttgcaataagcagtccagagctgttgatgatgcatttagcagatcataccaaacagattcggataggttcaggaggtattatgcctctacattatagtagctttaagattgcagaatggataatgactttagaggccttgcaccctaatcggattgatttaggtattggcaactctttaggaactacgttagttcaaagagctctatcaagtatccattgcaaagacagctatagtcaggttgtcacagaattataccagtatcttaatcctgatcatttgtcaccactaccgatttttgttaaccctaggggtaatacttaccctcagatttggacgctaagcaatagtttggagacagcagaactggctggtcaattaggtttaggctatacctttggtattttcccctatataccaaaagatcctataacagaagctaaaagagtatcggcacattatagaaaggcttttaggccttcaaagctattaaaaatccccaagttaatattagcagtttttattgtcctttctgataccgacgagaaagcagaagctttggctaaaccgttggacatttggatgcttggtcagcaagattttaatgaatttaagacctaccctgatgttgaggaggctagaaactatcacttaacagagaaacaaagagaagccattgcagcaaatcgtagtcgcatggttattggatcacctcacacagtcaagaaacaattggataggctgatagaagcttgtcaagctgacgaattattagccatccccttagttcctgaatttgccaatagacaacgaaccttagagctgctagcagacttatacgtgaccatt

SEQ ID NO: 6180 - protein, 332 aa, Streptococcus pyogenes
MKVSILDYGVIDKEKTPQEALLETRCLAQVADKLGFHRFWVAEHHNIYAFAISSPELLMMHLADHTKQIRIGSGGIMPLHYSSFKIAEWIMTLEALHPNRIDLGIGNSLGTTLVQRALSSIHCKDSYSQVVTELYQYLNPDHLSPLPIFVNPRGNTYPQIWTLSNSLETAELAGQLGLGYTFGIFPYIPKDPITEAKRVSAHYRKAFRPSKLLKIPKLILAVFIVLSDTDEKAEALAKPLDIWMLGQQDFNEFKTYPDVEEARNYHLTEKQREAIAANRSRMVIGSPHTVKKQLDRLIEACQADELLAIPLVPEFANRQRTLELLADLYVTI

SEQ ID NO: 6181 - DNA, 330 bp, Streptococcus agalactiae
atgaaaaaaattgcgaactacttattaattgaaaaaaatgaagaactttatactatcagcttaactcccgaacttcaagatgacttgggaactgttggatatgtggaattcacagatgatgcaaatttagaagttgatgatgttattttaaatattgaagcttcaaagacggttatggcaattttatctcctcttacaggtaaagttgttaaagttaatacagctgcaagtcaagaaccaactttgttaaattctgaaaaagctgacgaaaattggttggttgtgttaacagaagttgattatgctgcttttgaagctttagaaaatgcc

SEQ ID NO: 6182 - protein, 110 aa, Streptococcus agalactiae
MKKIANYLLIEKNEELYTISLTPELQDDLGTVGYVEFTDDANLEVDDVILNIEASKTVMAILSPLTGKVVKVNTAASQEPTLLNSEKADENWLVVLTEVDYAAFEALENA

SEQ ID NO: 6183 - DNA, 330 bp, Streptococcus pyogenes
atgaaaaaaattgcaaattacttattaattgagaaaacagatgaccgctataccattagcatgacaccagaattacaagacgatattggtactattggttacgctgaatttacggataacgaccaccttgccgttgatgacattatcttaaatctagaggcttctaagactgtcatgtctgtcttgtcaccattggctggggcagttgttgagcgcaatgaggcagccacactaacaccaacccttttgaattcagaaaaagctgaggaaaattggattgttgtgctaacagatgttgatcaagcagcttttgatgccctagaagatgcc

SEQ ID NO: 6184 - protein, 110 aa, Streptococcus pyogenes
MKKIANYLLIEKTDDRYTISMTPELQDDIGTIGYAEFTDNDHLAVDDIILNLEASKTVMSVLSPLAGAVVERNEAATLTPTLLNSEKAEENWIVVLTDVDQAAFDALEDA

SEQ ID NO: 6185 - DNA, 816 bp, Streptococcus agalactiae
atgcctaatcaaaaacaactattgctagccatgattgagtatcttcagtcagaaaaattaacagacgttgatgacttgaggaccaccgatttgcaaacggtttggcgtggtctagttaatcaacaagatcctcaaaacattagtcaagagtacctgtctttagaagataggtatttgtcacattggtggaatactcaaaaagtaaaaacgatagacgtctgtcatcaaacggtatattcaaatgtatttacctaccatggggatatttgcttattacaagtggatgctattgttaatgcagcaaatagtaaattgttaggttgttttattcctaaccaccattgtattgacaatcagattcatacgtttgcaggttcacgattacgtttagcatgtcatcaattgatgacacaacaaggacgaatggaagctgtaggacaagctaaacttaccgaatcctatcatcttccttgtaagtatgttattcatacagtcggaccttatgtaaaagttgatcaaaagccatctcgtataagagaggatttattaaagtcttcttataaatcttgcttacaattggcagttcgagctaatcttaaaacaattgtcttcccttgtatatcaacgggagaatttggttttcctaatcaaagagccgctgaattggcagttcaagcgatattagagtggcaacgcgaaaatcagcacaaactctatattattttcaatacattcacacctaaagaccaagatatttatcaaaaattattattaaaagaggaaatagatgacagtgtggaagactctagaaaaaac

SEQ ID NO: 6186 - protein, 272 aa, Streptococcus agalactiae
MPNQKQLLLAMIEYLQSEKLTDVDDLRTTDLQTVWRGLVNQQDPQNISQEYLSLEDRYLSHWWNTQKVKTIDVCHQTVYSNVFTYHGDICLLQVDAIVNAANSKLLGCFIPNHHCIDNQIHTFAGSRLRLACHQLMTQQGRMEAVGQAKLTESYHLPCKYVIHTVGPYVKVDQKPSRIREDLLKSSYKSCLQLAVRANLKTIVFPCISTGEFGFPNQRAAELAVQAILEWQRENQHKLYIIFNTFTPKDQDIYQKLLLKEEIDDSVEDSRKN

SEQ ID NO: 6187 - DNA, 810 bp, Streptococcus pyogenes
atgcctagttcatttgatttattaggggaaatgattggtctgttgcaaacagagcagcttactagttcttgggcctgtcccttgcctaatgctttaacaaagcgacaagacttgtggcgggcgctcattaaccagcgccctgctttgcccttatcaaaagattacttgaatctggaagatgcttatctagatgattggcgtgcttcttttgttcctgtatcagtcaaggattgccaaaaaactaattataccagtctttttctttaccatggggatattaggtatcttgctgtggatgctattgtcaacgctgctaatagtgagttattgggatgttttagtcctaaccatggctgtattgataatgcgattcatacgtttgccggaagtcgtttacgcttagcttgtcaggcaatcatgactgaacaaggccgtaaggaagccattggacaagcaaagcttaccagtgcttatcatctaccagcctcttatattattcataccgtagggccaagaattaccaaaggacaccacgtttctccgattcgagctgatttgttagcacgttgttatcgttctagtcttgatttggcggttaaagcaggattgactagcctagctttttgctctatttcaacaggagaatttggctttcctaaaaaagaagccgctcagattgctattaagacagttttaaaatggcaagcagaacatccagaatctaagaccttaactaccatttttaatacctttacatcagaagacaaggccttatacgacacttatttgcaaaaggagaataactgtgag

SEQ ID NO: 6188 - protein, 270 aa, Streptococcus pyogenes
MPSSFDLLGEMIGLLQTEQLTSSWACPLPNALTKRQDLWRALINQRPALPLSKDYLNLEDAYLDDWRASFVPVSVKDCQKTNYTSLFLYHGDIRYLAVDAIVNAANSELLGCFSPNHGCIDNAIHTFAGSRLRLACQAIMTEQGRKEAIGQAKLTSAYHLPASYIIHTVGPRITKGHHVSPIRADLLARCYRSSLDLAVKAGLTSLAFCSISTGEFGFPKKEAAQIAIKTVLKWQAEHPESKTLTTIFNTFTSEDKALYDTYLQKENNCE

SEQ ID NO: 6189 - DNA, 876 bp, Streptococcus agalactiae
atgacagtgtggaagactctagaaaaaactaatcattctcaatcagaaatactaagtcagttaatagaagaatcagatgctattgtagttggtattggtgcaggcatgtctgcagcggatggattcacctatattggccccagatttgaagaagcttttccggattttattgctaaatatcaactattagatatgttgcaagcaagtctttatgactttgaagattgggaagaatattgggccttccaaagtcgttttgtggcacttaattatttagatcaaccggtaggacaagcttatcttgatttaaaggatattttagcgaaaaaagaatatcatattattacaactaatgctgataatgccttcgctgtggctgattataatttagaaaaagtttttcatattcaaggtgaatatggcttatggcagtgtagtcaacattgtcatcaacaaacttatcgaaatgatcaggcaattcgtcaaatgattgcacaacaaaaggatatgaagattcctagtaacttaatccccaaatgcccaaagtgtgatcaaccgtttgaaattaataaacgtaacgaagaaaaaggtatggtggaagatgctgactttcatgctcaacgacaacgttatgaaaatttcttatcacaacatcaaaatgacaaagttctttatctagagattggagttggacataccacgccacaatttattaagcatccgttttggcgattcgtctctttaaatgaaaactctttatttgttactcttaatcacaagcattatcgcattcctcaaaagattcgctcaaggagtgtgcaactgacacagcatatcgctgaattaattgctgaagcgaaaaaagaaattattgga

SEQ ID NO: 6190 - protein, 292 aa, Streptococcus agalactiae
MTVWKTLEKTNHSQSEILSQLIEESDAIVVGIGAGMSAADGFTYIGPRFEEAFPDFIAKYQLLDMLQASLYDFEDWEEYWAFQSRFVALNYLDQPVGQAYLDLKDILAKKEYHIITTNADNAFAVADYNLEKVFHIQGEYGLWQCSQHCHQQTYRNDQAIRQMIAQQKDMKIPSNLIPKCPKCDQPFEINKRNEEKGMVEDADFHAQRQRYENFLSQHQNDKVLYLEIGVGHTTPQFIKHPFWRFVSLNENSLFVTLNHKHYRIPQKIRSRSVQLTQHIAELIAEAKKEIIG

SEQ ID NO: 6191 - DNA, 879 bp, Streptococcus pyogenes
gtgagtaattggacaacctatcctcagaaaaacctcacccaggcagaacaactggcccaattaatcaaagaagcagatgcacttgtagttggtattggagctggcatgtctgcagctgatggttttacttatatcgggtcgcgttttgagacggcattcccagattttattgctaagtatcagtttttggatatgctgcaagctagcctttttgattttgaagattggcaagaatattgggcttttcaaagtcgctttgtcgctttgaattatcttgatcagcccgtaggccagtcttatcttgatttaaaagagattttgggaaccaaagactatcatattattactactaatgctgataatgctttttgggtggctggttatgatcctcataacatttttcacattcaaggagaatatggtttgtggcaatgtagccagcactgccatcagcaaacttataaggacgatacggtcatccgtcaaatgatcgcagagcaaaaaaacatgaaagtcccaggtcaactgattcctcattgccctgaatgtgaggcgccttttgaaatcaataagcgtaatgaagaaaaaggaatggttgaagatgctgactttcatgcccaaaaagcacgttatgaggcttttttatcagaacataaagagggtaaagtgctttatctagaaattggtgtgggacatacgacgcctcagtttatcaaacaccccttttggaaacgtgtctcagaaaatcctaatgccttattcgttaccttgaatcacaaacattaccgcatccctctgtcaataaggcgacaaagcctagaactgacagaacacattgcacaattgattagcgccacaaaaaccatttaccaaaaatcg

SEQ ID NO: 6192 - protein, 293 aa, Streptococcus pyogenes
VSNWTTYPQKNLTQAEQLAQLIKEADALVVGIGAGMSAADGFTYIGSRFETAFPDFIAKYQFLDMLQASLFDFEDWQEYWAFQSRFVALNYLDQPVGQSYLDLKEILGTKDYHIITTNADNAFWVAGYDPHNIFHIQGEYGLWQCSQHCHQQTYKDDTVIRQMIAEQKNMKVPGQLIPHCPECEAPFEINKRNEEKGMVEDADFHAQKARYEAFLSEHKEGKVLYLEIGVGHTTPQFIKHPFWKRVSENPNALFVTLNHKHYRIPLSIRRQSLELTEHIAQLISATKTIYQKS

SEQ ID NO: 6193 - DNA, 1017 bp, Streptococcus agalactiae
atgtatcttattgaaccaattagaaatggtaagcgtatcacagacggtgcgattgcacttgccatgcaagtttatattttacaaaatgtttttttagatgatgatattttatttccatactattgtgatcccaaagttgaaatcggaaaatttcagaatgcagttatagagacaaatcaagaatatttgaaagaacatgatattcctgttgttcgtcgagatactggtggaggggctgtttacgttgactcaggtgctgtaaatatttgctatctcatgaaagatcatggacaatttggtgatttcaaacgagcttatgagccagctattaaggccctaaaaactttaggtgcctctagtgttgaaatgagggaacgaaatgacttagttattgatggtaaaaaagtatcaggtgcagcaatgacgatagtaaacggtcgtatttacggtggttactctcttttattagatgttgattttgatgctatggaaaaagtgttaaatcctaatcggaaaaaaattgaatctaaagggataaaatctgtccgaagtcgagtaggagatattcgtagccacttgtcagaagattatcgtcatatcacaaccgatcaatttaaagatttaatggtttgtcaattattacatattgatcatattgatcaggcaaaacgctatcatctaaccgaaaaagattgggctgcgattgacgctctagctgatgaaaaatataagaattgggattggaattatggtaactcaccacagtattcgtatcacagagatgctcgttttccgtcaggaacttacgattttcacttagaaattgagaaaggtattattacgaattgccgtatttatggtgactttttcagttctaaagatatttcagatattgaaaaccttctcattggttgtcctatgaaagaagaattagtcttggaaaaattaagtactttatcattagaagattattttggtcagactagtccagaagaaataaaagcagttttattttca

SEQ ID NO: 6194 - protein, 339 aa, Streptococcus agalactiae
MYLIEPIRNGKRITDGAIALAMQVYILQNVFLDDDILFPYYCDPKVEIGKFQNAVIETNQEYLKEHDIPVVRRDTGGGAVYVDSGAVNICYLMKDHGQFGDFKRAYEPAIKALKTLGASSVEMRERNDLVIDGKKVSGAAMTIVNGRIYGGYSLLLDVDFDAMEKVLNPNRKKIESKGIKSVRSRVGDIRSHLSEDYRHITTDQFKDLMVCQLLHIDHIDQAKRYHLTEKDWAAIDALADEKYKNWDWNYGNSPQYSYHRDARFPSGTYDFHLEIEKGIITNCRIYGDFFSSKDISDIENLLIGCPMKEELVLEKLSTLSLEDYFGQTSPEEIKAVLFS

SEQ ID NO: 6195 - DNA, 1017 bp, Streptococcus pyogenes
atgtaccttattgaaccgattcgtaacggtaaacgtatcaccgatggagctgttgctctagccatgcaagtttatgttcaagaaaatctatttttagatgatgatattttatttccctactattgtgatcccaaagttgaaattggaaaattccagaatgcagttgtagaaactaatcaagagtatttaaaagagcatcatatccctgttgttcgcagagatactggcggtggtgccgtttatgtagattctggtgctgttaatatttgctacttgattaatgataatggtatttttggtgattttaaaagaacctatcagcccgctattgaagcccttcatcatttgggagcaacagaggttgaaatgtctggacggaatgacttggttattgatgggaaaaaggtatctggcgctgcgatgactattgctaatggccgtgtttatgggggatattcccttttgctagatgtggactttgaagccatggaaaaagcattaaaacctaatcgcaaaaaaattgaatcaaaaggcatcaggtcagttcgtagtcgcgttggaaacatcagagaacatttagcaccacaataccaaggtattacgattgaagagttcaaagatttaatggtttgccaattgttacagattgagacgattagccaagctaagcgttatgatttaacggaaaaagactggcaacaaattgatgctttaacagagcgcaaatatcacaattgggaatggaattatggcaacgcgcctcaataccgttaccatagagatggccgttttaccggtggaacagtagatattcatttagatattaaaaaaggctatattgcagcttgtcgcatttacggagatttttttggcaaggcagacattgcagaacttgaaggtcacttgataggaacacgaatggaaaaagaggatgtcttagctaccctcaatgcaattgatttagccccttatttaggtgcgattacagcagaagaattaggagatttgatattttct

SEQ ID NO: 6196 - protein, 339 aa, Streptococcus pyogenes
MYLIEPIRNGKRITDGAVALAMQVYVQENLFLDDDILFPYYCDPKVEIGKFQNAVVETNQEYLKEHHIPVVRRDTGGGAVYVDSGAVNICYLINDNGIFGDFKRTYQPAIEALHHLGATEVEMSGRNDLVIDGKKVSGAAMTIANGRVYGGYSLLLDVDFEAMEKALKPNRKKIESKGIRSVRSRVGNIREHLAPQYQGITIEEFKDLMVCQLLQIETISQAKRYDLTEKDWQQIDALTERKYHNWEWNYGNAPQYRYHRDGRFTGGTVDIHLDIKKGYIAACRIYGDFFGKADIAELEGHLIGTRMEKEDVLATLNAIDLAPYLGAITAEELGDLIFS

SEQ ID NO: 6197 - DNA, 1668 bp, Streptococcus agalactiae
atgaaaacagatattgaaatagcgcaaagcgtcgccctaaagcctattgctgagattgttgagcaagtaggaattggttttgatgatatagaattgtatggtaaatacaaagcaaaattatcttttgataagattgaagctgtaaaatctcaaaaagtaggaaagttaattttagtaactgctattaatccgacaccagcaggtgagggaaaatccactatgagcattggattagctgatgctttaaataaaattggtaaaaaaacgatgattgctcttcgcgaaccttctttaggtcctgtaatgggtattaaaggaggagctgctggaggtggatacgcacaagtactaccaatggaagatattaatttgcattttactggtgatatgcacgcaatcacaactgctaataatgctttatcagctctacttgataatcatattcatcaaggcaatgaattagatattgaccaacgtcgagtgatttggaagcgtgtagttgatcttaatgatcgtgctcttcgtcaggtgatcgttggcttaggaagccctgtcaatgggataccacgtgaagatggctttgatattactgttgcttctgaaataatggctattctatgtttagctactgacctatcagatttaaagaaacgcctgtcaaatattgttgtggcttactcaaggaaccgtaaaccaatctatgttaaagatttgaagattgaaggagctctcacacttatcctaaaagatactatcaaacctaatttggttcaaaccatttatgggacaccggctcttgtccatgggggaccatttgctaatattgcacatggatgtaattctgtcttagcgacttcaacagctctacgcttagcagattacgttgttactgaagcgggttttggagcagacttgggcgctgaaaagtttcttgatataaaaacgccaaaccttccgacttctcccgatgcgattgttattgttgctacattgcgtgcattgaaaatgcatggaggtgtttcaaaagaagatctctcacaagagaacgtcgaagcagttaaaagaggttttacaaatctcgagcgtcacgttaacaatatgcgtcaatatggtgttccggtagttgtagctatcaatcagtttactgcagatacagaaagtgaaattgcaactcttaaaaccttatgtagtaatattgatgtggcagttgaattagcaagtgtgtgggaagatggagcagacggtggtcttgaacttgcacagactgttgctaatgtgattgaaacacaatcatccaattacaaacgcttatataatgatgaagacactattgaagaaaaaattaaaaaaattgttactaaaatatatggtggtaataaagttcattttggacctaaggcacaaatacaattaaaagagtttagtgacaatggctgggacaagatgcctatttgtatggcaaagacacaatatagcttttctgataatccaaatttacttggtgctccaactgactttgatataactgttcgtgaatttgttccaaaaacaggagctggttttatagttgctcttactggagacgtattgacaatgcctggtttacctaaaaaacctgcagctctcaatatggatgttttagaagacggtacagccattggattattt

SEQ ID NO: 6198 - protein, 556 aa, Streptococcus agalactiae
MKTDIEIAQSVALKPIAEIVEQVGIGFDDIELYGKYKAKLSFDKIEAVKSQKVGKLILVTAINPTPAGEGKSTMSIGLADALNKIGKKTMIALREPSLGPVMGIKGGAAGGGYAQVLPMEDINLHFTGDMHAITTANNALSALLDNHIHQGNELDIDQRRVIWKRVVDLNDRALRQVIVGLGSPVNGIPREDGFDITVASEIMAILCLATDLSDLKKRLSNIVVAYSRNRKPIYVKDLKIEGALTLILKDTIKPNLVQTIYGTPALVHGGPFANIAHGCNSVLATSTALRLADYVVTEAGFGADLGAEKFLDIKTPNLPTSPDAIVIVATLRALKMHGGVSKEDLSQENVEAVKRGFTNLERHVNNMRQYGVPVVVAINQFTADTESEIATLKTLCSNIDVAVELASVWEDGADGGLELAQTVANVIETQSSNYKRLYNDEDTIEEKIKKIVTKIYGGNKVHFGPKAQIQLKEFSDNGWDKMPICMAKTQYSFSDNPNLLGAPTDFDITVREFVPKTGAGFIVALTGDVLTMPGLPKKPAALNMDVLEDGTAIGLF

SEQ ID NO: 6199 - DNA, 1668 bp, Streptococcus pyogenes
atgaaatcagatatcgaaattgcccaaagtgtcgccttacaaccaatcactgacattgttaaaaaggttggaatagacggcgatgacattgagctttatggcaaatataaggctaaattgtcttttgagaaaatgaaagctgtcgaagctaatgagcctggaaaattaatcttggtaactgctattaaccctactccagcaggagaaggaaaatcaaccatgtctattggactggcagatgccttaaatcaaatgggaaaaaaaaccatgcttgccttacgtgaaccctcccttggtcctgttatggggattaaaggcggggcagcaggtggtggttatgcccaagtattgcctatggaagacattaatcttcactttactggtgacatgcatgccattacaaccgctaataatgcattatctgctttgattgacaatcatttgcagcaaggaaacgatttaggaattgatcctcgccgcattatttggaagcgcgtgttggaccttaatgatcgtgctcttcgtcaggtaattgttggcttaggtagtccagtgaatggtgtgccacgcgaagatgggttcgatatcacagtagcttctgaaatcatggcaattttatgtttggcaactgacttaaaagatctaaagaaacgtcttgctgatatcgttgtggcttatacctatgatcgtaagcctgtctatgtgcgtgacttgaaggttgaaggagccttgacattaattctaaaagatgctatcaagccaaacttggtgcagactatttatggaacaccagctcttattcatggggggccatttgctaatattgctcatggttgtaattctgtccttgctacctcaacagctttgcgattagcagattacactgttaccgaagcaggattcggggccgacctaggagctgaaaaattcctaaatatcaaagtacctaatcttcctaaagcaccagatgctatcgttattgttgcaaccttgcgcgcccttaaaatgcatggaggtgtcgccaaatcagatttagccgctgaaaattgtgaggctgttcgcttaggatttgccaacttaaaacgtcacgtggaaaacatgcgccaattcaaagttccagttgtggtggctatcaatgaatttgtagcagataccgaggctgaaattgctaccttaaaagcgctttgtgaagagattaaggttccagtagaattagccagtgtttgggcaaatggagctgagggaggcttagcattagctaaaacagtggttcgtgtgattgatcaagaagctgctgactacaaacgtctctattcagatgaggatactttggaagaaaaagtgatcaatatcgttacccagatttatggtggcaaagctgttcaatttggccccaaggccaaaacacaattgaagcagttcgcagaattcggttgggataaattgcctgtttgtatggctaagacccaatacagtttttcagataacccatccttgcttggagcgccaaccgattttgacattaccattcgtgaatttgttcctaaaacaggagcaggttttattgttggtttaacaggtgatgtgatgaccatgcctggtttgcctaaagttccagctgccatggcaatggatgtagcagaaaatggcacagccctcggtctcttt

SEQ ID NO: 6200 - protein, 556 aa, Streptococcus pyogenes
MKSDIEIAQSVALQPITDIVKKVGIDGDDIELYGKYKAKLSFEKMKAVEANEPGKLILVTAINPTPAGEGKSTMSIGLADALNQMGKKTMLALREPSLGPVMGIKGGAAGGGYAQVLPMEDINLHFTGDMHAITTANNALSALIDNHLQQGNDLGIDPRRIIWKRVLDLNDRALRQVIVGLGSPVNGVPREDGFDITVASEIMAILCLATDLKDLKKRLADIVVAYTYDRKPVYVRDLKVEGALTLILKDAIKPNLVQTIYGTPALIHGGPFANIAHGCNSVLATSTALRLADYTVTEAGFGADLGAEKFLNIKVPNLPKAPDAIVIVATLRALKMHGGVAKSDLAAENCEAVRLGFANLKRHVENMRQFKVPVVVAINEFVADTEAEIATLKALCEEIKVPVELASVWANGAEGGLALAKTVVRVIDQEAADYKRLYSDEDTLEEKVINIVTQIYGGKAVQFGPKAKTQLKQFAEFGWDKLPVCMAKTQYSFSDNPSLLGAPTDFDITIREFVPKTGAGFIVGLTGDVMTMPGLPKVPAAMAMDVAENGTALGLF

SEQ ID NO: 6201 - DNA, 1593 bp, Streptococcus agalactiae
ttgatttggaggggggaaaaacttatcagtaataaagtcaaaattgttcgtttacttaataagagtaagaaaagtttactaaggggtatatttagtcgaacaaccgttatcgctattttattgattttacaattattgtttttactagcctcttactcatggctagagcagtatcgtgtttggttagcaaccgttgagcatatcttaacaattggagcggtcttatatttagttaatagtgaaatggatgctttgtcccgagtaacttggttaatattggtaatgattgcccctttactaggggcgatgttcctaatgtacaccaaatttgactggggttatcgtggtttgaaacaaagattggagacattgattgatgagagtcagatttatctagaggatgatcctgaaactttgaatcagcttaagtcaagtacatccacaacatatcatttggttcaatattttgaaaaagcacatggaaatttcccagtttatcgaaatactgatgtgacatttctaccaacgggagaagcattctttgaaaaaatgaaagaagaactactaaaagctaaaaagtatatctttttagaattctttatcattgacgaaggaataatgtggggagaaatacttagtattttagaacaaaaggtggaagaaggtgttgaagtccgtatcttatatgatggtatgatagaaattacaaaattatcctttgattatacgaaacgacttgagaaaataggaataaaagcaaaagcattttctccgatttctccttttatttcaacttattataactatcgtgaccatcgaaaaattgttgttattgatggagtagtaggcatgactggtggtgtaaacttagccgatgagtatattaatcacattgagttatttgggcattggaaagattcaggtattatgttaaaggggaaagcagtggatagtttcctcctacttttcttacagatgtggtccattactgaggaaaaaatgttagtagcgccttacctcggtgtacacgatgatttagttgaaaatgaaggctatgttattccttatggagattctcctttagacactgataaagtaggggaaaatgtttatatagatattcttaatcatgctagagaatatgtttacatcatgacaccttatttaatattagacagtgaattggaacatgccattcagtttgctgcggaacgtggtgtagatgtacgtattattatgccgggtatcccagataagccaatcccttatgctcttgctaaaacttactatcaagctttaacaaaatcaggtgttaaaatatatgaatacacccttggatttgttcattcaaaaatattccttagtgataatacaaaggctgttgtaggtacgataaatcttgattaccgtagcctgtatcaccattttgaatgtgctgtttatctttataaggtagatgcaatccaagacatttatcgagattatatggatacattaaataaatcaaggttagttagcttgaaagatataaataatattccaaaattccaaaaagtaattggcatagtgacaaaaactattgctcccctgctt

SEQ ID NO: 6202 - protein, 531 aa, Streptococcus agalactiae
MIWRGEKLISNKVKIVRLLNKSKKSLLRGIFSRTTVIAILLILQLLFLLASYSWLEQYRVWLATVEHILTIGAVLYLVNSEMDALSRVTWLILVMIAPLLGAMFLMYTKFDWGYRGLKQRLETLIDESQIYLEDDPETLNQLKSSTSTTYHLVQYFEKAHGNFPVYRNTDVTFLPTGEAFFEKMKEELLKAKKYIFLEFFIIDEGIMWGEILSILEQKVEEGVEVRILYDGMIEITKLSFDYTKRLEKIGIKAKAFSPISPFISTYYNYRDHRKIVVIDGVVGMTGGVNLADEYINHIELFGHWKDSGIMLKGKAVDSFLLLFLQMWSITEEKMLVAPYLGVHDDLVENEGYVIPYGDSPLDTDKVGENVYIDILNHAREYVYIMTPYLILDSELEHAIQFAAERGVDVRIIMPGIPDKPIPYALAKTYYQALTKSGVKIYEYTLGFVHSKIFLSDNTKAVVGTINLDYRSLYHHFECAVYLYKVDAIQDIYRDYMDTLNKSRLVSLKDINNIPKFQKVIGIVTKTIAPLL

SEQ ID NO: 6203 - DNA, 1575 bp, Streptococcus pyogenes
atgattatcaaaaagaaagcaaaagtaaaatatttgctccataaagggaaacatggatttttaagaggaatttttagtagaacaacaatcattgtattattaattattttgcaattagttttcttatttcaatcttatgcctggatggagcagtaccgtgtttggataacgattcttgaaagtgtctttgctattactattgttttatatttagttaatagtgatatggatgctatttcaagaatgacgtggttaattttgattatgattgctccattactagggtcactgtttttaatttatacaaaattggattggggttacagagggctaaaacaaagaataaatcatcttgtagatctgtctgcaccttaccttagcgatgatgacgctatattagaggtattaaaggatagcacatcaaccacatatcatttagtacagtacttagaaagaagtcgtggcaactttccgatttataataatacaagggtaacttacttcccaacaggtgaaactttttttgatagtttaaaagaacagttattcttagctaaaaagtacatttttcttgaattttttattattgcagaaggccaaatgtggggagaaatccttagtattctagaaaaaaaagtcagtgaaggtgtagaagttagggtgttgtttgatggcatgaacgaactatcaacgctatcatcagattacgccaagagattagaacaaatagggattaaagctaaatcatttttaccgatttcaccctttatctctacctattacaattatcgagatcaccgaaaaattgtcgttattgatggggaggtatcattcactggaggtattaatctagcagatgagtacattaatgaagtagagcgttttggccactggaaagatgctggtttaatgcttgagggtgaagcaacagacagctttttaattttgtttttacaaatgtggtctatcacagaaaaagaactgattattgatccttatctttcagatcattctttaaaacttccttcagatggctatgttattccctacggtgattccccgcttgatactgataaaataggtaaaaatgtttatatagacattttaaatcatgctaaagagtacgtttatatcatgacaccttaccttattttagatagcgagatggaacacgctttacggtttgcatcagaacgtggagtagatatccgaattattatgccaggagtgccagataagggggtaccatatgccttagctaaaacctattataaagctttgatgtcttctggagtaaaaatttatgagtatcaaccagggttcgttcattcaaaggtatttatctctgataatacaaaagcagttgtcggaacaattaacttagactatcgtagcctttatcatcattttgaatgcgcgacttatttatatcgtgtgtcagttattgctgatattgtgaatgactttaatgaagctcaaaagcaatcactattgatgacatcagatcatttgacgcaacgtccttggtatcaaaaattgataggattattagtacgaataattgcccctctcttg

SEQ ID NO: 6204 - protein, 525 aa, Streptococcus pyogenes
MIIKKKAKVKYLLHKGKHGFLRGIFSRTTIIVLLIILQLVFLFQSYAWMEQYRVWITILESVFAITIVLYLVNSDMDAISRMTWLILIMIAPLLGSLFLIYTKLDWGYRGLKQRINHLVDLSAPYLSDDDAILEVLKDSTSTTYHLVQYLERSRGNFPIYNNTRVTYFPTGETFFDSLKEQLFLAKKYIFLEFFIIAEGQMWGEILSILEKKVSEGVEVRVLFDGMNELSTLSSDYAKRLEQIGIKAKSFLPISPFISTYYNYRDHRKIVVIDGEVSFTGGINLADEYINEVERFGHWKDAGLMLEGEATDSFLILFLQMWSITEKELIIDPYLSDHSLKLPSDGYVIPYGDSPLDTDKIGKNVYIDILNHAKEYVYIMTPYLILDSEMEHALRFASERGVDIRIIMPGVPDKGVPYALAKTYYKALMSSGVKIYEYQPGFVHSKVFISDNTKAVVGTINLDYRSLYHHFECATYLYRVSVIADIVNDFNEAQKQSLLMTSDHLTQRPWYQKLIGLLVRIIAPLL

SEQ ID NO: 6205 - DNA, 1074 bp, Streptococcus agalactiae
atgggatataccgttgctatcgtaggtgctacaggtgccgtaggaacacaaatgattcgtcaattagaacaatcgaatttaccaatagaacaagtgaaacttttatcatcaagtcgctcagcaggtaaaattttacattttaaagatgaggctatacgtgttgaagagacaacaaaagaatcattttacgatgttgatattgccttgttttcagctggtggatctatttcagcaaagttcgctccttatgcagtaaagtctggagcagttgtagtagataacacgtcatattttcgtcagaatcctgatgttccactagttgttcctgaagtaaatgctcatgccatgattggtcataatggtatcatagcttgccccaattgttctactattcaaatgatgattgctttagagcccattcgtcaaaaatgggggatagagcgtgttatagtttccacctatcaagctgtttcgggttcaggtgcacgtgctgttgaagaaactaaggaacagttgagacaagttttaaatgataacctttcacctgatcaattaattgcaacagtcttgccatgttctagcgatcaaaaacattatcctatcgcattcaatgcattacctcaaattgatatttttactgataatgattatacgtacgaagaaatgaaaatgactttggagacaaagaaaattatggaagatgctactattaaggtttcagctacctgcgtccgtattcccgttttatcggggcattctgagtccatttatattgagacgaaagaattagcctcaatctctgaaattaaaaaggctattgcaaattttcctggtgccgtcctacaagaccttccatctcagcaaatttaccctcaagcgattaatgctgtaggccatagggagacctttgttggtcgtattcgaaaagaccttgatcaagaaaatggtgttcatatgtgggtagtttcagataatctactgaagggggcagcttggaattctgttcaaattgcagaaacattgcataagaatgggctggttaaaccagcaaaagagttaaaatttgaattaata

SEQ ID NO: 6206 - protein, 358 aa, Streptococcus agalactiae
MGYTVAIVGATGAVGTQMIRQLEQSNLPIEQVKLLSSSRSAGKILHFKDEAIRVEETTKESFYDVDIALFSAGGSISAKFAPYAVKSGAVVVDNTSYFRQNPDVPLVVPEVNAHAMIGHNGIIACPNCSTIQMMIALEPIRQKWGIERVIVSTYQAVSGSGARAVEETKEQLRQVLNDNLSPDQLIATVLPCSSDQKHYPIAFNALPQIDIFTDNDYTYEEMKMTLETKKIMEDATIKVSATCVRIPVLSGHSESIYIETKELASISEIKKAIANFPGAVLQDLPSQQIYPQAINAVGHRETFVGRIRKDLDQENGVHMWVVSDNLLKGAAWNSVQIAETLHKNGLVKPAKELKFELI

SEQ ID NO: 6207 - DNA, 147 bp, Streptococcus agalactiae
ttggagaaagaggctaagcagatcattgatttaaaaaggaatcttttcaaaattgatgtccgggcacaaaaggatgaagagaaagttttcatgcgtacggcgtggttgagtttaccaactctttttttatttgttggaattatgtta

SEQ ID NO: 6208 - protein, 49 aa, Streptococcus agalactiae
MEKEAKQIIDLKRNLFKIDVRAQKDEEKVFMRTAWLSLPTLFLFVGIML

SEQ ID NO: 6209 - DNA, 102 bp, Streptococcus agalactiae
atgctattatggaaaataataatttacaataatagatttaaaagagttgagtttacacgccaaacgcatgaagaaacttttgttttcagaaaactagattca

SEQ ID NO: 6210 - protein, 34 aa, Streptococcus agalactiae
MLLWKIIIYNNRFKRVEFTRQTHEETFVFRKLDS

SEQ ID NO: 6211 - DNA, 600 bp, Streptococcus agalactiae
atggagaaagatatgattccagtagttattgaacaaacaagtcgtggtgaacgttcttatgatatttactcacgtcttttaaaagatcgtattattatgttgacaggccaagttgaggataatatggccaatagtatcattgcacagttattgtttctcgatgcacaagataatacaaaggatatttacctttatgtcaatacaccaggtggttcagtatcggctggacttgctattgtggacaccatgaacttcattaaatcggacgtacagacgattgttatggggatggctgcttcgatgggaaccattattgcttcaagtggtgctaaaggaaaacgttttatgttaccgaatgcagaatatatgatccaccaaccaatgggcggaacaggcggaggtacacagcaatctgatatggctatcgctgctgagcatcttttaaaaacgcgtcatactttagaaaaaatcttagctgataattctggtcaatctattgaaaaagtccatgatgatgcagagcgtgatcgttggatgagtgctcaagaaacacttgattatggctttattgatgctattatggaaaataataatttacaa

SEQ ID NO: 6212 - protein, 200 aa, Streptococcus agalactiae
MEKDMIPVVIEQTSRGERSYDIYSRLLKDRIIMLTGQVEDNMANSIIAQLLFLDAQDNTKDIYLYVNTPGGSVSAGLAIVDTMNFIKSDVQTIVMGMAASMGTIIASSGAKGKRFMLPNAEYMIHQPMGGTGGGTQQSDMAIAAEHLLKTRHTLEKILADNSGQSIEKVHDDAERDRWMSAQETLDYGFIDAIMENNNLQ

SEQ ID NO: 6213 - DNA, 588 bp, Streptococcus pyogenes
atgattcctgttgttattgaacaaactagccgtggagaacgttcttatgacatttattcacgtttattaaaagaccgtattatcatgttaacagggcctgtcgaagacaacatggccaactctgtcatagcgcagctcttattccttgacgcgcaagacaacactaaagatatctacctatatgtcaacacaccaggtggctctgtctcagcaggcttggctattgtcgataccatgaactttatcaaggccgatgtgcaaactattgtcatgggtatggcagcttctatggggacagtcattgcttcatcaggaacaaaaggcaaacgctttatgttaccaaatgcagagtatatgatccaccagccaatgggtggtacaggtggtggcacgcaacaaacggatatggctatcgcagcagaacatctcttaaaaacacgtcaccgtttagaaaaaatcttagcgcaaaatgctggaaaaacgattaaacaaatccataaagatgctgagcgtgattattggatgagtgctgaagaaaccttggcttacggtttcattgatgaaatcatggaaaacaacgaactaaaa

SEQ ID NO: 6214 - protein, 196 aa, Streptococcus pyogenes
MIPVVIEQTSRGERSYDIYSRLLKDRIIMLTGPVEDNMANSVIAQLLFLDAQDNTKDIYLYVNTPGGSVSAGLAIVDTMNFIKADVQTIVMGMAASMGTVIASSGTKGKRFMLPNAEYMIHQPMGGTGGGTQQTDMAIAAEHLLKTRHRLEKILAQNAGKTIKQIHKDAERDYWMSAEETLAYGFIDEIMENNELK

SEQ ID NO: 6215 - DNA, 627 bp, Streptococcus agalactiae
atgggaaaatttcaagtcatttcacatccacttattcaacataaactgtcaatcttacgtcgcactacaacatctactaaagattttcgtgagttagttgatgagattgcgatgttaatgggctatgaagtgtctcgtgatttgcctttagaagatgttgaaatccaaacaccagtagcgacaactgtacaaaaacaattagctgggaaaaagttagcaattgttccaattttacgtgcaggtattggtatggttgatggtttcttaagccttgtgccagctgctaaagttggtcatatcggtatgtatcgtgatgaagagactttccaaccagtcgaatatttagttaagttacctgaagatattgatcaacgtcagatttttgtagttgatccaatgcttgctacaggtgggtctgctattttagcagtagattctctaaaaaaacgtggcgcagctagtatcaaattcgtttgtttagtagcagctccagaaggagtggcagcacttcaagaagcacatccagatgtagatatttataccgctgctttggatgaaaaactcaacgaacatggctacattgttcctggactcggagatgctggggatcgcttatttggtacaaaa

SEQ ID NO: 6216 - protein, 209 aa, Streptococcus agalactiae
MGKFQVISHPLIQHKLSILRRTTTSTKDFRELVDEIAMLMGYEVSRDLPLEDVEIQTPVATTVQKQLAGKKLAIVPILRAGIGMVDGFLSLVPAAKVGHIGMYRDEETFQPVEYLVKLPEDIDQRQIFVVDPMLATGGSAILAVDSLKKRGAASIKFVCLVAAPEGVAALQEAHPDVDIYTAALDEKLNEHGYIVPGLGDAGDRLFGTK

SEQ ID NO: 6217 - DNA, 627 bp, Streptococcus pyogenes
atgggaaaatgtcaagttatttcgcatccgcttatccaacacaaactttcaatcttacgtcgtcaaaccacatcaactaaagattttcgtgagttggttaatgaaattgcgatgctgatgggatatgaagtgtcacgcgaccttcccttagaagatgtcgacatccaaacgccagtctcaaaaacggtccaaaaacagttagctggtaaaaaattagctattgttccgattcttcgtgctggtattgggatggttgatggcttgttaagtttggtaccagctgcaaaagttggccatatcggcatgtaccgtaatgaagaaacccttgaacctgttgaatacctcgttaaactaccagaagatattaaccaacgacaaattttccttgttgatccaatgttggcaacaggtggctcggctatcttagcagtggattcgttgaaaaaacgtggcgcagcaaatattaagtttgtctgtttagttgcagcaccagaaggggtgaaaaaacttcaagaagctcatccagatattgatatcttcacagcagcacttgatgatcatttaaatgaacatggctatatcgtgccaggattgggcgatgctggtgatcgtttatttgggacaaaa

SEQ ID NO: 6218 - protein, 209 aa, Streptococcus pyogenes
MGKCQVISHPLIQHKLSILRRQTTSTKDFRELVNEIAMLMGYEVSRDLPLEDVDIQTPVSKTVQKQLAGKKLAIVPILRAGIGMVDGLLSLVPAAKVGHIGMYRNEETLEPVEYLVKLPEDINQRQIFLVDPMLATGGSAILAVDSLKKRGAANIKFVCLVAAPEGVKKLQEAHPDIDIFTAALDDHLNEHGYIVPGLGDAGDRLFGTK

SEQ ID NO: 6219 - DNA, 1167 bp, Streptococcus agalactiae
atgattacatatgatttcacaagtttaccagaacgtttttcaagtaataccataaaatggaaggcggttcaaaaagatcaagaaatccttcccctttggattgcggatatggattttcctatctttccagaaatgtcggaggctattgaagatttttcacaccaaatggtttttggctatgatagtcctaaagacagtttataccaagctatctctaattgggaagtgcaagaacatggttatcaatttgataaaaaatcattattattaattgatggggttgtaccagcgatttcagttgctatacaagccttcacaaaggagggagatgctgttctaattaataccccagtctatccgccctttgctagaactataaaatacaataatcgtcatttagtttcaaatagtttacttaataataatcagtattttgagattgactttaaacaattagaaaaagatatcattgaaaataatgtaaagctttatattttttgtagtccacacaatcccggtgggcgtgtctggacaaaaggagaaattcaaaaaataggagatatctgtaaacgatataatgttatcctcgtttctgacgaaatacatcaagatttggtattatttgataatgtacaccatagctttaatactgttgattctagttttaaagaattgagtgttattttatctagtgcaactaaaacgtttaatattgcagggactaaaaatagttttgcaataattgaaaatgaaaagttacgctcggattttaagaagaggcaaatagctaacaatcaacaagaaatttcttcattggggttattagctacagaagttgcctttacaaaagagaaacaatggttaaaggccctaaaaatggagttagaaggatcaatagaatacctttatgagcaattaacgcaaaaaactcatatcaaagtgatgaaaccagagggaacttatcttgtttggttagatttttctgcttataatttaacgcatttagaaattcaagaaaaacttcgatatgatgccaaattaatattaaatgatggtttaacttttggaaaagaagggaaaaaacatgctagaatcaatgtcgcagctcctaggtctgttattgaggaggcagttttgcgattagtgacaaactttagaaaaaatgac

SEQ ID NO: 6220 - protein, 389 aa, Streptococcus agalactiae
MITYDFTSLPERFSSNTIKWKAVQKDQEILPLWIADMDFPIFPEMSEAIEDFSHQMVFGYDSPKDSLYQAISNWEVQEHGYQFDKKSLLLIDGVVPAISVAIQAFTKEGDAVLINTPVYPPFARTIKYNNRHLVSNSLLNNNQYFEIDFKQLEKDIIENNVKLYIFCSPHNPGGRVWTKGEIQKIGDICKRYNVILVSDEIHQDLVLFDNVHHSFNTVDSSFKELSVILSSATKTFNIAGTKNSFAIIENEKLRSDFKKRQIANNQQEISSLGLLATEVAFTKEKQWLKALKMELEGSIEYLYEQLTQKTHIKVMKPEGTYLVWLDFSAYNLTHLEIQEKLRYDAKLILNDGLTFGKEGKKHARINVAAPRSVIEEAVLRLVTNFRKND

SEQ ID NO: 6221 - DNA, 546 bp, Streptococcus agalactiae
atgaatattgaaacactaacgcagaaaaatcatcgttccgatagcggacgaaatcatattgttttatttgaaccacagattccagcaaatactggtaatattgctagaacttgtgcggcaacaaatgctcctttgcacatcatacgaccgatgggatttcctattgatgataaaaaaatgaaacgagcgggactggattactgggataagctagatgttagtttctatgatggtttggaagaatttatgttgtcatgtcgagggaaagttcacctaattagcaaatttgctgacaaggtttactcagatgaaaattacaatgatgatcaagaccattattttatgtttggtcgtgaagataaaggattgccagaaacttttatgcgcgagcatgccgaaaaggccttacgaattcccatgaacgatgagcatgtgcgtagcttgaatgtttcaaacactgtttgtatgattgtttatgaagcccttaggcagcaaagctttcctaatttagaattaagccatacttatgaaaatgataaattaaaa

SEQ ID NO: 6222 - protein, 182 aa, Streptococcus agalactiae
MNIETLTQKNHRSDSGRNHIVLFEPQIPANTGNIARTCAATNAPLHIIRPMGFPIDDKKMKRAGLDYWDKLDVSFYDGLEEFMLSCRGKVHLISKFADKVYSDENYNDDQDHYFMFGREDKGLPETFMREHAEKALRIPMNDEHVRSLNVSNTVCMIVYEALRQQSFPNLELSHTYENDKLK

SEQ ID NO: 6223 - DNA, 582 bp, Streptococcus pyogenes
gtgtggttttttaaattaaaaagagtaaatgagattatgacgacaaaagaacttatcaacaaaaacgacaaagtaaaaaaggctcgcaatcatattgtcctgtttcaaccccaaattccacaaaatactggtaatattgctagaacatgtgctgcaactaatgcacctttacatattattaaacccatgggatttcctattgatgaccgcaaaatgaagcgtgcaggcttggattactgggacaagttagaactgcatttttatgatcatttagaacagtttatcaatcaatgtcacggacagcttcacctgattagcaagtttgcagttaataattattctcaagctacttatgctgatggcgattcccattatttcttgtttggacgagaagatacaggcctgccagaagattttatgcgagaacatgctgaaaaagcacttcgtattccgatgaatgatgagcatgtacggagtttaaatgtctcaaatacggtttgtatggtgatttatgaagcccttagacaacagggctttcaagggttagagttaaagcatacttacgaacacgataaactaaaa

SEQ ID NO: 6224 - protein, 194 aa, Streptococcus pyogenes
VWFFKLKRVNEIMTTKELINKNDKVKKARNHIVLFQPQIPQNTGNIARTCAATNAPLHIIKPMGFPIDDRKMKRAGLDYWDKLELHFYDHLEQFINQCHGQLHLISKFAVNNYSQATYADGDSHYFLFGREDTGLPEDFMREHAEKALRIPMNDEHVRSLNVSNTVCMVIYEALRQQGFQGLELKHTYEHDKLK

SEQ ID NO: 6225 - DNA, 567 bp, Streptococcus agalactiae
ttgtattttgcatatgatggttggacaatttttgttaatattgcaccagaagtcaagaatcccaagaagaatttaccacttgcctttgtcattggtccagcgcttatcttattatcatatttggcatttttctatggtttgacacaaattttaggtgctagctttattatgacaaccggtaatgatgctattaattatgcagctaatattattttcggtcctagtgttgggcgtttattatctttcattgttattctatctgtattaggtgttgccaatggacttttacttgggacgatgcgtctacctcaagcttttgcggaacgcggatggatcaaaagtgagaggatggctaacataaatttgaagtatcaaatgtcattgccagctagtttgacggtgacggctgtagctattttttggctttttgttcattttatggttacaaaatttaacttattgccgggtagtgatattagtgaaattgctgtggtgtttaataataccagtttaatcattctttatgttttagtactcagcctttatctcaaaaaagatattaaaaat

SEQ ID NO: 6226 - protein, 189 aa, Streptococcus agalactiae
MYFAYDGWTIFVNIAPEVKNPKKNLPLAFVIGPALILLSYLAFFYGLTQILGASFIMTTGNDAINYAANIIFGPSVGRLLSFIVILSVLGVANGLLLGTMRLPQAFAERGWIKSERMANINLKYQMSLPASLTVTAVAIFWLFVHFMVTKFNLLPGSDISEIAVVFNNTSLIILYVLVLSLYLKKDIKN

SEQ ID NO: 6227 - DNA, 159 bp, Streptococcus agalactiae
gtgggtgacggtattcgtaccttaacaggggaattagttgcaccgagcgttgcagagggtgatactgttttagtcgaaaatggtgctggtctggaagttaaagacggtaacgaaaaagtgacagttgttcgcgaaagtgacattgttgctgtcgttaaa

SEQ ID NO: 6228 - protein, 53 aa, Streptococcus agalactiae
MGDGIRTLTGELVAPSVAEGDTVLVENGAGLEVKDGNEKVTVVRESDIVAVVK

SEQ ID NO: 6229 - DNA, 330 bp, Streptococcus pyogenes
gtgctaactttactaaagattcttttattggaggaaaatttcatgttaaaaccattaggtgaccgtgtggtcgtaagatttgatgatgaaaaagagcagacagtcggtggttttgtccttgcaggcactcataaagagtcaacacgaaaagcgacagtcctcgctgtcagtgaaacgggtgttcgcactattacaggtgatagcgtgctaccttcagtttcagtgggtcaagaggttttagttgaaaatgggcatgatttagaagtaaccgtagatgatgagaaagtttctatcatccgtgaatctgacatcattgctattgttacaaaa

SEQ ID NO: 6230 - protein, 110 aa, Streptococcus pyogenes
VLTLLKILLLEENFMLKPLGDRVVVRFDDEKEQTVGGFVLAGTHKESTRKATVLAVSETGVRTITGDSVLPSVSVGQEVLVENGHDLEVTVDDEKVSIIRESDIIAIVTK

SEQ ID NO: 6231 - DNA, 1620 bp, Streptococcus agalactiae
atggcaaaagatattaaattttcagcagatgcccgctcagcaatggtgcgtggtgttgatattttagctgatacagtcaaagtaacattaggtcctaaaggccgtaatgttgttcttgaaaaagcatttggttctcctttaattacaaatgatggtgtgacaattgctaaagaaattgagctagaagatcactttgaaaatatgggagctaaacttgtgtcagaagtggcttcaaaaactaatgatattgcaggggatggcactacaactgctactgttttgacccaagctattgtacgggaaggtcttaaaaatgtaactgcaggggcaaatccgattggcattcgtcgtggtattgaaacagctgtttcagcagcagttgaagagctaaaagagattgcacaaccagtttcaggcaaagaagctattgctcaagttgcggctgtgtcttcacgttctgaaaaagttggggaatacatttctgaagctatggagcgcgtgggtaatgatggtgttatcactattgaagaatcgcgaggtatggaaacagagcttgaagttgtggaaggaatgcagtttgaccgtgggtacttgtcacagtatatggtaactgataacgagaaaatggtctctgaacttgagaatccgtatatccttattacagataagaaaatttcaaatatccaagaaattttaccattattagaagaggttcttaaaacaaatcgtccgttgctaatcatcgctgatgatgttgatggagaagctctcccaacgcttgttcttaacaaaattcgtggaactttcaatgtcgtagctgttaaagcgcctggatttggtgatcgtcgtaaagccatgctggaagatattgctatcctaacaggaggaactgtcgttactgaagaccttggtttagacttaaaagatgctactatgcaagttttaggacagtctgctaaagtaacagtagataaagattctactgttattgtcgaaggtgccggtgactcatcagcaattgctaatcgcgtagctatcattaagtcacagatggaggctacaacttctgattttgatcgtgaaaaattacaagaacgacttgctaagttagccggtggtgtagcagtaattaaagttggtgcagcgactgaaacagaattaaaagagatgaaacttcgcatcgaagatgcgttaaatgcaacgcgtgctgcagttgaagaaggtattgtttcaggtggaggtacggctcttgtgaacgttattgaaaaagtagcggcactgaaacttaatggtgatgaggagactggacgtaatattgttcttcgtgctctcgaagagcctgttcgtcaaattgcttacaatgctggatatgaaggttcagttattattgaacgtttaaaacagtctgaaattggtacaggatttaatgcggccaatggagaatgggtagatatggttaccacaggtatcattgaccctgtcaaagtaacacgttctgcacttcaaaatgcggcatctgtagcaagtcttatcttgactacagaagcagtagtagcaaataaacctgaaccagaagctcctacagctcctgcaatggatccatctatgatgggtggcttc

SEQ ID NO: 6232 - protein, 540 aa, Streptococcus agalactiae
MAKDIKFSADARSAMVRGVDILADTVKVTLGPKGRNVVLEKAFGSPLITNDGVTIAKEIELEDHFENMGAKLVSEVASKTNDIAGDGTTTATVLTQAIVREGLKNVTAGANPIGIRRGIETAVSAAVEELKEIAQPVSGKEAIAQVAAVSSRSEKVGEYISEAMERVGNDGVITIEESRGMETELEVVEGMQFDRGYLSQYMVTDNEKMVSELENPYILITDKKISNIQEILPLLEEVLKTNRPLLIIADDVDGEALPTLVLNKIRGTFNVVAVKAPGFGDRRKAMLEDIAILTGGTVVTEDLGLDLKDATMQVLGQSAKVTVDKDSTVIVEGAGDSSAIANRVAIIKSQMEATTSDFDREKLQERLAKLAGGVAVIKVGAATETELKEMKLRIEDALNATRAAVEEGIVSGGGTALVNVIEKVAALKLNGDEETGRNIVLRALEEPVRQIAYNAGYEGSVIIERLKQSEIGTGFNAANGEWVDMVTTGIIDPVKVTRSALQNAASVASLILTTEAVVANKPEPEAPTAPAMDPSMMGGF

SEQ ID NO: 6233 - DNA, 1635 bp, Streptococcus pyogenes
ttgaatatggcaaaagatattaaattttcagcagatgcgcgtgctgccatggtgcgcggagttgatatgttagcagataccgtcaaagtaacgcttggtcctaaagggcgcaatgttgttcttgaaaaagcttttggttctcccttaattactaatgacggggtaaccattgctaaagagatcgaattagaagatcattttgaaaacatgggagcaaaattggtgtctgaagtggcttctaaaaccaatgatattgctggtgatgggacgactactgcaacagttttgacacaagccattgttcatgaaggactaaaaaatgtgacagcaggtgctaatccaattggtatccgtcgaggcattgaaacagcaacagcaacagctgttgaagccttgaaagccattgctcaacctgtatctggcaaggaagctattgctcaggtcgctgcagtatcatcacgctctgaaaaagttggagagtatatctcagaagctatggagcgtgtgggcaacgatggtgtgattaccatcgaagaatctcgaggtatggaaacagaacttgaagtggttgaaggcatgcaatttgaccgtggttacctgtctcaatacatggtcacagacaatgaaaaaatggttgcagaccttgaaaacccatttatcttaatcacggataaaaaagtgtcaaacatccaagacattttgccactacttgaggaagttcttaaaaccaaccgtccattactcattattgcagatgatgtggatggtgaagcacttccaacccttgtcttgaacaagattcgtggtactttcaatgtggttgctgtcaaagcgccaggatttggtgatcgtcgtaaagctatgcttgaagacattgctatcttgacaggtggtacagtgattacagaggatctaggacttgaattaaaagatgctacaatgacagcccttggacaggctgctaagattacagttgataaagatagcacagtaattgttgaaggttcaggaagttcagaagctattgctaaccgtattgcactgattaaatcgcaattagaaacaacaacttctgactttgaccgtgaaaaactacaagaacgtttggcgaaattagctggtggtgtagctgttatcaaagtaggagctccaacagagacagctttaaaagaaatgaaacttcgcattgaggatgctctaaatgctacacgtgcagccgttgaagaaggtatcgttgctggtggtggaacagcacttattacggttattgaaaaagtagcagctcttgagcttgagggcgatgatgctactggacgtaacattgtgcttcgtgctctagaagagcctgtacgtcaaattgctttaaatgctgggtacgaaggctccgtagttattgacaagttgaaaaacagccctgcaggaacaggatttaatgctgcaacaggtgagtgggttgatatgattaaaacaggaatcattgaccctgtcaaagtaacacgatcagcgcttcaaaatgcagcttctgtagctagtcttattttgacaacagaagcagttgttgctaataaacctgaaccagctacgccagcgccagcaatgccagcaggtatggatccaggaatgatgggcggcttc

SEQ ID NO: 6234 - protein, 545 aa, Streptococcus pyogenes
LNMAKDIKFSADARAAMVRGVDMLADTVKVTLGPKGRNVVLEKAFGSPLITNDGVTIAKEIELEDHFENMGAKLVSEVASKTNDIAGDGTTTATVLTQAIVHEGLKNVTAGANPIGIRRGIETATATAVEALKAIAQPVSGKEAIAQVAAVSSRSEKVGEYISEAMERVGNDGVITIEESRGMETELEVVEGMQFDRGYLSQYMVTDNEKMVADLENPFILITDKKVSNIQDILPLLEEVLKTNRPLLIIADDVDGEALPTLVLNKIRGTFNVVAVKAPGFGDRRKAMLEDIAILTGGTVITEDLGLELKDATMTALGQAAKITVDKDSTVIVEGSGSSEAIANRIALIKSQLETTTSDFDREKLQERLAKLAGGVAVIKVGAPTETALKEMKLRIEDALNATRAAVEEGIVAGGGTALITVIEKVAALELEGDDATGRNIVLRALEEPVRQIALNAGYEGSVVIDKLKNSPAGTGFNAATGEWVDMIKTGIIDPVKVTRSALQNAASVASLILTTEAVVANKPEPATPAPAMPAGMDPGMMGGF

SEQ ID NO: 6235 - DNA, 753 bp, Streptococcus agalactiae
ttgtatacggaggttacaatgcctaaaaatgaactaaataataaactaaataaactaaagcatgtacaagtctacaataagatttttaacatgattcaagacggtacttattctcctggaatgcaattaccttctgaacccgaattagcagggcaacttaatgttagtcgagctactttacgaaagtcattagcactattacaagaagaccatttggttaaaaatatcagaggaaaaggtaatttcattagagaaaattctagcaacttgtctgaaaacggttacgaaaatagacaacaccctattaaaacttgtctaacttccaaaattacagaagtagaattagaatttcgtgtagaggttcctgcagaagctatcacagcttcacttaaacaagaaacccctgtagttgttattgctgatcgttggtaccacaccgatgatggaccattagcttacacactttcttttatccctatcgaacttatttcagatgctgagatttctttacatgatactaaacagttgttaaacttcattgaagaaggtatctatcaagaaggcatatcaagccactcacaaagccatttgggatatgcgacatctggcaatttttcagcaactaaatataccctatccgatcatggacaattcatattaatacaagaaacaatttttaagcaagagaaaatactaatgtgtaataagcattacgttcccattgagcactttgaattgtccattacctctcat

SEQ ID NO: 6236 - protein, 251 aa, Streptococcus agalactiae
MYTEVTMPKNELNNKLNKLKHVQVYNKIFNMIQDGTYSPGMQLPSEPELAGQLNVSRATLRKSLALLQEDHLVKNIRGKGNFIRENSSNLSENGYENRQHPIKTCLTSKITEVELEFRVEVPAEAITASLKQETPVVVIADRWYHTDDGPLAYTLSFIPIELISDAEISLHDTKQLLNFIEEGIYQEGISSHSQSHLGYATSGNFSATKYTLSDHGQFILIQETIFKQEKILMCNKHYVPIEHFELSITSH

SEQ ID NO: 6237 - DNA, 741 bp, Streptococcus pyogenes
atgtctactaacgacttaaccaaaaaactcaaaaaacttaaacatgtgcaagtatataatactatttttcaacttattcaagatggtacatatagtcctggcatgcaactgccatcagaacctgaacttgctagacagctcaatgtcagtcggatgacactacgtaaatccctagccctcctccaagaggatcatctcataaaaaatatcagaggaaagggaaattttatactcaagactcctgaaactaaatatcaccaaggtttcgaatatcttcaacaccccatatatgcaagcctatcatctgacatcacaaaggttgagttggaatatcggattgaagtgcccactgttgccattacagcatccctaaaacaagaaactcctgttgtgattattgttgatcgctggtatcatagccaaaataaagctattgcttatagtttatcttttatccctattgaggttatttctaaatatgctataaatctcaatcaagaagagccccttcttactttcttagaagagaaaatctatgaatctggtaaagcttctcattcctgcaaccaaatcggctataccaagactggcaattacacagcaactaagtatactctatcagaaaatagtgcttttattttaatccaagaaactctctacaatggtaaagacatcttggtctcaaccaaacactacgttcctgctgatttatttgacttaaaagttcaatctcaaagttgc

SEQ ID NO: 6238 - protein, 247 aa, Streptococcus pyogenes
MSTNDLTKKLKKLKHVQVYNTIFQLIQDGTYSPGMQLPSEPELARQLNVSRMTLRKSLALLQEDHLIKNIRGKGNFILKTPETKYHQGFEYLQHPIYASLSSDITKVELEYRIEVPTVAITASLKQETPVVIIVDRWYHSQNKAIAYSLSFIPIEVISKYAINLNQEEPLLTFLEEKIYESGKASHSCNQIGYTKTGNYTATKYTLSENSAFILIQETLYNGKDILVSTKHYVPADLFDLKVQSQSC

SEQ ID NO: 6239 - DNA, 777 bp, Streptococcus agalactiae
atgcagaattattcaggtgaagtcggattgcaatatcacctacagattcgtccaggtgatgtaggtcgttatgttatcatgccaggtgatccaaaacgttgtgcaaaaattgcagaacattttgataatgcagttcttgtagcagacagccgtgaatatgttacttatacaggtacattaaacggtgaaaaagtcagtgttacttcaactggtattggtggtccatcagcgtctattgcgatggaagaattgaaactctgtggcgctgatacctttatccgtgttggaacatgtggtggtattgaccttgatgttaaaggcggagacatcgttattgcaactggagctatccgtatggaaggtacaagtaaagaatatgctccgattgaatttcctgctgtagctgacttggaggtaacgaatgctctagttaatgcagctaaaaagcttggttacacaagtcacgcaggagtagttcaatgtaaagatgcattttatggacaacatgagccagaacgtatgccagttagttatgaattattaaataaatgggaagcatggaaacgtctgggaacaaaagcgtctgaaatggaatctgcagctctttttgtagcagcaagtcatctaggagttcgttgtggatcagatttccttgttgttggtaatcaagaacgcaacgctttgggtatggataacccaatggctcatgacacagaagcagctattcaagttgctgttgaagcactccgcacacttattgaaaatgataaatcacaa

SEQ ID NO: 6240 - protein, 259 aa, Streptococcus agalactiae
MQNYSGEVGLQYHLQIRPGDVGRYVIMPGDPKRCAKIAEHFDNAVLVADSREYVTYTGTLNGEKVSVTSTGIGGPSASIAMEELKLCGADTFIRVGTCGGIDLDVKGGDIVIATGAIRMEGTSKEYAPIEFPAVADLEVTNALVNAAKKLGYTSHAGVVQCKDAFYGQHEPERMPVSYELLNKWEAWKRLGTKASEMESAALFVAASHLGVRCGSDFLVVGNQERNALGMDNPMAHDTEAAIQVAVEALRTLIENDKSQ

SEQ ID NO: 6241 - DNA, 777 bp, Streptococcus pyogenes
atgcaaaattattcaggtgaagtcggattgcaatatcacctacagattcgtccaggtgatgtaggtcgttatgttatcatgccaggtgatccaaaacgttgtgcaaaaattgcagaacattttgataatgcagttcttgtagcagacagccgtgaatatgttacgtatacaggtacattaaacggtgaaaaagttagtgttacttcaactggtattggtggtccatcagcgtctattgcgatggaagaattgaaactttgtggcgctgatacctttatccgtgttggaacatgtggtggtattgaccttgatgttaaaggcggagacatcgttattgcaactggagctatccgtatggaaggtaccagtaaagaatatgctccgattgaatttcctgctgtagctgacttggaagtgacaaatgctctagttaatgcagctaaaaagcttggttatacaagtcacgcaggagtagttcaatgtaaagatgcattttacgggcaacatgagccagaacgtatgccagttagttatgaattattaaataaatgggaagcatggaaacgtctgggaacaaaagcgtctgaaatggaatctgcagctctttttgtagcagcaagtcatctaggagttcgttgtggatcagatttccttgttgttggtaatcaagaacgcaacgctttgggtatggataacccaatggctcatgatacagaagcagctattcaagttgctgttgaagcactccgcacacttattgaaaatgataaatcacaa

SEQ ID NO: 6242 - protein, 259 aa, Streptococcus pyogenes; identical to SEQ ID NO: 6240

SEQ ID NO: 6243 - DNA, 1212 bp, Streptococcus agalactiae
ttggaagtcatcatgcaatttatttatagtattattggtattttattggtattaggaattgtgtatgcaatttctttcaatcgtaagagtgtttctctaagtttaattggaaaagctcttatcgttcaattcattattgcgctaatcttagtacgtatcccactaggtcaacaagttgttagtgttgtttcaactggagttactaaagtaatcaactgtggtcaagctggattaaattttgtgtttggttcattagcagatagtggagcaaaaactggttttattttcgccattcaaacgcttggcaatattgttttcttatctgccctagttagtctactttattatgtaggaatccttggatttgtagtaaaatggataggtaagggcgttggtaaaattatgaaatcctcagaggttgagagttttgttgccgtagctaatatgtttcttggtcaaacagacagtccaattttggttagcaaatacctaggtcgtatgactgatagtgagataatggttgtgttggtatcaggtatgggaagtatgtcagtttctattcttggtggctacattgcattaggcattccaatggaatatctcttgattgcttcaacaatggttcctattggcagtattctcattgctaaaatcttattgcctcaaacagaacctgttcaaaaaattgatgacattaagatggataataaaggtaataacgccaatgtgattgatgcaatcgctgagggtgcaagcacaggtgcacaaatggctttctcaattggtgctagtttgattgcctttgttggtttagtttctttgattaatatgatgttaagtggattgggaatccgcttagaacaaatcttctcatatgtttttgctccatttggttttcttatgggatttgaccacaaaaacattcttctagaaggaaaccttcttggaagtaagttgattttaaatgagtttgtttcgttccaacaattgggtgacctaatcaaatctttagattatcgtacagcattggtagcaactatttcactttgtggttttgctaatttatcaagtttaggtatttgtgtttcaggtattgctgttctttgtccagagaaacgtggcaccctagctcgacttgttttccgtgcaatgattggtggtattgctgtaagtatgcttagcgcctttatcgtcggtattgtaactctattc

SEQ ID NO: 6244 - protein, 404 aa, Streptococcus agalactiae
MEVIMQFIYSIIGILLVLGIVYAISFNRKSVSLSLIGKALIVQFIIALILVRIPLGQQVVSVVSTGVTKVINCGQAGLNFVFGSLADSGAKTGFIFAIQTLGNIVFLSALVSLLYYVGILGFVVKWIGKGVGKIMKSSEVESFVAVANMFLGQTDSPILVSKYLGRMTDSEIMVVLVSGMGSMSVSILGGYIALGIPMEYLLIASTMVPIGSILIAKILLPQTEPVQKIDDIKMDNKGNNANVIDAIAEGASTGAQMAFSIGASLIAFVGLVSLINMMLSGLGIRLEQIFSYVFAPFGFLMGFDHKNILLEGNLLGSKLILNEFVSFQQLGDLIKSLDYRTALVATISLCGFANLSSLGICVSGIAVLCPEKRGTLARLVFRAMIGGIAVSMLSAFIVGIVTLF

SEQ ID NO: 6245 - DNA, 1212 bp, Streptococcus pyogenes
ttggaagtcatcatgcaatttatttatagtattattggtattttattggtattaggaattgtgtatgcaatttctttcaatcgtaagagtgtttctctaagtttaattggaaaagctcttatcgttcaattcattattgcgctaatcttagtacgtatcccactaggccaacaaattgttagtgttgtttcaactggagttactagcgtaatcaactgtggtcaagctggtttaaattttgtgtttgggtcattagcagatagtggcgcaaaaactggttttattttcgctattcaaacgcttggtaatattgttttcttatctgccctagttagtctactttattatgtaggaatccttggatttgtagtaaaatggataggtaagggcgttggtaaaattatgaaatcctcagaggttgagagttttgttgctgtagctaatatgtttcttggtcaaacagacagtccaatcttggttagcaaatacctaggtcgtatgactgatagtgagataatggttgtgttggtatcaggtatgggaagtatgtcagtttctattcttggtggctatattgcattaggcattccaatggaatatctcttgattgcttcaacaatggttcctattggcagtattctcattgctaaaatcttattgcctcaaacagaacctgttcaaaaaattgatgacattaagatggataataaaggtaataacgccaatgtgattgatgcaatcgctgagggtgcaagcacaggtgcacaaatggctttctcaattggtgctagtttgattgcctttgttggtttagtttctttgattaatatgatgttaagtggattgggaatccgcttagaacaaatcttttcatatgtttttgctccatttggttttcttatgggatttgaccacaaaaacattcttctagaaggaaaccttcttggaagtaagttgattttaaatgagtttgtttcgttccaacaattgggtcacctaatcaaatctttagattatcgtacagcattggtagcaactatttcactctgtggttttgctaatttatcaagtttaggtatttgtgtttcaggtattgctgttctttgcccggagaaacgtagcaccctagctcgacttgttttccgtgcaatgattggtggtattgctgtaagtatgcttagcgcctttatcgtcggtattgtaactctattc

SEQ ID NO: 6246 - protein, 404 aa, Streptococcus pyogenes
LEVIMQFIYSIIGILLVLGIVYAISFNRKSVSLSLIGKALIVQFIIALILVRIPLGQQIVSVVSTGVTSVINCGQAGLNFVFGSLADSGAKTGFIFAIQTLGNIVFLSALVSLLYYVGILGFVVKWIGKGVGKIMKSSEVESFVAVANMFLGQTDSPILVSKYLGRMTDSEIMVVLVSGMGSMSVSILGGYIALGIPMEYLLIASTMVPIGSILIAKILLPQTEPVQKIDDIKMDNKGNNANVIDAIAEGASTGAQMAFSIGASLIAFVGLVSLINMMLSGLGIRLEQIFSYVFAPFGFLMGFDHKNILLEGNLLGSKLILNEFVSFQQLGHLIKSLDYRTALVATISLCGFANLSSLGICVSGIAVLCPEKRSTLARLVFRAMIGGIAVSMLSAFIVGIVTLF

SEQ ID NO: 6247 - DNA, 669 bp, Streptococcus agalactiae
gtggaagtaaaagatattttaaaaacggtagaccatactttgctagcaacaacagcaacatggccagaaatccaaacaattttagatgatgcaatggcttatgaaacagcttcagcatgtattccagcctcttacgtcaaaaaagcagcagagtacgtttcaggtaaattagctatttgtactgttattgggttcccaaatggctatagtacaactgcagcgaaggtttttgaatgtcaagatgctattaaaaatggtgctgatgaaattgacatggtcattaatttgacagatgttaaaaatggggattttgatactgttgaagaagaaattcgtcaaatcaaggctgcatgtcaagaccatatcttaaaagttatcgttgagacatgtcaattaactaaagaagaacttatcgaactttgtggggttgtcacacgttcaggtgcagactttattaaaacctctactggtttttcgacagcaggtgctacatttgaagatgttgaagtgatggcaaaatatgtcggcgaaggtgttaaaattaaggcagcaggtggaatctcatcattggaagatgctgaaaaatttattgctttaggagcttcacgcttgggtactagccgtatcatcaagattgttaagaaccaaaaagttgaagaaggcacttat

SEQ ID NO: 6248 - protein, 223 aa, Streptococcus agalactiae
MEVKDILKTVDHTLLATTATWPEIQTILDDAMAYETASACIPASYVKKAAEYVSGKLAICTVIGFPNGYSTTAAKVFECQDAIKNGADEIDMVINLTDVKNGDFDTVEEEIRQIKAACQDHILKVIVETCQLTKEELIELCGVVTRSGADFIKTSTGFSTAGATFEDVEVMAKYVGEGVKIKAAGGISSLEDAEKFIALGASRLGTSRIIKIVKNQKVEEGTY

SEQ ID NO: 6249 - DNA, 669 bp, Streptococcus pyogenes
gtggaagtaaaagatattttaaaaacggtagaccatactttgctagcaacaacagcaacgtggccagaaatccaaacaattttagatgatgccatggcttatgaaacagcttcagcatgtattccagcttcttacgtcaaaaaagcagcagaatacgtttcaggtaaattagctatttgtactgttattgggttcccaaatggctatagtacaactgcggcgaaggtttttgaatgtcaagatgctattcaaaatggtgctgatgaaattgacatggtcattaatttgacagacgttaaaaatggggattttgatactgttgaagaagaaattcgtcaaatcaaagctaaatgtcaagaccatatcttaaaagttatcgttgagacatgtcaattaactaaagaagaacttatcgaactttgtggagttgtcacacgttcaggtgcagactttattaaaacctctactggtttttcgacagcaggtgctacatttgaagatgttgaagtgatggcaaaatatgtcggcgaaggtgttaaaattaaggcagcaggtggaatctcatcattggaagatgctaaaacatttattgctttaggagcttcacgcttgggtactagccgtatcatcaagattgttaagaacgaagctacaaaaaccgatagctat

SEQ ID NO: 6250 - protein, 223 aa, Streptococcus pyogenes
VEVKDILKTVDHTLLATTATWPEIQTILDDAMAYETASACIPASYVKKAAEYVSGKLAICTVIGFPNGYSTTAAKVFECQDAIQNGADEIDMVINLTDVKNGDFDTVEEEIRQIKAKCQDHILKVIVETCQLTKEELIELCGVVTRSGADFIKTSTGFSTAGATFEDVEVMAKYVGEGVKIKAAGGISSLEDAKTFIALGASRLGTSRIIKIVKNEATKTDSY

SEQ ID NO: 6251 - DNA, 1209 bp, Streptococcus agalactiae
atgtcacaatttgatcgcattcacttagttgtcttagattcagtgggtattggagcggcaccagatgccaatgattttgtcaatgcaggagttcctgatggtgcttcagacacgcttggccacatttcaaaaacagttggacttgcggtgccaaacatggctaaaattggacttggtaatattcctcgtccccaagcgcttaagaccgtccctgcagaagaaaatccaagtggctacgcgacgaagttacaagaagtatcacttggtaaagatacaatgacagggcattgggagatcatgggcttaaatattacagagccatttgatactttctggaatggttttccagaagatattatcacaaagattgaggatttttcaggacgtaaagttattcgtgaagcgaataaaccttattcagggacagctgttattgatgactttggaccacgccaaatggaaactggtgagctcattatctatacctcagctgacccagtcctacaaattgcagctcatgaggatatcatccctctagaagaactctaccggatttgtgaatatgctcgtagtatcacaatggagcgtccagctctccttggtcgtattatcgctcgtccatatgtaggtgaaccaggtaactttacgcgtacagccaaccgtcacgactatgcagtatcaccatttgaagataccgtattaaataaactagatcaagctggcatcgatacttatgctgttggtaaaatcaatgatattttcaatggttcaggcattaatcatgatatgggacataacaaatcaaatagtcatggtattgatactttgataaaaacaatggggttatcagagtttgaaaaaggcttctcctttactaatttggttgactttgatgctctctatggtcaccgtcgtgatcctcatggttatcgtgattgtcttcatgagtttgatgagcgtcttccagagatcatttcagcaatgcgtgacaaagacttacttttgatcactgccgatcatggtaatgacccaacttatgcaggtacagaccatacaagagaatacattcctctcttagcctatagcccatccttcacaggaaacggacttatcccagtagggcatttcgcagatatttcagcaacagttgcggataactttggtgttgatactgcgatgattggagaaagcttcttgcaggacttagta

SEQ ID NO: 6252 - protein, 403 aa, Streptococcus agalactiae; identical to SEQ ID NO: 2738

SEQ ID NO: 6253 - DNA, 1638 bp, Streptococcus agalactiae
atgtttgatttttttaagaaaaaagttgttaaagtgtgcttagttatttttggtatagttttagtatcacttctgagtctaggattcttttatttttcaaagggacaagtacttagtcgttttgtagcagcacgttctcgtacgtcaggtcaagcgtttgataatattaaagaatacatggtttggtcagatacgggagaatctatcacaaatgatgaggccaattacgctaattttgagcccttgtctaaaagtgaggcgcgtaaattagggcaggaaataaaagaaggaaacaaaaatgattcaatgtatctaaagcgtgtaggtagtcgcttaggtatattccctgattatcgtattgctaataagcctatgtctttgaccttgaaaaccaatgttcctaaattggatgttttgttgaatcaaaaaaaggtcgcgacaagcaattcagatcatttttcagtaacggtggaacgtttacctagaacccattatactgctagccttgaagggactagtgacggaaaagagattaaactcaaaaaagattatgatggtaaaaaccaaactattgatttatcggtcgcttttaaatcttttacagtaacaagtaatcttatggatggtaatctttattttggtgataatcgtattgctaaattaaaagatggtagccattccgtagagaattatccagtgactgatggttcaaaagcttatatcaaaaaagtttttaatgatggtgagataacctctcataaacaaaaattaatctctatcgctgataatcagacaatcaaattagatgttgatggtttattaaatgaaaaagaagctggacagaaattgataactgctttcaatcaattgatactttatgtatcaactgggcaagaccctcagactttaggaacagtttttgaaaaaggtgccgaaaatgatttttacaaaggattgaaagaaagtattaaagcaaaatttgtaactgataatcgtaaagcgagccatttcactattcctaatattgtccttaataaaatgacacaggttgggaaagaaagttatcaagttaattttgctgccgattatgattttaattatgataaatcaacagatcctgataagaaaacatatggccacattattcagaatttaactggtaattttattatgaaaaaatcgggaaatagttaccttatttctaatgatggtaaaaaagatatcacagtagctaaggaaactaataaagttaaggctgatcccgtttccatttttccagagaaccttgtaggaagttggaaaggtgaagttgaggacggtacagtaacgatgacttttgataaggatggtaaagttactcagaaaaaagtttacaaggatagtaaatctaaggaaagtaaccattctgctaaagttacgaagttggaggataagggaaatgggctctacctttatcaatatgaatcaggtactgatactacaacttttgtaacaggaggtatcggtggtcttaaagttaaatacgcctatggaataaaaattgaagggaataagatcatcccagtgatctggcagacatctagtgatggagaatttgattaccataaaccactactcagtaagccattaactaagcaa

SEQ ID NO: 6254 - protein, 546 aa, Streptococcus agalactiae
MFDFFKKKVVKVCLVIFGIVLVSLLSLGFFYFSKGQVLSRFVAARSRTSGQAFDNIKEYMVWSDTGESITNDEANYANFEPLSKSEARKLGQEIKEGNKNDSMYLKRVGSRLGIFPDYRIANKPMSLTLKTNVPKLDVLLNQKKVATSNSDHFSVTVERLPRTHYTASLEGTSDGKEIKLKKDYDGKNQTIDLSVAFKSFTVTSNLMDGNLYFGDNRIAKLKDGSHSVENYPVTDGSKAYIKKVFNDGEITSHKQKLISIADNQTIKLDVDGLLNEKEAGQKLITAFNQLILYVSTGQDPQTLGTVFEKGAENDFYKGLKESIKAKFVTDNRKASHFTIPNIVLNKMTQVGKESYQVNFAADYDFNYDKSTDPDKKTYGHIIQNLTGNFIMKKSGNSYLISNDGKKDITVAKETNKVKADPVSIFPENLVGSWKGEVEDGTVTMTFDKDGKVTQKKVYKDSKSKESNHSAKVTKLEDKGNGLYLYQYESGTDTTTFVTGGIGGLKVKYAYGIKIEGNKIIPVIWQTSSDGEFDYHKPLLSKPLTKQ

SEQ ID NO: 6255 - DNA, 1722 bp, Streptococcus pyogenes
gtgaactatctaggtttcttcgaaaatccattagccatttatgatataatagtaaagaaaaacatagaaagttggggtctgttgatgaccaaaccatttcatcataagaaactaaaacaaataactataatagctgcaactagcctttttttattcctgatcggtggtgccttttactactctaaaaatcattgtattaatgcctatcttaaagctcgatcggcccaatcaggaccagtttttgagaatatcaaagcatatctagtctgggatgatactaatgagcagatcacaaatgacgaggcgatgtatactaagtttagaaggtatagtcagaaagaattgaggcaaaaaaagcaggatttaaaagccgctagtcaagatagtgccgttcaagtaaagtctgttggtcgtcgtttttggatttttcctgattatcggattgccataaaacccatggatttaacgataaaaacgaatgtgcctcaagcagacgttcttttaaatcaaaaaaaagttgctgtttctgattcagaacagttctcagtcaagcttgatcggctaccaacggcagaatataccgcaagtatcagaggcaaacacaacgggcgaaacattaaagtcaacaaatcatatgatggtgataatcccgtgctagatttgagtgtgtcttttagaacttttttggtaacaagcaatgctaagcaaggagatctttacttcgatgataaccatattggcacattaaaagatggtcaattacaagtagaagattaccctgttacagaaaacgcacaagcttatatgaaaacaacattcccagatggtgagttaagatcacaaaaatatgctctagctgatgttgaagaaggagcaaccctggagattttagttacagatcttttagaagaggacaaggcaggggagctattagtatcagcttttgatcagctgatgcactacctcagtacaggtcaagactcatctaacttacgtagcgtctttgaggcagggtctagcaacgcattttataggggattgaaagagtccataaaagcgaaatttcagacagatacaagaaaagccagccgtctcaatattccatctatccttttgacaacaatgactcaagtgggtaaaacaacttacgtgcttgatttcacagctacctacgaatttttgtatgacaagtcaacagatcctgagcagcatacctctggacatattaatcaagacttgactggaaaagtgactgtaaaaaaagttggacagcattaccttatcagccagtccggctccaaaaatattactgttgttaaagaggacaatcaactcaaagcgccatctgtctttcctgagtctattttgggaacgtggacaggccaagccaatggtttgagcatccatatgtctctagcatcagatggaacaattacgactaaagttgaagatcaaaaaggcaaccgttctaaagaaactcggacagctaaaattagtaaagttgaagacaaaggcaatggtttttatctttatacgccagatcctggaagtgacataagcgccttagttccagaaggaggattggggggtgcaaatgtcaaatatgcttatggtttcaaaatatctggtaaaacagcctctccagtggtgtggcaggcagcattaacacatgaatttgattataccaagccactttcgggagtaactttgcaaaagcaacca

SEQ ID NO: 6256 - protein, 574 aa, Streptococcus pyogenes
VNYLGFFENPLAIYDIIVKKNIESWGLLMTKPFHHKKLKQITIIAATSLFLFLIGGAFYYSKNHCINAYLKARSAQSGPVFENIKAYLVWDDTNEQITNDEAMYTKFRRYSQKELRQKKQDLKAASQDSAVQVKSVGRRFWIFPDYRIAIKPMDLTIKTNVPQADVLLNQKKVAVSDSEQFSVKLDRLPTAEYTASIRGKHNGRNIKVNKSYDGDNPVLDLSVSFRTFLVTSNAKQGDLYFDDNHIGTLKDGQLQVEDYPVTENAQAYMKTTFPDGELRSQKYALADVEEGATLEILVTDLLEEDKAGELLVSAFDQLMHYLSTGQDSSNLRSVFEAGSSNAFYRGLKESIKAKFQTDTRKASRLNIPSILLTTMTQVGKTTYVLDFTATYEFLYDKSTDPEQHTSGHINQDLTGKVTVKKVGQHYLISQSGSKNITVVKEDNQLKAPSVFPESILGTWTGQANGLSIHMSLASDGTITTKVEDQKGNRSKETRTAKISKVEDKGNGFYLYTPDPGSDISALVPEGGLGGANVKYAYGFKISGKTASPVVWQAALTHEFDYTKPLSGVTLQKQP

SEQ ID NO: 6257 - DNA, 1026 bp, Streptococcus agalactiae
ttgctagtttcttctctagtttcttgttcattttttcttgtcatttcgtcgttgtcttcatcaacacgaaataagtctataaacttatcaaataatttcatagacttattatatcaattttcaataaaatgctataataaaaccatgtcattttcattaaaaattagaaatccatacggtgaacataccgttaaagaactccttgaagattattttttgattccacgtaagattagacattttttgcgtgttaaaaaacatgtacttataaacaatgaatttattaattggcaaactgtcgtccaagaaaacgatactattaccttaatctttgatgatgaggattaccctactaaaaaaattcctctgggcagagcagagcttattgattgtctttatgaggatgaacatcttattatcgttaataaacctgaaggtatgaaaactcacggtaaccaaccaaatgaaatagcactgttaaatcatgtatctgcctattctggacaaacatgctatgttgttcatcgcctagatatggagaccagtggagctgttttatttgctaaaaatccatttatacttccccttatcaatcaacgcttagaacgaaaagaaatttggcgtgaatattgggctttagttgaaggaaaattttcacctaagcatcaagttttgagagacaaaattggacggaaccgtcatgacagacgtaaacgaatcattgattctaaaaacggtcaacatgctatgacaatcattgacgttttgaagtatatccaaaatagtagtctcataaaatgccgactggaaaccggaagaacccatcaaattcgcgttcacttatctcatcatggacatcccttaataggagaccccctctacaacccttcttctaataatgaaaggttaatgctacacgctcaccgattgactctatctcatccattaacttgcgaaactattagcgtagaggccccttcatctactttcgagaagattttaaacaattataaaaaaggagttgga

SEQ ID NO: 6258 - protein, 342 aa, Streptococcus agalactiae
MLVSSLVSCSFFLVISSLSSSTRNKSINLSNNFIDLLYQFSIKCYNKTMSFSLKIRNPYGEHTVKELLEDYFLIPRKIRHFLRVKKHVLINNEFINWQTVVQENDTITLIFDDEDYPTKKIPLGRAELIDCLYEDEHLIIVNKPEGMKTHGNQPNEIALLNHVSAYSGQTCYVVHRLDMETSGAVLFAKNPFILPLINQRLERKEIWREYWALVEGKFSPKHQVLRDKIGRNRHDRRKRIIDSKNGQHAMTIIDVLKYIQNSSLIKCRLETGRTHQIRVHLSHHGHPLIGDPLYNPSSNNERLMLHAHRLTLSHPLTCETISVEAPSSTFEKILNNYKKGVG

SEQ ID NO: 6259 - DNA, 846 bp, Streptococcus pyogenes
ttgacggtcaaagcattattagaggaacaattgttaattccccgtaaaattaggcattttctgagaactaaaaaacatgttcttattaatggtcattctgttaactggcaaagttgtgttaaatacggtgatcaggtcaaacttttttttgatcacgaagattatcctgaaaagattatcgtgatggggcaggccgaaaaagtaacctgcctttatgaagatgagcacatcattattgttaacaaacctgaagggatgaaaacacacggcaatgatccaacagagttggcgctgctcaaccacgtgtctgcttacacgggacagacctgctatgtggttcatcgtctggataaggaaacaagtggggccattttatttgctaaaacaccttttatcttaccaatccttaatcgtcttttagaaaaacgagatatccatcgagaatatttggcactagttcacggatccttagacagtcctagggtaacttaccatcatccaattggtcgtcatcgacatgaccgcagaaaacgtgttgtcgatccgataaatggcaagaaagctattactgaggtaactctagtcaaaaacttccacaaaacggcaagcttactcacttgtcaattacaaactggacggactcatcaaattcgagtccatttagcccatcaaggtcatgttttatttggtgatcctttgtattccaatggaaaaaaagattgtgctcgactgatgctccatgcttatcaattacgtttgaaacaccctctaacccaagaagacatttgcgtgcaagctaaatcagctacatttgacgcagtcttaaacgctcaaaaggctaggaaa

SEQ ID NO: 6260 - protein, 282 aa, Streptococcus pyogenes
LTVKALLEEQLLIPRKIRHFLRTKKHVLINGHSVNWQSCVKYGDQVKLFFDHEDYPEKIIVMGQAEKVTCLYEDEHIIIVNKPEGMKTHGNDPTELALLNHVSAYTGQTCYVVHRLDKETSGAILFAKTPFILPILNRLLEKRDIHREYLALVHGSLDSPRVTYHHPIGRHRHDRRKRVVDPINGKKAITEVTLVKNFHKTASLLTCQLQTGRTHQIRVHLAHQGHVLFGDPLYSNGKKDCARLMLHAYQLRLKHPLTQEDICVQAKSATFDAVLNAQKARK

SEQ ID NO: 6261 - DNA, 2319 bp, Streptococcus agalactiae
atgaaattatttgataagtttatagacttatttcgtgttgatgaagacaacgacgaaatgacaagaaaaaatgaacaagaaactagagaagaaactagcaatttggatggcgaagaagtctatgatattgatgatattacccgacctagtaaatcccagtatcagcgaggcattcgtcaccaaaaggaaaatgctaaatctcgacctgaatggctacaaaaagttgatcgttacctcccttctcctaaaaatcctatccgtcgtttttggcggcgctatcgtattgggaagttgctttttatcgccttaatggcttttattcttatatttggtagctatcttttttatctttctaaaactgctacagttagtgatttacagagtgctctaaaaacaaccaccaccatttatgataagaataaagaatatgctggaaaactttcgggacaaaagggaacttatgtagagttaaatgctatttctgatcatctcaaaaatgctgttatagcaactgaagatagaactttttatgaaaataatggtgtaaactttaagcgattttttttggcagtagctacacttgggaaatttggcggaggctcaactattacccagcaattagcaaaaaatgcttacttgtcacaggaccaaacgattaaacgcaaggcgcgtgaattctttttagcgctagaattgactaagaaatatagcaaggctgagattctgaccatgtatcttaataactcttattttggtaatggtgtttggggtgtggaagatgctagtaggaaatattttggaaccagtgctgctaatttgacagtagatgaggctgctacacttgctggaatgcttaaaggaccagaagtttataatccttattattctgttgaaaatgcaactaaccgaagagatactgttttggcagcgatggttgatgcaggtaaactaaccaagtctcaagctaaagaagctgcttcaattggtatgaaaaatagattagcagatacctatgctggtaaaattaatgattacaggtacccatcctattttgatgctgttgtcaatgaagccattgatacttatggtatttcagaaaaagatattgtcaataatggctataagatttacactgcattagatcaaaattatcaatcaggaatgcaaaaaacatttgatgatactagcctcttccctgtatctgactatgatggtcaatctgcccaaggtgctagcgtagctttagatccaaaaactggtggtgtaagaggtttagttggacgtgttcaaagtactaaagatgcacagtttagaagttttaactacgcgactcaatcaaagagaagtccagcctcaaccataaaacctttagttgtttattcaccagctattgcttcaggatggtcaatagataaagaacttcctaataaagttcaagattttcatggttataaaccaagtaactatggtgggattgagactgaaagtatcccgatgtatcaagcactagctaattcttataatattcctgctgtttatactttagacaaactaggaatcaataaagcctttacttatggcaggaagtttggtctaaatatgtcatcagcaaacaaagagctaggagtggcgctaggtggaagtgtaaccactaatcctttagaaatggcacaagcttactcaacttttgcaaatgacggtataatgcatcgcgctcatttgattactcgaattgagacagctaatggaaaattagtaaagcaatttacagataagcctaagcgagttattagtcgctcagtggctagtaaaatgactagtatgatgttaggaacattctcaaatggtacagctattaatgccaatgtttatggttatacaatggcaggtaaaactggaacaaccgaaacagattttaaccccaatttatctggagaccagtgggtagtcggctatacgcctgatgtcgttattagtcaatgggttggctttaagaacacagataaacaccattatttgacagattctagtgcaggtacagcttcaaatatatttagcacgcaagcttcatatatactaccgtatactaaggggtctagttttactcatattgagaatgcttatttccaaaacggtattggttcagtttataatgcacaagatgctagtaatacaacgaaccaagaatcacgctcaattattaatgatttaaaagattcggcaagtaaggctgcacaagatatttctagagcggtggaagattcaaatttccaagagaaggtaaaagatgcttggaatagtctaaaggactactttaga

SEQ ID NO: 6262 - protein, 773 aa, Streptococcus agalactiae
MKLFDKFIDLFRVDEDNDEMTRKNEQETREETSNLDGEEVYDIDDITRPSKSQYQRGIRHQKENAKSRPEWLQKVDRYLPSPKNPIRRFWRRYRIGKLLFIALMAFILIFGSYLFYLSKTATVSDLQSALKTTTTIYDKNKEYAGKLSGQKGTYVELNAISDHLKNAVIATEDRTFYENNGVNFKRFFLAVATLGKFGGGSTITQQLAKNAYLSQDQTIKRKAREFFLALELTKKYSKAEILTMYLNNSYFGNGVWGVEDASRKYFGTSAANLTVDEAATLAGMLKGPEVYNPYYSVENATNRRDTVLAAMVDAGKLTKSQAKEAASIGMKNRLADTYAGKINDYRYPSYFDAVVNEAIDTYGISEKDIVNNGYKIYTALDQNYQSGMQKTFDDTSLFPVSDYDGQSAQGASVALDPKTGGVRGLVGRVQSTKDAQFRSFNYATQSKRSPASTIKPLVVYSPAIASGWSIDKELPNKVQDFHGYKPSNYGGIETESIPMYQALANSYNIPAVYTLDKLGINKAFTYGRKFGLNMSSANKELGVALGGSVTTNPLEMAQAYSTFANDGIMHRAHLITRIETANGKLVKQFTDKPKRVISRSVASKMTSMMLGTFSNGTAINANVYGYTMAGKTGTTETDFNPNLSGDQWVVGYTPDVVISQWVGFKNTDKHHYLTDSSAGTASNIFSTQASYILPYTKGSSFTHIENAYFQNGIGSVYNAQDASNTTNQESRSIINDLKDSASKAAQDISRAVEDSNFQEKVKDAWNSLKDYFR

SEQ ID NO: 6263 - DNA, 2334 bp, Streptococcus pyogenes
atgagatttctagaacttttacaaaagaaattttttcctaaagcatatcaggaaaaacaattcttaatgcatcaaaaaacgcgtttaacgccacaacacaatcaaaagcagtattcgccaaatgccaatcatttggactcatcagctaccaaaaactcagaacaagaccctgcaacagctctgcaacgcagtagagcctacgaaggaagccctaaaagtcggcccgcttggttgcaaaagctggaagctgttttgccgtctcctcaacgtccaattcggcgtttttggcgccgctatcacatcggaaaactgctaatgattctgattggaactcttgtcttactcttaggatcatacttgttttacttatcaaaaacagctaaagtatctgatttacaagatgccttgaaggctacaacggttatttatgatcacaaaggagagtatgcaggcagtttatctggtcaaaaagggagttatgttgagctcaacgctatttcagatgatcttgagaatgctgttattgccactgaggataggactttttacagtaatagcggtattaatcttaaacgcttcttattggcggtagttacggcgggccgctttggaggtggctcaacgattacacagcaactggctaaaaatgcttatctctcacaagatcagacaattaaacgaaaggcccgagagttttttttggcgttagagttgaccaaaaaatacagtaaaaaagatattcttactatgtaccttaacaactcctactttggaaatggagtttggggagttgaagatgccagtcaaaaatattttggaaccacagctgctaacttaacactggatgaagctgccacattagcaggtatgctcaaaggacctgaaatatataacccttaccattctctaaaaaatgctactcaccgtagagatactgttttaggagcgatggttgatgccaaaaagattacccaaacaaaagctcagcaagctagagcagtagggctaaaaaatcgcttagctgatacttatgttggtaagacagatgactacaaatacccatcctactttgatgctgttattagtgaagcaatagcaacttatggtctttcagaaaaagacattgttaataatggatacaaagtttacactgagctagatcaaaattaccaaactggcatgcagacgacttttaacaacgatgaactatttcctgtttcagcttatgacggtagctctgctcaagcagctagtgttgctttagatcctaaaacaggaggtgttagaggtctgattggtcgtgtgaatagtagtgaaaatccgactttcagaagttttaactatgcgactcaagcaaaacgtagtcccgcatcaacaatcaaaccactcgtggtttacgcgccagccgttgcttcaggatggtcaattgaaaaagaactaccaaataccgttcaagatttcgatggctatcagccacataattatggaaattatgaatcagaagatgttcctatgtatcaagcattagcaaactcttataatattccagcagtttctacattgaacgatatcggaatcgataaagcctttacctatggtaaaacatttgggttagatatgagctctgccaaaaaagagttgggggtagctttaggtggcagcgtgacaaccaatccattggagatggctcaggcatatgctgcctttgccaataatggagtaatccatcctgcgcacttgattaaccggattgaaaatgccaggggtgaagtgcttaaaacctttactgataaggctaaacgtgttgtcagccagtctgttgcagataagatgacagccatgatgctaggtaccttttcaaatggaacagcagtcaatgctaacgtatatggctatacactagctggtaaaacagggacgacagaaaccaacttcaatcccgacttagcaggcgatcagtgggttattggttatacgccagatgttgttattagtcaatgggtaggatttaatcagaccgatgaaaatcattatctaacggattcaagtgcaggcacggcctcagctatttttagcactcaggcatcttacattttgccttataccaagggcagccaatttcatgtagataatgcctacgctcaaaatggtatttcagctgtttatggagtcaatgaaacaggtaatcaatcaggagttgatactcaatctattattgatggtttaagaaaatcagcacaagaagcttcgcaatcactatcaaaagcagtcgatcagtcagggttacgtgataaagcccaatctatttggaaagagattgttgactattttaga

SEQ ID NO: 6264 - protein, 778 aa, Streptococcus pyogenes
MRFLELLQKKFFPKAYQEKQFLMHQKTRLTPQHNQKQYSPNANHLDSSATKNSEQDPATALQRSRAYEGSPKSRPAWLQKLEAVLPSPQRPIRRFWRRYHIGKLLMILIGTLVLLLGSYLFYLSKTAKVSDLQDALKATTVIYDHKGEYAGSLSGQKGSYVELNAISDDLENAVIATEDRTFYSNSGINLKRFLLAVVTAGRFGGGSTITQQLAKNAYLSQDQTIKRKAREFFLALELTKKYSKKDILTMYLNNSYFGNGVWGVEDASQKYFGTTAANLTLDEAATLAGMLKGPEIYNPYHSLKNATHRRDTVLGAMVDAKKITQTKAQQARAVGLKNRLADTYVGKTDDYKYPSYFDAVISEAIATYGLSEKDIVNNGYKVYTELDQNYQTGMQTTFNNDELFPVSAYDGSSAQAASVALDPKTGGVRGLIGRVNSSENPTFRSFNYATQAKRSPASTIKPLVVYAPAVASGWSIEKELPNTVQDFDGYQPHNYGNYESEDVPMYQALANSYNIPAVSTLNDIGIDKAFTYGKTFGLDMSSAKKELGVALGGSVTTNPLEMAQAYAAFANNGVIHPAHLINRIENARGEVLKTFTDKAKRVVSQSVADKMTAMMLGTFSNGTAVNANVYGYTLAGKTGTTETNFNPDLAGDQWVIGYTPDVVISQWVGFNQTDENHYLTDSSAGTASAIFSTQASYILPYTKGSQFHVDNAYAQNGISAVYGVNETGNQSGVDTQSIIDGLRKSAQEASQSLSKAVDQSGLRDKAQSIWKEIVDYFR

SEQ ID NO: 6265 - DNA, 1890 bp, Streptococcus agalactiae
atgaataataacgaaaaaaaagtaaaatactttttaagaaaaacagcttatggtttggcctcaatgtcagcagcgtttgctgtatgtagtggtattgtacacgcggatactagttcaggaatatcggcttcaattcctcataagaaacaagttaatttaggggcggttactctgaagaatttgatttctaaatatcgtggtaatgacaaagctattgctatacttttaagtagagtaaatgattttaatagagcatcacaggatacacttccacaattaattaatagtactgaagcagaaattagaaatattttatatcaaggacaaattggtaagcaaaataaaccaagtgtaactacacatgctaaagttagtgatcaagaactaggtaagcagtcaagacgttctcaagatatcattaagtcattaggtttcctttcatcagaccaaaaagatattttagttaaatctattagctcttcaaaagattcgcaacttattcttaaatttgtaactcaagccacgcaactgaataatgctgaatcaacaaaagctaagcaaatggctcaaaatgacgtggccttaataaaaaatataagccccgaagtcttagaagaatataaagaaaaaattcaaagagctagcactaagagtcaagttgatgagtttgtagcagaagctaaaaaagttgttaattccaataaagaaacgttggtaaatcaggccaatggtaaaaagcaagaaattgctaagttagaaaatttatctaacgatgaaatgttgagatataatactgcaattgataatgtagtgaaacagtataatgaaggtaagctcaatattactgctgcaatgaatgctttaaatagtattaagcaagcagcacaggaagttgcccagaaaaacttacaaaagcagtatgctaaaaaaattgaaagaataagttcaaaaggattagcgttatctaaaaaggctaaagaaatttatgaaaagcataaaagtattttgcctacacctggatattatgcagactctgtgggaacttatttgaataggtttagagataaacaaactttcggaaataggagtgtttggactggtcaaagtggacttgatgaagcaaaaaaaatgcttgatgaagtcaaaaagcttttaaaagaacttcaagaccttaccagaggtactaaagaagataaaaaaccagacgttaagccagaagccaaaccagaggccaaaccagacgttaagccagaggccaaaccagacgttaagccagaagctaagccagacgttaaaccagaagctaagccagacgttaaaccagaagctaagccagacgttaaaccagaagctaagccagacgttaaaccaaaggccaaaccagacgttaagccagaagctaagccagacgttaaaccagacgttaaaccagacgttaagccagaggccaaaccagaggataagccagacgttaaaccagacgttaagccagaagctaaaccagacgttaagccagaggccaaaccagaagctaagccagaagctaagccagaagctaagccagaggccaaaccagaagctaagccagacgttaagccagaagctaaaccagacgttaaaccagaggctaagccagaagctaaaccagaggctaagtcagaagctaaaccagaggctaagctagaagctaaaccagaggccaaaccagcaaccaaaaaatcggttaatactagcggaaacttggcggctaaaaaagctattgaaaacaaaaagtatagtaaaaaattaccatcaacgggtgaagccgcaagtccactcttagcaattgtatcactaattgttatgttaagtgcaggtcttattacgatagttttaaagcataaaaaaaat

SEQ ID NO: 6266 - protein, 630 aa, Streptococcus agalactiae
MNNNEKKVKYFLRKTAYGLASMSAAFAVCSGIVHADTSSGISASIPHKKQVNLGAVTLKNLISKYRGNDKAIAILLSRVNDFNRASQDTLPQLINSTEAEIRNILYQGQIGKQNKPSVTTHAKVSDQELGKQSRRSQDIIKSLGFLSSDQKDILVKSISSSKDSQLILKFVTQATQLNNAESTKAKQMAQNDVALIKNISPEVLEEYKEKIQRASTKSQVDEFVAEAKKVVNSNKETLVNQANGKKQEIAKLENLSNDEMLRYNTAIDNVVKQYNEGKLNITAAMNALNSIKQAAQEVAQKNLQKQYAKKIERISSKGLALSKKAKEIYEKHKSILPTPGYYADSVGTYLNRFRDKQTFGNRSVWTGQSGLDEAKKMLDEVKKLLKELQDLTRGTKEDKKPDVKPEAKPEAKPDVKPEAKPDVKPEAKPDVKPEAKPDVKPEAKPDVKPEAKPDVKPKAKPDVKPEAKPDVKPDVKPDVKPEAKPEDKPDVKPDVKPEAKPDVKPEAKPEAKPEAKPEAKPEAKPEAKPDVKPEAKPDVKPEAKPEAKPEAKSEAKPEAKLEAKPEAKPATKKSVNTSGNLAAKKAIENKKYSKKLPSTGEAASPLLAIVSLIVMLSAGLITIVLKHKKN

SEQ ID NO: 6267 - DNA, 537 bp, Streptococcus agalactiae
atgttagattcttttgataagggttggtttgtactccaaacctactcaggttatgaaaataaagtaaaggaaaatctcttgcaacgtgcgcaaacttataatatgttagacaacattttgcgtgtggaaatccctactcaaactgtaaatgttgagaaaaatgggaaaacaaaagaaattgaagaaaatcgcttcccgggttatgtacttgtggaaatggtaatgactgatgaagcctggtttgttgttcgtaatactccaaacgttactggatttgttggatcacacggcaatcgctctaaaccaacaccgttgttagaagaagagattcgttcaatactcatctcaatgggacaaaccgttgatgtctttgatactaatatcaaggaaggtgatgttgttcaaatcattgatggtgctttcatcggacaagaaggacgtgtagttgagattgagaataacaaagttaaattaatgatcaacatgttcggctcagaaacacaagcagaacttgagttgtaccaagttgcagaatta

SEQ ID NO: 6268 - protein, 179 aa, Streptococcus agalactiae
MLDSFDKGWFVLQTYSGYENKVKENLLQRAQTYNMLDNILRVEIPTQTVNVEKNGKTKEIEENRFPGYVLVEMVMTDEAWFVVRNTPNVTGFVGSHGNRSKPTPLLEEEIRSILISMGQTVDVFDTNIKEGDVVQIIDGAFIGQEGRVVEIENNKVKLMINMFGSETQAELELYQVAEL

SEQ ID NO: 6269 - DNA, 552 bp, Streptococcus pyogenes
atgaaaggaaacatcatgctagattcatttgataagggctggttcgtcctccaaacttactcaggctacgaaaacaaagtaaaagaaaacctcttgcaacgtgcccaaacctataacatgttggacaatattttgcgcgtcgaaattccgacacaaacggttaacgttgaaaaaaatgggcaaaccaaagaaatcgaagaaaatcgctttccagggtatgtcttggttgaaatggtcatgacagatgaagcttggtttgttgtgcgtaacacaccaaacgttacaggttttgtgggatcacacgggaaccgatcaaaaccaacaccacttcttgaagaagaaatccgtgctatcttgttgtctatgggtcaaaccattgatgtctttgataccaatatcaaagaaggcgatgtggttcagatcatagacggtgcctttatgggacaagaaggccgtgtggtagaaatcgaaaacaacaaagtgaaactgatgctcaacatgtttggctctgaaacagtagcagaagttgaactttatcaaattgcagaacta

SEQ ID NO: 6270 - protein, 184 aa, Streptococcus pyogenes
MKGNIMLDSFDKGWFVLQTYSGYENKVKENLLQRAQTYNMLDNILRVEIPTQTVNVEKNGQTKEIEENRFPGYVLVEMVMTDEAWFVVRNTPNVTGFVGSHGNRSKPTPLLEEEIRAILLSMGQTIDVFDTNIKEGDVVQIIDGAFMGQEGRVVEIENNKVKLMLNMFGSETVAEVELYQIAEL

SEQ ID NO: 6271 - DNA, 1203 bp, Streptococcus agalactiae
atggaaaaagcagttgcacttgcagttgattcaaactacttggataaagccttagtaacaataaagtctatttgtgtttataatagaaatataactttttatttattcaatcaagataccccagttgaatgggtacgtaatataaacaggaaactagagcctctaggatcaaaactgattaatgttaaaatatataactatgatattgctcatctaacgacttttctaactgttagtacatggtttagattatttttagcagattatatacctagttcacgtgtactttatttagattcagatattatcgttaacactaatcttgattacttatttgaactagattttaaaggttattacttagcagccgtcaaagatccccataaaaatgaagaaggagggtttaatgctggcatgcttttagctaatctagaactatggcgggaagatgggctcactaaaacattactaaaaacagctgaagaactccaccgagttgtcaaaacaggggatcaaagtatcttgaacattgtttgccataatcgttggttatctctgaacaaaacatggaactttcaaacttatgatgtcgttagccgctataatcatcgatcttatttatatctaaacatagaaaatagaactcctaatattatacattttttaactagtgacaaaccttggaatgaaaatagcgttgcaaggtttagagaactatggtggtattacttccaacttgatttttgccaattaaccggcaagcaaagaaaagtgatttcttacgaaaagtccatggaattgctttctgtttcagatattcatcttttcactcttacatcttccgataatttagaacacattgaatcgctaatttgtagatgtcctactgttcaattccatattggtgcctacacaacagtgtcaaataaacttagcaaactagaacaatatccaaatgtcctagtttaccctgaattaattgaggcaagaattgaaaaattaataacattagccactgcataccttgatattaatcatggtccagaagtaggtaatattttacaaagagttcatttgaaacaaaagccaatttattctttcaacaacacgtctcatcaagagaatataaccaaacatatcgttaatcataattctattgataatatggttgttttaattaacgaattaaacctaaatcaatta

SEQ ID NO: 6272 - protein, 401 aa, Streptococcus agalactiae
MEKAVALAVDSNYLDKALVTIKSICVYNRNITFYLFNQDTPVEWVRNINRKLEPLGSKLINVKIYNYDIAHLTTFLTVSTWFRLFLADYIPSSRVLYLDSDIIVNTNLDYLFELDFKGYYLAAVKDPHKNEEGGFNAGMLLANLELWREDGLTKTLLKTAEELHRVVKTGDQSILNIVCHNRWLSLNKTWNFQTYDVVSRYNHRSYLYLNIENRTPNIIHFLTSDKPWNENSVARFRELWWYYFQLDFCQLTGKQRKVISYEKSMELLSVSDIHLFTLTSSDNLEHIESLICRCPTVQFHIGAYTTVSNKLSKLEQYPNVLVYPELIEARIEKLITLATAYLDINHGPEVGNILQRVHLKQKPIYSFNNTSHQENITKHIVNHNSIDNMVVLINELNLNQL

SEQ ID NO: 6273 - DNA, 90 bp, Streptococcus agalactiae
ttgttaattaccattactccagcattaaacccatatccaagcccaaaaagagctggaactgcagctaaatatgcattgtctagtgaaatt

SEQ ID NO: 6274 - protein, 30 aa, Streptococcus agalactiae
MLITITPALNPYPSPKRAGTAAKYALSSEI

SEQ ID NO: 6275 - DNA, 1194 bp, Streptococcus agalactiae
atgacttatcaaaaaacagttgttttggctggtgattattcctacattagacaaattgaaaccacattaaaatctctctgtgtctatcatgagaatctctcaatttttatttttaatcaagatattcctcaagaatggtttttagctatgaaagatagggttggacaaactggaaatcaaattcaggatgtaaagctcttccatgatcacttatccccaaaatgggaaaataaaaagcttaatcatattaattatatgacctatgctcgttatttcatacctcagtacatctcagctgatacagttttatatcttgactctgacttagttgttactactaatttagataacctctttcaaatttcactagacaatgcatatttagctgcagttccagctctttttgggcttggatatgggtttaatgctggagtaatggtaattaacaaccaacgttggcgacaagaaaatatgactattaaattaattgaaaaaaatcaaaaggaaattgagaatgccaacgaaggggatcaaacaattcttaatcgcatgtttgaaaatcaggtaatttatttagatgatacctacaattttcaaattggttttgatatgggagctgctatcgatgggcataaatttatttttgacatcccaattaccccactcccaaaaattattcactacatttcgggaatcaaaccttggcaaacattatcaaatatgagactccgtgaggtatggtggcactataatttacttgaatggtcaagtatcatatctagtaaaaaagtatttggtttagaccacccaattaaaacacaaaattatcgtctcaatttccttattgttacaacttctgattgtataccatctatctcagaattagtcactgcccttccagattgtctatttcacattgcagcaccaacagttatgtctgacattcttataagcctattagcttttgaaaatatccgccttcataaaacttacactccacctattattgataaattattagcagaagctgatatttatcttgatattaatgtttttggaaaaatggagggcattctacagaaaatgtcacaatctgaaaaaccaattcttactacaagagaatgcaatagccagcttgttccagaaacagtttttgcatctatcgatgatttaattaattatcttcagtctata

SEQ ID NO: 6276 - protein, 398 aa, Streptococcus agalactiae
MTYQKTVVLAGDYSYIRQIETTLKSLCVYHENLSIFIFNQDIPQEWFLAMKDRVGQTGNQIQDVKLFHDHLSPKWENKKLNHINYMTYARYFIPQYISADTVLYLDSDLVVTTNLDNLFQISLDNAYLAAVPALFGLGYGFNAGVMVINNQRWRQENMTIKLIEKNQKEIENANEGDQTILNRMFENQVIYLDDTYNFQIGFDMGAAIDGHKFIFDIPITPLPKIIHYISGIKPWQTLSNMRLREVWWHYNLLEWSSIISSKKVFGLDHPIKTQNYRLNFLIVTTSDCIPSISELVTALPDCLFHIAAPTVMSDILISLLAFENIRLHKTYTPPIIDKLLAEADIYLDINVFGKMEGILQKMSQSEKPILTTRECNSQLVPETVFASIDDLINYLQSI

SEQ ID NO: 6277 - DNA, 210 bp, Streptococcus agalactiae
gtgaaatctttattaacaaaattccctgttcgaaaccatgaccttagactcatatatttagggtgggataaatactttttattgtatcgcaaagccctctctcgttgtctagatacaaaattaacaccaaacaatgcaccagcagagacagatacgataccatctatttttattcctgcatctagaaaagcatctaaaactccagcagta

SEQ ID NO: 6278 - protein, 70 aa, Streptococcus agalactiae
MKSLLTKFPVRNHDLRLIYLGWDKYFLLYRKALSRCLDTKLTPNNAPAETDTIPSIFIPASRKASKTPAV

SEQ ID NO: 6279 - DNA, 849 bp, Streptococcus agalactiae
ttgcctatgttgtctgttggtttagttttagagggtggcggaatgagaggtctttatactgctggagttttagatgcttttctagatgcaggaataaaaatagatggtatcgtatctgtctctgctggtgcattgtttggtgttaattttgtatctagacaacgagagagggctttgcgatacaataaaaagtatttatcccaccctaaatatatgagtctaaggtcatggtttcgaacagggaattttgttaataaagatttcacctattatgaagttcctatgaaattggatgtatttgacgatgaagcatttaaaaaatcaagtattgatttttacgtagttgctacagagatgacatctggtaaacctgaatattttaaaattgatagtgtttttgaacaaatggaaattttacgtgctagttcagcattaccagtagtctcaaagatggttgattggcaggggaaaaagtacttagatggtggtttatctgatagtattcccgttgattttgcccgtggtttaggatttgacaagttgattgttgtgatgactaggccgctcaattatcagaaaaagccttcaagtggacgattgtataaaactctgtataggaaatatcctaattttgtaaagacagcctcgaatcggtaccaacagtataataatagtcttgaaaaggtcatgagccttgaaaaaacaggcgatctatttgcaattagaccgagtaagagcttggttattggccgcttagagaagaatccggataaacttgatagtatttatcagcttggtatgaaagatgctaaaagtgtgatgcctgagctgaatagttatctaatgaaa

SEQ ID NO: 6280 - protein, 283 aa, Streptococcus agalactiae
MPMLSVGLVLEGGGMRGLYTAGVLDAFLDAGIKIDGIVSVSAGALFGVNFVSRQRERALRYNKKYLSHPKYMSLRSWFRTGNFVNKDFTYYEVPMKLDVFDDEAFKKSSIDFYVVATEMTSGKPEYFKIDSVFEQMEILRASSALPVVSKMVDWQGKKYLDGGLSDSIPVDFARGLGFDKLIVVMTRPLNYQKKPSSGRLYKTLYRKYPNFVKTASNRYQQYNNSLEKVMSLEKTGDLFAIRPSKSLVIGRLEKNPDKLDSIYQLGMKDAKSVMPELNSYLMK

SEQ ID NO: 6281 - DNA, 123 bp, Streptococcus agalactiae
atgccaaggcacattccaagaatggttgcaatcatccataatgatgaattcttgacagaaacgtttaagttggtttggataatagttggtaaccagttcatcatgccaaagtatccggcaatc

SEQ ID NO: 6282 - protein, 41 aa, Streptococcus agalactiae
MPRHIPRMVAIIHNDEFLTETFKLVWIIVGNQFIMPKYPAI

SEQ ID NO: 6283 - DNA, 1245 bp, Streptococcus agalactiae
atgtcaccattaaatatcaataagaataattggcgcgccctaatcgctgccattgtcgcatccggaaccgatgatttaaatatcatgttccttgcattttctatgtcaactatcattactgatcttcatttatctgcggcacaggctggttggattgggacaattaccaacttgggaatgctcgtgggaggactaatctttggtttattagctgatcgctacaataaatttaaagttttcaaatggacgattctaatcttttcaatcgcaactggtttagttttcttcactactaatttatcatatctctatatcatgcgcttcattgcaggaattggcgttggtggcgaatatggtatcgctattgccattatggcaggaattgtcccaactaataaaatgggccggatttcttcactaaatggtatcgctggtcaagttggatctattagctcagcactcttagcaggatggctagctccagcactcggttggcggggactttttctctttggccttctccctatagttctcgtcctatggatgcaatttgctgttgatgataaagatatcttagatcaatataatacagacgcagatgatgaacctctagatatcagtataaaagctttatttgatactcctgtattagccacacagagcctagcactaatggttatgacaactgttcagattgccggatactttggcatgatgaactggttaccaactattatccaaaccaacttaaacgtttctgtcaagaattcatcattatggatgattgcaaccattcttggaatgtgccttggcatgctagtatttggtcaattgttagataaatttggaccgcgtttagtatacgggtgtttccttctatcatctgcaatttgtgtctatctctttcaattcgcaacaacaatgccttctatgattataggcggggcagttgtcggattctttgttaatggtatgtttgcaggctatggtgccatgattacacgtctctatccacatcatattcgttcaacagctaacaatcttatcttaaatgttggtcgtgcaataggtggcttttcatctgttatcatcggaatgattctagacgtttcaaatgtctctatggtcatgcttttcttagcaagtctctatatcgttagttttttatcaatgctaagcattaagcaattaaaacgtcaaaaatatcacactaatttaacacaattagatgtcaaaccaactgac

SEQ ID NO: 6284 - protein, 415 aa, Streptococcus agalactiae
MSPLNINKNNWRALIAAIVASGTDDLNIMFLAFSMSTIITDLHLSAAQAGWIGTITNLGMLVGGLIFGLLADRYNKFKVFKWTILIFSIATGLVFFTTNLSYLYIMRFIAGIGVGGEYGIAIAIMAGIVPTNKMGRISSLNGIAGQVGSISSALLAGWLAPALGWRGLFLFGLLPIVLVLWMQFAVDDKDILDQYNTDADDEPLDISIKALFDTPVLATQSLALMVMTTVQIAGYFGMMNWLPTIIQTNLNVSVKNSSLWMIATILGMCLGMLVFGQLLDKFGPRLVYGCFLLSSAICVYLFQFATTMPSMIIGGAVVGFFVNGMFAGYGAMITRLYPHHIRSTANNLILNVGRAIGGFSSVIIGMILDVSNVSMVMLFLASLYIVSFLSMLSIKQLKRQKYHTNLTQLDVKPTD

SEQ ID NO: 6285 - DNA, 2517 bp, Streptococcus agalactiae
ttgacatggagaagtgcgatgacattctataatcacaaagaaatcgaacccaaatggcaagctttttgggcagataatcatacctttaaaacaggaacagacgcatcaaaacctaagttttatgccctagatatgttcccatacccatctggagctggtctccacgttggtcacccagaaggctatacagcaacggatattctcagccgtttcaaacgtgcccaaggtcacaatgtcctccacccaatgggttgggatgcttttggacttcctgctgagcagtacgctatggatactggtaatgacccagctgagtttacagctgaaaacatcgctaacttcaaacgccagattaatgctcttggtttctcatacgactgggatcgtgaagttaacacaactgaccctaactactacaagtggacacagtggatctttaccaagctttatgaaaaaggtctagcttacgaagctgaagttccagttaactgggttgaagaattgggaacagctatcgccaacgaagaggttcttccagatggtacatcagaacgtggtggctacccagttgtcagaaaaccaatgcgccaatggatgctcaaaatcactgcctatgcagagcgcttgctggaagacttggaagaagttgactggccagagtcaatcaaggacatgcaacgcaactggattggtaaatcaactggtgctaatgtaaccttcaaggttaaggatacagataaggacttcactgtctttacaacacgtcctgacaccctttttggtgcgacttacgcagttcttgctcctgagcatgccttggttgatgctattacaacagctgaccaagcagaagccgttgccgaatacaaacgtcaagcgagtctcaaatcagaccttgctcgtacagaccttgccaaagaaaaaactggtgtctggacaggtgcctatgccattaacccagttaatggtaaagaaattccagtttggattgcggactatgtccttgctagctacggtacaggtgctatcatggcagttccagctcacgatgaacgtgactgggaattcgcaaaacaattcaacctagacatcattccagttcttgaaggtgggaatgttgaagaggctgcctttacagaagacggtcttcacatcaactcagacttcctagatggtctcgacaaagcggcagctattgccaaaatggtcgagtggcttgaagcagaaggtgttggtaatgagaaagttacttaccgtcttcgtgactggctcttcagccgtcagcgttactggggtgagccaatcccaatcatccactgggaagatggaacatcaactgcggttcctgagagcgaattgccactagttcttccagttactaaggatatccgtccttcaggtactggtgagagcccacttgctaacttgacagactggttggaagtcactcgtgaagatggcgttaaaggtcgtcgtgagaccaacaccatgccacaatgggcaggttcaagctggtactatctccgctacatcgatccacacaacactgaaaaactagctgacgaggaactcctcaaacaatggttgccagttgatatctatgtcggtggtgcagagcatgccgtgcttcaccttctctatgctcgcttctggcacaaggttctttatgatctcggtgtcgtacctaccaaagagccattccaaaaactctttaaccaagggatgattttgggaacaagctaccgcgacagccgtggtgctcttgtggcaactgacaaggttgaaaaacgtgatggcagcttcttccatgtggaaactggtgaagagcttgaacaagcacctgctaagatgtctaaatcacttaagaacgttgtcaatccagatgatgttgttgagcagtacggtgctgacacccttcgtgtttacgagatgttcatgggaccactcgatgcttcaatcgcttggtctgaagaaggtcttgaaggctcacgtaagttcttggaccgtgtttaccgtttgatcacgactaaagagatcactgaggaaaatagcggagctcttgacaaggtttacaacgaaactgttaaggcagttactgagcaagttgaccaaatgaaattcaacacagctatcgctcaactcatggtctttgtcaatgcagccaacaaggaagacaaactctttagcgactatgccaaaggctttgttcaattgattgcaccattcgcaccgcacttaggtgaagaactctggcaagtcttgacagcctcaggacagtcaatctcttacgtgccatggccaagctatgacgaaagcaaattggttgaaaacgaaatcgaaatcgttgtccaaatcaaaggtaaggtcaaagctaaactcgtcgttgctaaagacctttcacgcgaagaattgcaagatcttgctcttgctaacgaaaaagtccaagccgaaatcgcaggcaaagacatcatcaaagtcatcgcagtaccaaacaaactcgttaatattgtggtgaaa

SEQ ID NO: 6286 - protein, 839 aa, Streptococcus agalactiae
MTWRSAMTFYNHKEIEPKWQAFWADNHTFKTGTDASKPKFYALDMFPYPSGAGLHVGHPEGYTATDILSRFKRAQGHNVLHPMGWDAFGLPAEQYAMDTGNDPAEFTAENIANFKRQINALGFSYDWDREVNTTDPNYYKWTQWIFTKLYEKGLAYEAEVPVNWVEELGTAIANEEVLPDGTSERGGYPVVRKPMRQWMLKITAYAERLLEDLEEVDWPESIKDMQRNWIGKSTGANVTFKVKDTDKDFTVFTTRPDTLFGATYAVLAPEHALVDAITTADQAEAVAEYKRQASLKSDLARTDLAKEKTGVWTGAYAINPVNGKEIPVWIADYVLASYGTGAIMAVPAHDERDWEFAKQFNLDIIPVLEGGNVEEAAFTEDGLHINSDFLDGLDKAAAIAKMVEWLEAEGVGNEKVTYRLRDWLFSRQRYWGEPIPIIHWEDGTSTAVPESELPLVLPVTKDIRPSGTGESPLANLTDWLEVTREDGVKGRRETNTMPQWAGSSWYYLRYIDPHNTEKLADEELLKQWLPVDIYVGGAEHAVLHLLYARFWHKVLYDLGVVPTKEPFQKLFNQGMILGTSYRDSRGALVATDKVEKRDGSFFHVETGEELEQAPAKMSKSLKNVVNPDDVVEQYGADTLRVYEMFMGPLDASIAWSEEGLEGSRKFLDRVYRLITTKEITEENSGALDKVYNETVKAVTEQVDQMKFNTAIAQLMVFVNAANKEDKLFSDYAKGFVQLIAPFAPHLGEELWQVLTASGQSISYVPWPSYDESKLVENEIEIVVQIKGKVKAKLVVAKDLSREELQDLALANEKVQAEIAGKDIIKVIAVPNKLVNIVVK

SEQ ID NO: 6287 - DNA, 2499 bp, Streptococcus pyogenes
atgacattttacgatcacaccgctattgaacccaaatggcaagccttttgggcagataatcatacttttaaaacaggaacagacgcatcaaaacctaagttttatgccctagatatgttcccatacccatctggagctggtctccacgttggtcacccagaaggctatacagcaactgatattctcagccgtttcaaacgtgcccaaggtcacaatattctccacccaatgggttgggatgcctttggacttcctgctgagcagtacgctatggatactggtaatgacccagccgagtttacagctgaaaacatcgctaacttcaaacgccagattaatgctcttggtttctcatacgactgggatcgtgaagttaacacaactgaccctaactactacaagtggacacagtggatctttaccaagctttatgaaaaaggcctagcctacgaagctgaagttcccgttaactgggttgaagaattgggaacagctatcgctaacgaagaggttctccctgatgggacatcagaacgtggcggctacccagttgtcagaaaacccatgcgccaatggatgctcaaaatcactgcctatgcagagcgcttgctagaagacttggaagaagttgactggccagaatcaatcaaggacatgcaacgcaactggattggtaaatcaactggtgctaatgtaaccttcaaggttaaggatacagataaggacttcactgtctttacaacacgtcctgacacgctttttggtgcaacttacgccgttcttgctcctgagcatgccttggttgatgctattacaacagctgaccaagcagaagccgttgccaaatacaaacgtcaagcaagtctcaaatcagaccttgctcgtacagatcttgccaaagaaaaaactggtgtgtggacaggtgcctatgcgattaacccagttaatggtaacgaaatgccagtttggattgcggactatgtccttgccagctacggtactggtgctatcatggctgttccagcccacgatgaacgtgactgggaattcgcaaaacaatttaagctagacatcatccctgttcttgaaggtggtaatgttgaagaggctgcctttacagaagacggtcttcacatcaactcaggcttcctagatggtcttgacaaagcgtcagctattgccaaaatggtcgaatggcttgaagcagaaggcgtcggtaatgagaaagtcacttaccgtcttcgtgactggctctttagccgtcaacgttattggggtgagccaatcccaatcatccactgggaagatgggacctcaacagcggttcctgagagtgagttgccactggttcttccagtaacgaaggatatccgtccttcaggtactggtgagagcccacttgctaacgtgacagactggttggaagtgactcgtgaagatggtgtgaaaggtcgtcgtgagactaacaccatgccacaatgggcaggttcaagctggtattatcttcgttacatcgatccacacaacactgaaaaactggctgacgaggaactcctcaaacaatggttgccagttgatatctatgtcggtggtgcagagcatgccgtgcttcaccttctctacgctcgcttctggcacaaggttctttacgatctcggtgttgtacctaccaaagagccattccaaaaactctttaaccaagggatgattttggggacaagctaccgcgatagccgtggtgctcttgtggcaactgacaaggttgaaaaacgtgatggtagcttcttccatgtggaaactggggaagagcttgaacaagcaccagctaagatgtctaaatcacttaagaacgttgtcaacccagatgatgttgttgagcagtacggtgctgacactcttcgtgtttacgagatgttcatgggaccacttgacgcttccatcgcctggtctgaagaaggtcttgaaggctcacgtaagttcttggaccgtgtttaccgtttgatcacaactaaagagatcactgaggaaaatagcggagcccttgacaaggtttacaacgaaaccgttaaggccgttactgagcaagttgaccaaatgaaattcaacacagctatcgctcaactcatggtatttgtcaatgcagccaacaaggaagacaaactctttagcgactatgccaaaggctttgttcaattgattgcaccatttgcaccgcacttaggtgaggaactctggcaagccttgacagcctcaggtgagtcaatctcttacgtgccatggccaagttatgatgaaagcaaattggttgaaaacgatgtggaaatcgttgtccaaatcaaaggtaaggtcaaagctaaacttgtagttgctaaagacctttcacgcgaagaattacaagaagttgctcttgctaacgaaaaagtccaagccgaaatcgcaggcaaagacatcatcaaagtcatcgcagtaccaaacaaactcgttaatattgttatcaaa

SEQ ID NO: 6288 - protein, 833 aa, Streptococcus pyogenes
MTFYDHTAIEPKWQAFWADNHTFKTGTDASKPKFYALDMFPYPSGAGLHVGHPEGYTATDILSRFKRAQGHNILHPMGWDAFGLPAEQYAMDTGNDPAEFTAENIANFKRQINALGFSYDWDREVNTTDPNYYKWTQWIFTKLYEKGLAYEAEVPVNWVEELGTAIANEEVLPDGTSERGGYPVVRKPMRQWMLKITAYAERLLEDLEEVDWPESIKDMQRNWIGKSTGANVTFKVKDTDKDFTVFTTRPDTLFGATYAVLAPEHALVDAITTADQAEAVAKYKRQASLKSDLARTDLAKEKTGVWTGAYAINPVNGNEMPVWIADYVLASYGTGAIMAVPAHDERDWEFAKQFKLDIIPVLEGGNVEEAAFTEDGLHINSGFLDGLDKASAIAKMVEWLEAEGVGNEKVTYRLRDWLFSRQRYWGEPIPIIHWEDGTSTAVPESELPLVLPVTKDIRPSGTGESPLANVTDWLEVTREDGVKGRRETNTMPQWAGSSWYYLRYIDPHNTEKLADEELLKQWLPVDIYVGGAEHAVLHLLYARFWHKVLYDLGVVPTKEPFQKLFNQGMILGTSYRDSRGALVATDKVEKRDGSFFHVETGEELEQAPAKMSKSLKNVVNPDDVVEQYGADTLRVYEMFMGPLDASIAWSEEGLEGSRKFLDRVYRLITTKEITEENSGALDKVYNETVKAVTEQVDQMKFNTAIAQLMVFVNAANKEDKLFSDYAKGFVQLIAPFAPHLGEELWQALTASGESISYVPWPSYDESKLVENDVEIVVQIKGKVKAKLVVAKDLSREELQEVALANEKVQAEIAGKDIIKVIAVPNKLVNIVIK

SEQ ID NO: 6289 - DNA, 618 bp, Streptococcus agalactiae
gtgagtttttatatgttacattctaaaaaaatacattccttatcgcttattgccgttctctctttagcaacatatacgagtttacaaccaaatcatgtaacggctgaacaatcacaaaaaacatcaactgttcatatgagtcaaaaaactattgaacataagttaaaagttgcagataaagaagctgctcctctctacgctaaaatcgaccatatccaacgacatattgaagtcaaaaaagcaaaagatttaaaagttattgaattgtatattaacaaagatatcaaccaactagagaagcaaaataaacgtctactaactaaattctatacttctattgataatcaaacatgggatagcacaagtgaagtcaaaaaattgattgataagacaaacctatccactaacgaaaaagatagattaaaattatattttgaacaacgtgcttaccttgagacaaggttgaacgaccgctatcaaaaatttgataactctattgaaaaccaaaataaagaactaaaaatattaacgtcaaaaatagaaaaaatctatcaaaaacatggtattacaaaagaggtattaaaaacttactatgctaaaaaaacagtacgagctgac

SEQ ID NO: 6290 - protein, 206 aa, Streptococcus agalactiae
MSFYMLHSKKIHSLSLIAVLSLATYTSLQPNHVTAEQSQKTSTVHMSQKTIEHKLKVADKEAAPLYAKIDHIQRHIEVKKAKDLKVIELYINKDINQLEKQNKRLLTKFYTSIDNQTWDSTSEVKKLIDKTNLSTNEKDRLKLYFEQRAYLETRLNDRYQKFDNSIENQNKELKILTSKIEKIYQKHGITKEVLKTYYAKKTVRAD

SEQ ID NO: 6291 - DNA, 1386 bp, Streptococcus agalactiae
atgaaaaagaaaagtttaattagcaatcttatccttattaatagcatcactctatttcttggtttttacctcatctatttttctgtcaactatgtcattaaagactatgtccatcaaatgacaaggaattccatgcaggcgaatttcaccattttagatagtatctataacaacaagaaaataccagatgaaaatatggttaaccaagatagcatctttgtttggtcttactatgctatttttgaccagcattatcgtatgaaatatggcactgataatcataaaaaagagagccatgatattattcgctatcttacccaaaaaagattgtggcaaatttctaaggaaaaagatggtatgtttgtaaccatcaagaaaaaaacctattatgtaatgaccaaagactactctggtatccttgttgatggtagcataaaaaaagttcctaaagcacagtcgcaactttttcatgtgattaacttttcagacattacttacacccagcatctaattactaaaattaatcattttcttatagttatcttagtactaacctatattcccatgctatttattatgaggaagactttcactggaattagagaatctattcaatcagtacaaacttatatttccagcctttggaaaaatcaaggcaatcatcaatctagtcaaaaagaaattgtcttttctgatttcgatcctcttctacttgagagccaagaaatggcaaatcgaatctaccaagcagaagagagccaaagaaacttctttcaaaatgcctcccacgagttacggacacctttaatgtccatccaaggatatactgagggagttcaagagggtattattgatgccgagctcgcacactctgttattctgcaagagagcaaaaaaatgaaacagctcgtagacgatattatcttactctctaaattagatagtaacttaagtgatcaaaaagatgaattttctttaaatgaattacttaatagtattattgcttatttcaaacccctagctaataaacaaaagattagtattacttatagaccagacaagcatgaaaagttactaaaaggtaacgaagagttgattcaacgagctatcaataatatccttagtaacgcactacgctatgctgtttctcatattgaaatctcttacacaaatcaaaaactaactatctcaaacgacggaccagccatttcaaaagaagacttgccttatattttcgatcgcttctataaaggacatggcggccaaacaggtattggacttgcaatgactaaagaaattatcaagcaacatcatggtaatatcatcgctgagagtgattcgacctcaacaacttttacgatttatttcaattgccacaaaattgcc

SEQ ID NO: 6292 - protein, 462 aa, Streptococcus agalactiae
MKKKSLISNLILINSITLFLGFYLIYFSVNYVIKDYVHQMTRNSMQANFTILDSIYNNKKIPDENMVNQDSIFVWSYYAIFDQHYRMKYGTDNHKKESHDIIRYLTQKRLWQISKEKDGMFVTIKKKTYYVMTKDYSGILVDGSIKKVPKAQSQLFHVINFSDITYTQHLITKINHFLIVILVLTYIPMLFIMRKTFTGIRESIQSVQTYISSLWKNQGNHQSSQKEIVFSDFDPLLLESQEMANRIYQAEESQRNFFQNASHELRTPLMSIQGYTEGVQEGIIDAELAHSVILQESKKMKQLVDDIILLSKLDSNLSDQKDEFSLNELLNSIIAYFKPLANKQKISITYRPDKHEKLLKGNEELIQRAINNILSNALRYAVSHIEISYTNQKLTISNDGPAISKEDLPYIFDRFYKGHGGQTGIGLAMTKEIIKQHHGNIIAESDSTSTTFTIYFNCHKIA

SEQ ID NO: 6293 - DNA, 702 bp, Streptococcus agalactiae
atgggtattgaggtatacatgacaaaaataatttatttcgctgatgatgaaaagaatattcgtgacttggtggttccttttttagaacatgatggtttcactgttcgagcatttgaaactggagaccttctcttagaagcctataaaaaccaaaaacccgatttagttatattagacataatgatgcctggaactaatggtttagatgttatgaaaagcatccgccaatatgataatattcctattatcatgttaacagctagagattctgatgttgatttcattacggcttttaatttaggaactgacgattacttcaccaagcctttttcacctataaaacttagtctacatgttaaagcattgttcaaacgccttgatgaaaaagcaatcaaaaatgacactcagtatcagttcctagatttaactctggataccgaaaagcgaatagccctattatcaaatgaagaaatgcccttaaccaagacagaatttgattttcttttagtattaattgaaaaacctgaaactgctttttctagggaaacactgcttaatcgtatttggggatttgatgatattgaaagcagagcagttgatgacactattaaacgattacgtaaaaaatttaagcaataccacagtcaggttagtatcaaaactgtctggggttacggcttcaaattaatcaaagaggacaaa

SEQ ID NO: 6294 - protein, 234 aa, Streptococcus agalactiae
MGIEVYMTKIIYFADDEKNIRDLVVPFLEHDGFTVRAFETGDLLLEAYKNQKPDLVILDIMMPGTNGLDVMKSIRQYDNIPIIMLTARDSDVDFITAFNLGTDDYFTKPFSPIKLSLHVKALFKRLDEKAIKNDTQYQFLDLTLDTEKRIALLSNEEMPLTKTEFDFLLVLIEKPETAFSRETLLNRIWGFDDIESRAVDDTIKRLRKKFKQYHSQVSIKTVWGYGFKLIKEDK

SEQ ID NO: 6295 - DNA, 4770 bp, Streptococcus agalactiae
ttgattttttatgttttaatagtttttgtaattattatgttacaagaaaaggagatttttatgaacacaaaacagcgtttttcaatccggaaatataagttaggtgccgtatctgtacttttgggaaccctattttttttaggtggtatcacaaatgtagctgctgattctgtcataaataagccatctgatattgcagttgaacagcaagtaaaagacagtccaacgagcatagcaaatgagacacctactaacaacacgtcatcagcccttgcgtcgacagctcaagacaatcttgttacaaaggctaataatagtccaacagaaacacaaccagtagctgagtctcactctcaagccaccgagacattttccccagtcgcaaatcaaccggttgaaagcactcaagaagtttctaaaactcctttaaccaaacaaaatttagcagtcaaatctacaccagctatttctaaagaaacccctcaaaacattgatagtaataaaattatcactgtccccaaagtatggaacacaggctacaaaggagagggaactgttgtagcaattattgactcaggactagatatcaatcacgatgctctccaattaaatgattcgacaaaagcaaaataccaaaacgaacagcaaatgaatgctgctaaagcaaaagctggtataaactatggaaaatggtataacaacaaagtaatctttggtcacaactatgttgatgtcaatacagagctaaaagaggtgaaaagcacttctcatggtatgcacgtaaccagtatcgcaacagctaatcctagcaagaaagatacaaatgaattaatctatggtgttgctcctgaagcacaagtaatgtttatgagagtcttctctgatgaaaaaagaggaactggaccagccctttatgttaaagctattgaagatgccgttaaactcggtgctgacagcattaatttaagtttaggtggagctaatgggtctttagttaatgccgatgaccgacttataaaagctttagagatggctagactcgctggcgtttctgttgttatagcagcaggtaacgacggtacatttgggagtggagcatcaaagccttctgctctttatcctgattatggtttagttggtagtccatcaacagctcgtgaggccatttctgtagcatcatataataatacaacactggttaataaagtcttcaacattatcggattagaaaacaacagaaatctcaacaacggattagctgcttatgcagatcctaaagttagtgataagacctttgaagtagggaaacaatatgattatgttttcgtaggaaaaggaaacgacaatgattataaggacaaaactttaaatggtaaaatcgccttaattgaacgtggagatattacttttacaaaaaaagtcgtcaatgctattaatcacggtgctgtgggagctattatctttaataacaaagctggggaagctaatctaacaatgagtttagatcctgaagcaagtgctattcctgctatttttacccaaaaagagtttggagatgttttagctaaaaacaactataaaattgtatttaacaatatcaaaaataaacaagccaaccctaatgcaggtgtcctatctgacttttcaagctgggggttaacagcagacggacaattaaaacctgacttatctgctcctggaggctctatttacgccgctatcaatgataatgaatatgatatgatgagtgggacaagtatggcttctccccatgtcgctggtgctactgctctagttaaacaatacttattgaaagaacatccagaacttaaaaaaggtgacattgaaagaactgtcaaataccttcttatgagtactgctaaagcacacctaaacaaagatacaggcgcttacacctcaccacgccaacaaggagcaggtattatcgatgtcgcagcagcagttcagacaggattatacctaactggtggggaaaacaactatggcagcgttacattaggaaatattaaagataaaatttcctttgatgttactgttcataatatcaataaagttgcaaaagatttacactatacaacctatttaaatactgatcaagttaaagatggctttgtcacattggctcctcaacaacttggtacatttacagggaaaacgatacggattgaaccagggcaaacccaaacgattacaattgatatagatgtttcgaaataccatgacatgttaaaaaaagtaatgccaaacggctatttcctagaaggctacgtacgttttacagaccctgttgatggtggggaagttcttagtattccttatgttggatttaagggagaattccaaaacttagaagttttagaaaaatccatttataagcttgttgctaacaaagaaaagggattttatttccaaccaaaacaaacaaacgaagttcctggttcagaagattatactgccttaatgactacaagttcagagcctatctactcaacagacggtactagtcctatccaattgaaagccttgggaagctataagtctatagatggaaaatggatcttacaactagatcaaaaaggccagcctcatctagccatttcacctaatgatgaccaaaatcaagatgccgttgcagtgaaaggtgttttcttacgtaatttcaataatttaagagccaaagtctatcgtgcagatgatgttaatttacaaaaaccactatgggtaagtgctccccaagcaggagataaaaattactacagcggaaatactgaaaatccaaaatctacatttttatatgacacagaatggaaaggaaccactactgatggtattcctttagaagatggaaaatacaaatacgttttaacttattactctgatgtccctggctctaagccacaacaaatggtgtttgatatcactttggatagacaagctcctacactaacaacagcaacttatgacaaagatagacgtatcttcaaagctcgtcctgcagtagaacacggggaatctggtatctttagagaacaagttttttacttaaaaaaagataaagatggtcattataatagcgtcttacgtcaacaaggagaagacggtatccttgttgaagataacaaagtatttatcaaacaagaaaaggatggtagctttattctacctaaagaggttaacgatttctctcatgtctactatactgttgaagattatgcaggcaatctagtatcagcaaaactcgaagatttgatcaatattggcaataaaaatggtttagtaaacgtcaaagtgtttagccctgagcttaacagtaatgtcgatattgatttctcttactctgtcaaagatgacaaaggtaatatcatcaaaaagcaacatcacgggaaagacctcaatttattgaaattgccttttggtacctatacgtttgatctattcttatacgatgaggaacgagcaaatctaatcagtcccaaaagtgtcactgtaactatttctgaaaaagatagccttaaagacgtcttatttaaagttaacttactcaagaaagcagccttactcgttgaatttgacaagcttttaccaaaaggagcaacagtccagttggttactaagacaaatactgttgttgatctaccaaaagcaacttattctcctactgactatggtaaaaacatacctgtaggagactatcgtttaaacgtaacgctgcctagtgggtatagcactttagagaacttagatgatttacttgtatccgtaaaagaagatcaggtaaacctaacaaaattgacgctgattaataaagctcctctgattaatgccctagcagaacaaactgatattattacccagcctgtgttttataatgctggaactcacttaaaaaataattacctagctaatcttgaaaaggcacaaactttaattaaaaatagagtggaacaaacaagtattgataatgctattgctgctttgagagaaagtcgccaagctcttaacggtaaagaaacagatacttctttactggcaaaagctattttagctgaaacagaaatcaagggaaactatcaatttgttaatgctagtccattaagccaatcaacttatatcaatcaagtccaattggcgaaaaaccttctacaaaaacctaacgtcactcaatcagaagtagacaaagccttagaaaatcttgatattgctaaaaatcaattaaatggtcatgaaactgattactctggtttacaccatatgataattaaagcaaacgttctgaaacaaacatcatctaaatatcagaacgccagtcaatttgctaaagaaaattataataaccttatcaagaaagcagaattgctgctttccaatagacaagctacacaagctcaagttgaagagttattaaaccaaataaaagcaaccgaacaagagcttgatggccgtgatagagtttcttccgcagagaattatagtcaatcactcaatgataatgactctctcaataccacacctatcaatccgccaaatcagccccaggcgttgatattcaaaaaaggcatgactaaagaaagtgaggttgctcagaagcgtgtcttaggggtgactagccaaaccgataatcaaaaggtaaagacaaacaagcttcctaaaacaggcgaaagcactcctaaaataacctatacaatattgctatttagtctctctatgctaggtctggcaacaatcaaactaaagtctatcaaaagagaa

SEQ ID NO: 6296 - protein, 1590 aa, Streptococcus agalactiae
MIFYVLIVFVIIMLQEKEIFMNTKQRFSIRKYKLGAVSVLLGTLFFLGGITNVAADSVINKPSDIAVEQQVKDSPTSIANETPTNNTSSALASTAQDNLVTKANNSPTETQPVAESHSQATETFSPVANQPVESTQEVSKTPLTKQNLAVKSTPAISKETPQNIDSNKIITVPKVWNTGYKGEGTVVAIIDSGLDINHDALQLNDSTKAKYQNEQQMNAAKAKAGINYGKWYNNKVIFGHNYVDVNTELKEVKSTSHGMHVTSIATANPSKKDTNELIYGVAPEAQVMFMRVFSDEKRGTGPALYVKAIEDAVKLGADSINLSLGGANGSLVNADDRLIKALEMARLAGVSVVIAAGNDGTFGSGASKPSALYPDYGLVGSPSTAREAISVASYNNTTLVNKVFNIIGLENNRNLNNGLAAYADPKVSDKTFEVGKQYDYVFVGKGNDNDYKDKTLNGKIALIERGDITFTKKVVNAINHGAVGAIIFNNKAGEANLTMSLDPEASAIPAIFTQKEFGDVLAKNNYKIVFNNIKNKQANPNAGVLSDFSSWGLTADGQLKPDLSAPGGSIYAAINDNEYDMMSGTSMASPHVAGATALVKQYLLKEHPELKKGDIERTVKYLLMSTAKAHLNKDTGAYTSPRQQGAGIIDVAAAVQTGLYLTGGENNYGSVTLGNIKDKISFDVTVHNINKVAKDLHYTTYLNTDQVKDGFVTLAPQQLGTFTGKTIRIEPGQTQTITIDIDVSKYHDMLKKVMPNGYFLEGYVRFTDPVDGGEVLSIPYVGFKGEFQNLEVLEKSIYKLVANKEKGFYFQPKQTNEVPGSEDYTALMTTSSEPIYSTDGTSPIQLKALGSYKSIDGKWILQLDQKGQPHLAISPNDDQNQDAVAVKGVFLRNFNNLRAKVYRADDVNLQKPLWVSAPQAGDKNYYSGNTENPKSTFLYDTEWKGTTTDGIPLEDGKYKYVLTYYSDVPGSKPQQMVFDITLDRQAPTLTTATYDKDRRIFKARPAVEHGESGIFREQVFYLKKDKDGHYNSVLRQQGEDGILVEDNKVFIKQEKDGSFILPKEVNDFSHVYYTVEDYAGNLVSAKLEDLINIGNKNGLVNVKVFSPELNSNVDIDFSYSVKDDKGNIIKKQHHGKDLNLLKLPFGTYTFDLFLYDEERANLISPKSVTVTISEKDSLKDVLFKVNLLKKAALLVEFDKLLPKGATVQLVTKTNTVVDLPKATYSPTDYGKNIPVGDYRLNVTLPSGYSTLENLDDLLVSVKEDQVNLTKLTLINKAPLINALAEQTDIITQPVFYNAGTHLKNNYLANLEKAQTLIKNRVEQTSIDNAIAALRESRQALNGKETDTSLLAKAILAETEIKGNYQFVNASPLSQSTYINQVQLAKNLLQKPNVTQSEVDKALENLDIAKNQLNGHETDYSGLHHMIIKANVLKQTSSKYQNASQFAKENYNNLIKKAELLLSNRQATQAQVEELLNQIKATEQELDGRDRVSSAENYSQSLNDNDSLNTTPINPPNQPQALIFKKGMTKESEVAQKRVLGVTSQTDNQKVKTNKLPKTGESTPKITYTILLFSLSMLGLATIKLKSIKRE

SEQ ID NO: 6297 - DNA, 4941 bp, Streptococcus pyogenes
gtggagaaaaagcaacgtttttcccttagaaaatacaaatcaggaacgttttcggtcttaataggaagcgttttcttggtgatgacaacaacagtagcagcagatgagctaagcacaatgagcgaaccaacaatcacgaatcacgctcaacaacaagcgcaacatctcaccaatacagagttgagctcagctgaatcaaaatctcaagacacatcacaaatcactctcaagacaaatcgtgaaaaagagcaatcacaagatctagtctctgagccaaccacaactgagctagctgacacagatgcagcatcaatggctaatacaggttctgatgcgactcaaaaaagcgcttctttaccgccagtcaatacagatgttcacgattgggtaaaaaccaaaggagcttgggacaagggatacaaaggacaaggcaaggttgtcgcagttattgacacagggatcgatccggcccatcaaagcatgcgcatcagtgatgtatcaactgctaaagtaaaatcaaaagaagacatgctagcacgccaaaaagccgccggtattaattatgggagttggataaatgataaagttgtttttgcacataattatgtggaaaatagcgataatatcaaagaaaatcaattcgaggattttgatgaggactgggaaaactttgagtttgatgcagaggcagagccaaaagccatcaaaaaacacaagatctatcgtccccaatcaacccaggcaccgaaagaaactgttatcaaaacagaagaaacagatggttcacatgatattgactggacacaaacagacgatgacaccaaatacgagtcacacggtatgcatgtgacaggtattgtagccggtaatagcaaagaagccgctgctactggagaacgctttttaggaattgcaccagaggcccaagtcatgttcatgcgtgtttttgccaacgacatcatgggatcagctgaatcactctttatcaaagctatcgaagatgccgtggctttaggagcagatgtgatcaacctgagtcttggaaccgctaatggggcacagcttagtggcagcaagcctctaatggaagcaattgaaaaagctaaaaaagccggtgtatcagttgttgtagcagcaggaaatgagcgcgtctatggatctgaccatgatgatccattggcgacaaatccagactatggtttggtcggttctccctcaacaggtcgaacaccaacatcagtggcagctataaacagtaagtgggtgattcaacgtctaatgacggtcaaagaattagaaaaccgtgccgatttaaaccatggtaaagccatctattcagagtctgtcgactttaaagacataaaagatagcctaggttatgataaatcgcatcaatttgcttatgtcaaagagtcaactgatgcgggttataacgcacaagacgttaaaggtaaaattgctttaattgaacgtgatcccaataaaacctatgacgaaatgattgctttggctaagaaacatggagctctgggagtacttatttttaataacaagcctggtcaatcaaaccgctcaatgcgtctaacagctaatgggatggggataccatctgctttcatatcgcacgaatttggtaaggccatgtcccaattaaatggcaatggtacaggaagtttagagtttgacagtgtggtctcaaaagcaccgagtcaaaaaggcaatgaaatgaatcatttttcaaattggggcctaacttctgatggctatttaaaacctgacattactgcaccaggtggcgatatctattctacctataacgataaccactatggtagccaaacaggaacaagtatggcctctcctcagattgctggcgccagccttttggtcaaacaatacctagaaaagactcagccaaacttgccaaaagaaaaaattgctgatatcgttaagaacctattgatgagcaatgctcaaattcatgttaatccagagacaaaaacgaccacctcaccgcgtcagcaaggggcaggattacttaatattgacggagctgtcactagcggcctttatgtgacaggaaaagacaactatggcagtatatcattaggcaacatcacagatacgatgacgtttgatgtgactgttcacaacctaagcaataaagacaaaacattacgttatgacacagaattgctaacagatcatgtagacccacaaaagggccgcttcactttgacttctcactccttaaaaacgtaccaaggaggagaagttacagtcccagccaatggaaaagtgactgtaagggttaccatggatgtctcacagttcacaaaagagctaacaaaacagatgccaaatggttactatctagaaggttttgtccgctttagagatagtcaagatgaccaactaaatagagtaaacattccttttgttggttttaaagggcaatttgaaaacttagcagttgcagaagagtccatttacagattaaaatctcaaggcaaaactggtttttactttgatgaatcaggtccaaaagacgatatctatgtcggtaaacactttacaggacttgtcactcttggttcagagaccaatgtgtcaaccaaaacgatttctgacaatggtctacacacacttggcacctttaaaaatgcagatggcaaatttatcttagaaaaaaatgcccaaggaaaccctgtcttagccatttctccaaatggtgacaacaaccaagattttgcagccttcaaaggtgttttcttgagaaaatatcaaggcttaaaagcaagtgtctaccatgctagtgacaaggaacacaaaaatccactgtgggtcagcccagaaagctttaaaggagataaaaactttaatagtgacattagatttgcaaaatcaacgaccctgttaggcacagcattttctggaaaatcgttaacaggagctgaattaccagatgggcattatcattatgtggtgtcttattacccagatgtggtcggtgccaaacgtcaagaaatgacatttgacatgattttagaccgacaaaaaccggtactatcacaagcaacatttgatcctgaaacaaaccgattcaaaccagaacccctaaaagaccgtggattagctggtgttcgcaaagacagtgtcttttatctagaaagaaaagacaacaagccttatacagttacgataaacgatagctacaaatatgtctcagtagaagacaataaaacatttgtggagcgacaagctgatggcagctttatcttgccgcttgataaagcaaaattaggggatttctattacatggtcgaggattttgcagggaacgtggccatcgctaagttaggagatcacttaccacaaacattaggtaaaacaccaattaaacttaagcttacagacggtaattatcagaccaaagaaacgcttaaagataatcttgaaatgacacagtctgacacaggtctagtcacaaatcaagcccagctagcagtggtgcaccgcaatcagccgcaaagccagctaacaaagatgaatcaggatttctttatctcaccaaacgaagatgggaataaagactttgtggcctttaaaggcttgaaaaataacgtgtataatgacttaacggttaacgtatacgctaaagatgaccaccaaaaacaaacccctatctggtctagtcaagcaggcgctagtgtatccgctattgaaagtacagcctggtatggcataacagcccgaggaagcaaggtgatgccaggtgattatcagtatgttgtgacctatcgtgacgaacatggtaaagaacatcaaaagcagtacaccatatctgtgaatgacaaaaaaccaatgatcactcagggacgttttgataccattaatggcgttgaccactttactcctgacaagacaaaagcccttgactcatcaggcattgtccgcgaagaagtcttttacttggccaagaaaaatggccgtaaatttgatgtgacagaaggtaaagatggtatcacagttagtgacaataaggtgtatatccctaaaaatccagatggttcttacaccatttcaaaaagagatggtgtcacactgtcagattattactaccttgtcgaagatagagctggtaatgtgtcttttgctaccttgcgtgacctaaaagcggtcggaaaagacaaagcagtagtcaattttggattagacttaccggtccctgaagacaaacaaatagtgaactttacctaccttgtgcgggatgcagatggtaaaccgattgaaaacctagagtattataataactcaggtaacagtcttatcttgccatacggcaaatacacggtcgaattgttgacctatgacaccaatgcagccaaactagagtcagataaaatcgtttcctttaccttgtcagctgataacaacttccaacaagttacctttaagataacgatgttagcaacttctcaaataactgcccactttgatcatcttttgccagaaggcagtcgcgttagccttaaaacagctcaagatcagctaatcccgcttgaacagtccttgtatgtgcctaaagcttatggcaaaaccgttcaagaaggcacttacgaagttgttgtcagcctgcctaaaggctaccgtatcgaaggcaacacaaaggtgaataccctaccaaatgaagtgcacgaactatcattacgccttgtcaaagtaggagatgcctcagattcaactggtgatcataaggttatgtcaaaaaataattcacaggctttgacagcctctgccacaccaaccaagtcaacgacctcagcaacagcaaaagccctaccatcaacgggtgaaaaaatgggtctcaagttgcgcatagtaggtcttgtgttactcggacttacttgcgtctttagccgaaaaaaatcaaccaaagat

SEQ ID NO: 6298 - protein, 1647 aa, Streptococcus pyogenes
VEKKQRFSLRKYKSGTFSVLIGSVFLVMTTTVAADELSTMSEPTITNHAQQQAQHLTNTELSSAESKSQDTSQITLKTNREKEQSQDLVSEPTTTELADTDAASMANTGSDATQKSASLPPVNTDVHDWVKTKGAWDKGYKGQGKVVAVIDTGIDPAHQSMRISDVSTAKVKSKEDMLARQKAAGINYGSWINDKVVFAHNYVENSDNIKENQFEDFDEDWENFEFDAEAEPKAIKKHKIYRPQSTQAPKETVIKTEETDGSHDIDWTQTDDDTKYESHGMHVTGIVAGNSKEAAATGERFLGIAPEAQVMFMRVFANDIMGSAESLFIKAIEDAVALGADVINLSLGTANGAQLSGSKPLMEAIEKAKKAGVSVVVAAGNERVYGSDHDDPLATNPDYGLVGSPSTGRTPTSVAAINSKWVIQRLMTVKELENRADLNHGKAIYSESVDFKDIKDSLGYDKSHQFAYVKESTDAGYNAQDVKGKIALIERDPNKTYDEMIALAKKHGALGVLIFNNKPGQSNRSMRLTANGMGIPSAFISHEFGKAMSQLNGNGTGSLEFDSVVSKAPSQKGNEMNHFSNWGLTSDGYLKPDITAPGGDIYSTYNDNHYGSQTGTSMASPQIAGASLLVKQYLEKTQPNLPKEKIADIVKNLLMSNAQIHVNPETKTTTSPRQQGAGLLNIDGAVTSGLYVTGKDNYGSISLGNITDTMTFDVTVHNLSNKDKTLRYDTELLTDHVDPQKGRFTLTSHSLKTYQGGEVTVPANGKVTVRVTMDVSQFTKELTKQMPNGYYLEGFVRFRDSQDDQLNRVNIPFVGFKGQFENLAVAEESIYRLKSQGKTGFYFDESGPKDDIYVGKHFTGLVTLGSETNVSTKTISDNGLHTLGTFKNADGKFILEKNAQGNPVLAISPNGDNNQDFAAFKGVFLRKYQGLKASVYHASDKEHKNPLWVSPESFKGDKNFNSDIRFAKSTTLLGTAFSGKSLTGAELPDGHYHYVVSYYPDVVGAKRQEMTFDMILDRQKPVLSQATFDPETNRFKPEPLKDRGLAGVRKDSVFYLERKDNKPYTVTINDSYKYVSVEDNKTFVERQADGSFILPLDKAKLGDFYYMVEDFAGNVAIAKLGDHLPQTLGKTPIKLKLTDGNYQTKETLKDNLEMTQSDTGLVTNQAQLAVVHRNQPQSQLTKMNQDFFISPNEDGNKDFVAFKGLKNNVYNDLTVNVYAKDDHQKQTPIWSSQAGASVSAIESTAWYGITARGSKVMPGDYQYVVTYRDEHGKEHQKQYTISVNDKKPMITQGRFDTINGVDHFTPDKTKALDSSGIVREEVFYLAKKNGRKFDVTEGKDGITVSDNKVYIPKNPDGSYTISKRDGVTLSDYYYLVEDRAGNVSFATLRDLKAVGKDKAVVNFGLDLPVPEDKQIVNFTYLVRDADGKPIENLEYYNNSGNSLILPYGKYTVELLTYDTNAAKLESDKIVSFTLSADNNFQQVTFKITMLATSQITAHFDHLLPEGSRVSLKTAQDQLIPLEQSLYVPKAYGKTVQEGTYEVVVSLPKGYRIEGNTKVNTLPNEVHELSLRLVKVGDASDSTGDHKVMSKNNSQALTASATPTKSTTSATAKALPSTGEKMGLKLRIVGLVLLGLTCVFSRKKSTKD

SEQ ID NO: 6299 - DNA, 693 bp, Streptococcus agalactiae
atgatggaaaaaggatttaaagagggagtgaaagatgccttgcccacagctttagggtatatctcaataggcttggcgtttgggatagttgcttcagcatcagatttatctgcaatagaagttggtcttatgagtgccttggtatatgggggatctgctcagtttgctatgtgtgcgctattattagcaaaagcagacttgatgactattacgatgacagtatttttagttaatttgagaaatatgttaatgagtttacacgcgactactatcttcaagtctgctcacctaatgaatcaattagccataggaactctaataacagatgagagctacggcgttttacttggagaagcattacatcacaaagttgtatcgcctagttggatgcatggtaataatgtgatgagttatttgacatgggtaatctcaacgataataggaactttactggggagtactattcctaatccagaaatgtttggtttagactttgcattagtcgccatgtttataggtctctttgtatttcagttgtttgggatgttatctgatggaaagcgacttgttgtatatgttcttgcttctgtaggtttaagttacttcttattagctacttttttgtcaggagccttatcagtattgcttgcgactgttgttggatgtagtgtgggagttgttttagatgataaa

SEQ ID NO: 6300 - protein, 231 aa, Streptococcus agalactiae
MMEKGFKEGVKDALPTALGYISIGLAFGIVASASDLSAIEVGLMSALVYGGSAQFAMCALLLAKADLMTITMTVFLVNLRNMLMSLHATTIFKSAHLMNQLAIGTLITDESYGVLLGEALHHKVVSPSWMHGNNVMSYLTWVISTIIGTLLGSTIPNPEMFGLDFALVAMFIGLFVFQLFGMLSDGKRLVVYVLASVGLSYFLLATFLSGALSVLLATVVGCSVGVVLDDK

SEQ ID NO: 6301 - DNA, 249 bp, Streptococcus agalactiae
gtgacaactagagttggtatgccagccaataaatctaaccattttagtgttggcaattgtcctaatttaactgaaaaaaagctagagaatgttagggcaaataaaatagaaagaggaagaaattttaaaaatttcacaagactatttggtagccctttgtattttacaaatatgaatggagcgactcttggcacccaagaaacaacaaaacctaaaagaatagcaagaaaaacggtactatttatcatc

SEQ ID NO: 6302 - protein, 83 aa, Streptococcus agalactiae
MTTRVGMPANKSNHFSVGNCPNLTEKKLENVRANKIERGRNFKNFTRLFGSPLYFTNMNGATLGTQETTKPKRIARKTVLFII

SEQ ID NO: 6303 - DNA, 2250 bp, Streptococcus agalactiae
ttgatggaggaaattatggtaaaagtttcaaatttagggtatccacgtcttggtgaacagcgcgaatggaagcaagcgatcgaagctttctgggcagggaatcttgaacaaaaagatttagaaaaacaactaaaacaattacgtatcaatcatttaaagaaacaaaaagaggcaggtattgaccttattccagtgggggatttttcttgttatgatcatgttttggatttgtcatttcaattcaatgtaatcccaaagcgtttcgatgagtatgagaggaatttagacctttattttgctattgcaagaggtgataaagataatgtcgcatcatctatgaaaaagtggtttaataccaactaccactacatagtcccagaatgggaggttgagactaaacctcacttgcagaataattacttacttgatctttatctagaagctagggaagtagttggtgataaagcaaagccggttatcactggtccaataacctatgtttccttatcatcaggaattgtcgactttgaagcgactgttcagcggttattaccactttataagcaggtctttcaagatctgatagatgcaggcgccacctatattcagattgatgagccgatatttgtaactgatgaaggtgaacttttagtagatatagctaagtctgtttatgatttttttgcaagagaagtaccacaagcccacttcatctttcaaacctactttgaatcagcagtctgtttagataaactctctaagctgccagtaacgggatttggccttgattttatacatggtagggcggaaaatttagctgctgttaagcaaggtctattccgcgaaaaagaattatttgcaggaattgttaatggtcgaaatatctgggcagtaaatttagaagaaacgttggctttattggaagagataggtccctttgttaaacgattgactcttcaaccttcttcaagtcttttacatgtaccggtgacgactaaatacgaaacacatttagaccctgtgttaaagaatggcttatcatttgctgatgaaaaactaaaggaattagaactattagctagtgcttttgatggtaataaaacaaagggatatcacgaagctttatctcgtttttcagctcttcaagctgctgattttcgtcatgtagcattggaatcattagcagaagtaaagcttgaacgaagtccgtataaattacgccaagctttgcaagctgaaaaattacagttaccgattttaccaacaacaactattggatcctttcctcaatcacctgaaattaggaagaaacgccttgcttggaaaagaggaaatctatctgactcagattataaagatttcataaaaactgaaattagaagatggattgctattcaagaagatcttgatcttgatgtgttagtacatggcgaatttgagcgtgttgatatggttgaattttttggtcaaaagttagctggttttacgacaaccaaattaggctgggtacagtcttatggttcaagggcggtcaaaccacctatcatttatggtgatgtcaaacatattcaacccttaagccttgaagaaacggtttatgcccaaagtttgactaagaaacctgttaaaggcatgttgacaggtcctattactataacgaactggtcatttgagcgagatgatattagccgatctgatctttttaatcaaattgctttggctataaaagatgagattcaacttttggaacaatcaggtattgctattatacaagtggatgaagcagcccttcgagaaggtttacccttacgccagcaaaagcaacaggcttacttagatgatgctgttgcggcctttaaaattgcaacttcatctgtgaaagatgagacacaaattcatacacatatgtgttattcaaaatttgacgaaattattgattctatccgtgcactagatgcagatgttatttctattgaaacgagtagaagtcatggggacatcattgaaagttttgaaacagcagtttatcctctaggaattggcctgggtgtttatgatattcattcccctcgcatacctactaaggaagaaattattgtcaatattcaacgatcactaaaatgtctatcaaaagagcaattttgggtaaaccctgattgtggcttaaaaacacgccgtgaagcagaaacaattgctgccttggaggttcttgtttcagctaccaaagaggttcgtcagcaattagataat

SEQ ID NO: 6304 - protein, 750 aa, Streptococcus agalactiae
MMEEIMVKVSNLGYPRLGEQREWKQAIEAFWAGNLEQKDLEKQLKQLRINHLKKQKEAGIDLIPVGDFSCYDHVLDLSFQFNVIPKRFDEYERNLDLYFAIARGDKDNVASSMKKWFNTNYHYIVPEWEVETKPHLQNNYLLDLYLEAREVVGDKAKPVITGPITYVSLSSGIVDFEATVQRLLPLYKQVFQDLIDAGATYIQIDEPIFVTDEGELLVDIAKSVYDFFAREVPQAHFIFQTYFESAVCLDKLSKLPVTGFGLDFIHGRAENLAAVKQGLFREKELFAGIVNGRNIWAVNLEETLALLEEIGPFVKRLTLQPSSSLLHVPVTTKYETHLDPVLKNGLSFADEKLKELELLASAFDGNKTKGYHEALSRFSALQAADFRHVALESLAEVKLERSPYKLRQALQAEKLQLPILPTTTIGSFPQSPEIRKKRLAWKRGNLSDSDYKDFIKTEIRRWIAIQEDLDLDVLVHGEFERVDMVEFFGQKLAGFTTTKLGWVQSYGSRAVKPPIIYGDVKHIQPLSLEETVYAQSLTKKPVKGMLTGPITITNWSFERDDISRSDLFNQIALAIKDEIQLLEQSGIAIIQVDEAALREGLPLRQQKQQAYLDDAVAAFKIATSSVKDETQIHTHMCYSKFDEIIDSIRALDADVISIETSRSHGDIIESFETAVYPLGIGLGVYDIHSPRIPTKEEIIVNIQRSLKCLSKEQFWVNPDCGLKTRREAETIAALEVLVSATKEVRQQLDN

SEQ ID NO: 6305 - DNA, 1842 bp, Streptococcus agalactiae
atgtccaagtttttagagaaattaaaaacagatattctagtagctgacggtgcaatgggaactctcctttatacttatgggctagatacttgtcatgaatcctacaatgtaacacatccagaaaaggttctagccattcatcaagcttatattgaagcgggtgcagatgttattcagacgaatacctatggggctcaacgtcatcgattaaagaactacggtttggaagatcaggttgtctctatcaatcaagcagcagttaatatagctcatcaagcgactttgggtaaagaaacatttattttaggtactgttggaggttttcgttctcaaagacaatgcgatttaacattggataatattgtagaagaaactttggaacaagttgaggctttattggcgacaggacagctagacggattattgtttgaaacttattatgatattgaggagataacgacagttttaaaaattgtgagggagatgactgatctaccaattattactaatatttctcttcatgaagcaggggtaacatcaaatggaaagcctattgtagaggcgctcagccaattagttatgctaggtgcagatgtgattggcttaaattgtcaccttggaccctatcatatgatccaatcattgaagcaagttcctttatttgcccagtcttatttgtcagtttatcctaatgcaagtcagttatctttagatggtgagaatagtcaataccagtttagtcagaattcagagtattttggaaaatctgcagaacttctcgtagcagaaggagttaggcttattggtggttgttgtgggacaactccagatcatattagagctgtgaaacgatctattagaggattgaaacctattgaacgaaaggttgttactcctataatacctgtaaaagattttgttaggcgtatcagacgaacagatactctagtggataaggtaaaaaaagaagtaacaattatcgcagaattagatcctccaaagcatttagatatcgttcagtttcaaaaggctatacgagcgattgaccaaaaaggtattgcagcaattactttagcagataattcactatctaatacacgtatttgtaatttaagtatagctagcttgcttaaagatgaaattagcacaccctttttactacatatagcttgtcgtgaccataatttaattggtttacagtctagactgttgggcatggaattattaggttttaaccatattttagccataacaggagatccgactaaacttggtgatttcccaggagcgactagtgtttatgatgtgacttcctttaaactcctttctctgattaaacaacttaatcaaggtttatcttatagtggtgctagcttgagacgtccaacagattttacagttgctgctgcctttaatcctaatgtgaaaaaccttactcgaaccgtaaaattgattgagaaaaaagtagcttctggtgctgattattttatgacacaaccaatatttgatcactctgtgttaaaggaattagctgatcttactaaaacagttgaacaacccttttttatcggaattatgccaataacaagttataataacgctgtttttctacacaatgaagttcctggtattaaactttctgagtcatttttatctgctcttgaaaaggtaaaggacgacaaagaagcttgtttaactttggccttaaacgagagtaagtccttgattgatgaagccttgaactattttaatggtatctatttgattactccctttttacgctatgatctgactcttgagttaattgactatatacaaaaaaagcaagtaagaaagtcctct

SEQ ID NO: 6306 - protein, 614 aa, Streptococcus agalactiae
MSKFLEKLKTDILVADGAMGTLLYTYGLDTCHESYNVTHPEKVLAIHQAYIEAGADVIQTNTYGAQRHRLKNYGLEDQVVSINQAAVNIAHQATLGKETFILGTVGGFRSQRQCDLTLDNIVEETLEQVEALLATGQLDGLLFETYYDIEEITTVLKIVREMTDLPIITNISLHEAGVTSNGKPIVEALSQLVMLGADVIGLNCHLGPYHMIQSLKQVPLFAQSYLSVYPNASQLSLDGENSQYQFSQNSEYFGKSAELLVAEGVRLIGGCCGTTPDHIRAVKRSIRGLKPIERKVVTPIIPVKDFVRRIRRTDTLVDKVKKEVTIIAELDPPKHLDIVQFQKAIRAIDQKGIAAITLADNSLSNTRICNLSIASLLKDEISTPFLLHIACRDHNLIGLQSRLLGMELLGFNHILAITGDPTKLGDFPGATSVYDVTSFKLLSLIKQLNQGLSYSGASLRRPTDFTVAAAFNPNVKNLTRTVKLIEKKVASGADYFMTQPIFDHSVLKELADLTKTVEQPFFIGIMPITSYNNAVFLHNEVPGIKLSESFLSALEKVKDDKEACLTLALNESKSLIDEALNYFNGIYLITPFLRYDLTLELIDYIQKKQVRKSS

SEQ ID NO: 6307 - DNA, 741 bp, Streptococcus agalactiae
ttgaataaatcttggttgagaaagggaggtataaaaatggtatgtgtcgattttattgatcaaaaagtttatagtgaagcagaaggcctatttgtttccgatttagacttaggcattaaaggtttaataagagcacgttatccttttgctctggatagtgactttatttcgtatggaaatttaagtcattattgtatgaattatcttgacgaaattgttcagcgagcgaatcagaaaaatgagaagataaaatataatgtgactaccttgatgaaagaagaagagaagcccttcaacgttgaagagcgtttgaacaagcaagcaactatcggtcaacgaattgctgatgatgttgcacgttttggcggatcttggacttttattatcgtttttgtatccattatggctatttggatgttggttaatatcatgaagccttttggtattcaatttgatccttacccatttatcctgttaaacttagctttatcaacgattgctgcaatccaagcaccacttattatgatgagtcaaaatcgtgctgctgattatgatcgtttgcaagctcgaaatgactttaatgtcaataaaacctctgagttagaaattagattattgcacgaaaagattgatcatatggtacaacaagatcagtttgaattgttagagattcaaaagttacagacagaaatgctagtatcattgggaaatcagttagcacaattgaaacaactacaaaaa

SEQ ID NO: 6308 - protein, 247 aa, Streptococcus agalactiae
MNKSWLRKGGIKMVCVDFIDQKVYSEAEGLFVSDLDLGIKGLIRARYPFALDSDFISYGNLSHYCMNYLDEIVQRANQKNEKIKYNVTTLMKEEEKPFNVEERLNKQATIGQRIADDVARFGGSWTFIIVFVSIMAIWMLVNIMKPFGIQFDPYPFILLNLALSTIAAIQAPLIMMSQNRAADYDRLQARNDFNVNKTSELEIRLLHEKIDHMVQQDQFELLEIQKLQTEMLVSLGNQLAQLKQLQK

SEQ ID NO: 6309 - DNA, 1083 bp, Streptococcus agalactiae
atgacaacaaatgtaatggcaaattatagctacggagaagattgcttcaaagaaattcctagcgttttggcaacttaccgtattcaaagcattgctttcgtcggtggcaaacgtgccctagacagctcagaagccgaggttcgctctattttagaggaagcaaatattaaagtcacaggaagctttgtctatggaacggattcaacacaatctaacattgacaagttagtagccaacccacaagttcaagccgctgatgctatcttaggttttggcggtggaaaagctttagacacagctaaaatggtagcaaaagagttaggtaaaaatagctttactatcccaactatttgttctaattgctccgcaggtactgccattgcagttgtatataatgatgaccattctttcttaagatacggctatcccgagtctccacttcatatttttatcaatacacggattattgcacaggcaccaagcaaatatttttgggctggtattggggacggtatttcaaaagcccctgaagtagaacgtgctaccttagaggctaagaccaataaactaccacatactgcagtgttaggacaagcagtcgctctgtcttcaaaggaagctttttatcaatttggtgaacaaggtctaaaagatgttgaagctaatttagcttcgcgtgcagttgaagaaattgcgcttgatatcttaatctcaactggctatgcttctaatttagttaatcaacctgatttctactacaattcttgtcacgcgcatgcattttactatggtacaaccgctattcaaagacaaggtgaattcttacatggcgttgtagttgcgtttggtgtgttagttttacatgcttatttcaacgaactagaagaacttgaaaaagtagctcgttttaataagtcactaggtttgccaacaactctagctgacgtctctttatcagaaaaagatattccaaaaattgttgaaattgcaatgactactaatgaatacaaaaatacccctttcgatcccaaaatgtttgctcaagctattttagcagcagacgctttcggacagacactagcc

SEQ ID NO: 6310 - protein, 361 aa, Streptococcus agalactiae
MTTNVMANYSYGEDCFKEIPSVLATYRIQSIAFVGGKRALDSSEAEVRSILEEANIKVTGSFVYGTDSTQSNIDKLVANPQVQAADAILGFGGGKALDTAKMVAKELGKNSFTIPTICSNCSAGTAIAVVYNDDHSFLRYGYPESPLHIFINTRIIAQAPSKYFWAGIGDGISKAPEVERATLEAKTNKLPHTAVLGQAVALSSKEAFYQFGEQGLKDVEANLASRAVEEIALDILISTGYASNLVNQPDFYYNSCHAHAFYYGTTAIQRQGEFLHGVVVAFGVLVLHAYFNELEELEKVARFNKSLGLPTTLADVSLSEKDIPKIVEIAMTTNEYKNTPFDPKMFAQAILAADAFGQTLA

SEQ ID NO: 6311 - DNA, 537 bp, Streptococcus agalactiae
atgaaaatagcaataatcggatatagtgggtcgggtaagtccactttagcaagaaaattgggaaattactataattgcaatgtattacatcttgatagtattcacttcgccccaaattgggaagagagaaaatatgatgacatgattgacgatgtcagcaacatgttagaaaaaagaacatggattatagaaggtaactacaaaaaactgctatatcaagaacgtctagcagatgcagatgagattattttttttgactttaatcgcttcaactgcttgtggagagcattcaaacgttactgtaagtttcgtggtaagactagacctgatatggccaatggatgcccggaaaaattagattttgaatttatcagttggattcttaaagacggtcgctctgacaaacaaaaatcaaactataaacaagttgttgaggactaccctcaaaaaataaagattctaaaacaccaacgcgatcttgatcaatacctaaaagaactccctgttgcatccaatacagaccctctcaagagcttg

SEQ ID NO: 6312 - protein, 179 aa, Streptococcus agalactiae
MKIAIIGYSGSGKSTLARKLGNYYNCNVLHLDSIHFAPNWEERKYDDMIDDVSNMLEKRTWIIEGNYKKLLYQERLADADEIIFFDFNRFNCLWRAFKRYCKFRGKTRPDMANGCPEKLDFEFISWILKDGRSDKQKSNYKQVVEDYPQKIKILKHQRDLDQYLKELPVASNTDPLKSL

SEQ ID NO: 6313 - DNA, 504 bp, Streptococcus pyogenes
ttgaaaattgccatcattggacatagtggctctggcaagtcaaccttagcacgatttttaggccaacattaccattgtgaggtattccatttagaccaactacacttctcatcgaactggcaagaacggtcagatcatgacatgatagctgatttatcaacatgcctgctcaaacaagatttgattattgaggggaattatgccaattgtctctatgaagagcgcatgagtgaagctgattacattatctatgttaatttcagtcggtttcattgtgtctatcgagcatttaagcgttatttaaactataggggaaaaacgcgtcctgatatggctgacaactgtcaggaaaaatttgacgttgcgtttgtgaaatggattctactagatggacgttcaagaaaccaattaaaaaaataccaatccgttgtccaaaaatactctcataaaaccattgtcttaacaaatcaaaagcagctaagtcattatatgaatacgatcaac

SEQ ID NO: 6314 - protein, 168 aa, Streptococcus pyogenes
LKIAIIGHSGSGKSTLARFLGQHYHCEVFHLDQLHFSSNWQERSDHDMIADLSTCLLKQDLIIEGNYANCLYEERMSEADYIIYVNFSRFHCVYRAFKRYLNYRGKTRPDMADNCQEKFDVAFVKWILLDGRSRNQLKKYQSVVQKYSHKTIVLTNQKQLSHYMNTIN

SEQ ID NO: 6315 - DNA, 216 bp, Streptococcus agalactiae
gtggcaaaagaagatgtgattgaaattgaaggtaaagttgttgaaactatgcctaacgcaatgtttactgttgagttggaaaatggacaccaaattttggcaactgtatcaggaaaaatccgtaaaaactacatccgtattttggtaggtgatcgtgttactgttgaaatgagcccatacgatttaacacgtggacgcatcacataccgctttaaa

SEQ ID NO: 6316 - protein, 72 aa, Streptococcus agalactiae
MAKEDVIEIEGKVVETMPNAMFTVELENGHQILATVSGKIRKNYIRILVGDRVTVEMSPYDLTRGRITYRFK

SEQ ID NO: 6317 - DNA, 201 bp, Streptococcus pyogenes
gtgattgaaattgaaggcaaagtagtagaaacgatgccaaatgcaatgtttactgttgaattggaaaatggacatcaaattctagcaactgtatcaggaaaaatccgcaaaaattacattcgtattttagtaggtgaccgtgttacagtagaaatgagtccttatgacttgacacgtggacgcatcacataccgctttaaa

SEQ ID NO: 6318 - protein, 67 aa, Streptococcus pyogenes
VIEIEGKVVETMPNAMFTVELENGHQILATVSGKIRKNYIRILVGDRVTVEMSPYDLTRGRITYRFK

SEQ ID NO: 6319 - DNA, 636 bp, Streptococcus agalactiae
atgaatcttttaattatgggtttgcctggtgctggtaaaggtactcaagcagctaagatcgttgaagaatttggtgttgctcacatctcaacaggggatatgttccgcgccgcaatggctaatcaaaccgaaatgggacgtttagctaaaagttatattgataaaggtgaattggttcctgatgaagtaacaaacgggattgtaaaagagcgcttagctgaggatgatatcgcagaaaaaggttttttacttgatggatatccacgtactattgaacaagcacacgccttagatgctacgcttgaagaactaggactacgcttagatggtgttattaatattaaagtggatccatcatgtcttatagagcgtttgagtggtcgtattatcaatcgtaaaactggtgaaactttccacaaagtgttcaacccaccagtagattataaagaagaagattactatcaacgtgaagatgataagcctgaaactgtcaaacgtcgcttggacgttaatattgctcaaggagaacctattcttgaacactatcgtaagcttggtcttgttacagatattgaaggtaatcaagaaataacagaagtttttgcagatgttgaaaaagcgttgctagaactcaaa

SEQ ID NO: 6320 - protein, 212 aa, Streptococcus agalactiae
MNLLIMGLPGAGKGTQAAKIVEEFGVAHISTGDMFRAAMANQTEMGRLAKSYIDKGELVPDEVTNGIVKERLAEDDIAEKGFLLDGYPRTIEQAHALDATLEELGLRLDGVINIKVDPSCLIERLSGRIINRKTGETFHKVFNPPVDYKEEDYYQREDDKPETVKRRLDVNIAQGEPILEHYRKLGLVTDIEGNQEITEVFADVEKALLELK

SEQ ID NO: 6321 - DNA, 636 bp, Streptococcus pyogenes
atgaatcttttaatcatgggtttgccgggagctggtaaagggacccaagcagctaagattgttgaagaatttggtattgctcacatctcaacaggggatatgttccgcgccgcaatggctaatcaaaccgaaatgggacgtttagctaaaagttatattgataaaggtgaattggttcctgatgaagtcacaaacgggattgtaaaagagcgcttagctgaggatgatatcgcagaaaaaggttttttgcttgatgggtatccacgtactattgaacaagcacacgccttagatgcaacacttgaagaactaggactccgcttagatggtgttattaatattaaagtggatccatcatgtcttgtagagcgtttgagtggtcgtattatcaatcgtaaaactggtgaaacgttccataaagtgttcaacccaccagtagattataaagaagaagattactatcaacgtgaagatgataagcctgaaactgttaaacgtcgtttggacgtcaatatggctcaaggagaacctattcttgaacactatcgtaagcttggtcttgttacagatattgaaggtaatcaagaaataacagacgtttttgcagatgttgaaaaagcgttgctagaactcaaa

SEQ ID NO: 6322 - protein, 212 aa, Streptococcus pyogenes
MNLLIMGLPGAGKGTQAAKIVEEFGIAHISTGDMFRAAMANQTEMGRLAKSYIDKGELVPDEVTNGIVKERLAEDDIAEKGFLLDGYPRTIEQAHALDATLEELGLRLDGVINIKVDPSCLVERLSGRIINRKTGETFHKVFNPPVDYKEEDYYQREDDKPETVKRRLDVNMAQGEPILEHYRKLGLVTDIEGNQEITDVFADVEKALLELK

SEQ ID NO: 6323 - DNA, 1302 bp, Streptococcus agalactiae
atgtttttaaaattacttagagatgcactcaaagtaaagatggtaagaaataaaattttatttactatctttatccttcttgtatttcgtatcggaacgcatatcacagtaccgggcatcaatgttaagagtttagaacaaatgggtgaacttccatttctaaatatgcttaacttagttagtggtaatgcaatgagaaacttttcggtattctctatgggagttagcccttacattactgcgtctattgttgttcagttacttcaaatggatattcttccgaagtttgttgaatggggaaaacaaggagaggtaggtcgtcgtaagcttaaccaagctacacgttatatttctttgttccttgcattcgtacaatcaattggtattactgctggttttaacactctatcaagtgttgctttagttaaaactccgaatgtacaaacatatttgcttattggtgcaatccttacaacaggtagtatggtggttacttggctaggtgaacaaattactgataagggattcggaaatggagtgtctatgattatctttgcgggtatcatttcttccattccaagtgcaattacaactatctacgaagatttctttgtaaatgtacgctcttcagcaattacaaattcttacatctttgtcgggatccttatcgtagcagtattagcaattgtattttttacaacatttattcaacaagctgaatacaaaattccaatccaatatacaaaacttgttcaaggagctcctacaagttcatatcttcctctaaaagtaaatccagctggtgttattcccgttatctttgctagctcgattacaacaattccaagtacgattattcctttctttcaaaatggcaaagaaattccttggcttactaaactccaagaattacttaattatcaaaccccagtcggtatgattatctatgctatcttgattattctgttctctttcttctatacttttgtacaagtaaaccctgaaaagacagcagagaatcttcaaaaaaattcgtcctacattccaagtattcgaccaggacgagaaacagaagaatatatgtcatcgctattgaaaaaattagcaacaattggttcagtatttctagcatttatttccttgttaccaattattgctcaacaagcgttgcatttgtcatcaagtattgcgttaggtgggacaagcttactcattttgattgcaacgggtattgaaggtatgaaacaactcgagggctatcttttgaagagacgctatgttggattcatgaatacaacagaa

SEQ ID NO: 6324 - protein, 434 aa, Streptococcus agalactiae
MFLKLLRDALKVKMVRNKILFTIFILLVFRIGTHITVPGINVKSLEQMGELPFLNMLNLVSGNAMRNFSVFSMGVSPYITASIVVQLLQMDILPKFVEWGKQGEVGRRKLNQATRYISLFLAFVQSIGITAGFNTLSSVALVKTPNVQTYLLIGAILTTGSMVVTWLGEQITDKGFGNGVSMIIFAGIISSIPSAITTIYEDFFVNVRSSAITNSYIFVGILIVAVLAIVFFTTFIQQAEYKIPIQYTKLVQGAPTSSYLPLKVNPAGVIPVIFASSITTIPSTIIPFFQNGKEIPWLTKLQELLNYQTPVGMIIYAILIILFSFFYTFVQVNPEKTAENLQKNSSYIPSIRPGRETEEYMSSLLKKLATIGSVFLAFISLLPIIAQQALHLSSSIALGGTSLLILIATGIEGMKQLEGYLLKRRYVGFMNTTE

SEQ ID NO: 6325 - DNA, 438 bp, Streptococcus agalactiae
atgaaacttcatgaattaaaacctgcagaaggatcacgtaaagtccgcaatcgtgtgggtcgcggtacatcttcaggtaatggtaaaacttctggacgtggtcaaaaaggacaaaaagcgcgtagtggtggtggagtacgccttggttttgaaggtggacaaactccattgttccgtcgtatgccaaaacgtgggttctcaaacatcaatgcaaaagaatatgctcttgtgaaccttgaccaattaaatgtctttgaagatggtactgaagtaactccagttgttcttaaagaagctggaatcgtgcgtgctgaaaaatcaggcgttaaaattcttggtaatggtgaattaactaagaaattgtctgttaaagcagctaaattttctaaatctgctgaagcagctatcactgctaaaggtggttcaatcgaagtcatc

SEQ ID NO: 6326 - protein, 146 aa, Streptococcus agalactiae
MKLHELKPAEGSRKVRNRVGRGTSSGNGKTSGRGQKGQKARSGGGVRLGFEGGQTPLFRRMPKRGFSNINAKEYALVNLDQLNVFEDGTEVTPVVLKEAGIVRAEKSGVKILGNGELTKKLSVKAAKFSKSAEAAITAKGGSIEVI

SEQ ID NO: 6327 - DNA, 438 bp, Streptococcus pyogenes
atgaaacttcatgaattaaaagctgctgaaggctcacgtaaagtacgtaaccgtgttggtcgtgggacatcatcaggtaatggtaaaacatctggtcgcggtcaaaaaggtcaaaaagctcgtagcggtggcggtgtacgtttaggttttgaaggtggacaaacaccattgttccgtcgtattccaaaacgtggctttacaaatattaatactaaagaatatgcacttgtgaatcttgatcaactgaatgtttttgatgatggtacagaagtgactccggctattttaaaagatgctggtattgtccgagctgaaaaatcaggcgttaaagtgcttggtaacggtgaattgactaaaaaattgactgtaaaagcagctaagttctcaaaatctgctgaagcagctattattgctaaaggtggttcaatcgaagtcatc

SEQ ID NO: 6328 - protein, 146 aa, Streptococcus pyogenes
MKLHELKAAEGSRKVRNRVGRGTSSGNGKTSGRGQKGQKARSGGGVRLGFEGGQTPLFRRIPKRGFTNINTKEYALVNLDQLNVFDDGTEVTPAILKDAGIVRAEKSGVKVLGNGELTKKLTVKAAKFSKSAEAAIIAKGGSIEVI

SEQ ID NO: 6329 - DNA, 177 bp, Streptococcus agalactiae
atggctcaaattaaaattactttgactaagtctccaatcggtcgcaaaccagaacaacgtaaaacagttgttgcccttggacttggtaaattaaactcttcagttgttaaggaagataatgctgccatccgtggtatggttaacgctatctctcacttagtaactgttgaagaagct

SEQ ID NO: 6330 - protein, 59 aa, Streptococcus agalactiae
MAQIKITLTKSPIGRKPEQRKTVVALGLGKLNSSVVKEDNAAIRGMVNAISHLVTVEEA

SEQ ID NO: 6331 - DNA, 180 bp, Streptococcus pyogenes
atggctcaaattaaaattactttgactaagtctcctatcggacgtaagccagaacaacgtaaaactgttgttgctcttggacttggtaaattaaactcttcagtagtcaaagaagataatgctgctatccgtggtatggtgacagctatttctcacttggttaccgttgaagatgttaaa

SEQ ID NO: 6332 - protein, 60 aa, Streptococcus pyogenes
MAQIKITLTKSPIGRKPEQRKTVVALGLGKLNSSVVKEDNAAIRGMVTAISHLVTVEDVK

SEQ ID NO: 6333 - DNA, 273 bp, Streptococcus agalactiae
ttgagccattataatcccctttcttatgctaagtcagaaacagaaatgccacgtaaagcagcaacttcttctgcacgttttaattgtttcaagccctcaacagttgcgcgaacaatgttgattggagtgtttgaaccaagtgatttagatgtaatatctgcaacacctgctaattcgatgacggcacgaacagcacccccagcggcaaccccagcaccctcaacagctggtttcaacaatactttcgctccaccaaattctgaacgaacttcg

SEQ ID NO: 6334 - protein, 91 aa, Streptococcus agalactiae
MSHYNPLSYAKSETEMPRKAATSSARFNCFKPSTVARTMLIGVFEPSDLDVISATPANSMTARTAPPAATPAPSTAGFNNTFAPPNSERTS

SEQ ID NO: 6335 - DNA, 492 bp, Streptococcus agalactiae
atggcatttaaagataatgcagtagaacttgaagagcgcgttgttgcgattaaccgcgttacaaaagttgttaaaggtggacgtcgtctacgttttgcagctcttgtagttgttggtgaccgtaatggtcgtgttggttttggtacaggtaaagctcaagaagtaccagaagctattcgcaaagctgttgaagctgctaagaaaaacatggttgaagttcctatggtcggtacaacaattcctcacgaagttcgttcagaatttggtggagcgaaagtattgttgaaaccagctgttgagggtgctggggttgccgctgggggtgctgttcgtgccgtcatcgaattagcaggtgttgcagatattacatctaaatcacttggttcaaacactccaatcaacattgttcgcgcaactgttgagggcttgaaacaattaaaacgtgcagaagaagttgctgctttacgtggcatttctgtttctgacttagca

SEQ ID NO: 6336 - protein, 164 aa, Streptococcus agalactiae
MAFKDNAVELEERVVAINRVTKVVKGGRRLRFAALVVVGDRNGRVGFGTGKAQEVPEAIRKAVEAAKKNMVEVPMVGTTIPHEVRSEFGGAKVLLKPAVEGAGVAAGGAVRAVIELAGVADITSKSLGSNTPINIVRATVEGLKQLKRAEEVAALRGISVSDLA

SEQ ID NO: 6337 - DNA, 492 bp, Streptococcus pyogenes
atggcatttaaagataatgcagttgaacttgaagaacgcgttgttgcgattaaccgcgttacaaaagttgttaaaggtggacgtcgtcttcgctttgcagctcttgtagttgttggtgatggaaatggtcgtgttggatttggtactggtaaagctcaagaagttccagaagctatccgtaaagcagttgaagctgctaagaaaaacatgatcgaagtaccaatggttggtacaacaatccctcacgaagtttacactaacttcggtggagctaaagtattattgaaaccagctgtagaaggttctggagttgctgctggtggtgcagttcgtgccgtcatcgaattagcaggtgttgctgatattacttcaaaatctcttggttcaaacactccaatcaacattgttcgtgcaactgttgaaggattgaaacaacttaaacgtgcagaagaagttgccgcacttcgtggcatctcagtttctgacttagca

SEQ ID NO: 6338 - protein, 164 aa, Streptococcus pyogenes
MAFKDNAVELEERVVAINRVTKVVKGGRRLRFAALVVVGDGNGRVGFGTGKAQEVPEAIRKAVEAAKKNMIEVPMVGTTIPHEVYTNFGGAKVLLKPAVEGSGVAAGGAVRAVIELAGVADITSKSLGSNTPINIVRATVEGLKQLKRAEEVAALRGISVSDLA

SEQ ID NO: 6339 - DNA, 363 bp, Streptococcus agalactiae
gtgaaaattgtgatttcgaaaccagataaaaataaaatccgccaaaaacgccaccgtcgtgttcgcggtaaactctctggaactgctgatcgcccacgtttgaacattttccgttctaatacaggcatctacgctcaagtaattgatgacgtagcgggtgtaacgctcgcaagtgcatcaactcttgataaagaagtttctaacggaacaaaaacagaacaagccgttgttgtcggtaaacttgttgctgaacgcgcagtagctaaaggtatttctgaagtggtgtttgaccgcggtggatatctctatcacggacgtgtaaaagctttggctgactcagctcgtgaaaacggattgaaattc

SEQ ID NO: 6340 - protein, 121 aa, Streptococcus agalactiae
MKIVISKPDKNKIRQKRHRRVRGKLSGTADRPRLNIFRSNTGIYAQVIDDVAGVTLASASTLDKEVSNGTKTEQAVVVGKLVAERAVAKGISEVVFDRGGYLYHGRVKALADSARENGLKF

SEQ ID NO: 6341 - DNA, 363 bp, Streptococcus pyogenes
gtgaaaattgtgatttcgaaaccagataaaaacaaaatccgccaaaaacgccaccgtcgcgtccgcggtaaactctctggaactgctgatcgcccacgtttgaacgtattccgttctaatacaggcatctacgctcaagttattgatgacgtagcgggtgtaacgctcgcaagtgcatcaactcttgataaagacgtttctaaaggaacaaaaacagaacaagccgttgtagtcggcaaacttgttgctgaacgtgcagtggctaaaggtatttctgaagtggtgtttgaccgcggtggatatctctatcacggacgtgttaaagccttggctgatgcagctcgtgaaaacggattgaaattc

SEQ ID NO: 6342 - protein, 121 aa, Streptococcus pyogenes
VKIVISKPDKNKIRQKRHRRVRGKLSGTADRPRLNVFRSNTGIYAQVIDDVAGVTLASASTLDKDVSKGTKTEQAVVVGKLVAERAVAKGISEVVFDRGGYLYHGRVKALADAARENGLKF

SEQ ID NO: 6343 - DNA, 534 bp, Streptococcus agalactiae
atgtcacgtattggtaataaagtaattacattgcctgcaggtgttgaaatcattaacaaggataatgttgttactgtaaaaggacctaaaggccaactcactcgtgagtttaataaaaatattggaatcactgttgaagggactgaagtaacagttactcgtcctaacgactcaaaagaaatgaaaacaattcatggtacaactcgtgcgaacttgaacaacatggttgttggtgtttctgaaggtttcaaaaaagctcttgaaatgcgcggtgttggttaccgtgcacaacttcaaggatcaaaacttgttctttctgttggtaagtctcaccaagacgaagttgaagctccagaaggtgttacttttgaagtgccaactccaacaacaatcaacgtaatcggtatcaacaaagaaagcgttggacaaactgctgcttacgttcgtagcttacgttcaccagaaccatataaaggtaaaggtattcgttacgttggtgaattcgtacgccgtaaagaaggtaaaacaggtaaa

SEQ ID NO: 6344 - protein, 178 aa, Streptococcus agalactiae
MSRIGNKVITLPAGVEIINKDNVVTVKGPKGQLTREFNKNIGITVEGTEVTVTRPNDSKEMKTIHGTTRANLNNMVVGVSEGFKKALEMRGVGYRAQLQGSKLVLSVGKSHQDEVEAPEGVTFEVPTPTTINVIGINKESVGQTAAYVRSLRSPEPYKGKGIRYVGEFVRRKEGKTGK

SEQ ID NO: 6345 - DNA, 534 bp, Streptococcus pyogenes
atgtcacgtattggtaataaagtaattactatgcctgcaggcgttgaattaacaaataacaacaatgttattactgttaaaggccctaaaggcgaactcactcgtgagttcaacaaaaatattgaaatcaaagttgaagggactgaaatcacagttgtacgtcctaacgactcaaaagaaatgaaaacaatccatggtacaacccgtgctaacttgaataacatggttgtaggtgtttctgaaggtttcaaaaaagatcttgaaatgaagggtgtcggttaccgtgctcaacttcaaggtactaaacttgtcctttcagtaggtaaatctcaccaagacgaagttgaagctccagaaggaattactttcactgttgctaacccaacttcaatctcagttgaaggaatcaacaaagaagttgttggtcaaacagctgcttacatccgtagcttgcgttcaccagagccttacaaaggcaaagggatccgttacgttggtgaatacgtacgccttaaagaaggtaaaacaggtaaa

SEQ ID NO: 6346 - protein, 178 aa, Streptococcus pyogenes
MSRIGNKVITMPAGVELTNNNNVITVKGPKGELTREFNKNIEIKVEGTEITVVRPNDSKEMKTIHGTTRANLNNMVVGVSEGFKKDLEMKGVGYRAQLQGTKLVLSVGKSHQDEVEAPEGITFTVANPTSISVEGINKEVVGQTAAYIRSLRSPEPYKGKGIRYVGEYVRLKEGKTGK

SEQ ID NO: 6347 - DNA, 396 bp, Streptococcus agalactiae
atggttatgactgacccaattgcagactttttaactcgtattcgtaatgctaaccaagcaaaacatgaagtgttagaagtacctgcatcaaacattaaaaaagggattgctgatatccttaaacgtgaaggttttgtaaaaaacgttgaagttattgaagatgacaaacaaggcatcatccgtgtgttccttaaatatggacaaaatggtgaacgtgttatcactaacttgaaacgtatttcaaaaccaggtcttcgtgtttatactaaacatgaagatatgcctaaagttcttaacggacttggtattgcaattgtatcaacttctgaaggtcttttgactgacaaagaagctcgccaaaaaaatattggtggagaagtacttgcatatatttgg

SEQ ID NO: 6348 - protein, 132 aa, Streptococcus agalactiae
MVMTDPIADFLTRIRNANQAKHEVLEVPASNIKKGIADILKREGFVKNVEVIEDDKQGIIRVFLKYGQNGERVITNLKRISKPGLRVYTKHEDMPKVLNGLGIAIVSTSEGLLTDKEARQKNIGGEVLAYIW

SEQ ID NO: 6349 - DNA, 396 bp, Streptococcus pyogenes
atggttatgactgacccaattgcagactttttaacacgtatccgtaatgctaatcaagtaaaacacgaagtgttagaagtacctgcttcaaacattaaaaaagggattgctgagattcttaaacgtgaaggttttgtaaaaaatgttgaagttatcgaagatgataaacaaggcatcattcgtgtgttcttaaaatacggaaaaaatggtgaacgtgttatcactaacttaaaacgtatttcaaaaccaggtcttcgcgtttacgcaaaacgtgatgacatgcctaaagttcttaacggacttggaattgcaatcatttcaacatcagaaggtcttttgactgacaaagaagctcgccaaaagaatgttggtggagaagtgatcgcttacgtttgg

SEQ ID NO: 6350 - protein, 132 aa, Streptococcus pyogenes
MVMTDPIADFLTRIRNANQVKHEVLEVPASNIKKGIAEILKREGFVKNVEVIEDDKQGIIRVFLKYGKNGERVITNLKRISKPGLRVYAKRDDMPKVLNGLGIAIISTSEGLLTDKEARQKNVGGEVIAYVW

SEQ ID NO: 6351 - DNA, 183 bp, Streptococcus agalactiae
ttggctaaaaaatctatgattgctaagaacaaacgcccagcgaagttctctacgcaagcttacactcgttgtgaaaaatgcggacgtccacactcagtttaccgcaaattccaactttgccgtgtttgcttccgtgacttggcttataaaggtcaagtaccaggcgtaactaaagcatcttgg

SEQ ID NO: 6352 - protein, 61 aa, Streptococcus agalactiae
MAKKSMIAKNKRPAKFSTQAYTRCEKCGRPHSVYRKFQLCRVCFRDLAYKGQVPGVTKASW

SEQ ID NO: 6353 - DNA, 183 bp, Streptococcus pyogenes
ttggctaaaaaatctatgattgctaagaacaaacgtcctgcaaaacactctacacaagcttatactcgctgtgaaaaatgtggacgtccacattcagtttaccgcaagtttaaactttgtcgtgtttgcttccgtgaattggcttacaaaggtcaaattccaggtgttgtcaaagcttcttgg

SEQ ID NO: 6354 - protein, 61 aa, Streptococcus pyogenes
LAKKSMIAKNKRPAKHSTQAYTRCEKCGRPHSVYRKFKLCRVCFRELAYKGQIPGVVKASW

SEQ ID NO: 6355 - DNA, 540 bp, Streptococcus agalactiae
atggcaaatcgcttaaaagaaaaatatactaatgaagttgttcctgcgttgacagaaaaatttaactattcatctgttatggctgtgccaaaagttgagaaaatcgttcttaacatgggtgttggtgatgctgtatcaaacgctaaaaatcttgagaaagctgctgctgagttagcacttatttcaggtcaaaaaccacttattactaaagctaagaaatcaatcgctggcttccgtcttcgtgaaggtgtagcgatcggtgcaaaagttaccctgcgcggtgaacgtatgtacgaattcttggataaattagtttctgtttcacttccacgtgtacgtgacttccatggtgttccaacgaaatcatttgatggacgtggaaactacactcttggagttaaagaacaattgatcttcccagaaatcaactttgatgacgttgataaagtacgtggtcttgatatcgttatcgttactactgctaacactgatgaagagtcacgtgaattgctaaaaggccttggaatgccttttgcaaag

SEQ ID NO: 6356 - protein, 180 aa, Streptococcus agalactiae
MANRLKEKYTNEVVPALTEKFNYSSVMAVPKVEKIVLNMGVGDAVSNAKNLEKAAAELALISGQKPLITKAKKSIAGFRLREGVAIGAKVTLRGERMYEFLDKLVSVSLPRVRDFHGVPTKSFDGRGNYTLGVKEQLIFPEINFDDVDKVRGLDIVIVTTANTDEESRELLKGLGMPFAK

SEQ ID NO: 6357 - DNA, 540 bp, Streptococcus pyogenes
atggcaaatcgtttaaaagaaaaatatactaacgaagtaattcctgcgttgacagagaaattcaattacacatcagttatggctgtgccaaaagttgagaaaattgttctcaatatgggtgttggtgatgctgtatccaacgcaaaaaacctagagaaagctgcagctgaattagcacttatctcaggtcaaaaaccacttattactaaagctaagaaatcaatcgctggcttccgtcttcgtgaaggtgtagcgatcggtgcaaaagttaccctccgtggcgaacgtatgtacgaattcctagacaaattggttagcgtttcacttcctcgtgtacgtgacttccatggcgttccaacaaaatcgtttgatggacgcggaaactacactctcggtgtgaaagaacaacttatcttcccagaaatcagctttgatgatgttgataaagtacgtggtcttgatattgtaatcgtcactactgcaaatactgacgaagaatcacgtgaattgcttaagggccttggaatgccttttgcaaaa

SEQ ID NO: 6358 - protein, 180 aa, Streptococcus pyogenes
MANRLKEKYTNEVIPALTEKFNYTSVMAVPKVEKIVLNMGVGDAVSNAKNLEKAAAELALISGQKPLITKAKKSIAGFRLREGVAIGAKVTLRGERMYEFLDKLVSVSLPRVRDFHGVPTKSFDGRGNYTLGVKEQLIFPEISFDDVDKVRGLDIVIVTTANTDEESRELLKGLGMPFAK

SEQ ID NO: 6359 - DNA, 303 bp, Streptococcus agalactiae
atgtttgtaaaaaaaggcgacaaagttcgcgttattgctggtaaggacaaaggcactgaagctgtagttcttaaagctcttccaaaagtaaacaaagttgttgttgaaggcgtagccctcatcaagaaacatcaaaaaccaaataacgaaaaccctcaaggcgctatcgttgaaaaagaagctccaatccatgtgtcaaacgttcaagttcttgataaaaatggtgtagcaggacgtgttggttacaaagttgttgacggcaaaaaagttcgttacaacaaaaaatcaggcgaagtgcttgat

SEQ ID NO: 6360 - protein, 101 aa, Streptococcus agalactiae
MFVKKGDKVRVIAGKDKGTEAVVLKALPKVNKVVVEGVALIKKHQKPNNENPQGAIVEKEAPIHVSNVQVLDKNGVAGRVGYKVVDGKKVRYNKKSGEVLD

SEQ ID NO: 6361 - DNA, 303 bp, Streptococcus pyogenes
atgtttgtaaaaaaaggcgacaaagttcgcgtaattgctggcaaggacaaaggcactgaagctgtagttcttaaagcacttccaaaagttaacaaagttattgttgaaggtgttggaatgattaaaaaacaccaaaaacctaacactgaaaatcctcaaggagctatcgtcgaaaaagaagcacctatccatgtctctaatgttcaagtattagataaaaatggtgtagctggacgtattggttataaagttgttgacggtaaaaaagtacgttacagcaaaaaatcaggcgaagtgcttgat

SEQ ID NO: 6362 - protein, 101 aa, Streptococcus pyogenes
MFVKKGDKVRVIAGKDKGTEAVVLKALPKVNKVIVEGVGMIKKHQKPNTENPQGAIVEKEAPIHVSNVQVLDKNGVAGRIGYKVVDGKKVRYSKKSGEVLD

SEQ ID NO: 6363 - DNA, 366 bp, Streptococcus agalactiae
atgattcaacaagaaactcgcttgaaagttgctgataatagcggtgctcgtgagatcttgactatcaaagtacttggtggttcaggacgtaaattcgctaacatcggtgacgtaatcgttgcttctgtaaaacaagctactcctggtggagcagttaaaaaaggtgatgtggttaaagctgttatcgttcgtacaaaaactggtgcacgccgcccagacggttcatacatcaaatttgacgacaatgctgctgtaatcatccgtgacgataaaactcctcgcggaactcgtatctttggcccagttgcacgtgaattgcgtgaaggtggctacatgaagatcgtttcattggcaccagaagtactt

SEQ ID NO: 6364 - protein, 122 aa, Streptococcus agalactiae
MIQQETRLKVADNSGAREILTIKVLGGSGRKFANIGDVIVASVKQATPGGAVKKGDVVKAVIVRTKTGARRPDGSYIKFDDNAAVIIRDDKTPRGTRIFGPVARELREGGYMKIVSLAPEVL

SEQ ID NO: 6365 - DNA, 366 bp, Streptococcus pyogenes
atgattcaacaagaaactcgcttgaaagttgctgataatagcggtgctcgtgagatcttgactatcaaagtacttggtggttcaggacgtaaattcgctaacatcggtgacgtaatcgttgcttctgtaaaacaagctactcctggtggagcagttaaaaaaggtgatgtggttaaagctgttatcgttcgtacaaaaactggtgcacgccgtccagacggttcatacatcaaatttgacgacaatgctgctgtaatcatccgtgatgataaaactcctcgcggaactcgtatctttggcccagttgcacgcgaattgcgtgagggtggctacatgaagatcgtatcacttgcaccagaagtactt

SEQ ID NO: 6366 - protein, 122 aa, Streptococcus pyogenes; identical to SEQ ID NO: 6364

SEQ ID NO: 6367 - DNA, 258 bp, Streptococcus agalactiae
atggaacgtaatcaacgtaaaactctttacggacgcgtagtgtctgacaagatggacaaaacaatcacagttgtagttgaaactaaacgtaaccacccagtctatggtaaacgtatcaactattctaaaaaatataaagcacatgatgaaaacaacgttgctaaagaaggcgatatcgttcgtatcatggaaactcgcccactttcagctacaaaacgtttccgtcttgtggaagtagtggaaaaagctgttattatc

SEQ ID NO: 6368 - protein, 86 aa, Streptococcus agalactiae
MERNQRKTLYGRVVSDKMDKTITVVVETKRNHPVYGKRINYSKKYKAHDENNVAKEGDIVRIMETRPLSATKRFRLVEVVEKAVII

SEQ ID NO: 6369 - DNA, 258 bp, Streptococcus pyogenes
atggaacgtaatcaacgtaaaactctttacggacgcgtagtgtctgacaagatggacaaaacaatcacagttgtagttgaaactaaacgtaaccacccagtctatggtaaacgtatcaactattctaaaaaatataaagcacatgacgaaaacaacgttgctaaagaaggcgatatcgttcgtatcatggaaactcgcccactttcagctacaaaacgtttccgtcttgtggaagtagtggaaaaagctgttattatc

SEQ ID NO: 6370 - protein, 86 aa, Streptococcus pyogenes; identical to SEQ ID NO: 6368

SEQ ID NO: 6371 - DNA, 204 bp, Streptococcus agalactiae
atgaaacttcaagaaattaaagattttgttaaagagcttcgtggattgtctcaagaagaacttgctaagaaagaaaacgaactcaaaaaagaattgtttgatcttcgtttccaagctgcagcaggtcaacttgaaaagactgctcgccttgacgaagttaagaaacaaattgcacgtgttaaaactgtgcaatcagaaatgaaa

SEQ ID NO: 6372 - protein, 68 aa, Streptococcus agalactiae
MKLQEIKDFVKELRGLSQEELAKKENELKKELFDLRFQAAAGQLEKTARLDEVKKQIARVKTVQSEMK

SEQ ID NO: 6373 - DNA, 411 bp, Streptococcus agalactiae
atgttagtacctaaacgtgttaaacaccgtcgcgaattccgtggaaaaatgcgcggtgaggctaaaggtggtaaagaagtttcattcggtgaatacggacttcaagctacaactagccactggattacaaaccgtcaaatcgaagctgcccgtattgcgatgactcgttacatgaaacgtggtggtaaagtttggattaaaatcttcccacacaaatcatacactgcaaaagctatcggtgtacgtatgggttctggtaaaggggcacctgaaggttgggtagcaccagttaaacgtggtaaagtgatgtttgaaattgctggtgtttctgaagaagttgcacgtgaagcattacgtcttgctagccacaaattaccagttaaatgcaaattcgtaaaacgtgaagcagaa

SEQ ID NO: 6374 - protein, 137 aa, Streptococcus agalactiae
MLVPKRVKHRREFRGKMRGEAKGGKEVSFGEYGLQATTSHWITNRQIEAARIAMTRYMKRGGKVWIKIFPHKSYTAKAIGVRMGSGKGAPEGWVAPVKRGKVMFEIAGVSEEVAREALRLASHKLPVKCKFVKREAE

SEQ ID NO: 6375 - DNA, 411 bp, Streptococcus pyogenes
atgttagtacctaaacgtgttaaacaccgtcgcgaattccgtggaaaaatgcgcggtgaggctaaaggtggtaaagaagtttcattcggtgaatacggacttcaagccacaactagccactggattacaaaccgtcaaatcgaagctgcccgtattgcgatgactcgttacatgaaacgtggtggtaaagtttggattaaaatcttcccacacaaatcatacactgcaaaagctatcggtgtacgtatgggttctggtaaaggggcacctgaaggttgggtagcaccagttaaacgtggtaaagtgatgtttgaaattgctggtgtttctgaagaaattgctcgcgaagcattacgtcttgctagccacaaattaccagttaagtgcaaattcgtaaaacgtgaagcagaa

SEQ ID NO: 6376 - protein, 137 aa, Streptococcus pyogenes
MLVPKRVKHRREFRGKMRGEAKGGKEVSFGEYGLQATTSHWITNRQIEAARIAMTRYMKRGGKVWIKIFPHKSYTAKAIGVRMGSGKGAPEGWVAPVKRGKVMFEIAGVSEEIAREALRLASHKLPVKCKFVKREAE

SEQ ID NO: 6377 - DNA, 651 bp, Streptococcus agalactiae
gtgggtcaaaaagtacatccaattggtatgcgtgtcggaatcatccgtgactgggatgcgaaatggtatgctgaaaaagaatacgcggattaccttcatgaagatcttgcaatccgtaaattcattaataaagaattagctgacgcatcagtttcaactattgaaattgaacgtgcagtaaacaaagttattgtttcacttcacactgctaaaccaggtatggttatcggtaaaggtggagcaaacgttgacgctcttcgtggtcaacttaacaaattaactggaaaacaagtacacatcaacatcattgaaatcaaacaacctgatttagatgctcaccttgttggtgaaaatattgctcgtcaattagagcaacgtgttgctttccgtcgtgctcaaaaacaagcaatccaacgtacaatgcgtgcaggagctaaaggtattaaaactcaagtttctggtcgtttgaacggtgctgatatcgctcgtgctgaaggttattcagaaggaactgttccgcttcacacgcttcgtgctgatatcgactatgcttgggaagaagctgacacaacttatggtaaacttggcgttaaagtttggatttaccgtggagaagttcttccagctcgtaaaaacactaaaggaggcaaa

SEQ ID NO: 6378 - protein, 217 aa, Streptococcus agalactiae
MGQKVHPIGMRVGIIRDWDAKWYAEKEYADYLHEDLAIRKFINKELADASVSTIEIERAVNKVIVSLHTAKPGMVIGKGGANVDALRGQLNKLTGKQVHINIIEIKQPDLDAHLVGENIARQLEQRVAFRRAQKQAIQRTMRAGAKGIKTQVSGRLNGADIARAEGYSEGTVPLHTLRADIDYAWEEADTTYGKLGVKVWIYRGEVLPARKNTKGGK

SEQ ID NO: 6379 - DNA, 651 bp, Streptococcus pyogenes
gtgggtcaaaaagtacatccaattggtatgcgtgtcggaatcatccgtgactgggatgcgaaatggtatgctgaaaaagaatacgcggattaccttcatgaagatcttgcaatccgtaaattcattaataaagaattagctgacgcatcagtttcaactattgaaattgaacgtgcagtaaacaaagttattgtttcacttcacactgctaaaccaggtatggttatcggtaaaggtggcgcaaacgttgacgctcttcgtggtcaacttaacaaattaactggaaaacaagtacacatcaacatcatcgaaatcaaacaacctgatttagatgctcaccttgttggtgaaaacattgctcgtcaacttgagcaacgtgttgctttccgtcgtgctcaaaaacaagcaatccaacgtacaatgcgtgcaggagctaaagggattaaaactcaagtttctggtcgtttgaacggtgctgatatcgctcgtgctgaaggttattcagaaggaactgttccacttcacacgcttcgcgctgatatcgactatgcttgggaagaagctgacacaacttatggtaaacttggcgttaaagtttggatttaccgtggagaagttcttccagctcgtaaaaacactaaaggaggcaaa

SEQ ID NO: 6380 - protein, 217 aa, Streptococcus pyogenes
VGQKVHPIGMRVGIIRDWDAKWYAEKEYADYLHEDLAIRKFINKELADASVSTIEIERAVNKVIVSLHTAKPGMVIGKGGANVDALRGQLNKLTGKQVHINIIEIKQPDLDAHLVGENIARQLEQRVAFRRAQKQAIQRTMRAGAKGIKTQVSGRLNGADIARAEGYSEGTVPLHTLRADIDYAWEEADTTYGKLGVKVWIYRGEVLPARKNTKGGK

SEQ ID NO: 6381 - DNA, 342 bp, Streptococcus agalactiae
atggcagaaattacttcagctaaagcaatggctcgtacagtgcgtgtttcacctcgtaaaacacgtttagtacttgatcttatccgtggtaagaatgttgctgacgcaatcgcaatcttaaaattcactccaaacaaagcagctcgtgttattgagaaaactcttaactcagcaattgcaaatgcagaaaacaactttggtttggaaaaagcaaacttggtagtatctgaaacattcgctaacgaaggaccaacaatgaaacgtttccgtccacgtgcgaaaggttcagcttcaccaatcaacaaacgtacaactcacgtaactgtagttgtatcagaaaaa

SEQ ID NO: 6382 - protein, 114 aa, Streptococcus agalactiae
MAEITSAKAMARTVRVSPRKTRLVLDLIRGKNVADAIAILKFTPNKAARVIEKTLNSAIANAENNFGLEKANLVVSETFANEGPTMKRFRPRAKGSASPINKRTTHVTVVVSEK

SEQ ID NO: 6383 - DNA, 342 bp, Streptococcus pyogenes
atggcagaaattacttcagctaaagcaatggctcgtacagtgcgtgtttcacctcgtaaaacacgtttagtacttgatcttatccgtggtaagaaagttgctgacgcaatcgcaatcttaaaattcactccaaacaaagcagctcgtgttattgagaaaactcttaactcagcaattgctaacgcagaaaacaactttggtttggaaaaagcaaacttggtagtatctgaaacattcgctaacgaaggaccaacaatgaaacgtttccgtccacgtgcgaaaggttcagcttcaccaatcaacaaacgtacaactcacgtaactgtagttgtatcagaaaaa

SEQ ID NO: 6384 - protein, 114 aa, Streptococcus pyogenes
MAEITSAKAMARTVRVSPRKTRLVLDLIRGKKVADAIAILKFTPNKAARVIEKTLNSAIANAENNFGLEKANLVVSETFANEGPTMKRFRPRAKGSASPINKRTTHVTVVVSEK

SEQ ID NO: 6385 - DNA, 276 bp, Streptococcus agalactiae
atgggacgtagtcttaaaaaaggacctttcgtcgacgagcatttaatgaaaaaagttgaagctcaagcaaatgacgaaaagaaaaaagtaatcaaaacttggtcacgtcgttcaacgattttcccaagtttcatcggatacacaatcgcagtttatgatggacgtaaacatgttcctgtttatatccaagaggacatggtaggtcacaaacttggtgaatttgcaccaacacgtacttacaaaggtcacgcagctgacgacaagaaaacacgtcgt

SEQ ID NO: 6386 - protein, 92 aa, Streptococcus agalactiae
MGRSLKKGPFVDEHLMKKVEAQANDEKKKVIKTWSRRSTIFPSFIGYTIAVYDGRKHVPVYIQEDMVGHKLGEFAPTRTYKGHAADDKKTRR

SEQ ID NO: 6387 - DNA, 330 bp, Streptococcus pyogenes
ttgctcttgaattcaagccgctgtggtacattatttaaaggagaaaactacaaaatgggacgtagtcttaaaaaaggacctttcgtcgatgagcatttgatgaaaaaagttgaagctcaagcaaacgacgaaaagaaaaaagtaatcaaaacttggtcacgtcgttcaacgattttcccaagtttcatcggatatacaatcgcagtttatgacggacgtaaacatgtacctgtttacatccaagaagacatggtaggtcacaaacttggtgaatttgcaccaacgcgtacttacaaaggtcacgcagctgacgacaagaaaacacgtcgt

SEQ ID NO: 6388 - protein, 110 aa, Streptococcus pyogenes
LLLNSSRCGTLFKGENYKMGRSLKKGPFVDEHLMKKVEAQANDEKKKVIKTWSRRSTIFPSFIGYTIAVYDGRKHVPVYIQEDMVGHKLGEFAPTRTYKGHAADDKKTRR

SEQ ID NO: 6389 - DNA, 831 bp, Streptococcus agalactiae
gtgggtattaaagtttataaaccaacgacaaatggccgtcgtaatatgacttctttggattttgcagaaatcactacaaacactcctgagaaatcattgcttgtttcactaaagaataaagcaggacgtaacaacaacggacgtattactgttcgtcaccaaggtggtggacacaaacgtcattaccgtttgattgacttcaaacgtaataaagatggtgttgaagcagttgttaaaacaattgaatacgatccaaatcgtactgcaaatattgctcttgtacactatactgatggtgttaaagcttacatccttgcgcctaaaggccttgaagtaggtcaacgcattatttctggtccagaagcagacatcaaagttggtaacgcacttccgcttgctaacattccagtcggtacagttatccataatattgaattgcaaccaggtaaaggtgctgaattgattcgtgccgctggtgcttctgctcaagtacttggtcaagaaggtaaatatgttcttgttcgccttcaatcaggtgaagtacgtatgatccttggtacttgccgtgcaacaattggtactgttggtaatgaacagcaatcacttgttaacattggtaaagcaggacgtaatcgttggaaaggtgttcgccctacagttcgtggttctgtaatgaaccctaacgatcacccacacggtggtggtgaaggtaaagcaccagttggtcgtaaagcaccatctactccatggggtaaacctgcgcttggacttaaaactcgtaataagaaagctaaatcagacaaacttattgttcgtcgtcgtaaccaaaaa

SEQ ID NO: 6390 - protein, 277 aa, Streptococcus agalactiae
MGIKVYKPTTNGRRNMTSLDFAEITTNTPEKSLLVSLKNKAGRNNNGRITVRHQGGGHKRHYRLIDFKRNKDGVEAVVKTIEYDPNRTANIALVHYTDGVKAYILAPKGLEVGQRIISGPEADIKVGNALPLANIPVGTVIHNIELQPGKGAELIRAAGASAQVLGQEGKYVLVRLQSGEVRMILGTCRATIGTVGNEQQSLVNIGKAGRNRWKGVRPTVRGSVMNPNDHPHGGGEGKAPVGRKAPSTPWGKPALGLKTRNKKAKSDKLIVRRRNQK

SEQ ID NO: 6391 - DNA, 831 bp, Streptococcus pyogenes
gtgggtattaaagtttataaaccaacgacaaatggccgtcgtaacatgacttctttggatttcgcggaaatcacaacaagcacgcctgagaaatcattgcttgtttctcttaagagcaaagctggtcgtaacaacaatggtcgcatcacagttcgtcaccaaggtggtggacacaaacgtcattaccgtttgatcgacttcaaacgtaacaaagatggcgttgaagcagttgttaaaacaatcgaatacgatccaaaccgtactgcaaacatcgcacttgtacattacactgacggtgtgaaagcttacatcattgcacctaaaggtcttgaagtaggtcaacgtattgtttctggtccagatgcagatatcaaagttggtaacgcacttccattagcaaacattcctgtcggtacagttgttcacaatattgagttgaaacctggtaaaggtggagaacttgttcgtgcagctggagcttctgctcaagtacttggtcaagaaggtaaatacgttcttgttcgtcttcaatcaggcgaagttcgtatgattcttggtacatgccgtgcaactatcggtactgttggtaacgaacaacaatcacttgttaacattggtaaagcaggacgtagccgttggaaaggtatccgcccaacagttcgtggttctgtaatgaaccctaacgatcacccacacggtggtggtgaaggtaaagcaccagttggacgtaaagcgccatcaactccatggggtaaaccagcgcttggtcttaaaactcgtaacaagaaagctaaatcagacaaacttatcgttcgtcgtcgtaacgaaaaa

SEQ ID NO: 6392 - protein, 277 aa, Streptococcus pyogenes
VGIKVYKPTTNGRRNMTSLDFAEITTSTPEKSLLVSLKSKAGRNNNGRITVRHQGGGHKRHYRLIDFKRNKDGVEAVVKTIEYDPNRTANIALVHYTDGVKAYIIAPKGLEVGQRIVSGPDADIKVGNALPLANIPVGTVVHNIELKPGKGGELVRAAGASAQVLGQEGKYVLVRLQSGEVRMILGTCRATIGTVGNEQQSLVNIGKAGRSRWKGIRPTVRGSVMNPNDHPHGGGEGKAPVGRKAPSTPWGKPALGLKTRNKKAKSDKLIVRRRNEK

SEQ ID NO: 6393 - DNA, 294 bp, Streptococcus agalactiae
atgaatttgtatgacgtaatcaaaaaacctgttatcactgagaaatcaatggttgctcttgaagcagggaaatatacatttgaagttgacacacgtgcacacaaacttttgatcaaacaagctgttgaagctgcatttgacggagtaaaagttgcaagtgtaaacactgtgacagttaaacccaaagcaaaacgtgttggtcgttacacaggtttcacttcaaaaactaaaaaagctattatcactcttacagctgattcaaaagcaatcgagttgtttgctgctgaagctgaa

SEQ ID NO: 6394 - protein, 98 aa, Streptococcus agalactiae
MNLYDVIKKPVITEKSMVALEAGKYTFEVDTRAHKLLIKQAVEAAFDGVKVASVNTVTVKPKAKRVGRYTGFTSKTKKAIITLTADSKAIELFAAEAE

SEQ ID NO: 6395 - DNA, 294 bp, Streptococcus pyogenes
atgaatttgtacgacgtaatcaaaaaaccagttatcactgagaagtcaatgattgctcttgaagcaggcaaatacactttcgaagttgatactcgtgcacacaaacttttgatcaaacaagctgttgaagctgcttttgacggagttaaagttgcaagtgtaaacactgttaacgttaaaccaaaagcaaaacgcgttggtcgttacacaggtttcacttcaaaaactaaaaaagctatcatcactcttacagctgattctaaagcaatcgagttgttcgcagctgaagctgaa

SEQ ID NO: 6396 - protein, 98 aa, Streptococcus pyogenes
MNLYDVIKKPVITEKSMIALEAGKYTFEVDTRAHKLLIKQAVEAAFDGVKVASVNTVNVKPKAKRVGRYTGFTSKTKKAIITLTADSKAIELFAAEAE

SEQ ID NO: 6397 - DNA, 621 bp, Streptococcus agalactiae
atggcaaacgttaaactatttgaccaaactggtaaagaagttagctcagttgagcttaacgaagctatcttcggtattgaaccaaacgaatcagttgtttttgatgttgtaatcagccaacgcgctagccttcgccaaggaactcacgcggttaaaaaccgttcagcagtatctggtggtggacgtaaaccatggcgtcaaaaaggaactggacgcgctcgtcaaggttctatccgctcaccacaatggcgtggtggtggtgttgtctttggaccaactccacgttcatacggctacaaacttccacaaaaagttcgtcgccttgcgttgaaatcagtttattcagcaaaagttgctgaagataaatttgtagctgtagaaaacctttcatttgcagctccaaaaactgctgaatttgcgtcagttctttcagcacttagcattgattcaaaagtacttgtaatccttgaagaaggtaacgaatttgctgcactttcagcgcgtaaccttccaaacgttacagttgctactgcaactactgcaagtgttcttgatatcgttaacgcagacaaacttcttgttactaaagaagcaatctctacaatcgagggggttcttgca

SEQ ID NO: 6398 - protein, 207 aa, Streptococcus agalactiae
MANVKLFDQTGKEVSSVELNEAIFGIEPNESVVFDVVISQRASLRQGTHAVKNRSAVSGGGRKPWRQKGTGRARQGSIRSPQWRGGGVVFGPTPRSYGYKLPQKVRRLALKSVYSAKVAEDKFVAVENLSFAAPKTAEFASVLSALSIDSKVLVILEEGNEFAALSARNLPNVTVATATTASVLDIVNADKLLVTKEAISTIEGVLA

SEQ ID NO: 6399 - DNA, 621 bp, Streptococcus pyogenes
atggcaaacgtaaaactatttgaccaaactggtaaagaagttagctcagttgaattaaacgacgctatcttcggtatcgaaccaaacgaatcagttgtttttgatgttgtaattagccaacgcgctagccttcgccaaggtactcatgcggttaaaaaccgttcagcagtatcaggtggtggacgtaaaccatggcgtcaaaaaggaactggacgcgctcgtcaaggttctatccgctcaccacaatggcgtggtggtggtgttgtctttggaccaactccccgttcatacggatacaaacttccacaaaaagttcgtcgccttgcgttgaaatcagtttactcagcaaaagttgctgaagataaatttgtagctgtagaaggcctttcatttgcagcaccaaaaactgctgaatttgcaaaagtgctttcagctcttagcattgatacaaaagtacttgttcttgttgaagaaggaaatgaatttgcagcactttctgcacgtaaccttccaaacgtaactgttgcaactgcagcaactgcaagtgttcttgatatcgtgaacgcagacaaacttcttgttactaaagaagcaatctctacaattgaggaggttcttgca

SEQ ID NO: 6400 - protein, 207 aa, Streptococcus pyogenes
MANVKLFDQTGKEVSSVELNDAIFGIEPNESVVFDVVISQRASLRQGTHAVKNRSAVSGGGRKPWRQKGTGRARQGSIRSPQWRGGGVVFGPTPRSYGYKLPQKVRRLALKSVYSAKVAEDKFVAVEGLSFAAPKTAEFAKVLSALSIDTKVLVLVEEGNEFAALSARNLPNVTVATAATASVLDIVNADKLLVTKEAISTIEEVLA

SEQ ID NO: 6401 - DNA, 624 bp, Streptococcus agalactiae
atgacaaaaggaatcttagggaaaaaagtgggaatgactcaaatcttcactgaatcaggcgaattcatccctgttactgtcattgaagcaactccaaacgttgtgcttcaagttaaaactgttgaaacagacggttacgaagcagttcaggttggttttgatgacaaacgtgaagtattgagtaacaaacctgccaaaggccatgttgcaaaagcaaacacagctcctaagcgcttcattcgtgaattcaaaaacattgaaggcttagaagttggtgcagaattatctgtagaacaatttgaagctggtgatgttgttgacgtcacagggacatcaaaaggtaaaggtttccaaggtgttatcaaacgccatggtcaatcacgtggtcctatggctcacggttctcgttaccatcgtcgtccaggttctatgggacctgttgcgcctaaccgcgttttcaaaaacaaacgcttggcaggacgtatgggtggtaaccgtgtaacagttcaaaaccttgaaattgtacaagttatcccagagaaaaacgttgtcctcatcaaaggtaacgtaccaggtgctaagaaatctcttatcactatcaaatcagcagttaaagctgctaaa

SEQ ID NO: 6402 - protein, 208 aa, Streptococcus agalactiae
MTKGILGKKVGMTQIFTESGEFIPVTVIEATPNVVLQVKTVETDGYEAVQVGFDDKREVLSNKPAKGHVAKANTAPKRFIREFKNIEGLEVGAELSVEQFEAGDVVDVTGTSKGKGFQGVIKRHGQSRGPMAHGSRYHRRPGSMGPVAPNRVFKNKRLAGRMGGNRVTVQNLEIVQVIPEKNVVLIKGNVPGAKKSLITIKSAVKAAK

SEQ ID NO: 6403 - DNA, 624 bp, Streptococcus pyogenes
atgacaaaaggaatcttagggaaaaaagtgggaatgactcaaattttcactgaatcaggcgaattcatccctgttactgtcattgaagcaactccaaacgttgtgcttcaagttaaaactgttgaaacagacggttatgaagcagttcaggttggttttgatgacaaacgtgaagtcttgagtaacaaacctgccaaaggccatgttgcaaaagcaaacacagctcctaagcgcttcattcgtgaattcaaaaacattgaaggcttagaagttggtgcagaattatctgtagaacaatttgaagctggtgatgttgttgacgtcacagggatatcaaaaggtaaaggtttccaaggtgttatcaaacgccatggtcaatcacgtggtcctatggctcacggttctcgttaccatcgtcgcccaggttctatgggacctgttgcgcctaaccgcgttttcaaaaacaaacgcttggcaggacgtatgggtggtaaccgtgtaacagttcaaaaccttgaaattgtacaagttatcccagaaaagaacgttatccttgttaaaggtaacgtaccaggtgctaagaaatctcttatcactatcaagtcagcagttaaagctgctaaa

SEQ ID NO: 6404 - protein, 208 aa, Streptococcus pyogenes
MTKGILGKKVGMTQIFTESGEFIPVTVIEATPNVVLQVKTVETDGYEAVQVGFDDKREVLSNKPAKGHVAKANTAPKRFIREFKNIEGLEVGAELSVEQFEAGDVVDVTGISKGKGFQGVIKRHGQSRGPMAHGSRYHRRPGSMGPVAPNRVFKNKRLAGRMGGNRVTVQNLEIVQVIPEKNVILVKGNVPGAKKSLITIKSAVKAAK

SEQ ID NO: 6405 - DNA, 114 bp, Streptococcus agalactiae
atgagaaaatatttccttttcttattttatttcaaaaagttttttatgagcgttttttgtgctcaaaaaagttttttacgagcgttttttgtgctcagaaatcaaattaaagtt

SEQ ID NO: 6406 - protein, 38 aa, Streptococcus agalactiae
MRKYFLFLFYFKKFFMSVFCAQKSFLRAFFVLRNQIKV

SEQ ID NO: 6407 - DNA, 306 bp, Streptococcus agalactiae
atggcaaacaaaaaaatccgtatccgtttgaaagcgtacgaacaccgtacacttgatacagcggcagaaaaaatcgttgaaactgcaacacgtacaggtgctacagttgctggaccagttccgcttccaactgaacgcagtctttacacaattattcgtgcgactcacaaatataaagattctcgcgaacagtttgaaatgcgtacacacaaacgtttggtagacatcatcaacccaacacaaaaaactgttgatgctttgatgaaacttgatcttccaagtggtgtcaacgtagaaatcaaactt

SEQ ID NO: 6408 - protein, 102 aa, Streptococcus agalactiae
MANKKIRIRLKAYEHRTLDTAAEKIVETATRTGATVAGPVPLPTERSLYTIIRATHKYKDSREQFEMRTHKRLVDIINPTQKTVDALMKLDLPSGVNVEIKL

SEQ ID NO: 6409 - DNA, 306 bp, Streptococcus pyogenes
atggcaaacaaaaaaatccgtatccgtttgaaagcgtacgaacaccgtacacttgatacagcggcagaaaaaatcgttgaaactgcaacacgtacaggtgctacagttgctggaccagttccacttccaactgaacgcagtctttacacaattattcgtgcgactcacaaatacaaagattctcgcgaacaatttgaaatgcgtacacacaaacgtttggtagacatcatcaatccaacacaaaaaactgttgatgctttgatgaaacttgatcttccaagtggtgtcaacgtagaaatcaaactt

SEQ ID NO: 6410 - protein, 102 aa, Streptococcus pyogenes; identical to SEQ ID NO: 6408

SEQ ID NO: 6411 - DNA, 111 bp, Streptococcus agalactiae
gtggctgtttttgaaagttcactatcatcgatatattcaaaaaatgtaaccagaaatggttgcatttttttcgaaaataataaaataatgcttgcgtgtgctgtttttttt

SEQ ID NO: 6412 - protein, 37 aa, Streptococcus agalactiae
MAVFESSLSSIYSKNVTRNGCIFFENNKIMLACAVFF

SEQ ID NO: 6413 - DNA, 1278 bp, Streptococcus agalactiae
gtgcgttatagtaaagagattattcagttagctataccagctatgattgaaaatatcttacaaatgctcatgggagtagttgataattatctagtggctcagttaggtgttgtagcagtatcaggtgtttcagttgctaataatataattactatttatcaagctatttttatagctttaggggcgagtatagcaagtctattggccaagtcgttagcaggtagtaagaaggatgatgcaatttcagtatgttctcaagccatttttctaacattactgataggggcagtattaggaattatctcgattgtttttggacaaactttctttaaacttttagggacaacaaaaagtgtcgcacaagttggtggtttatatttagcaattgtgggtggaggtgttgttactttaggaatgttaaccaccctaggctcatttttacgtgtgcaagggcaacctcgtttaccaatgtatgtcagtatttttgtcaatttcctcaatgcagtcttatcaggttttgctatttttgagtggcgctatggtttggtcggagtggcagtatcaactcttatcgcaagattaattggtatttgtatccttgcgaagtatcttcctattaaaaagataataaaaagaatgacttggaaaatcagtgcacaaatttggaatcttgccttaccatcagcaggagaacgtctgatgatgcgagctggagatgttgttatagttgctattgttgttcagttaggtacaaatgttgtagcgggaaatgctattggagaaaccttgacacaatttaattatatgccaggacttggcatcgcaactgctacaattatcctaactgcaaaatatgtaggacaaaaaaacagagaatctatagaagaaactattcaaagttcgtattatattggcttagttctaatgatccttatatcaagttttatgcttcttgcaggcaaaccattgacacagttatttacaaataatccttctgccattaaaggaagtttgattgttattttgctatctttcgtaggagtacctgctactattgggaccttggtttatacagcagcttggcaaggattaggaaatgctaaactcccattttacacaacgactataggcatgtggttaatcagagtagttcttggttatttattaggaatagtttttgaattaggtttgcttggggtttggatggctacgatagcagacaatatctttaggtggctgtttttgaaagttcactatcatcgatatattcaaaaaatg

SEQ ID NO: 6414 - protein, 426 aa, Streptococcus agalactiae
MRYSKEIIQLAIPAMIENILQMLMGVVDNYLVAQLGVVAVSGVSVANNIITIYQAIFIALGASIASLLAKSLAGSKKDDAISVCSQAIFLTLLIGAVLGIISIVFGQTFFKLLGTTKSVAQVGGLYLAIVGGGVVTLGMLTTLGSFLRVQGQPRLPMYVSIFVNFLNAVLSGFAIFEWRYGLVGVAVSTLIARLIGICILAKYLPIKKIIKRMTWKISAQIWNLALPSAGERLMMRAGDVVIVAIVVQLGTNVVAGNAIGETLTQFNYMPGLGIATATIILTAKYVGQKNRESIEETIQSSYYIGLVLMILISSFMLLAGKPLTQLFTNNPSAIKGSLIVILLSFVGVPATIGTLVYTAAWQGLGNAKLPFYTTTIGMWLIRVVLGYLLGIVFELGLLGVWMATIADNIFRWLFLKVHYHRYIQKM

SEQ ID NO: 6415 - DNA, 1290 bp, Streptococcus pyogenes
atgatatataataatagaagaaaaattttctctttagctctgccttctatgatagaaaatattttacagatgttaatgggaatggttgataattacctggtggctcaaattggacttgtagcagtctctggtgtctccatagctaacaacattatcagtatttatcagtccctctttatcgcgctgggagctgctgtatctagtctgattgctcgaagtattggagaaaataatcagaacaaacaattaaactatatggcaggtgtcttgcaagtaacactcctcctttcggtcggcttagggttgttatcagttgctggacatcatcaggtgttagaatggctaggagctgaagcttctgtaacattggttggagggcaatatctatccattgtcggcggtatgattgttagtctaggacttttaactagcttaggagctattgttcgagctcaagggtatcctaagattcctatgcaagtgagcttattaataaacgtactcaatgccattttttctgccttgtctatctatgtatggggatttggtcttcttggtgttgcttgggcgacggttttatctcgtttagtgggtgtgtttttactttgtcagtttattcctattaaacaggttgcgaaacgattgatgagacctttggacaaaattatttttgatttatcactacctgctgctggtgaacgtttgatgatgagagcaggagatgtcctaattattggcattgttgttcgctttgggacaacggccttggcaggtaatgctattggagaaaccttgactcagtttaattacatgcctggcttagccatggcaacggcaacaattattctagtggctaggcaactggggggcggtaaggtgactgagataaggtatattattagagaagcttttattttatccaccctcatgatgctggttatgggagccttgacctatctgctaggtcctagtctcttgccgctatttacacagaatactgatgctcaaaggtctgccatgattgttttacttttttctttactaggagctcccgcaacggcaggcactttagtttatacagccgtctggcagggtttgggaaaagcaaagcttcctttctatgcaacaaccataggaatgtgggtgattcgcattggccttggttatgtgattggtgtggtttggcaatatggactcataggggtctggatggcgacagtgttagataataccagtcggtggtttattctctctaaacactttaaaaagtaccaagaaattacctttcat

SEQ ID NO: 6416 - protein, 430 aa, Streptococcus pyogenes
MIYNNRRKIFSLALPSMIENILQMLMGMVDNYLVAQIGLVAVSGVSIANNIISIYQSLFIALGAAVSSLIARSIGENNQNKQLNYMAGVLQVTLLLSVGLGLLSVAGHHQVLEWLGAEASVTLVGGQYLSIVGGMIVSLGLLTSLGAIVRAQGYPKIPMQVSLLINVLNAIFSALSIYVWGFGLLGVAWATVLSRLVGVFLLCQFIPIKQVAKRLMRPLDKIIFDLSLPAAGERLMMRAGDVLIIGIVVRFGTTALAGNAIGETLTQFNYMPGLAMATATIILVARQLGGGKVTEIRYIIREAFILSTLMMLVMGALTYLLGPSLLPLFTQNTDAQRSAMIVLLFSLLGAPATAGTLVYTAVWQGLGKAKLPFYATTIGMWVIRIGLGYVIGVVWQYGLIGVWMATVLDNTSRWFILSKHFKKYQEITFH

SEQ ID NO: 6417 - DNA, 1488 bp, Streptococcus agalactiae
atggcaatagtatatcaatcaacacgtgatgctagtaataaagtgacagctagtcaagcgattctaaagggattagctgacgatggaggactctttacccccatcacatttccaaaagttgatttagatttcactaaacttaaggatgcttcctaccaagaagtggctaaactcgttttgtcagctttttttgatgattttactgaacaagaattggattactgtattagtcaagcttatgatactaaatttgatacaactgaaatagccccgatagtaaagattggagaccggtatcaccttgaattatttcacggtcctacaattgcatttaaagatatggctttatccattcttccttatttgctaacaacagcagccaaaaaacaaggggttgataataaaatcgttattttaacagcaacatcaggtgacactggcaaggcagcgatggcaggttttgcagatgttccaggaactgagattattgtcttttatcctaaaaatggtgttagttatatccaagaattgcagatgataacacaagccggacaaaatactcatgttgttgcgattgaaggaaattttgatgatgcacagacttcagttaaagaaatgttcaataattcccttcttcgattaaaattatcacagcagcatatgcagttatcatcagccaattcaatgaacatcggtcgccttgttcctcaaattgtttactatatatatgcatatgctcaattagttaagtcaaaggaaatctcaattggtcaaccaattaattttagtgtacctacaggaaattttggtaatattttagcagcatattatgctagtcaaattggattacctgttaccaaactcatttgtgcctcaaatgataataacgttctaacagatttttttaagacacaaacctacgataaaaatcgagaatttaaagtgacatcaagtccctctatggatattttggtctcctctaatctagaacgattaatctttcaccttttaggcgatgatgcagaaacgactaaaaaattaatggaagatttagtgactactggggagtatgccttagaggctaggcaagcaaatattttagagagctttgtagcgggatttgcgacagaacaatttgttgaattagacatcaaacatttatttgaccagtatcagtatatagaggatccgcatacagctgtagcatcagctgtttatcaagcttatcagacagaaactaaagatcaaactccagcagtaattgtgtcaacagcaagtccttataagttcccgtgtgttgttacaaaggctattacaaataaagaagagatacaggatttcgctgctatttcaatcttaaacgatttgtcaggtgtttctttacctaaggcggttacagatctacaaaaggccgaagtaatccatagaacggtagtacctacctcaaatatgcgagaaacggttgaagagtgtctaggtttgaaacaa

SEQ ID NO: 6418 - protein, 496 aa, Streptococcus agalactiae
MAIVYQSTRDASNKVTASQAILKGLADDGGLFTPITFPKVDLDFTKLKDASYQEVAKLVLSAFFDDFTEQELDYCISQAYDTKFDTTEIAPIVKIGDRYHLELFHGPTIAFKDMALSILPYLLTTAAKKQGVDNKIVILTATSGDTGKAAMAGFADVPGTEIIVFYPKNGVSYIQELQMITQAGQNTHVVAIEGNFDDAQTSVKEMFNNSLLRLKLSQQHMQLSSANSMNIGRLVPQIVYYIYAYAQLVKSKEISIGQPINFSVPTGNFGNILAAYYASQIGLPVTKLICASNDNNVLTDFFKTQTYDKNREFKVTSSPSMDILVSSNLERLIFHLLGDDAETTKKLMEDLVTTGEYALEARQANILESFVAGFATEQFVELDIKHLFDQYQYIEDPHTAVASAVYQAYQTETKDQTPAVIVSTASPYKFPCVVTKAITNKEEIQDFAAISILNDLSGVSLPKAVTDLQKAEVIHRTVVPTSNMRETVEECLGLKQ

SEQ ID NO: 6419 - DNA, 846 bp, Streptococcus agalactiae
ttgggtcacgaaggcattggtatagtagaagaaattggagaaggcgtaacgtctttgagggttggtgatcgtgtctctattgcatggttctttgaagggtgcggtcattgcgaatactgtactacaggacgtgagacactttgtcgtagtgttaaaaatgctggatacagtgttgatggtggtatgagtgaatacgctattgttaccgcggactatgcggttaaggttcctgagggattagacccagctcaagcatcatcaatcacttgtgctggagtaacaacatacaaggctatcaaagaagctggagctgctcctggtcagtggattgcagtgtatggtgcaggtggtcttggaaacttagcagtccaatatgcaaaaaaagtattcaatgctcatgttgtagctgttgatattaacgcagataaacttcaattagctaaagaggttggagcagatttgacagttaatggcaaagaaataaaagatgttgcggcatatattcaagaaaagacaggcggttgtcatggagtggttgtgactgctgtttctaaagttgcgtttaatcaggcgattgacagcgttcgtgctggaggtacagtggtagctgtcggtcttccatcagaatatatggaattgagtattgtaaaaacagtacttgatgggattcgtgtggttggttccttagttggaactcgtaaagacttagaagaagccttcgcatttggagcagaaggcttggtagtaccggtggttgaaaaagtgcctgtggatacagctcctcaagtattcgatgaaatggaaagaggattgattcaaggacgtaaagttcttgactttacaaag

SEQ ID NO: 6420 - protein, 282 aa, Streptococcus agalactiae
MGHEGIGIVEEIGEGVTSLRVGDRVSIAWFFEGCGHCEYCTTGRETLCRSVKNAGYSVDGGMSEYAIVTADYAVKVPEGLDPAQASSITCAGVTTYKAIKEAGAAPGQWIAVYGAGGLGNLAVQYAKKVFNAHVVAVDINADKLQLAKEVGADLTVNGKEIKDVAAYIQEKTGGCHGVVVTAVSKVAFNQAIDSVRAGGTVVAVGLPSEYMELSIVKTVLDGIRVVGSLVGTRKDLEEAFAFGAEGLVVPVVEKVPVDTAPQVFDEMERGLIQGRKVLDFTK

SEQ ID NO: 6421 - DNA, 1071 bp, Streptococcus pyogenes
atgtacaatttatttgtaaccgattacaaaaaagtcattattagatggaggactgatatgaaagccgtagttgttaatcaagctagtacaggtgtcgaagttgttgagcatgatcttccaaatattggtcatggtgaagcgcttgttaaagtagaatactgtggcgtttgtcatactgatttacacgttgcacatggcgattttggtcaggtaccaggacgtattttggggcacgaaggtattggtatagtagaagaaattggagaaggcgtaacatccttaaaggttggtgatcgtgtctctattgcatggttctttgaaggatgtggtcattgcgaatactgtactacaggacgtgagacactttgtcgtagtgttaaaaatgctggatacagtgttgatggaggaatgagtgaatatgcagtagtaacagctgattatgcagttaaagttccagaaggtttagacccggctcaagcttcttccattacttgtgctggtgtaacaacttataaagctattaaagaggcaggtgctgctccaggccaatggattgttatctttggggctggtggccttggaaatctggctgttcaatacgctaaaaaagtctttaatgcacatgttgtcgcagtggacattaataatgataaacttgagttagctaaagaagttggcgcagatattttagttaacggcaaagaaattgaagatgttccaggctatattcaagaaaaaaccggtggagcacatggtgttgtggtaacggctgtttctaaagttgcttttaaccaagcaattgatagtgtccgtgccggtggaacagttgtagccgtaggtcttccatcagaatacatggaactgtctatcgtaaaaactgttttagatggtatcaaagtggtcggatcacttgtagggacacgtaaagacttggaagaagcctttgcctttggtgcagaaggtctggttgctccggttgtcgaaaaagttccagttgacactgctccagaagtctttgatgaaatggaacgtggtttaatccaagggcgcaaggtcttagatttcatcagc

SEQ ID NO: 6422 - protein, 357 aa, Streptococcus pyogenes
MYNLFVTDYKKVIIRWRTDMKAVVVNQASTGVEVVEHDLPNIGHGEALVKVEYCGVCHTDLHVAHGDFGQVPGRILGHEGIGIVEEIGEGVTSLKVGDRVSIAWFFEGCGHCEYCTTGRETLCRSVKNAGYSVDGGMSEYAVVTADYAVKVPEGLDPAQASSITCAGVTTYKAIKEAGAAPGQWIVIFGAGGLGNLAVQYAKKVFNAHVVAVDINNDKLELAKEVGADILVNGKEIEDVPGYIQEKTGGAHGVVVTAVSKVAFNQAIDSVRAGGTVVAVGLPSEYMELSIVKTVLDGIKVVGSLVGTRKDLEEAFAFGAEGLVAPVVEKVPVDTAPEVFDEMERGLIQGRKVLDFIS

SEQ ID NO: 6423 - DNA, 1296 bp, Streptococcus agalactiae
ttgaaattatttatcccagtattgatttatcaatttgctaatttttcagctacttttattgattcggttatgactggacagtatagtcagctacatttggcaggtgtgtcaactgctagtaatttatggactccgtttttcgctttattagtaggtatgatttcagcattagtaccagtagttggtcaacatttgggtagaggaaataaagaacaaattcgcacagaatttcatcaatttctatatttaggtttgatactgtccttaatattatttttaatcatgcaatttattgctcaacctgtcttggggagtttgggtttagaagatgaagttctagcagttggtcgtggttatttaaattatatgttgattggaatcatgccgctggtgttgtttagcatttgccgttcattctttgatgcattggggttaacaaggttatctatgtatctgatgcttttaattctaccctttaattcattttttaattatatgcttatctacggtaaatttggtatgcctagactaggaggtgcgggggcaggtcttggaacttctttaacttattgggctatttttattgttattattattgtgatgtcacttcatcctcaaattaaaacatatcatatatggactctggaaagaataaaagctcctttgattattgaagatattcgattgggattaccgattggtttacaaatttttgcagaagttgcaatttttgcagtagtaggcttattcatggcaaaattttcttcaatcattattgcagcacatcaggctgctatgaatttttcatcattaatgtatgcctttcctttaagtatttccactgctctagctattacaatatcgtttgaagtaggggcagagcgctttcaggacgcaaacacttatagtaggataggacgcttaacagcggtagggattacatcaggaaccttactatttttatttctatttcgtgagaatgtagcagcaatgtataatagtgaccctcactttgtcgctattacagctcaattcctaacttatagtctctttttccagtttgcagatgcttatgcagctcctgtacaggggattttacgaggctataaggatacaacaaaaccatttatgatcggtgcgggctcttattggttatgtgctttgccattagcggttatcttagaaaaaaatagccagttaggtccttttgcctattggattggtttaatcacaggtatttttgtttgtggtctatttctaaaccaacgtctgcaaaagattaagaagttgtattat

SEQ ID NO: 6424 - protein, 432 aa, Streptococcus agalactiae
MKLFIPVLIYQFANFSATFIDSVMTGQYSQLHLAGVSTASNLWTPFFALLVGMISALVPVVGQHLGRGNKEQIRTEFHQFLYLGLILSLILFLIMQFIAQPVLGSLGLEDEVLAVGRGYLNYMLIGIMPLVLFSICRSFFDALGLTRLSMYLMLLILPFNSFFNYMLIYGKFGMPRLGGAGAGLGTSLTYWAIFIVIIIVMSLHPQIKTYHIWTLERIKAPLIIEDIRLGLPIGLQIFAEVAIFAVVGLFMAKFSSIIIAAHQAAMNFSSLMYAFPLSISTALAITISFEVGAERFQDANTYSRIGRLTAVGITSGTLLFLFLFRENVAAMYNSDPHFVAITAQFLTYSLFFQFADAYAAPVQGILRGYKDTTKPFMIGAGSYWLCALPLAVILEKNSQLGPFAYWIGLITGIFVCGLFLNQRLQKIKKLYY

SEQ ID NO: 6425 - DNA, 210 bp, Streptococcus agalactiae
ttggagaagatttatcccttgatctttagcaccgaagatacacccacagtaacattgtcggtagatatcataatctttacacatctcaacggaacgttggtaacctttattttttttaaggtcgctaggaagatactgagtatcataaattttttggacatcaataccaatagtattgattgtttgagagtttttgtgaggactaatagt

SEQ ID NO: 6426 - protein, 70 aa, Streptococcus agalactiae
MEKIYPLIFSTEDTPTVTLSVDIIIFTHLNGTLVTFIFFKVARKILSIINFLDINTNSIDCLRVFVRTNS

SEQ ID NO: 6427 - DNA, 765 bp, Streptococcus agalactiae
atgatagacgttgagaatattcttgaaaaaatgaaacctaaccaaaaaatcaattacgattgggtcatgcaacaaatggttaagcagtggcaagctagtgatatccgtccgaaaattctgatgcatgtttgctgtgctccttgtagtacatatacccttgaatacttatcacaatgggcagatgttaccatctattttgctaattcaaatatccatcctaaagatgaatattatcgccgcgaatatgttactcaaaaatttgttcatgatttcaacaaaaatactggatattctgtacaattcttatcagcaccatatgaaccaaatgaatttttcaaaattgttcatgggttagaagaagaacctgaaggtggggatcgttgtaaagtttgctatgatttccgtcttgataagacagcggaaaaagccgttgaactaggttttgattactttggcagtgccctaactattagtcctcacaaaaactctcaaacaatcaatactattggtattgatgtccaaaaaatttatgatactcagtatcttcctagcgaccttaaaaaaaataaaggttaccaacgttccgttgagatgtgtaaagattatgatatctaccgacaatgttactgtgggtgtatcttcggtgctaaagatcaagggataaatcttctccaaatcaaaaaagatgcgaaagctttcgtgagtgataaagacggcaaagaagaatttcctaatatacgcttcacatttaatggcaagtcaatg

SEQ ID NO: 6428 - protein, 255 aa, Streptococcus agalactiae
MIDVENILEKMKPNQKINYDWVMQQMVKQWQASDIRPKILMHVCCAPCSTYTLEYLSQWADVTIYFANSNIHPKDEYYRREYVTQKFVHDFNKNTGYSVQFLSAPYEPNEFFKIVHGLEEEPEGGDRCKVCYDFRLDKTAEKAVELGFDYFGSALTISPHKNSQTINTIGIDVQKIYDTQYLPSDLKKNKGYQRSVEMCKDYDIYRQCYCGCIFGAKDQGINLLQIKKDAKAFVSDKDGKEEFPNIRFTFNGKSM

SEQ ID NO: 6429 - DNA, 774 bp, Streptococcus pyogenes
gtggccacaatgattgatttacaagagattctcgctaacatgaatcccaatcaaaagataaattatgacagggtcatgcaacagatggccaaggtttgggagaaggaatccgtgcgccccagtattttaatgcatgtctgctgcgccccatgctccacttacaccctagaatacctgacgcagtttgctgacattacggtttactttgccaattctaatattcaccctaaggacgaataccatcgcagagcttatgtgacacaacagtttgtctccgagttcaacgctaaaacaggcaatactgttcagtttctcgaagcggactatgtccccaatgagtacgttcgacaagtgcgaggcttagaagaggaaccagaaggtggggaccgttgccgtgtctgttttgattaccgactagacaagaccgctcaaaaagcagtggaacttggttttgactactttgccagtgccctaaccatcagtcctcataaaaattcgcaaaccattaatgatgtgggcatcgatgtgcaaaaggtttacaccaccaaatacctgccaagtgatttcaagaaaaacaacggttatcgcagatccgttgaaatgtgtgaggagtatgatatttaccgccaatgctattgtggctgtgtctatgctgccaaaatgcaaggtattgacttggttcaagtgaaaaaagatgccaaagcttttatggcagacaaggatttggataatgatttcacccacatccgctttagttatcgtggggatgagatg

SEQ ID NO: 6430 - protein, 258 aa, Streptococcus pyogenes
VATMIDLQEILANMNPNQKINYDRVMQQMAKVWEKESVRPSILMHVCCAPCSTYTLEYLTQFADITVYFANSNIHPKDEYHRRAYVTQQFVSEFNAKTGNTVQFLEADYVPNEYVRQVRGLEEEPEGGDRCRVCFDYRLDKTAQKAVELGFDYFASALTISPHKNSQTINDVGIDVQKVYTTKYLPSDFKKNNGYRRSVEMCEEYDIYRQCYCGCVYAAKMQGIDLVQVKKDAKAFMADKDLDNDFTHIRFSYRGDEM

SEQ ID NO: 6431 - DNA, 1005 bp, Streptococcus agalactiae
atgaatgaactgattaaacataagctagaattgttaccagacagtcctggttgttaccttcataaagataagaatgggacaattatttatgtaggtaaggctaaaaatcttaagaatcgtgtgaaaagttattttcatgggagtcataatactaagacagaacttttggtctctgagattgaagactttgaatacattgtgacaacatctaataccgaagctctattattggaaattaatttaatccaagaaaatatgccgaagtataatattcgattgaaagatgataagtcttacccatatatcaaaataacaaatgaacgttatcctcgtcttatgattacacgtcaagtaaaaaaatcagatggcacttattttggaccttatccggattctggggcagcaactgagattaagcggttactagataggctctttccttttaagaaatgtactaatccagcaaataaagtatgcttttattatcatttagggcaatgcaatgcacatacagtttgtcaaactaataaagcttattgggatagtctgagagaagatgtaaaacagtttcttaatggtaaagataataaaattgttaacggattaactgaaaaaatgaagagcgctgctatgactatggaatttgagcgtgcggctgaatatcgagatttgatcgaagcaattagtttgttgcgtactaagcagcgtgttattcatcaagatatgaaggatagagatgtttttggttatttcgttgataagggttggatgtgtgtacaggtcttttttgttcgaaatggaaaattgattcagcgtgacgtgaatatgtttccttattataatgaaccagaggaagattttctaacttacatagggcaattttatcaagatacaaaacattttctacccaaagaagtctttattccacaggatattgatgctaagtcggttgaaacaattgtaggctgtaagattgttaaaccacaacgtggtaaaagaaacagt

SEQ ID NO: 6432 - protein, 335 aa, Streptococcus agalactiae
MNELIKHKLELLPDSPGCYLHKDKNGTIIYVGKAKNLKNRVKSYFHGSHNTKTELLVSEIEDFEYIVTTSNTEALLLEINLIQENMPKYNIRLKDDKSYPYIKITNERYPRLMITRQVKKSDGTYFGPYPDSGAATEIKRLLDRLFPFKKCTNPANKVCFYYHLGQCNAHTVCQTNKAYWDSLREDVKQFLNGKDNKIVNGLTEKMKSAAMTMEFERAAEYRDLIEAISLLRTKQRVIHQDMKDRDVFGYFVDKGWMCVQVFFVRNGKLIQRDVNMFPYYNEPEEDFLTYIGQFYQDTKHFLPKEVFIPQDIDAKSVETIVGCKIVKPQRGKRNS

SEQ ID NO: 6433 - DNA, 519 bp, Streptococcus agalactiae
atggggaaatctgccattgattatctctataaaaaaggacataaaagcatccagtttgttacagatgatttaaattcagaagtatcagaagagcgctatttagggtattttaaaggtgctagaaagttaggtttaaaccaaaagccagctcttttatttgacagaggcaatccgcaagttttagaggaatttataaatagagtcaaagaagaagaaacaactgctttaattgttattggtgatactgtctctgttagagtaatgcaatttctttctttctataaattaaaagttccagatgacatttctatcatgacctttaataattctctcttctcacatctgattcatccttacctaagcacatttgatattaatgttaataatctaggaaggacaagcgttcgtcgtctgattgacatcattaaatctccagacaaagtctttagtgagactattattgtgccttttactttagaagagcgtgaaagtgtccgagatatttctaaaaataataat

SEQ ID NO: 6434 - protein, 173 aa, Streptococcus agalactiae
MGKSAIDYLYKKGHKSIQFVTDDLNSEVSEERYLGYFKGARKLGLNQKPALLFDRGNPQVLEEFINRVKEEETTALIVIGDTVSVRVMQFLSFYKLKVPDDISIMTFNNSLFSHLIHPYLSTFDINVNNLGRTSVRRLIDIIKSPDKVFSETIIVPFTLEERESVRDISKNNN

SEQ ID NO: 6435 - DNA, 1494 bp, Streptococcus agalactiae
atgaaaaaacgtgcaagtggtgtcttaatgcacatcacttctctaccaggtgatttaggtattggaacatttggacgagaagcctacgcttttgttgattttttggtcgaaactgatcaaaaattttggcaaattcttcccttaacaacaacaagcttcggggactctccttaccagtctttttctgcagtagctggtaatacacatttaattgattttgatttgctaacgcttgaaggtttcatttcgaaagatgactaccaaaatattagttttggacaggatccagaagttgttgattatgctggtctgtttgaaaaacgccgtccagttttagaaaaagcagttaaaaatttcttgcaagaagagagagctacgagaatgctatctgatttcttgcaagaagaaaaatgggtaactgattttgctgaatttatggcgatcaaagaacattttggtaataaggcgcttcaagaatgggatgacaaggctattatacgccgcgaagaagaagccttagcaggatatcgtcaaaagcttagtgaagtgataaaatatcatgaagtaacgcaatatttcttttacaaacaatggtttgagttaaaagaatatgctaatgataaagggattcaaattatcggtgatatgccaatctacgtttctgccgatagtgtagaagtttggacaatgcctgaactgtttaaattagatcgcgacaaacaaccacttgctattgctggtgtaccagcggatgatttttctgacgatggtcagctttggggcaatcctatttacaattgggattaccacaaagagtcagattttgactggtggatttatcgtattcaatctggtgttaagatgtatgactatttgcgtattgatcattttaaaggtttttcagattattgggaaattcgaggagattatcaaacagctaatgatggctcatggcaaccagctcccggtccagaattatttgcaactatcaaagaaaaattaggtgatttacctattattgctgagaatttaggctatattgatgagagagcagagagattactggctggaacagggttcccaggtatgaaaatcatggaattcggtttttatgatacaacaggaaatagtattgatattcctcataactacacagaaaatacaattgcatatgctggaactcatgataacgaagttattaatggctggtttgaaaatcttacagtcgaacagaaagcttatgcagaaaattacatgcgtcgtttgccaaatgagcccattactgagactgtactgcgtaccttgtatgcaaccgttagtcaaacaacgattacatgtatgcaagatctactagataaacctgcagatagccgtatgaacatgccaaataccgttggaggtaactggcaatggcgtatgagaaaagaagacttaacagaaaatcgcaaagcattcttaaaagagattacaactatttataatagagggaataaa

SEQ ID NO: 6436 - protein, 498 aa, Streptococcus agalactiae
MKKRASGVLMHITSLPGDLGIGTFGREAYAFVDFLVETDQKFWQILPLTTTSFGDSPYQSFSAVAGNTHLIDFDLLTLEGFISKDDYQNISFGQDPEVVDYAGLFEKRRPVLEKAVKNFLQEERATRMLSDFLQEEKWVTDFAEFMAIKEHFGNKALQEWDDKAIIRREEEALAGYRQKLSEVIKYHEVTQYFFYKQWFELKEYANDKGIQIIGDMPIYVSADSVEVWTMPELFKLDRDKQPLAIAGVPADDFSDDGQLWGNPIYNWDYHKESDFDWWIYRIQSGVKMYDYLRIDHFKGFSDYWEIRGDYQTANDGSWQPAPGPELFATIKEKLGDLPIIAENLGYIDERAERLLAGTGFPGMKIMEFGFYDTTGNSIDIPHNYTENTIAYAGTHDNEVINGWFENLTVEQKAYAENYMRRLPNEPITETVLRTLYATVSQTTITCMQDLLDKPADSRMNMPNTVGGNWQWRMRKEDLTENRKAFLKEITTIYNRGNK

SEQ ID NO: 6437 - DNA, 1491 bp, Streptococcus pyogenes
atgaacaaacgtgcaagcggtatcttaatgcatattagttccctgcctgggaaatttgggataggcacttttggaaaatcagcttttgaatttgttgattttctagcagagacgaaacaaacctattggcaaattctgcctttaacaacgacgagttttggagattctccttatcagtcattttcagctattgctgggaacacacatttcattgattttgaattgctagtagatgatgaacttttagaagcagcagatttgtgtgatattacattcggcacaaatcctgaagcagtagactatgctcagctttttcaagttagacgtccacttttagaaaaagcagtgagagcttttgttgctgaacaagaaaatgtgtgtaaattagaagcttttgaaacagcttctagctggttaactgattttgctgaatttatggctttaaaagaatattttaacaataaagccttacaagattgggacgacgaaactgtcattaaacgccaagaagactcacttaataattaccgtgagttgcttgcaaaaaagattacctatcataaagtctgtcaatacttcttttaccaacaatggtcagccttgaaaacttacgctaaccataaagggatagaaattattggtgatatgcctatttatgtttctgcggacagtgtagaagtttggacgatgcctgagctatttaaagtagatagtgataaaaagccattgtttattgcaggtgtaccagcagatggctttagtgaagatggtcagctgtggggaaatccaacctacaattggtctgctcatgaaaagtctaattttgcatggtggatttatcgtattcaagaaagtttcaaactatatgatcagctaagaatcgatcattttaaaggcttctcagatttttgggaaattcctgctggtgataaaactgctagaaatggccattgggcctcagccccaggtatagcattattttctgcggttcgtgaggccttaggagagctccctatcatcgcagaaaacctgggttatattgatgaaaaagcagagcagctattagcatcaacaggctttcctggcatgaagatattagaatttggtttatttgatataacgagtcaaagtatagatttaccacattactatgaccgtaattgtgtcgcttacacagggactcatgataacgaggtggttaacggatggtatgacaatcttagtgaagaacaagtacactttgtaaataactatcttcacaaacatgcagatgaaagtattacaaaagccatgctaagaacaatctttgcttctgtttgtgatacagccattctttgcatccaagatttattagataaagatggtaagagtcgtatgaatatgccaaatacaattggaggtaattggcaatggcgtatgcttgacggtgaattgaaccaagatcacaaagattaccttatttatttaacagatctttatggtcgcgcaaga

SEQ ID NO: 6438 - protein, 497 aa, Streptococcus pyogenes
MNKRASGILMHISSLPGKFGIGTFGKSAFEFVDFLAETKQTYWQILPLTTTSFGDSPYQSFSAIAGNTHFIDFELLVDDELLEAADLCDITFGTNPEAVDYAQLFQVRRPLLEKAVRAFVAEQENVCKLEAFETASSWLTDFAEFMALKEYFNNKALQDWDDETVIKRQEDSLNNYRELLAKKITYHKVCQYFFYQQWSALKTYANHKGIEIIGDMPIYVSADSVEVWTMPELFKVDSDKKPLFIAGVPADGFSEDGQLWGNPTYNWSAHEKSNFAWWIYRIQESFKLYDQLRIDHFKGFSDFWEIPAGDKTARNGHWASAPGIALFSAVREALGELPIIAENLGYIDEKAEQLLASTGFPGMKILEFGLFDITSQSIDLPHYYDRNCVAYTGTHDNEVVNGWYDNLSEEQVHFVNNYLHKHADESITKAMLRTIFASVCDTAILCIQDLLDKDGKSRMNMPNTIGGNWQWRMLDGELNQDHKDYLIYLTDLYGRAR

SEQ ID NO: 6439 - DNA, 2262 bp, Streptococcus agalactiae
atgacaagaaattttacaacttacgttggacaacaaggaaaagtattatcagaattaacaaatgaagagatttacgttgaattgttaaattttgtaaaagaagaagctgccgctaaatcaaaaaatagctctcaacgtaaggtatactatatttcagctgagtttctaattggtaaattactttcaaataatttgattaacttagggatttataaagatgtcaaaaaagagttagaacttgtaggtaaatcaattgctgaaatagaagatgtagagccagaaccatcacttggtaatggtggtttagggcgtttagcatcatgttttattgactcgatttcttctttaggtattaatggtgaaggtgttggtttaaactatcactgtgggcttttcaaacaagtatttcgcaacaatcaacaagaagcagaagctaactactggattgagaataattcttggttagtaccaacagatatttcttatgatgttcctttccgtgactttactttaaaatcacgcctagatagaattgatgtattaggttataagaaagatactaaaaattatttgaacctttttgatattgatggacttgattataaccttattgaaaaaggtatcacttttgataagacagaaatcaagaagaatttaaccttgttcttgtatccagatgattcagataaaaatggagaattattacgtatctatcagcaatatttcatggtttcaaatgctgctcaattattaattgatgaagcaatcgagcgtggttcaaaccttcatgatttagctgaatatgcttatgttcaaattaatgacactcacccatctatggtcatccctgagttgattcgtttattgacagaaaaacatggttttgaatttgacgaagctgtgtcagttgttcgcaatatggttggctatacaaaccataccatccttgcagaagctcttgaaaaatggcctttagagtatcttaatgaggtagtaccccacctagtaacaatcattaaaaaattagatcaaatgattcgtgaagagcaaacaaatccagaggttcaaattattgatgaagctggacgtgttcacatggcgcatatggatatccacttctcaacaagcgttaatggtgtagcagcattacatacagaaatccttaaaaatagtgaattaaaggttttctatgatatttacccagataagtttaacaataagacaaacggtattacattccgtcgctggttggagtttgctaaccaagatttagcagattacttgaaagaactaattggggatagctatcttactgatgcgactcagctcgaaaaattgttaacttatgctgatagcaatgaagttcatgataaattagctgctattaaatttaaaaacaaactggctcttaaacgttaccttaaggaaaataaaggtattgaattggatgaatactcaattattgatacacaaatcaaacgattccacgaatataagcgccaacaaatgaatgctttatatgttattcataaatacttagaaattaaacgtgggcatttcccatcacgtaaattaacagttatttttggtggtaaagctgctccagcctatactattgcacaggatatcattcacttaattctctgcttatcagaattaattaataatgatccagaagttaataaataccttaatgtccatttagtagaaaattacaatgtgacagtagcggaaaagttaatccctgcaacagatatttcggaacaaatttcattggcttccaaagaagcatctggtacaggtaacatgaaatttatgttgaatggtgctcttactcttggtactatggatggggcaaatgttgaaatagctgaattagctggcaaagagaacatctacacatttggtaaagactctgatactatcattaatctttatgaaacatctggttatcgttcaaaagattactatgataaagacaaagtaattcgtgaagctgttgattttatcattagtgatgatatagtgtcactcggtaatgcagaacgactaaagagattgcatgatgagttagtaggtaaagattggttcatgacattgattgatttgaaagaatacattgctgttaaagaacaagtgcttgctgattatgaagattatgaatcatggaataagaaagttatacacaatattgctaaagcagggttcttctcatcagatcgtacaatcgaacaatataatcaagatatttggcattcaaat

SEQ ID NO: 6440 - protein, 754 aa, Streptococcus agalactiae
MTRNFTTYVGQQGKVLSELTNEEIYVELLNFVKEEAAAKSKNSSQRKVYYISAEFLIGKLLSNNLINLGIYKDVKKELELVGKSIAEIEDVEPEPSLGNGGLGRLASCFIDSISSLGINGEGVGLNYHCGLFKQVFRNNQQEAEANYWIENNSWLVPTDISYDVPFRDFTLKSRLDRIDVLGYKKDTKNYLNLFDIDGLDYNLIEKGITFDKTEIKKNLTLFLYPDDSDKNGELLRIYQQYFMVSNAAQLLIDEAIERGSNLHDLAEYAYVQINDTHPSMVIPELIRLLTEKHGFEFDEAVSVVRNMVGYTNHTILAEALEKWPLEYLNEVVPHLVTIIKKLDQMIREEQTNPEVQIIDEAGRVHMAHMDIHFSTSVNGVAALHTEILKNSELKVFYDIYPDKFNNKTNGITFRRWLEFANQDLADYLKELIGDSYLTDATQLEKLLTYADSNEVHDKLAAIKFKNKLALKRYLKENKGIELDEYSIIDTQIKRFHEYKRQQMNALYVIHKYLEIKRGHFPSRKLTVIFGGKAAPAYTIAQDIIHLILCLSELINNDPEVNKYLNVHLVENYNVTVAEKLIPATDISEQISLASKEASGTGNMKFMLNGALTLGTMDGANVEIAELAGKENIYTFGKDSDTIINLYETSGYRSKDYYDKDKVIREAVDFIISDDIVSLGNAERLKRLHDELVGKDWFMTLIDLKEYIAVKEQVLADYEDYESWNKKVIHNIAKAGFFSSDRTIEQYNQDIWHSN

SEQ ID NO: 6441 - DNA, 2262 bp, Streptococcus pyogenes
atgacacgctttacagaatatgttgaaactaaactaggaaaatcacttacgcaagccagcaatgaagagatttatctatcattattaaactttgtcaaagaagaagctagccacaaggctaaaaattctgctaaacgcaaagtttactatatctcagcagagtttttgattggtaaattactatcaaacaacctgattaacctaggaatttacaaggacatcaaagaagaattggcagctgctggcaagtctatcgcagaagtcgaagatgttgaattagaaccatcactaggtaatggtggtttaggacgccttgcttcatgttttattgactctattgcatctcttgggattaatggtgaaggggttggtttaaactatcattgtgggttgtttaagcaagtcttcaaacacaatgagcaagaagctgagccaaacttctggattgaagatgactcatggttggttccaacagacatttcttacgatgtgccttttaagaacttcaccttgaaatctcgtcttgatcgtattgatgttttgggttacaaacgcgacactaaaaactaccttaacttgtttgatatcgagggcgttgattacgggttaatcaaagacggcatttcttttgataaaacgcaaattgctaaaaacttgaccttgttcctctacccagacgattctgacaaaaatggggaattgctccgtatttaccaacagtactttatggtgtcaaatgcagcgcaattaatcattgatgaagctatcgaacgtggttcaaaccttcatgaccttgcagactacgcttacgtgcaaattaatgacacgcatccatcaatggtcatcccagaattaattcgtctcttgactgaaaaacatggctttgactttgatgaagcggtagctgttgtgaaaaatatggttggttacactaaccacactattcttgcagaagcccttgaaaaatggccaactgcttacttaaacgaagtagtgccacacttggtaaccatcattgaaaaattggatgctcttgttcgttcagaagtgtctgatccagctgttcaaattattgacgaatcaggtcgtgtgcacatggcccatatggatattcattttgcaacaagtgtcaatggggtagcagcactccacacagaaatcttgaaaaacagcgaattaaaagctttctatgacctttacccagaaaaattcaacaacaaaaccaacgggattactttccgtcgttggctagaatttgctaaccaagacttggctgattacattaaagaacttattggcgatgagtacttgactgacgcaacaaaattagaaaaattgatggcctttgcagatgacaaagctgttcatgctaaattggctgaaatcaaattcaacaacaaattagctcttaaacgttaccttaaagacaataaagacattgagcttgatgaacattctattattgatacccaaatcaaacgtttccacgagtacaaacgtcaacagatgaatgctctttacgtgattcacaaatatttggaaattaaaaaaggcaaccttccaaaacgtaaaatcactgttatctttggaggtaaagcagcgcctgcttacattattgcgcaagacatcattcacttgatcctttgcttgtctgaattgattaacaatgaccctgaagtaagcccataccttaatgtgcatctagttgaaaattacaacgtgacagtagcagagcacttgattccagcaactgatatttctgagcaaatttcactagcatccaaagaagcttctggaactggtaatatgaaattcatgcttaacggtgctttaacacttggtacaatggacggtgctaacgtagaaatcgctgagcttgcaggcatggagaatatctatacctttggtaaagattctgacaccatcatcaacctttatgcgactgcttcttatgtagcaaaagattactatgataaccaccctgctattaaagcagcagtgaactttattatcagtccagaattgctagcatttggcaacgaagaacgtcttgatcgtctttataaagaattgatttcaaaagactggttcatgactttgattgaccttgaagagtacattgaagtgaaagaaaaaatgttagcagactatgaagaccaagatttatggatgacaaaagtggtccataacatcgcaaaagctggattcttctcatctgaccgtaccattgagcagtataacgaagatatttggcattcacga

SEQ ID NO: 6442 - protein, 754 aa, Streptococcus pyogenes
MTRFTEYVETKLGKSLTQASNEEIYLSLLNFVKEEASHKAKNSAKRKVYYISAEFLIGKLLSNNLINLGIYKDIKEELAAAGKSIAEVEDVELEPSLGNGGLGRLASCFIDSIASLGINGEGVGLNYHCGLFKQVFKHNEQEAEPNFWIEDDSWLVPTDISYDVPFKNFTLKSRLDRIDVLGYKRDTKNYLNLFDIEGVDYGLIKDGISFDKTQIAKNLTLFLYPDDSDKNGELLRIYQQYFMVSNAAQLIIDEAIERGSNLHDLADYAYVQINDTHPSMVIPELIRLLTEKHGFDFDEAVAVVKNMVGYTNHTILAEALEKWPTAYLNEVVPHLVTIIEKLDALVRSEVSDPAVQIIDESGRVHMAHMDIHFATSVNGVAALHTEILKNSELKAFYDLYPEKFNNKTNGITFRRWLEFANQDLADYIKELIGDEYLTDATKLEKLMAFADDKAVHAKLAEIKFNNKLALKRYLKDNKDIELDEHSIIDTQIKRFHEYKRQQMNALYVIHKYLEIKKGNLPKRKITVIFGGKAAPAYIIAQDIIHLILCLSELINNDPEVSPYLNVHLVENYNVTVAEHLIPATDISEQISLASKEASGTGNMKFMLNGALTLGTMDGANVEIAELAGMENIYTFGKDSDTIINLYATASYVAKDYYDNHPAIKAAVNFIISPELLAFGNEERLDRLYKELISKDWFMTLIDLEEYIEVKEKMLADYEDQDLWMTKVVHNIAKAGFFSSDRTIEQYNEDIWHSR

SEQ ID NO: 6443 - DNA, 1371 bp, Streptococcus agalactiae
atgttgaaaaaactatttgcaccccctcagaaaagagaacgtttatcagctgaggaaattaagcataaatatcctcgttatcgtgtacaagtccttatttctatttttgtaggttatatgggatactattttgttcgtaatacgacttcaattttatctggtatccttaatatgtctgctactgagattggtattattacctgtgctagctacattgcttatggtctctctaaatttatttctggtttgatttcagatgaatcgaattctaaaattttccttccagttggtttgtttcttacaggactagttaatgtgttaatcggtgttattccatctgtaattactagtatctggctctttactatcatgtatcttattaatggttggttacaagggatgggataccctcctggagcgcgtacattagtctattggtatgataataaagaaagaattaaatatgctaccatttggaatttatctcacaattttggtggagcaatagcgccgattttaactggtgtaggtctagctcttgctggtaatgattctcttaatcaagcgcgtgctgcttattggtttccaggggtggtggcttgtcttttggctgttcttgtttactttttacaagaagatactccagaatctatcggacttccgcctatagaagagtatcataaagagcaatatactaatgttgtggattcaagtgacattttagaagagcctgaagttttgggtatgggcgaaattataaaaaaatatattctaccaaatactaaactgatgtgggcatccttgtattcaatatttgtatatattttacgttacggtattgtctcatggactcctaagtttttagcgacgagtgtgcaagatggtggaaaaggtattactgcaacagctggtatgggtggtttttcactttttgaaataggtggtattattgggatgctaacagcaggatatctatctgccaaagtgtttaaaaactctaaacctttaaccaatgtagccttcttagttgtagcaatcttattactagctgcctattggtttattccagcaggacctcaatatatggcattagacttcattattttactaggtttgggggcatcaatctacggtcctgttatgatggttggcctgtatgctatggagttagttccaaaagcagcagctggagcagcttcaggattgactggcacatttagttatgtcggaggagcaacgatcgctactctagctattggtattattattgaccactttggttggggagtagcatttataatatttggtatttctggatttgcggctattgtctgtaccttgctttcaagagataagagtctagagtattgg

SEQ ID NO: 6444 - protein, 457 aa, Streptococcus agalactiae
MLKKLFAPPQKRERLSAEEIKHKYPRYRVQVLISIFVGYMGYYFVRNTTSILSGILNMSATEIGIITCASYIAYGLSKFISGLISDESNSKIFLPVGLFLTGLVNVLIGVIPSVITSIWLFTIMYLINGWLQGMGYPPGARTLVYWYDNKERIKYATIWNLSHNFGGAIAPILTGVGLALAGNDSLNQARAAYWFPGVVACLLAVLVYFLQEDTPESIGLPPIEEYHKEQYTNVVDSSDILEEPEVLGMGEIIKKYILPNTKLMWASLYSIFVYILRYGIVSWTPKFLATSVQDGGKGITATAGMGGFSLFEIGGIIGMLTAGYLSAKVFKNSKPLTNVAFLVVAILLLAAYWFIPAGPQYMALDFIILLGLGASIYGPVMMVGLYAMELVPKAAAGAASGLTGTFSYVGGATIATLAIGIIIDHFGWGVAFIIFGISGFAAIVCTLLSRDKSLEYW

SEQ ID NO: 6445 - DNA, 1341 bp, Streptococcus agalactiae
ttgtttatggaagaggattataacaaaagagaacctgagaagtttacgcaatttctgcgccgtcaaaaggtcgtcttttttgtcgcattttttggttatgtgtgtgcttacttggtacgcaacaatttcaaactaatgtcaaacactattatggtgcaaaatggttgggacaaggctcaaattgcgatcttgttatcgtgtttgaccgtttcttatggcttagcaaaattctatatgggagccttaggggatcgtgttagcttgaggaagctcttttcaatcagcttgggtgcaagcgctttgatttgtattttaattggttttttcaatagttcaatggtggtattaggaatactgctagtcttgtgtggtgtcgtacaaggtgccttggcacctgcctcacaagccatgattgccaattattttccaaataaaacacgcggcggagccatcgctggatggaacatttctcaaaacatgggatcagccctcttgccattaaccatcgccttgctcaccagtatgggcttggtggtaccagctaatggcaatattttacttgcctttttaatccctggcgttttagtgttcttgtttgctttgtgttgctggaagcttggcggtgataaccctgagtctgagggacttgactctcttcgaacgatgtatggtgatgcgggcgagtcagctgttgccagtgaagaagaaaagcataacctgtcttattggcaactcatctggaaatacgttttttgtaacccgtcgctcttacttgttgctgctgtcaatgtggccctttattttgttcgttttgggattgaagactggatgccgatctacttgtcacaagtagccaatatgtcagaggctcatatccattttgcgatttcaatgttagagtgggtcgctattccaggctcgctggtatttgcgtggttagcggttcgttatcctaataaaatggccaaggttggggctattgggctttttgtgttagcggctattgtctttgtctatgaacgcttgactgccacaggtgctccaaattatttcttgttgcttgttattgcaggtattttagggtcattgatttatggcccacagttgatcgtgaatattttaacaatcaactttgttcctttaaatgttgcaggaacagcgattggttttgtaggagtaacagcttatctcatcggcaatatgggagcaaactggctgatgccgattttggcagatggttttggctggttttggtcatatattgtcgttgcagccttatctgctttttcagcggttggttatttgattttagccaaacgtgaggaagaaatcatcaaagat

SEQ ID NO: 6446 - protein, 447 aa, Streptococcus pyogenes
LFMEEDYNKREPEKFTQFLRRQKVVFFVAFFGYVCAYLVRNNFKLMSNTIMVQNGWDKAQIAILLSCLTVSYGLAKFYMGALGDRVSLRKLFSISLGASALICILIGFFNSSMVVLGILLVLCGVVQGALAPASQAMIANYFPNKTRGGAIAGWNISQNMGSALLPLTIALLTSMGLVVPANGNILLAFLIPGVLVFLFALCCWKLGGDNPESEGLDSLRTMYGDAGESAVASEEEKHNLSYWQLIWKYVFCNPSLLLVAAVNVALYFVRFGIEDWMPIYLSQVANMSEAHIHFAISMLEWVAIPGSLVFAWLAVRYPNKMAKVGAIGLFVLAAIVFVYERLTATGAPNYFLLLVIAGILGSLIYGPQLIVNILTINFVPLNVAGTAIGFVGVTAYLIGNMGANWLMPILADGFGWFWSYIVVAALSAFSAVGYLILAKREEEIIKD

SEQ ID NO: 6447 - DNA, 303 bp, Streptococcus agalactiae
atgacttatgaattatgtctagaatacggtacttatccacttagacctgtagatgcttgggctgatgaaatcaatactgcacctgcgtttattactgaagataaaaaacttttagaacttttagaagaagtcaataccttattccatgagctctttttaacgatagaatgttccttccactatattggtcatgacttcccagaaaaaagagcaaaaatcacacaaatttatcatgtgattatcgaacatttaagcatacactaccctgaatatgacattaaaattgaatcattattaatgggg

SEQ ID NO: 6448 - protein, 101 aa, Streptococcus agalactiae
MTYELCLEYGTYPLRPVDAWADEINTAPAFITEDKKLLELLEEVNTLFHELFLTIECSFHYIGHDFPEKRAKITQIYHVIIEHLSIHYPEYDIKIESLLMG

SEQ ID NO: 6449 - DNA, 300 bp, Streptococcus pyogenes
atgacttatgaactttgtttagaatatgggacttatccgttgtcacgtgttgatgcttactggggagaagatcaaaatcccccaacattcattcaagaagatcgactgctttgccataaactagaaactatgaatcacctgttccatgatttatttgtaactattgaatcacaattccattatgttggttttaacatgcctgaaaaaagagcgcagattcggatactatatcaagaagtagctactatattaaaatccaaatataaggattatccaattaagattgagacgtttcttctt

SEQ ID NO: 6450 - protein, 100 aa, Streptococcus pyogenes
MTYELCLEYGTYPLSRVDAYWGEDQNPPTFIQEDRLLCHKLETMNHLFHDLFVTIESQFHYVGFNMPEKRAQIRILYQEVATILKSKYKDYPIKIETFLL

SEQ ID NO: 6451 - DNA, 984 bp, Streptococcus agalactiae
atgtcagaaaaaatcagagttttactctattataaatatgtttcaattgaaaatgcggaagagtacgctgcgaaacatctagaattttgtaaatctattgggcttaaaggtcgtattttgattgcggatgaggggattaatggaactgtttctggagattatgaaacaactcagaagtatatggattgggtccacagcgatgagcgttttgctgatctttggttcaagattgacgaggaaaatcaacaagctttccgtaaaatgtttgttcgttataagaaagagattgtgcaccttgggttagaagataataactttgatagcgatattaatcctttggaaacaacaggtgagtatttaaatcctaaacaatttaaagaagccttgcttgatgaagatactgttgttttagatacgcgtaatgattatgagtatgacttaggtcacttccgtggagcaattcgtcctgatattcgcaatttccgtgagttaccacaatgggtacgtgacaacaaagataagtttatggaaaaacgtgttgttgtgtactgtaccggtggtgttcgttgtgagaaattctcgggttggatggttcgagaaggttttaaagatgttggacaattacacggtggtattgcaacatatggaaaagatccggaagttcaaggtgaactttgggatggtgcgatgtatgtttttgatgatcgtatctcggtgccaattaatcatgttaatccaactgttattagtaaagattattttgatggaacaccttgtgaacgttatgtcaattgtgcaaatccgttttgtaacaaacaaatttttgcttcagaagaaaacgaagcgaagtatgttcgagggtgctcgcctgaatgtcgtgcacatgaacgtaatcgctatgtgcaagaaaatggtttatcacgtcaagaatgggcagaacgtttagaagctattggagaatccttacctcaagtagcaaatgtt

SEQ ID NO: 6452 - protein, 328 aa, Streptococcus agalactiae
MSEKIRVLLYYKYVSIENAEEYAAKHLEFCKSIGLKGRILIADEGINGTVSGDYETTQKYMDWVHSDERFADLWFKIDEENQQAFRKMFVRYKKEIVHLGLEDNNFDSDINPLETTGEYLNPKQFKEALLDEDTVVLDTRNDYEYDLGHFRGAIRPDIRNFRELPQWVRDNKDKFMEKRVVVYCTGGVRCEKFSGWMVREGFKDVGQLHGGIATYGKDPEVQGELWDGAMYVFDDRISVPINHVNPTVISKDYFDGTPCERYVNCANPFCNKQIFASEENEAKYVRGCSPECRAHERNRYVQENGLSRQEWAERLEAIGESLPQVANV

SEQ ID NO: 6453 - DNA, 984 bp, Streptococcus pyogenes
atgtcagaaaaaatcagagttttactctattataaatatgtttcaattgaaaatgcgcaagagtacgctgcgaaacatctagaattttgtaaatctattgggcttaaaggtcgtattttgattgcggatgaggggattaatggaactgtttctggagattatgaaacaactcagaagtatatggattgggtccacagcgatgagcgttttgctgatctttggttcaagattgacgaggaaaatcaacaagctttccgtaaaatgtttgttcgttataagaaagagatcgtgcaccttgggttagaagacaataactttgatagtgatattaatcctttggaaacaacaggtgagtatttaaatcctaaacaatttaaagaagccttgcttgatgaagatactgttgttttagatacgcgtaatgattatgagtatgacttaggtcacttccgtggagcaattcgtcctgatattcgcaatttccgtgagttaccacaatgggtacgtgacaacaaagataagtttatggaaaaacgtgttgttgtgtactgtacgggtggtgttcgctgtgagaaattctcgggttggatggttcgagaaggctttaaagatgttggacaattacacggtggtattgcaacatatggaaaagatccggaagttcaaggtgaactttgggatggtgcgatgtatgtttttgatgatcgtatctcggtgccaattaatcatgttaatccaactgtcattagtaaagattattttgatggaacaccttgtgaacgttatgtcaattgtgcaaatccgttttgtaacaaacaaatttttgcttcagaagaaaacgaaacaaagtatgttcgaggatgctcacctgaatgtcgtgcacatgaacgtaatcgctatgtgcaagaaaatggtttatcacgtcaagaatgggcagaacgtttagaagctattggagaatccttgccagaatttgtaggtgcc

SEQ ID NO: 6454 - protein, 328 aa, Streptococcus pyogenes
MSEKIRVLLYYKYVSIENAQEYAAKHLEFCKSIGLKGRILIADEGINGTVSGDYETTQKYMDWVHSDERFADLWFKIDEENQQAFRKMFVRYKKEIVHLGLEDNNFDSDINPLETTGEYLNPKQFKEALLDEDTVVLDTRNDYEYDLGHFRGAIRPDIRNFRELPQWVRDNKDKFMEKRVVVYCTGGVRCEKFSGWMVREGFKDVGQLHGGIATYGKDPEVQGELWDGAMYVFDDRISVPINHVNPTVISKDYFDGTPCERYVNCANPFCNKQIFASEENETKYVRGCSPECRAHERNRYVQENGLSRQEWAERLEAIGESLPEFVGA

SEQ ID NO: 6455 - DNA, 1125 bp, Streptococcus agalactiae
atgaaacattatcaaaccataattatcggtgcaggcgctgcaggaatcggttttggttctgccatgcaacgattaggacttacaaattttcttatcattgaaaaagggcacattggagaatcttttttaagatggcccagaacaacacaatttatcacaccttccttcactaccaatggctttggttttccagatctaaacgctgttattccagatacttctcctgctttctcatttgaaaaagaacatctttctggagtggaatatgcacgctacttacaattagttgctgctcattataatctccctatccaaaacgaaacatctgttctatctattgataaacgagatagcctttttgttattaaaacttcaaagggagatttttctgctgattatcttattatggcaacaggagaatttcaaaatccaaataccattgatattaaaggtgcagatctaggaatgcactatggtcaagttgataatttccatatcaaatctgacaatccatttatcatcattggtggaaacgaaagtgcttgtgatgcactaacacatctagtatatttgggaaatcaagtcgaattatatacagatacgtttggtcgtaaagagagcaatcccgatccaagcatctctttatcccccctaactaaagaacgtttaaaacatatacaagaccacaaaaaagaatattatagtatctctgaaggcaagaaagccattgagattaaacaaattggaaaacaatatcaagttacttttgatgacggtagtactgcggagtctttccataaacctattctttccacaggttttctaaatacctgtcatctcattgacggaatcgctttatttgaatacgataaaaatcagttgccaatagttactgaagatgacgaatctactatcgttaataactgtttcttaattggtccaagcttacgacaaagagatactattttctgctatatttataaattcagacagcgctttgtccctgttattaatcatatcgcacaacgagaagggattatattagacgaagatacccttgaattctttaaagaaaatcaaatgtaccttgataacctagcttgttgcgatgtcaattgtgattgc

SEQ ID NO: 6456 - protein, 375 aa, Streptococcus agalactiae
MKHYQTIIIGAGAAGIGFGSAMQRLGLTNFLIIEKGHIGESFLRWPRTTQFITPSFTTNGFGFPDLNAVIPDTSPAFSFEKEHLSGVEYARYLQLVAAHYNLPIQNETSVLSIDKRDSLFVIKTSKGDFSADYLIMATGEFQNPNTIDIKGADLGMHYGQVDNFHIKSDNPFIIIGGNESACDALTHLVYLGNQVELYTDTFGRKESNPDPSISLSPLTKERLKHIQDHKKEYYSISEGKKAIEIKQIGKQYQVTFDDGSTAESFHKPILSTGFLNTCHLIDGIALFEYDKNQLPIVTEDDESTIVNNCFLIGPSLRQRDTIFCYIYKFRQRFVPVINHIAQREGIILDEDTLEFFKENQMYLDNLACCDVNCDC

SEQ ID NO: 6457 - DNA, 1041 bp, Streptococcus agalactiae
gtgtttgtaaagaaaggactatttgtgtttttactattatgtattttatcgatgtggctcatgatttttggggttgcattctattactttgggtcgctacatcaatcattgacttcaaggattatttatcagtttgtacttactgttttgctaacgacaacagcttggttcatgggtgcctattttttagcatttgaaggtcattttaaaactgtctttcaattccaagaagcagatggtaaacaaattgtaaattgtttatttcaactttgtttcgccctttacgcagtagtaatgcttattgggtcaattattgatagagttcagacgaagcgacttttattagctgttgtttcttggcttttcttggtgtatacgcccttagcttatttaatttggaattcagagggtgtttttgcaaagatgggagtacttgatttttcaggcggaatgatcgttcatttatctgcagggctttcttcgtatattttagctcatgttattggcaagagtgaacatcagcacaataaggttaaaaatgatagtctctttttaggaatgatacttattacatttggttggtttggatttaatatgggtccagttggtgagtggaattcacaagccattatgatacttttaaatactatatttgctattataggtggtggtttggcgtggacattggctgctaagtggaatggtgaggaagagaaaacaggaagcttattgaatggcattattgttggtcttgtgacgagtacagcaggagttgggtatctcttaacttggcaattattagctgtaacattctttgcatccctcttcacctactttgtaacggattacgttgcgaaagcttttgccattgatgatgtcgtttcctcctttggaatgaatggtattgggggattgttgggaagtttaggagttggtctctttaaattatcacatatgccagttcaactgttagcattagctaccacaattcttttgtcaattataatgacctatatcatatctaaagcgatttttagaaaa

SEQ ID NO: 6458 - protein, 347 aa, Streptococcus agalactiae
MFVKKGLFVFLLLCILSMWLMIFGVAFYYFGSLHQSLTSRIIYQFVLTVLLTTTAWFMGAYFLAFEGHFKTVFQFQEADGKQIVNCLFQLCFALYAVVMLIGSIIDRVQTKRLLLAVVSWLFLVYTPLAYLIWNSEGVFAKMGVLDFSGGMIVHLSAGLSSYILAHVIGKSEHQHNKVKNDSLFLGMILITFGWFGFNMGPVGEWNSQAIMILLNTIFAIIGGGLAWTLAAKWNGEEEKTGSLLNGIIVGLVTSTAGVGYLLTWQLLAVTFFASLFTYFVTDYVAKAFAIDDVVSSFGMNGIGGLLGSLGVGLFKLSHMPVQLLALATTILLSIIMTYIISKAIFRK

SEQ ID NO: 6459 - DNA, 549 bp, Streptococcus agalactiae
gtgaccgcttttggtcgtgagggttcaagtccctctctccgcagactagtcgagttcatttggaactcgactttttgcatatttaagataaagatggagtatcacatgtcaaaagtacgtggctttgaattagttagccaatttagcaataaagagttattaccaaaacgagaaacagctcacgcagctggctatgatttaaaagtagctaaaaaaacggttattgaacctggtgaaattacattggtcccgaccggtattaaagcatacatgcaaccaggggaggtcctgtacctttatgatcgttcatcgaatccacgtaaaaaagggattgtcctaataaattcagttggtgttattgatggtgactactataataaccaagtcaatgaaggacatatttttgcacagatgcaaaatattactgatcaggctgttattttagaagaaggggaacggattgttcaggctgtttttgccccattcttattggcagatgacgatcaggctacaggaatgcgtacaggtggttttggtagtactggaaaa

SEQ ID NO: 6460 - protein, 183 aa, Streptococcus agalactiae
MTAFGREGSSPSLRRLVEFIWNSTFCIFKIKMEYHMSKVRGFELVSQFSNKELLPKRETAHAAGYDLKVAKKTVIEPGEITLVPTGIKAYMQPGEVLYLYDRSSNPRKKGIVLINSVGVIDGDYYNNQVNEGHIFAQMQNITDQAVILEEGERIVQAVFAPFLLADDDQATGMRTGGFGSTGK

SEQ ID NO: 6461 - DNA, 444 bp, Streptococcus pyogenes
atgacaaaaattcgtggtttcgagcttgtttcaagctttactaatcctgatttactaccaaaacgtgagacgactcatgcagctggttatgacctgtctgttgctgaggctgtaaccattgccccaggggagattaagttggtaccaacaggggttaaggcctatatgcaagatggcgaggtgctttacctctatgatcgttcgtcaaatccacgaaaaaaagggattatcctgattaattcagtaggtgtgattgatgcagattattatggtaatgaggctaatgaaggacatatttttgcacaaatgcaaaacattacagatcaccctgtgacattagctgtgggtgagaggatcgttcagggtgtttttatgccttttttaattgctgatggtgaccaagccagaggtgaacgaacaggtggttttggttcgacagggcag

SEQ ID NO: 6462 - protein, 148 aa, Streptococcus pyogenes
MTKIRGFELVSSFTNPDLLPKRETTHAAGYDLSVAEAVTIAPGEIKLVPTGVKAYMQDGEVLYLYDRSSNPRKKGIILINSVGVIDADYYGNEANEGHIFAQMQNITDHPVTLAVGERIVQGVFMPFLIADGDQARGERTGGFGSTGQ

SEQ ID NO: 6463 - DNA, 1362 bp, Streptococcus agalactiae
gtggctaagaaaaaatcagtcttcacctgtcaagagtgtggttaccaatcacctaagtatttgggacgttgtccaaattgctcagcctggtcttcatttgtagaagaggttgaagttcaagaagttaaaaatgcacgagttagtttgaacggtgaaaagtcccgaccgacgaagttaaaagatgtttcctcaattaactattctagaactaagactgatatggatgaatttaaccgtgttctaggaggcggtgttgtaccaggaagtttggttctgattggaggagaccctgggataggtaaatctactttattactacaagtatcaactcagctagctaataaaggtacagtattatatgtctcaggtgaggaatctgcagaacagattaagttacgaagtgagcgtctaggcgatatcgataatgaattttacctttatgccgagactaatatgcaaagtattcggtcggagattgagaagattaaaccagattttcttattattgattctatacaaactattatgagtcccgaagtatcaagtgtccaaggctctgttagccaagttcgcgaagtgaccgctgaattgatgcagttagctaaaactaataatattgctacttttattgtaggtcatgtgactaaggagggaacattagcaggccctcgaatgctagaacatatggtggatacggttctttattttgaaggggagcgtcatcacacgttccgtattttacgggcagtcaaaaaccgttttggttcgaccaatgaaataggtatctttgaaatgcagtcgggtggtctagttgaagttttgaatccaagtcaagtttttcttgaagaacgtttagacggtgcaacaggatctgctattgttgttactatggaaggaacaaggcctattttagcagaggttcaagctttagtgactccgactgtttttggaaatgctaagcgtacaacaacaggtcttgactttaatcgtgtcagtcttattatggcagttctagaaaaacgttgtggtttattgcttcaaaatcaagatgcctatttaaaatcagcgggtggtgttaaattggatgaaccagcaattgatttagctgttgctgtagctattgcttccagttacaaagaaaaacccacaaatccacaagaatcatttattggagaaattggactcactggtgagattcgtcgcgtgacacgtattgagcaacgtattaatgaggctagtaaattgggctttactaaaatttacgcaccaaagaattctctagctgggattgaaatacctaaaggcattgatgttattggtgtgacaactgttagtcaggtcttaaaagcagtgttttcaaca

SEQ ID NO: 6464 - protein, 454 aa, Streptococcus agalactiae
MAKKKSVFTCQECGYQSPKYLGRCPNCSAWSSFVEEVEVQEVKNARVSLNGEKSRPTKLKDVSSINYSRTKTDMDEFNRVLGGGVVPGSLVLIGGDPGIGKSTLLLQVSTQLANKGTVLYVSGEESAEQIKLRSERLGDIDNEFYLYAETNMQSIRSEIEKIKPDFLIIDSIQTIMSPEVSSVQGSVSQVREVTAELMQLAKTNNIATFIVGHVTKEGTLAGPRMLEHMVDTVLYFEGERHHTFRILRAVKNRFGSTNEIGIFEMQSGGLVEVLNPSQVFLEERLDGATGSAIVVTMEGTRPILAEVQALVTPTVFGNAKRTTTGLDFNRVSLIMAVLEKRCGLLLQNQDAYLKSAGGVKLDEPAIDLAVAVAIASSYKEKPTNPQESFIGEIGLTGEIRRVTRIEQRINEASKLGFTKIYAPKNSLAGIEIPKGIDVIGVTTVSQVLKAVFST

SEQ ID NO: 6465 - DNA, 1359 bp, Streptococcus pyogenes
atggcaaagaaaaaagcaacctttatctgtcaggagtgtggctaccagtcgccaaagtatttagggcgctgtccaaattgctcggcctggtcttcttttgtggaagaagtagaggtcaaagaagtcaaaaatgcccgtgttagtctagctggagaaaagtccagaccggttaaactaaaagatgtggataatattagttatcacagaacacagactgacatgtctgaatttaatagagttcttggagggggtgtggttcctggaagcttgattttaattggtggtgatccaggtattggaaaatccaccttactcttgcaggtatccacgcagctcgctaataagggaacggttctctatgtgtctggggaagaatcagcagagcagattaaactgcggagtgagcgtctgggtgatattgacaatgaattttacctctatgccgaaaccaatatgcaagctattcgcacagaaattgaaaatattaaaccagattttttaattattgactccattcagaccatcatgagccctgatattacaggtgttcaaggatcagtcagtcaggtgagagaagtcactgcagaattgatgcagcttgcaaagacgaacaacattgcaacctttattgtgggtcatgtcaccaaggaaggaaccttggctgggcctcgtatgttagaacatatggtggataccgttctctactttgaaggggaaaggcatcacacctttcgcattctgcgggctgtgaaaaaccgctttggctccactaacgagattggcatttttgaaatgcagtctggcggcttggtagaggtcttaaatcctagtcaagtctttttagaggaacgcttagatggggcaacaggatcggctgtcgttgtaacgatggaaggaagtcgtcctatcttagcagaggtgcaatctttagtgacaccaaccgtttttggcaatgccagacgaaccactacgggacttgatttcaatcgcgtaagcctaataatggcagttttagaaaagcgctgtggtttactcttacaaaatcaagatgcctacctcaagtcggctggtggtgtcaaactagacgaacctgccattgatttggcagtcgctgtggctatcgcatccagttataaggaaaaaccaaccagccctcaagaagctttcttaggcgagatcgggttaacaggtgagattcggcgagtgacccgtattgagcaacggattaatgaagcagcaaagcttggctttaccaaggtctatgctcctaaaaatgccttgcaaggcattgatatccctcaaggtattgaggttgtcggagtgactacggttggtcaggttttaaatgcagtttttagc

SEQ ID NO: 6466 - protein, 453 aa, Streptococcus pyogenes
MAKKKATFICQECGYQSPKYLGRCPNCSAWSSFVEEVEVKEVKNARVSLAGEKSRPVKLKDVDNISYHRTQTDMSEFNRVLGGGVVPGSLILIGGDPGIGKSTLLLQVSTQLANKGTVLYVSGEESAEQIKLRSERLGDIDNEFYLYAETNMQAIRTEIENIKPDFLIIDSIQTIMSPDITGVQGSVSQVREVTAELMQLAKTNNIATFIVGHVTKEGTLAGPRMLEHMVDTVLYFEGERHHTFRILRAVKNRFGSTNEIGIFEMQSGGLVEVLNPSQVFLEERLDGATGSAVVVTMEGSRPILAEVQSLVTPTVFGNARRTTTGLDFNRVSLIMAVLEKRCGLLLQNQDAYLKSAGGVKLDEPAIDLAVAVAIASSYKEKPTSPQEAFLGEIGLTGEIRRVTRIEQRINEAAKLGFTKVYAPKNALQGIDIPQGIEVVGVTTVGQVLNAVFS

SEQ ID NO: 6467 - DNA, 495 bp, Streptococcus agalactiae
atgaccacttattttgataactttttaaaaaccaatcaagcctatgctgacttacatggaacagctcatctacctatcaagccaaagacaaaggttgctattgtaacctgtatggattctcgtttacacgttgctcaagctctagggctagctttaggagatgctcatattttacgtaatgctggtggacgagttacagacgatgttctacgttctttagttatttcgcaacaacaattaggaacacgagaaatcgttgttctacaccatacagattgtggagcacagacgtttactaacgaagcttttgctgctcaattacagagagatttgggtgttgatatgcatggacatgattttcttccttttaatgatattgaagaaagcgttcgtgaagatgtggcaaaattacatgcttctccattaatcccagatgatgttgttatttctggtgctatttatgatgtagatactggtcgtatggtggaagttaaa

SEQ ID NO: 6468 - protein, 165 aa, Streptococcus agalactiae
MTTYFDNFLKTNQAYADLHGTAHLPIKPKTKVAIVTCMDSRLHVAQALGLALGDAHILRNAGGRVTDDVLRSLVISQQQLGTREIVVLHHTDCGAQTFTNEAFAAQLQRDLGVDMHGHDFLPFNDIEESVREDVAKLHASPLIPDDVVISGAIYDVDTGRMVEVK

SEQ ID NO: 6469 - DNA, 498 bp, Streptococcus pyogenes
ttgatgtcttattttgaacattttatggctgccaatcaggcttatgtggccttgcatgggacagctcatttgcccttaaaacccaagactaaagtagcgattgtgacttgtatggattcacggctacatgtggcccaagctctggggctggctctaggagatgctcatattttaaggaatgctggcggacgtgtcaccgaagacatgattcggtcgctggttatttctcagcagcaaatgggaacgagagagattgtggttctccaccatacagattgtggcgcgcagacttttactaatgaaggctttgccaagcatattcatgagcacttaggtgtggatgtttcagggcaagatttccttcccttccaagatgtggaagacagtgtccgcgaggatatggctaagataagagcctcctctcttatctctgatgatgtcgttattaacggtgccgtctacgatgtggatactggaaagatgacacaagtaatggaa

SEQ ID NO: 6470 - protein, 166 aa, Streptococcus pyogenes
LMSYFEHFMAANQAYVALHGTAHLPLKPKTKVAIVTCMDSRLHVAQALGLALGDAHILRNAGGRVTEDMIRSLVISQQQMGTREIVVLHHTDCGAQTFTNEGFAKHIHEHLGVDVSGQDFLPFQDVEDSVREDMAKIRASSLISDDVVINGAVYDVDTGKMTQVME

SEQ ID NO: 6471 - DNA, 1317 bp, Streptococcus agalactiae
atgaaaaaatatgatgtcattgttcttggttttggtaaagcaggtaaaacattagcagcaaaattagcaacacaaggtaaaagcgttgcaatggtcgaagaagacgataaaatgtacgggggaacatgtatcaacattggatgtattccgacaaaaacgcttttagtatcagctagcaaaaatcatgattttcaagaagctatgactactagaaatgaagttacaagtcgtttacgtgctaaaaattttgctatgttggataataaagacactgtggatgtttataatgctaaagcccgctttatatcaaataaagtggtcgaattaacaggaggagctgacaaacaagaacttacagctgatgttattattatcaatactggtgctaagtcagtacaattaccaatcccaggattagctgattctcaacatgtttatgattcaacggcaatccaagaattggctcatcttcctaaacggttaggtatcattggaggcggtaatattgggcttgaatttgcgactttatattccgaattagggagcaaagtgacagttattgatagtcaatcccgtatctttgcgcgtgaggaagaggaattatcagagatggctcaagattatttagaagagatggggatatcttttaaattatcagccgatatcaaatctgtgcaaaatgaagatgaagacgttgttattagctttgaggatgaaaaattaagctttgatgcagtattatatgcaacaggacgtaagccaaatacagaaggtttagcacttgaaaatacagatattaaattgacagaacgtggagctattgctgttgatgaatattgccaaacttctgttgagaatatttttgcagttggtgatgttaatggcggccctcaattcacatatatttctttagatgactcacgtattgtcttaaattatttgaattgtgataaggattattctctaaaaaatcgaggagcagtaccgacttcaacctttacaaatcctcctttagcaacggtaggtctagatgaaaagaccgctaaggaaaaaggatatcaagttaaatctaatagccttcttgtttctgccatgccacgtgcacatgttaataatgaccttagaggtatttttaaagttgtggtagatactgagacaaatcttattttgggagctcgcttatttggtgcagaatcccatgaattaattaatatcatcacaatggcaatggataataaaatcccatatacttatttccaaaaacaaattttcactcacccaacaatggtagagaattttaatgatttgtttaacttt

SEQ ID NO: 6472 - protein, 439 aa, Streptococcus agalactiae
MKKYDVIVLGFGKAGKTLAAKLATQGKSVAMVEEDDKMYGGTCINIGCIPTKTLLVSASKNHDFQEAMTTRNEVTSRLRAKNFAMLDNKDTVDVYNAKARFISNKVVELTGGADKQELTADVIIINTGAKSVQLPIPGLADSQHVYDSTAIQELAHLPKRLGIIGGGNIGLEFATLYSELGSKVTVIDSQSRIFAREEEELSEMAQDYLEEMGISFKLSADIKSVQNEDEDVVISFEDEKLSFDAVLYATGRKPNTEGLALENTDIKLTERGAIAVDEYCQTSVENIFAVGDVNGGPQFTYISLDDSRIVLNYLNCDKDYSLKNRGAVPTSTFTNPPLATVGLDEKTAKEKGYQVKSNSLLVSAMPRAHVNNDLRGIFKVVVDTETNLILGARLFGAESHELINIITMAMDNKIPYTYFQKQIFTHPTMVENFNDLFNF

SEQ ID NO: 6473 - DNA, 1509 bp, Streptococcus agalactiae
ttgactaattcagttaaactgaaaaagtttactatcagaaaatataggagtagaattttggctaataagattcgtgtgcgttatgcaccaagtccaacaggattgttacacatcggaaatgcgcgtactgcgctctttaactacctttatgctcgccatcatggtggggattttgttattcgtattgaagatactgaccgaaaacgccacgtcgaagatggtgaacgctctcaattggagaacttacgttggctaggtatggactgggatgaaagtcctgaaacacatgaaaattatcgtcaatcagaacgccttgagctctaccaacgttatattgatcagttgttagcagaaggtaaagcctacaagtcctatgtgactgaggaagaattagcagcagagcgtgaacgccaagaattggcaggcgaaacacctcgctatatcaacgaatttatcggaatgtcagaaactgaaaaagaagcttacattgcagagcgtgaagcagcaggcatcattccgacagtacgccttgctgttaatgaatctgggatttataaatggactgatatggtaaaaggtgacattgagtttgaaggctctaatatcggcggagactgggttattcagaagaaagatggttatccaacttacaatttcgcagtagtcattgatgatcatgacatgcaaatttcgcatgttatccgtggcgatgaccatattgcaaatacgccaaaacaattaatggtttatgaagcactcggttgggaagcgccacaatttggtcacatgacattgattataaactcagagactggtaagaaattatcaaaacgcgacaccaatactcttcaatttatcgaagactatcgtaaaaaaggttatatgtcggaagctgtctttaatttcattgcccttcttggctggaatcctggtggagaagaagaaatcttctcacgcgagcaattaattaatctatttgatgaaaatcgtcttagcaaatcaccagcagcattcgatcagaagaaaatggattggatgagtaatgattacctaaaaaatgctgattttgagagtgtttttgcactttgcaaaccattcttagaagaagctggtcgacttacagacaaagctgaaaaattagttgagctttatcaacctcaattaaaatcagctgatgagattgtaccattaacagaccttttctttgcagattttccagaactaacagaagccgaaaaagaagtaatggcagctgaaacagtcccaacagtcttatctgcttttaaggaaaagttagtatcgctttctgacgaagaattcactagagatactattttccctcaaattaaggctgttcaaaaagaaacaggtattaaaggtaagaacctatttatgcctattcgtattgcggtttctggtgaaatgcatggaccagagttaccagatactatttatttattaggtaaagaaaaatcagttcaacatatcgataatatgttagcaaaatta

SEQ ID NO: 6474 - protein, 503 aa, Streptococcus agalactiae
MTNSVKLKKFTIRKYRSRILANKIRVRYAPSPTGLLHIGNARTALFNYLYARHHGGDFVIRIEDTDRKRHVEDGERSQLENLRWLGMDWDESPETHENYRQSERLELYQRYIDQLLAEGKAYKSYVTEEELAAERERQELAGETPRYINEFIGMSETEKEAYIAEREAAGIIPTVRLAVNESGIYKWTDMVKGDIEFEGSNIGGDWVIQKKDGYPTYNFAVVIDDHDMQISHVIRGDDHIANTPKQLMVYEALGWEAPQFGHMTLIINSETGKKLSKRDTNTLQFIEDYRKKGYMSEAVFNFIALLGWNPGGEEEIFSREQLINLFDENRLSKSPAAFDQKKMDWMSNDYLKNADFESVFALCKPFLEEAGRLTDKAEKLVELYQPQLKSADEIVPLTDLFFADFPELTEAEKEVMAAETVPTVLSAFKEKLVSLSDEEFTRDTIFPQIKAVQKETGIKGKNLFMPIRIAVSGEMHGPELPDTIYLLGKEKSVQHIDNMLAKL

SEQ ID NO: 6475 - DNA, 1443 bp, Streptococcus pyogenes
atgtctaaaccaattcgtgtgcgttatgcaccaagtccaacagggcttttacatatcgggaatgcccgcacagccctatttaattacctttatgcccgtcgtcacggaggtacttttatcattcgtattgaagatactgaccgtaaacgtcatgttgaagatggtgaacgttctcaacttgaaaacctaaaatggttaggaatggattgggatgaaagcccagaaacgcatgaaaattaccgccagtctgaacgtctagcactttatcaacaatatattgatcaattgttagctgaaggaaaagcctacaagtcttacgtgactgaggaagaattggcagcagagcgtgaacgccaagaagcagctggcgaaacgcctcgctatatcaatgaatttattggtatgtcagctgacgaaaaagctaagtacattgctgagcgtgaagcagcaggtatcgttccaacagtccgtcttgctgttaatgagtccggtatttacaaatggactgacatggttaaaggcgatatcgagtttgaaggtggtaacatcggtggtgactgggttattcaaaagaaagatggctatccaacttataactttgccgttgttgttgatgatcatgatatgcaaatttctcacgttatccgtggcgatgaccatattgccaatacgccaaaacaattgatggtctatgaagctcttggctgggaagcgccagagtttggtcatatgactcttatcatcaattctgaaacgggtaaaaaattatcaaaacgcgacaccaataccctccaattcattgaagattaccgcaaaaaaggttatatgcctgaagctgtctttaacttcatcgcccttcttggctggaatcctggcggagaagaggaaatcttctctcgtgagcaactgattgccctttttgatgaaaatcgccttagcaagtcgccagctgcctttgaccagaagaaaatggattggatgagcaatgagtatcttaaacatgcggattttgaaacagtttatgccctctgcaaaccattccttgaagaggcaggccgtttgacagaaaaagctgagaagctagtagaattatacaaacctcaattaaaatctgcagatgagattattccattgactgaccttttcttttctgatttccctgaattaacagaagccgaaaaagaagtgatggcaggtgaaacagtttcgacagtcttgcaagctttcaaggctaagttggaagctatgtcagatgaagacttcaaaccagaaaatattttcccacaaattaaggctgttcaaaaagaaacaggaatcaaagggaaaaacctctttatgcctattcgtattgcagtatctggtgaaatgcatggcccagaattaccaaatacgatttatttattgggacgtgataaatccattgagcacatcaaaaacatgcta

SEQ ID NO: 6476 - protein, 481 aa, Streptococcus pyogenes
MSKPIRVRYAPSPTGLLHIGNARTALFNYLYARRHGGTFIIRIEDTDRKRHVEDGERSQLENLKWLGMDWDESPETHENYRQSERLALYQQYIDQLLAEGKAYKSYVTEEELAAERERQEAAGETPRYINEFIGMSADEKAKYIAEREAAGIVPTVRLAVNESGIYKWTDMVKGDIEFEGGNIGGDWVIQKKDGYPTYNFAVVVDDHDMQISHVIRGDDHIANTPKQLMVYEALGWEAPEFGHMTLIINSETGKKLSKRDTNTLQFIEDYRKKGYMPEAVFNFIALLGWNPGGEEEIFSREQLIALFDENRLSKSPAAFDQKKMDWMSNEYLKHADFETVYALCKPFLEEAGRLTEKAEKLVELYKPQLKSADEIIPLTDLFFSDFPELTEAEKEVMAGETVSTVLQAFKAKLEAMSDEDFKPENIFPQIKAVQKETGIKGKNLFMPIRIAVSGEMHGPELPNTIYLLGRDKSIEHIKNML

SEQ ID NO: 6477 - DNA, 966 bp, Streptococcus agalactiae
atgaaatttggaaaaaaacttggctttctagccttattgatgtctattgtcctcattctaggtgcatgtggtaaaactggacttggaaattcttctgggaattctacaaaaaatgtaaccaaaaaatctgctaaagatttgaaactaggtgtatctatttcaacaactaacaatccctactttgttgcgatgaaagacggtattgacaaatatgctagcaataaaaaaataagcattaaggtagctgatgctcaagatgacgccgcacgtcaagcagatgatgtccaaaactttattagtcaaaacgtagatgctattttgattaatcccgttgactcaaaagctattgtaacagctattaagtctgcaaacaacgctaatattcctgttattctaatggaccgtggtagtgagggaggcaaagtattaactactgtcgcttcagataacgttgctgctggtaagatggctgcggattatgccgttaaaaaactaggcaaaaaagcaaaagcctttgaattatctggagtaccaggtgcctctgctactgtagaccgtggtaaaggatttcattcagttgcaaaatctaaacttgacatcctttcaagccaatctgccaattttgaccgcgccaaagctttgaatactacacaaaatatgattcaaggacataaagatgtccaaattattttcgcacaaaatgatgaaatggcacttggggctgcacaggctgtcaaatctgctggcttgcaaaatgttcttatcgtaggaattgatggtcagccagatgcccatgatgccattaaaaaaggagatatttcagccactattgcacaacaaccagctaagatgggagaaatagcaattcaagcagcaattgattattataaaggcaaaaaagtagagaaagaaacaatttctccaatttaccttgttaccaaagacaatgttgaaaaatacaattgg

SEQ ID NO: 6478 - protein, 322 aa, Streptococcus agalactiae
MKFGKKLGFLALLMSIVLILGACGKTGLGNSSGNSTKNVTKKSAKDLKLGVSISTTNNPYFVAMKDGIDKYASNKKISIKVADAQDDAARQADDVQNFISQNVDAILINPVDSKAIVTAIKSANNANIPVILMDRGSEGGKVLTTVASDNVAAGKMAADYAVKKLGKKAKAFELSGVPGASATVDRGKGFHSVAKSKLDILSSQSANFDRAKALNTTQNMIQGHKDVQIIFAQNDEMALGAAQAVKSAGLQNVLIVGIDGQPDAHDAIKKGDISATIAQQPAKMGEIAIQAAIDYYKGKKVEKETISPIYLVTKDNVEKYNW

SEQ ID NO: 6479 - DNA, 636 bp, Streptococcus agalactiae
ttgggaatgctaaacggactcttcatttcttacggaaaattagcaccatttatcgttacactggcaacaatgactatctttagaggagcaacgctagtttattcaaacggcaacccaattaccgctggcttatccgatagttttctattccaatttttgggacaaggctatattgttggtatcccattcccagtcattctcatgtttcttacttttattattttgtatattttgttacataaaacagccttcgggaaatctgtttacgctttaggaggtaatgaaaaagcagcgtatatctcgggtattaagttaaacaaagttaaaattatcatctacactatctcaggtatcatggcttccatttctgggttaattatcacatcacgccttagctcagcacaaccaacagctggagcaagttatgagatggatgctattgccgccgttgtcttaggtggaacgtctttatctggtgggaaaggacgtatcattggaacattgattggtgctcttattattggtgtcctgaacaatggattaaacatcattggtgtctctgcattttggcaacaagttgtgaaaggtatcgttattttaatggctgttttacttgatcgctttaaagtagcaaaa

SEQ ID NO: 6480 - protein, 212 aa, Streptococcus agalactiae
MGMLNGLFISYGKLAPFIVTLATMTIFRGATLVYSNGNPITAGLSDSFLFQFLGQGYIVGIPFPVILMFLTFIILYILLHKTAFGKSVYALGGNEKAAYISGIKLNKVKIIIYTISGIMASISGLIITSRLSSAQPTAGASYEMDAIAAVVLGGTSLSGGKGRIIGTLIGALIIGVLNNGLNIIGVSAFWQQVVKGIVILMAVLLDRFKVAK

SEQ ID NO: 6481 - DNA, 348 bp, Streptococcus agalactiae
atgaagagtccgtttagcattcccaagatgccacctaaggcaacagataaaacgatagcaataccaacgggtactccgtggccgattaatccagctgttaatgcactagatagggctaatatggacccgactgataaatcaataccgccagtcaaaataacgaaggtcatcccgaaagcgataaaaccatttgcagttacttgtaataataaattgagtagattattggttgtgaggaaattaggattaatgagtgtgataataaccattaaaccagctaacgcaatcagggttgttaactctgatatatatttcatcatatttttcactttacttacctcctgtggc

SEQ ID NO: 6482 - protein, 116 aa, Streptococcus agalactiae
MKSPFSIPKMPPKATDKTIAIPTGTPWPINPAVNALDRANMDPTDKSIPPVKITKVIPKAIKPFAVTCNNKLSRLLVVRKLGLMSVIITIKPANAIRVVNSDIYFIIFFTLLTSCG

SEQ ID NO: 6483 - DNA, 1476 bp, Streptococcus agalactiae
atgaaaattgacatgaggaatatctccaaatccttcggtactaataaagttctagaaaagattgatttggaattacaatctggtcaaatacacgcgcttatgggtgaaaatggtgcgggtaaatcaaccttaatgaacattctaacaggactttttccagcaagtacaggaactatttatattgatggcgaggaacgaactttttcaaaccctcaagaagcagaggaatttggtattagttttattcaccaagagatgaatacttggccggaaatgactgtcttggaaaatctctttcttggacgtgaaatcaagacaacttttggcttactcaatcaaaaattaatgagacaaaaagcacttgaaacttttaaaagattaggtgtgactattcccctagacatcccgattggtaacttgtctgttggacaacaacaaatgattgaaatcgccaaaagtctcctaaaccaactctctattttggtaatggatgaaccgactgctgctttaacagatcgtgaaactgaaaatcttttccgagttatccgaggtttgaaacaagaaggagtgggcgttgtctatatctcccatcgaatggaggaaatttttaaaatcactgacttcgtaaccgtcatgagagatggtgtcattgtagatacaaaagaaacatcactcacaaattctgacgaattggttaaaaaaatggttggccgaaaattggaagattactatcctgaaaaacattctgaaattgggcctgttgcttttgaagttagtaacctctgtggagataatttcgaggacgtttccttttatgtccgtaaaggcgagattcttggattttctggattaatgggagctgggcgtactgaagttatgcgaactatctttggaattgataaaaagaagtctggtaaggtgaaaattgatgaccaagaaatcactattactaccccaagccaagctatcaagcagggcattggttttttgaccgaaaatagaaaagatgaaggtctcatcctagacttcaatatcaaggacaatatgactctccctagcactaaagattttagcaaacatggtttctttgatgaaaaaacaagcacaacatttgtgcaacaattgattaatcgtctctacattaaatcagggagaccagatttagaggttggaaatctttctggaggtaaccaacaaaaggtcgttctcgctaaatggattggtattgctcctaaagtcttaattcttgatgagccaacgcgtggtgttgatgtcggtgctaaacgagagatttaccaattaatgaatgaactagcagacagaggtgttccaattgtcatggtatcatcagacttacctgaaattctaggtgttagtgaccgcatcatggtaatgcacgaaggtcgaatcagtggagaactcagtcgaaaagaagctgaccaagaaaaagttatgcaactagccacaggaggtaag

SEQ ID NO: 6484 - protein, 492 aa, Streptococcus agalactiae
MKIDMRNISKSFGTNKVLEKIDLELQSGQIHALMGENGAGKSTLMNILTGLFPASTGTIYIDGEERTFSNPQEAEEFGISFIHQEMNTWPEMTVLENLFLGREIKTTFGLLNQKLMRQKALETFKRLGVTIPLDIPIGNLSVGQQQMIEIAKSLLNQLSILVMDEPTAALTDRETENLFRVIRGLKQEGVGVVYISHRMEEIFKITDFVTVMRDGVIVDTKETSLTNSDELVKKMVGRKLEDYYPEKHSEIGPVAFEVSNLCGDNFEDVSFYVRKGEILGFSGLMGAGRTEVMRTIFGIDKKKSGKVKIDDQEITITTPSQAIKQGIGFLTENRKDEGLILDFNIKDNMTLPSTKDFSKHGFFDEKTSTTFVQQLINRLYIKSGRPDLEVGNLSGGNQQKVVLAKWIGIAPKVLILDEPTRGVDVGAKREIYQLMNELADRGVPIVMVSSDLPEILGVSDRIMVMHEGRISGELSRKEADQEKVMQLATGGK

SEQ ID NO: 6485 - DNA, 396 bp, Streptococcus agalactiae
atgaaaaagactggtatattaaatagtcatctcgctaaattagcagacgaccttgggcatactgatcgagtttgtattggagatctgggtctacctgttccaaatggcattccaaagattgatttgtctttgacctctggaatacctagtttccaagaggtacttgatatctatttagagaatatcttagttgaaaaagtcattttagcagaagaaatcaaggaagcaaatccggatcaattatcaaggttattagctaaacttgataactctgttagcatagagtacgtcagtcacaatcatttaaaacaaatgacccaagatgtcaaagcagttattcgtacaggtgaaaatacaccgtattcaaatattattctacaatctggtgttatcatc

SEQ ID NO: 6486 - protein, 132 aa, Streptococcus agalactiae
MKKTGILNSHLAKLADDLGHTDRVCIGDLGLPVPNGIPKIDLSLTSGIPSFQEVLDIYLENILVEKVILAEEIKEANPDQLSRLLAKLDNSVSIEYVSHNHLKQMTQDVKAVIRTGENTPYSNIILQSGVII

SEQ ID NO: 6487 - DNA, 909 bp, Streptococcus agalactiae
atgagtaacattgtcattatcggtagtatttccatggacttagttatggaaaccaatcgtatcgccaaagagggagaaaccgtatttggccaacgtttttcaatggttccaggaggtaaaggtgctaatcaggctgtcgctattgggcgtcttagccaagagcgagataatattactattcttggtgccattggcgaggattcttttggtcccattcttttggataatttaaacaaaaatcatgttactacggattttgtgggaacgataccatcttcttcaggtgttgcccaaatcactctttataataatgataatcgaatcatttactgtcctggagccaacggaaaagttgatactaaaaaatggtctcaggagtggtcaataattaaagaagctgatttagttgtattacaaaatgaaattcctcatcaagcaaatatgaaaattgctaatttttgtaaagaacatagtattaaattactctataatcctgcaccatctagagagactgatattgagatgctcgataaggtcgattatttcacaccaaatgaacacgaatgtcaagagctgttcccaaaccaaaaactagaggatatattagccacatatcctgaaaaactaatcgtaacactcggcacaaaaggagccatctactctgatggaaaagaaagtcatttaattcctgctttagaaactaaagctgttgatacaactggtgcaggtgatacttttaacggtgcattcggttatgctatctcgaaaaaatttaagattgctaaggccttacgttttgcaactctagctgctcacttatccgtgcaaaaatttggtgcacagggtggcatgcctacaattaaagaaatggaggacaaccaacattatgaaaaagactggtatattaaa

SEQ ID NO: 6488 - protein, 303 aa, Streptococcus agalactiae
MSNIVIIGSISMDLVMETNRIAKEGETVFGQRFSMVPGGKGANQAVAIGRLSQERDNITILGAIGEDSFGPILLDNLNKNHVTTDFVGTIPSSSGVAQITLYNNDNRIIYCPGANGKVDTKKWSQEWSIIKEADLVVLQNEIPHQANMKIANFCKEHSIKLLYNPAPSRETDIEMLDKVDYFTPNEHECQELFPNQKLEDILATYPEKLIVTLGTKGAIYSDGKESHLIPALETKAVDTTGAGDTFNGAFGYAISKKFKIAKALRFATLAAHLSVQKFGAQGGMPTIKEMEDNQHYEKDWYIK

SEQ ID NO: 6489 - DNA, 1020 bp, Streptococcus agalactiae
gtgaaaccgtttccacaatataagaaaggagtttctatgagtacgattagacaagtcgccgagaaagctggcgtatcaacatctactgtctcaaggtatatatcccaaaatggttacgttagtcaaaaagcaagtcaaaaaatcgagcaagctatccgcgaactccattatgttccaaatttccttgcacaatctctgaaaaccaaaaaaaatcaacttgttggattactacttcccgatatttcaaaccctttctttccaagacttgctagaggagttgaagaatttctaaaagaacagggttatcgtgtcatgcttggcaacacaaataacaagagccatttagaagaagagtacttaaatgtgctattacaaagtaatgctgcagggattattacaacacacgatttcaccaaaaatcatcctgaaatagatattccagttgtagttgttgaccgcgttaatcaagaaacacagtacggcgttttctctgataataaagagggaggaaaattagcagctcaagctatttggacagcaggtgctaccaatatattactcattcgtggtccgctagataaagctgataaccttaatcaaaggtttcaaggaagccaaaattacctattaaacaaaggggcttgttttgctatcgaagatagtgccagttttgattttgcagagattcaaattgaagcgaaaactttacttgaccaccatccagacattgatagcattatcgctccatctgatatacatgctattgcctacctacacgagattcttaatcgagggaagcgaatccctgaagatgtacaaattattggttatgatgatattttaatgagccaatttatctacccttcgttgtcaactattcaccaatcatcatatattatgggacaaaaagcagctgaattaattttcaaaattactaatcaattacctattaccaataagcgtattaaattacccgttcattatgtcgaacgtgaaaccctaaggaggaaaatagatgag

SEQ ID NO: 6490 - protein, 340 aa, Streptococcus agalactiae
MKPFPQYKKGVSMSTIRQVAEKAGVSTSTVSRYISQNGYVSQKASQKIEQAIRELHYVPNFLAQSLKTKKNQLVGLLLPDISNPFFPRLARGVEEFLKEQGYRVMLGNTNNKSHLEEEYLNVLLQSNAAGIITTHDFTKNHPEIDIPVVVVDRVNQETQYGVFSDNKEGGKLAAQAIWTAGATNILLIRGPLDKADNLNQRFQGSQNYLLNKGACFAIEDSASFDFAEIQIEAKTLLDHHPDIDSIIAPSDIHAIAYLHEILNRGKRIPEDVQIIGYDDILMSQFIYPSLSTIHQSSYIMGQKAAELIFKITNQLPITNKRIKLPVHYVERETLRRKIDE

SEQ ID NO: 6491 - DNA, 1023 bp, Streptococcus pyogenes
ttgagattgaaaaatccccataaacttattttacaaggaggtaaggctatggtaaccattaaacaagttgctgaagaagcaggtgtttctagatcaacagtctccaggtatatttctcaaaaaggatatgtatctgatgatgcaaggcataaaatcaaagcagcgatagcaaaattacattacactccaaatgtcttggcgcagtcattgaagacgaaaaaaaatcaactagtcggtttattattaccagacatttccaatcctttttttccgaggttagcaagaggagcagaagaatatttaaaagaaaaggggtatcgggttatgctaggaaatatttcagacagcgaagctcttgaagaagaatacgtccatgtccttcttcaaagcaatgctgctggcattattactacccatgactttacaaagcggtatcctactcttgctattccagttgtagtggtagatcgtgttgaccaagagacccagtacggtgtcttttcagataatagggcagggggcttattggcggctcagactgtctggcaagcaggggcaaaagaagttttgttaataagaggtccgctggataatgctgaaaacattaatgagcggtttgaagctagtttttcttaccttcaaaaacaagacgtgactatgtatgtgtgtgatagtcagaattttgattttgaaagtattcagctagaagctagttacaacctcaagtgttacccaacaatagacagtattatagcaccttctgatatccatgctattgcttatattcatgaactgcattctcaaggtaaaaagattcctcaagatgttcaaataataggttatgatgacattttaatgagtcaatttatttatccttctttatcgactattcatcaatcctcttatttgatgggccgttatgccgccgaattagtttatactattgctagtcaattaactgtgaaagcaaatcggattaaattgcctgttcactacgttgagcgagaaacaataaggaaaaga

SEQ ID NO: 6492 - protein, 341 aa, Streptococcus pyogenes
LRLKNPHKLILQGGKAMVTIKQVAEEAGVSRSTVSRYISQKGYVSDDARHKIKAAIAKLHYTPNVLAQSLKTKKNQLVGLLLPDISNPFFPRLARGAEEYLKEKGYRVMLGNISDSEALEEEYVHVLLQSNAAGIITTHDFTKRYPTLAIPVVVVDRVDQETQYGVFSDNRAGGLLAAQTVWQAGAKEVLLIRGPLDNAENINERFEASFSYLQKQDVTMYVCDSQNFDFESIQLEASYNLKCYPTIDSIIAPSDIHAIAYIHELHSQGKKIPQDVQIIGYDDILMSQFIYPSLSTIHQSSYLMGRYAAELVYTIASQLTVKANRIKLPVHYVERETIRKR

SEQ ID NO: 6493 - DNA, 1119 bp, Streptococcus agalactiae
atgttcacatcaaaagatcaaaggagaaaaaccatgtcacatgcttggaaagaattaaccttttataagaaaaaatacctcctgattgaattgctaatcattgttatgatgttcatggtagtttttttatcaggtttagcaaacggtttaggtagagctgttagtgctgctattgaaaataacccagctcaaacctatattttgaatgaaggtgctgaacaagtgattacatcatctgtattgacaactaaagatcagacagatttaaacagtttgaatttaaaagatagtaccactttaaatattcaacgttcgagtttaactcgacaaggacacgaaaagaaaattgatatttcttattttgctattgataaagattcttttatggcacctacactttctgagggaaaacaactgacaagttacaaaaaagctattattttaaatgatagtttaaaagctgaagggataaagttaggtgataaagtgattgataagtcatcatctatatcactaacagtcgttggatttgtccataatagtatgtatggtcacggacctgtggcatttattgataaagacatttataccgaaattaataaaaagattaatcctcaataccagttcttacctcaggcattagttatgaaaaatgataaaagtatatctcatttaccaactcaattagaagctgttagtaaaaaagatgtcattcaacatattcctggttatagtgccgaacaatccactttgaatatgattttatgggtccttgtcgtagcttcagctggtattttaggtgtctttttctacatcatcacacttcaaaaacgtcatgaatttagcgtcatgaaagctattgggacaaaaatgtcagagattgccctatttcaattgagtcaagtcattatattggcactgtttggtatcattgttggagatggattggcggttgctctctcttatgtattaccagctcaaatgccatttgttattaattggcaaaatattattctagtatcgtttgtatttttagtcattgcaatgattagtagtgctttgtcaattgtaaaagttgctaaaatcgacccagtcgaagttattaatgggggaggagaa

SEQ ID NO: 6494 - protein, 373 aa, Streptococcus agalactiae
MFTSKDQRRKTMSHAWKELTFYKKKYLLIELLIIVMMFMVVFLSGLANGLGRAVSAAIENNPAQTYILNEGAEQVITSSVLTTKDQTDLNSLNLKDSTTLNIQRSSLTRQGHEKKIDISYFAIDKDSFMAPTLSEGKQLTSYKKAIILNDSLKAEGIKLGDKVIDKSSSISLTVVGFVHNSMYGHGPVAFIDKDIYTEINKKINPQYQFLPQALVMKNDKSISHLPTQLEAVSKKDVIQHIPGYSAEQSTLNMILWVLVVASAGILGVFFYIITLQKRHEFSVMKAIGTKMSEIALFQLSQVIILALFGIIVGDGLAVALSYVLPAQMPFVINWQNIILVSFVFLVIAMISSALSIVKVAKIDPVEVINGGGE

SEQ ID NO: 6495 - DNA, 1074 bp, Streptococcus pyogenes
atgtttttagcgcttaatgaaatgaaacaatccaaattgcggtatggtttgattgctggtttgctatgtttggttgcctatttgatgttctttttgtcaggattggcctttggtttgatgcaggagaaccgctcggcggttgatctttggaaagctgacagtgttttactagccaaggatgctgacgctaccttgaccttatcacaggtgtccagagctcaagaaaatcaaataacagcagacaaggtagctcctcttgctcaactcaataccgtggcgtggtcagttaaaaatcctaaggatgccgacaaagttaaggttagccttttcgggattgattctaatagctttattcgtcctaacattgtaaaaggtcgattatttaagactaacaaagaggttgttttggatcaaagccttgcaaaagaggaagcttttgcgattggcaaggacttttacacatcgagttctagtcaagcattaactatcgttggttatactcaaaatgctagatttagtgttgcaccagtggtttatatgaatttggaagcttttgaaacattaaaatatggagaaccactaccaaaagataagcaagttgttaatgcttttatcactaaaggaagtttaacagattatcctaaaaaagacttccaaaaattagatattaaaacctttattactaaattacctggttatagcgctcaacttttaacttttggctttatgattagttttcttgtcattatttcagctattattattggtatttttatgtatattttgactattcaaaaggcacctatttttgggattatgaaagcgcaaggaatttctaacaaaacgattacgaccgctgtgcttatgcagacattctttttgagttttttaggtagtggtttagggttgctaggtacttggctgacatcattattattaccaacagtagtaccttttcaaagcaattggtttttgtatttggctatattcgttagtatgatctgttttgctctattaggcaccttattttctgtttttaacattatacgaattgatcctttgaaagcaattgga

SEQ ID NO: 6496 - protein, 358 aa, Streptococcus pyogenes
MFLALNEMKQSKLRYGLIAGLLCLVAYLMFFLSGLAFGLMQENRSAVDLWKADSVLLAKDADATLTLSQVSRAQENQITADKVAPLAQLNTVAWSVKNPKDADKVKVSLFGIDSNSFIRPNIVKGRLFKTNKEVVLDQSLAKEEAFAIGKDFYTSSSSQALTIVGYTQNARFSVAPVVYMNLEAFETLKYGEPLPKDKQVVNAFITKGSLTDYPKKDFQKLDIKTFITKLPGYSAQLLTFGFMISFLVIISAIIIGIFMYILTIQKAPIFGIMKAQGISNKTITTAVLMQTFFLSFLGSGLGLLGTWLTSLLLPTVVPFQSNWFLYLAIFVSMICFALLGTLFSVFNIIRIDPLKAIG

SEQ ID NO: 6497 - DNA, 684 bp, Streptococcus agalactiae
atgtcagcaatcttagaattaaaacacatctcaaagcactatccagatggagatgagcttttatcaatattagataatttagatttatcagtttctgcaggtgagtttgtagctatactgggaccctcaggttcaggtaaaagcacacttttatccattgcagggttacttcttggcgcagatcaaggtagtttgtatgtcaatcatgagaacgttacggatttgtctcaaagacaaagaacacaattgcgccgtgaagcactaggttttatatttcaaagtcatcaactgcttccttatttaacaatccaagaacagttgcaacaagaggctcgatttgcaaaacactatgataagaaaacaagcttggaagaaattaataaattattatcagatttaggaatagagcagtgtgcacataaataccctaaccaattatcgggaggacaaaagcaacgcgcagcaattgctagagcatttattaatcatcctaaggttatcttggcagatgagccaacagctagccttgatgaagaacgtgggcgtcaagttacagaacttattcgtcaggaagttaaatcacataatactgcagctattatggtgacacacgatgagcgcgttctagatttagtagataccgtttatcgtttaaaggacgggaaattagttaaagaaaacttc

SEQ ID NO: 6498 - protein, 228 aa, Streptococcus agalactiae
MSAILELKHISKHYPDGDELLSILDNLDLSVSAGEFVAILGPSGSGKSTLLSIAGLLLGADQGSLYVNHENVTDLSQRQRTQLRREALGFIFQSHQLLPYLTIQEQLQQEARFAKHYDKKTSLEEINKLLSDLGIEQCAHKYPNQLSGGQKQRAAIARAFINHPKVILADEPTASLDEERGRQVTELIRQEVKSHNTAAIMVTHDERVLDLVDTVYRLKDGKLVKENF

SEQ ID NO: 6499 - DNA, 669 bp, Streptococcus pyogenes
gtgatgtcggttttaacatttaaacaagtgaccaaaacatttcaagatggtcatcacgaaatcaacgcattaaaggcaactgacttttccattgaagctggagaatttgtggctattattggaccatcaggttctggaaaatcaacctttttgaccattgctggtggcttacagaccccaagttctggtcagctaatcattgatggcactgattatacgcatttatcagaaaaagagcgctcacgcttgcgcttcaaatccgttggttttatcttacaagcttccaatctgatacctttttcaacggtccagcagcagttggaattggtcgatcatttgacaggaagcaaagaaaaagccaaagccaatcagttatttgacgatttaggcattacagggctaaaacatcagttacctcaagaattatccggcggagaaaggcaaagagcggctattgcccgtgctctttaccatgatccagcactgatattggcagacgaacctactgcaagtttggatactgaaaaagcctatgaagtggtcaaactgttggctaaggaaagtaaagaaaaaaacaaggccattattatggtcactcatgatgatcggatgctaaaatattgtgacaaagtctatcggatgcaagatggagagttatgtcaagagaga

SEQ ID NO: 6500 - protein, 223 aa, Streptococcus pyogenes
VMSVLTFKQVTKTFQDGHHEINALKATDFSIEAGEFVAIIGPSGSGKSTFLTIAGGLQTPSSGQLIIDGTDYTHLSEKERSRLRFKSVGFILQASNLIPFSTVQQQLELVDHLTGSKEKAKANQLFDDLGITGLKHQLPQELSGGERQRAAIARALYHDPALILADEPTASLDTEKAYEVVKLLAKESKEKNKAIIMVTHDDRMLKYCDKVYRMQDGELCQER

SEQ ID NO: 6501 - DNA, 669 bp, Streptococcus agalactiae
atgattaaaatattagttgtagaggataacattgttcaacaaaaaatcattaccacaaaattaacacaagagggctaccaatttatcactgcttcaaatggacaagaagctctaaattgtctagatacagaagaagtacaattgattataactgatatcatgatgcccatgatggatggttatcaattaattcaagaactcaggtcagctgcttataatgttccaatcattgttatgacagcaaaatcacaaatggaagatatgacaaaagggtttggccttggtgcagatgattatatggttaagcctgtgcagttacaagaattagctttacgtattaaggcactcttgaggagagctaatattgtagctcaacatcagctaattattgggaatacttgtcttaatgaagatgaattaagcttgaaatattttgagcaagaaattatatttcctcagaaagaatttagggttcttttccacttacttagctatcctaataggattttcacacgtttagaactattggatagtatttggggaatggatactgatttagatgagcgggtggtagatgcttgcatcaataaaattagacgaaaagtagaacacttaccagattttaagattgagacggtgagaggggtagggtatcgtgcaaaaaatgac

SEQ ID NO: 6502 - protein, 223 aa, Streptococcus agalactiae
MIKILVVEDNIVQQKIITTKLTQEGYQFITASNGQEALNCLDTEEVQLIITDIMMPMMDGYQLIQELRSAAYNVPIIVMTAKSQMEDMTKGFGLGADDYMVKPVQLQELALRIKALLRRANIVAQHQLIIGNTCLNEDELSLKYFEQEIIFPQKEFRVLFHLLSYPNRIFTRLELLDSIWGMDTDLDERVVDACINKIRRKVEHLPDFKIETVRGVGYRAKND

SEQ ID NO: 6503 - DNA, 1077 bp, Streptococcus agalactiae
gtgcaaaaaatgactaagctaaggcgatttcggtttccgttaagattttatttcacattaatgtttgtgttaacgatgcttttctcagtcctagcttctcttttactagttgcagcaatagtttttactttttttcaaggagtcttaactactcatgtattacaagttagtgctctcgctgttgtttttttaagccttgtgatagctagtattagtatgtggtacggttcttatcatttaacaaaaccaattttagatattagccatattgtgtccaatgttgcagacggtgactttgaagggcatatttatcgaaacagtaatcgtcgtaaatcctatgagtattataatgaattggatgagctatctgaaagtattaatcagatgattgtttctttatctcatatggatcatatgcgaaaagactttatcactaatgtttctcatgagctaaagactccgattgctgcagtagctaatattgtagaactattacaagatccagaattagatgaagaaacacaaagtgagttattaggtcttgttaaaacagagagcctaaggttaacaagattatgtgatacgatgttgcaaatgtcgcgcgtggataatcaggagactattggggagctatcctctgttcgtgtagatgaacaaattcgtcaagcaatgattagtttaacagaacgttggcaagctaaaaggataaattttcaactggattcaaaaccatatactgtttactcaaactctgacttgctgatgcaagtttggataaaccttttagataatgcaataaaatattccgaggatattgtagacttaagtgtacgaatggaagaaactaataatcattatctgagagttattatttctgataaaggtaggggaatttctcaatatgatgttcagcatatatttgataaattttaccaagcggatcagtcgcataatcaacaaggaaatggattaggactagcaatagttaaacgtataattgttctttgtaagggacgtattagtgtctccagtcagttggaaattggaacagaattttgtgtagaactacctttatca

SEQ ID NO: 6504 - protein, 359 aa, Streptococcus agalactiae
MQKMTKLRRFRFPLRFYFTLMFVLTMLFSVLASLLLVAAIVFTFFQGVLTTHVLQVSALAVVFLSLVIASISMWYGSYHLTKPILDISHIVSNVADGDFEGHIYRNSNRRKSYEYYNELDELSESINQMIVSLSHMDHMRKDFITNVSHELKTPIAAVANIVELLQDPELDEETQSELLGLVKTESLRLTRLCDTMLQMSRVDNQETIGELSSVRVDEQIRQAMISLTERWQAKRINFQLDSKPYTVYSNSDLLMQVWINLLDNAIKYSEDIVDLSVRMEETNNHYLRVIISDKGRGISQYDVQHIFDKFYQADQSHNQQGNGLGLAIVKRIIVLCKGRISVSSQLEIGTEFCVELPLS

SEQ ID NO: 6505 - DNA, 1188 bp, Streptococcus agalactiae
atgggaaaagaaaaattaattttagcttattctggtggtttagatacctctgttgctatagcttggttaaaaaaagattatgacgttattgctgtctgtatggatgttggcgaaggtaaagatcttgattttattcacgataaggctttaacaataggtgccatagaatcttatattttagatgttaaagatgagttcgctgagcattttgttttaccagctttacaggcacatgcgatgtatgaacaaaaatacccgcttgtttcagcgcttagtcgtccaattattgcccaaaaattagttgaaatggcacatcaaacaggtgcgaccacaattgcacatggctgtacaggtaaaggaaatgaccaagtgcgttttgaagttgcaattgcagcactagatcctgaattaaaagtaattgcccctgttcgtgagtggaagtggcatcgtgaagaggaaattacttttgcaaaagctaacggcgtacctattccagcagatttagataacccttattctatagaccaaaatttatggggacgtgccaatgaatgtggtgtgcttgagaatccttggaatcaagcgccagaagaagcttttggtattacaaaatcaccagaagaagctcctgattgtgcagaatatattgatattacgttccaaaatgggaagcctatagctataaacaatcaagaaatgacactagcagatttgattttatcgctaaatgaaattgcaggaaaacatggtattggacgcattgatcatgttgaaaatcgtttagtcggtatcaaatcacgtgaaatttatgaatgtcctgcggcaatggtactgttagctgctcataaagaaattgaagatttaacactagttcgtgaagtgtctcattttaaacctatccttgaaaatgaactatcaaatcttatttataatgctttatggtttagtccagctacaaaagctatcattgcctatgtcaaagaaacacaaaaagtggttaatggtactacaaaagttaagttatataaaggttctgcccaagtcgttgctcgccactcatctaattcattatatgatgagaatttagcaacctatacagctgctgatagctttgatcaagatgcagcagttggttttatcaaactctggggacttccaacccaagttaatgcccaagtaaacaaagga

SEQ ID NO: 6506 - protein, 396 aa, Streptococcus agalactiae
MGKEKLILAYSGGLDTSVAIAWLKKDYDVIAVCMDVGEGKDLDFIHDKALTIGAIESYILDVKDEFAEHFVLPALQAHAMYEQKYPLVSALSRPIIAQKLVEMAHQTGATTIAHGCTGKGNDQVRFEVAIAALDPELKVIAPVREWKWHREEEITFAKANGVPIPADLDNPYSIDQNLWGRANECGVLENPWNQAPEEAFGITKSPEEAPDCAEYIDITFQNGKPIAINNQEMTLADLILSLNEIAGKHGIGRIDHVENRLVGIKSREIYECPAAMVLLAAHKEIEDLTLVREVSHFKPILENELSNLIYNALWFSPATKAIIAYVKETQKVVNGTTKVKLYKGSAQVVARHSSNSLYDENLATYTAADSFDQDAAVGFIKLWGLPTQVNAQVNKG

SEQ ID NO: 6507 - DNA, 1386 bp, Streptococcus agalactiae
atgacaaaaaatcataagttatggggtggtcgttttgaaagtagtcttgaaaaatgggttgaagagttcggtgcatcaatcagtttcgaccaaaaattagctccctatgatatgaaggcttctatggcccatgtcacaatgttaggcaaaacggatattattagtcaagaagaagcaggcttgataaaagatggtttaaaaatactgcaagataaatacagagcaggtcaattgacttttagcatatcaaatgaagacattcatatgaacatagagagcttattaaccgctgaaattggagaagtagcaggtaagcttcatactgcacgttcacgaaatgatcaagtggctacagatatgcacctttatttgaaagataaattgcaagaaatgatgaagaaattgcttcatttacgaacaaccttagttaatttagcagaaaatcatatctatactgttatgccagggtatacacatttacaacatgctcagccgatttcatttggacatcatctaatggcttactataatatgtttacgcgtgatacagagcgattagagtttaatatgaaacacaccaatctatcaccattaggagctgctgctctagcagggacaacgtttcctattgaccgccatatgacaactcgtttattagattttgaaaaaccatatagtaattcgcttgatgctgtctcagatcgtgactttatcatagaatttttatccaatgctagcattttaatgatgcatttatcacgtttttgtgaagaaatcattaattggtgcagttatgaatatcaattcatcacattatcagatactttctctacaggatcatctattatgcctcaaaagaaaaatcctgatatggcagaattaattcgagggaagacaggccgtgtttatggaaatttatttagtttactaactgttatgaaatcattgccgttagcttataacaaagatttacaagaagataaagaagggatgtttgatagcgtagaaacagtcagcatagctattgaaatcatggctaatatgcttgagacaatgactgtgaatgagcacataatgatgacctcaacggagactgatttttcaaatgcaacagaattagcagattatttagcaagtaagggggtacctttcagaaaagcacatgaaattgtaggtaaattggttttagaatgcagtaaaaatggttcttatttacaggatatacctttaaaatattatcaagaaatttcagagttgatagaaaacgatatctatgagatattaactgcaaagacagcagttaaacgaagaaattcattaggaggaacggggtttgaccaggttaaaaaacagatcctattggcacgtaaagaattgaaagcggaa

SEQ ID NO: 6508 - protein, 462 aa, Streptococcus agalactiae
MTKNHKLWGGRFESSLEKWVEEFGASISFDQKLAPYDMKASMAHVTMLGKTDIISQEEAGLIKDGLKILQDKYRAGQLTFSISNEDIHMNIESLLTAEIGEVAGKLHTARSRNDQVATDMHLYLKDKLQEMMKKLLHLRTTLVNLAENHIYTVMPGYTHLQHAQPISFGHHLMAYYNMFTRDTERLEFNMKHTNLSPLGAAALAGTTFPIDRHMTTRLLDFEKPYSNSLDAVSDRDFIIEFLSNASILMMHLSRFCEEIINWCSYEYQFITLSDTFSTGSSIMPQKKNPDMAELIRGKTGRVYGNLFSLLTVMKSLPLAYNKDLQEDKEGMFDSVETVSIAIEIMANMLETMTVNEHIMMTSTETDFSNATELADYLASKGVPFRKAHEIVGKLVLECSKNGSYLQDIPLKYYQEISELIENDIYEILTAKTAVKRRNSLGGTGFDQVKKQILLARKELKAE

SEQ ID NO: 6509 - DNA, 741 bp, Streptococcus agalactiae
  misc_feature (1)..(741): n = a, c, g, or t
atggcaatcgtttcagcagaaaaattcgtccaagcagctcgtgataacggctatgcagtaggtggatttaacacaaacaaccttgagtggactcaagctatcttgcgcgcagcagaagctaaaaaagctccagtacttatccaaacttcaatgggtgcggctaaatacatgggtggttacaaactttgtaaacaacttattgaaactttggttgaatcaatgggtattactgtaccagttgctatccaccttgaccacggtcattacgatgatgcccttgagtgtattgaagtaggttacacttcaattatgtttgatggttcacaccttccagttgaagaaaaccttgaaaaagcacgcgaagttgttgctaaagcacatgctaaaggtatttcagtagaagctgaagttggtactatcggtggtgaagaagatggtattgtcggtaaaggtgaattagcaccaatcgaagacgctaaagctatggttgaaactggtattgacttcttggctgcaggtatcggtaacattcatggaccatacccagcaaactgggaaggacttgaccttgatcacttgaagaaattgactgaagctgttcctggtttcccaatcgtgttacacggtggttcaggtattcctgatgatcaaatccaagaagctatcaaacttggtgttgctaaagttaacgttaacacagaatgtcaattagctttctgtcaagcaannnnnttaattaat

SEQ ID NO: 6510 - protein, 247 aa, Streptococcus agalactiae
  MISC_FEATURE (1)..(247): Xaa = Any Amino Acid
MAIVSAEKFVQAARDNGYAVGGFNTNNLEWTQAILRAAEAKKAPVLIQTSMGAAKYMGGYKLCKQLIETLVESMGITVPVAIHLDHGHYDDALECIEVGYTSIMFDGSHLPVEENLEKAREVVAKAHAKGISVEAEVGTIGGEEDGIVGKGELAPIEDAKAMVETGIDFLAAGIGNIHGPYPANWEGLDLDHLKKLTEAVPGFPIVLHGGSGIPDDQIQEAIKLGVAKVNVNTECQLAFCQAXXLIN

SEQ ID NO: 6511 - DNA, 879 bp, Streptococcus pyogenes
atggcaatcgtttcagcagaaaaatttgtccaagcagctcgtgaaaacggatatgctgttggtggatttaacacaaacaacttagagtggactcaagcaatcttgcgtgcagcagaagctaaacaagctccagttcttatccaaacatcaatgggtgcagcaaaatacatgggtggttataaagtatgtcaatctcttattactaaccttgttgagtcaatgggtatcactgttcctgttgctatccaccttgatcatggtcactacgaagatgctcttgagtgtatcgaagtaggttacacttcaatcatgtttgacggttcacaccttccagttgaagaaaaccttgctaaaactgcagaagttgttaaaattgcacatgctaaaggcgtttcagttgaagctgaagttggtacaatcggtggtgaagaagacggtatcatcggtaaaggtgagctcgctccaatcgaagatgctaaagcaatggttgaaactggaattgacttcttggcagctggtatcggtaacatccacggtccatacccagaaaactgggaaggtcttgctcttgaccacttagaaaaattaacagcagctgtaccaggtttcccaatcgtattgcacggtggttctggtattcctgacgatcaaatcaaagaagcaatccgtcttggtgttgctaaagttaatgttaacactgaaagtcaaatcgctttctctaacgcaactcgtgaatttgctcgtaactacgaagctaacgaagcagaatatgatggtaaaaaattatttgacccacgtaaattcttggctccaggtatgaaagctgttcaaggtgctgttgaagaacgtatcgatgttttcggatcagctaacaaagca

SEQ ID NO: 6512 - protein, 293 aa, Streptococcus pyogenes
MAIVSAEKFVQAARENGYAVGGFNTNNLEWTQAILRAAEAKQAPVLIQTSMGAAKYMGGYKVCQSLITNLVESMGITVPVAIHLDHGHYEDALECIEVGYTSIMFDGSHLPVEENLAKTAEVVKIAHAKGVSVEAEVGTIGGEEDGIIGKGELAPIEDAKAMVETGIDFLAAGIGNIHGPYPENWEGLALDHLEKLTAAVPGFPIVLHGGSGIPDDQIKEAIRLGVAKVNVNTESQIAFSNATREFARNYEANEAEYDGKKLFDPRKFLAPGMKAVQGAVEERIDVFGSANKA

SEQ ID NO: 6513 - DNA, 690 bp, Streptococcus agalactiae
atgttttctggtaaacgattaaagaaaagacgaataacacttggctattctcaatctgaactagcagataaacttcatataaaccgctcttcttatttcaattgggaaaatgaaaagactaaaccaaaccaaagcaatctcaaacaactagctatcctattagatgttcctgaaacatatttcgagtcagaatataaaatagtcaatacttatcttcagctttctttacagaatcaggaaaaggtagagaaatatgctgaggaattacttcaaactcaaaaggttcatgaaaagattgttccactgtttgctgtggaagttctatcagaaattcaactatctgctggtccaggtgaaggtctgtacgatgaatttgaaactgagactgtctattcagaagatgaatacacaggattcgatatagcaacatggatttctggtaattctatggaacctgtttataaagacggtgaagtcgctttaattagatcgactggttttgatcacgatggagctgtctatgccttgaattggaatggatcgctctatatcaagaaactctatcgtgaagaagatggattccgaatggtgtcaattaacccagatgttgctgaaaggtttatcccatttgaagatgaaatcagaattgttggtaaaattgtaggccacttcatgcctgtgattggaggt

SEQ ID NO: 6514 - protein, 230 aa, Streptococcus agalactiae
MFSGKRLKKRRITLGYSQSELADKLHINRSSYFNWENEKTKPNQSNLKQLAILLDVPETYFESEYKIVNTYLQLSLQNQEKVEKYAEELLQTQKVHEKIVPLFAVEVLSEIQLSAGPGEGLYDEFETETVYSEDEYTGFDIATWISGNSMEPVYKDGEVALIRSTGFDHDGAVYALNWNGSLYIKKLYREEDGFRMVSINPDVAERFIPFEDEIRIVGKIVGHFMPVIGG

SEQ ID NO: 6515 - DNA, 636 bp, Streptococcus pyogenes
ttgggaagattgttgcatgtcaataaaatgacaatatctaattgggaaaaaggtaagaatataccaaatgaaaaacatttaaatgccttattgcatctattcaatgtgacatctgattatttcgacccaaactatagattgctaacgccttataaccagctgacaatatctaataaagaaaaagtaattggctattcagagcgattgttaaatcatcaaatagacaaaaaatctaaagatctcatagataaaccatcacaattatatgcttatcgggtctatgaaagtttatctgctggtactggttactcctattttggtgatggtaactttgatgttgtcttttacgatgaacaattagaatacgattttgcgtcttgggtttttggagattctatggagccaacttatttaaatggtgaagttgttcttataaaacaaaatagttttgattacgatggagcaatttatgcagtcgaatgggatgggcaaacatatatcaaaaaggtatttcgtgaagatgagggattacgtctagtgtccttaaataaaaaatattctgataagtttgctccctatagcgaagaacctcgcattattggcaaaattatcgctaattttaggcccttagaaatt

SEQ ID NO: 6516 - protein, 212 aa, Streptococcus pyogenes
LGRLLHVNKMTISNWEKGKNIPNEKHLNALLHLFNVTSDYFDPNYRLLTPYNQLTISNKEKVIGYSERLLNHQIDKKSKDLIDKPSQLYAYRVYESLSAGTGYSYFGDGNFDVVFYDEQLEYDFASWVFGDSMEPTYLNGEVVLIKQNSFDYDGAIYAVEWDGQTYIKKVFREDEGLRLVSLNKKYSDKFAPYSEEPRIIGKIIANFRPLEI

SEQ ID NO: 6517 - DNA, 132 bp, Streptococcus agalactiae
atgtcaagacagtttgacgacattatatttattaaagcaaatagaattattttattactcgaccaaaaagaatatgatgtaactaaccatttaactgaattggttgatgaattagcaaaattgaaatctagg

SEQ ID NO: 6518 - protein, 44 aa, Streptococcus agalactiae
MSRQFDDIIFIKANRIILLLDQKEYDVTNHLTELVDELAKLKSR

SEQ ID NO: 6519 - DNA, 1422 bp, Streptococcus agalactiae
gtgaatactatgggctatgtcgactactcaaaagaacctcgtagcgatattgcttttgtcgatatgaaatccttctatgcatctatcgaatgtgtagagagaggacttcacccgcttcatacttcactttgtgtgatgagtagggcagataattcagctggtctaattctagcttcttctccaatgttcaaaaaagtctttggtaaaggaaatgttggcagagcctacgacctcccctttgatgttcataccagaaaatttaactactaccgtgctaaaatttcaggattgccaacggatgcaaaatttgtttccttcatagaaaattgggccaagcgtacatttattgtgccaccgagaatggacttgtacattcaaaaaaatcttgaaatacaaaaagtatttcaaaattatgcagatccgacagatattctgccctattctattgatgaaggatttattgacttaacttcatcgctaaattattttgttgaagacaaatctctgagtcgcaaagataagttagatgtggtttcagcaaaaattcaacacgatatttgggaaaaaacgggtgtctattcaactgttggaatgagtaatgccaatccacttctagctaagttagcacttgataacgaagctaaaaccactgctaccatgcgtgccaattggtcttatgaagatgttgaaacgaaggtctggaatattcccaaaatgactgacttttggggaataggttcacgaacagaaaaacgactaaacaaattgggaatctacagcattaaagaattggccaactgtgaccctactatcttgaaaaaagaatttggtgttattggagtacaacattggtttcatgctaatggcatcgatgaaagtaatgtccatgaaccttatcgccctaaagcagtcgggattgggaattcgcaagtgctccataaagattacactcgtcaaagtgatatagagcttgtcctgcgtgagatggcagagcaagttgcgattcggctacgcagaagacataaaaaagcaactgtagtcgccataaatgtaggctattcaaatttcgaaaacaagaaatcaatcaatgttcagagaaaaattaacccaaataatcgtacgcttgtttttcaagatgaagttgtttctctctttcgttctaaatacgatggaggggcagttagaagcattgctgtaaggtacgatggattggtggatgaaaactttgctgtgatttctctttttgatgactttgaagaaagcgaaaaagaggaaaaattggagacaaccattgattccattcgtgatcgttttggatttcttgctgtacagaaagctagttctttattagaaaattcaagggcaatttctcgcagtagattagtcggcggacattccgctggaggattggagggtttaaaa

SEQ ID NO: 6520 - protein, 474 aa, Streptococcus agalactiae
MNTMGYVDYSKEPRSDIAFVDMKSFYASIECVERGLHPLHTSLCVMSRADNSAGLILASSPMFKKVFGKGNVGRAYDLPFDVHTRKFNYYRAKISGLPTDAKFVSFIENWAKRTFIVPPRMDLYIQKNLEIQKVFQNYADPTDILPYSIDEGFIDLTSSLNYFVEDKSLSRKDKLDVVSAKIQHDIWEKTGVYSTVGMSNANPLLAKLALDNEAKTTATMRANWSYEDVETKVWNIPKMTDFWGIGSRTEKRLNKLGIYSIKELANCDPTILKKEFGVIGVQHWFHANGIDESNVHEPYRPKAVGIGNSQVLHKDYTRQSDIELVLREMAEQVAIRLRRRHKKATVVAINVGYSNFENKKSINVQRKINPNNRTLVFQDEVVSLFRSKYDGGAVRSIAVRYDGLVDENFAVISLFDDFEESEKEEKLETTIDSIRDRFGFLAVQKASSLLENSRAISRSRLVGGHSAGGLEGLK

SEQ ID NO: 6521 - DNA, 336 bp, Streptococcus agalactiae
ttggtattctctagcaaccttaaatgggagataacttctatcaatcattttaaaccctccaatcctccagcggaatgtccgccgactaatctactgcgagaaattgcccttgaattttctaataaagaactagctttctgtacagcaagaaatccaaaacgatcacgaatggaatcaatggttgtctccaatttttcctctttttcgctttcttcaaagtcatcaaaaagagaaatcacagcaaagttttcatccaccaatccatcgtaccttacagcaatgcttctaactgcccctccatcgtatttagaacgaaagagagaaacaacttcatct

SEQ ID NO: 6522 - protein, 112 aa, Streptococcus agalactiae
MVFSSNLKWEITSINHFKPSNPPAECPPTNLLREIALEFSNKELAFCTARNPKRSRMESMVVSNFSSFSLSSKSSKREITAKFSSTNPSYLTAMLLTAPPSYLERKRETTSS

SEQ ID NO: 6523 - DNA, 348 bp, Streptococcus agalactiae
atgattgatagaagttatctcccatttaaggttgctagagaataccaagaccgaaagatggccaaatggatgggcttcttcttatcagaacatacggcaggacttgatagtgagcttaataaagttgactatacttctgagttatcaatttcagataaactactgctgctcaatcaattatacagtaatcagttgaatggtatcattgcagttcctggacaatattacagtggaaaagttgacaatctgacttttaaccatgtttcattgaagacaaaaacgggctttgtcagcattccaatcaaggatattctttcaattgatttggaggtggaatatgaatcagct

SEQ ID NO: 6524 - protein, 116 aa, Streptococcus agalactiae
MIDRSYLPFKVAREYQDRKMAKWMGFFLSEHTAGLDSELNKVDYTSELSISDKLLLLNQLYSNQLNGIIAVPGQYYSGKVDNLTFNHVSLKTKTGFVSIPIKDILSIDLEVEYESA

SEQ ID NO: 6525 - DNA, 357 bp, Streptococcus agalactiae
ttgatgatttataagtcaggtagtcctatgcgggctacctttttacaattgaaggagaatataatgaaattttttcaaaagaaaaaacaaaaccaggatcaattcaaacgactgattcatcgactatcagagatgtcagatagtgaactaaccaaagtagaacaactcctagatgtggtttttgatacaaattttaagcctgatacgagcgttgaattatctcaaagcgatataactgacgaggatcaaagtcttgataggtcaatccaggaagcgaaaaataaacttcacacggaacaattggaaaaaaacattgagaggtttagacaaggtaggcgagagagcaataataacaaa

SEQ ID NO: 6526 - protein, 119 aa, Streptococcus agalactiae
MMIYKSGSPMRATFLQLKENIMKFFQKKKQNQDQFKRLIHRLSEMSDSELTKVEQLLDVVFDTNFKPDTSVELSQSDITDEDQSLDRSIQEAKNKLHTEQLEKNIERFRQGRRESNNNK

SEQ ID NO: 6527 - DNA, 387 bp, Streptococcus agalactiae
atgagtaaaacatggaattttgatcagccactagacgatgtgaaaccaacatcgtcccatgaagaacgagctaaaatcgcagcactttttcataaacaggatgaaaaaccaattgaagaagtagattatgtggctgcttttgaacagcaacaaaaggagtcagaatcaaaagatgtacaaacgctcgcatcaaccgttaaacaaaatcagccgaagaaggtaaatatcacaagtgactataaacaacacttggctgataccattgcacaaaacaacaaggatatttccgcctgtcagaagcaaattgaagaacttcatcaattgattgatgaaaagaaaatccaaaataaaaagttgcaggctatttcagtagccattgatgattta

SEQ ID NO: 6528 - protein, 129 aa, Streptococcus agalactiae
MSKTWNFDQPLDDVKPTSSHEERAKIAALFHKQDEKPIEEVDYVAAFEQQQKESESKDVQTLASTVKQNQPKKVNITSDYKQHLADTIAQNNKDISACQKQIEELHQLIDEKKIQNKKLQAISVAIDDL

SEQ ID NO: 6529 - DNA, 225 bp, Streptococcus agalactiae
atgagtgtgattgaacgtctggctgaaaaagtagctaggcaagaagaaaaggtctcacgtgagactgagaaattggaacactatcgagaccaactacaaactgcaatgtatagcacctttatcaaacgacaacaatcaagtcagttgtcatttcatgaagcactagagcaagcctttggtaaagaaaccacactacacccaaattacagaaatgaggatacagaa

SEQ ID NO: 6530 - protein, 75 aa, Streptococcus agalactiae
MSVIERLAEKVARQEEKVSRETEKLEHYRDQLQTAMYSTFIKRQQSSQLSFHEALEQAFGKETTLHPNYRNEDTE

SEQ ID NO: 6531 - DNA, 1074 bp, Streptococcus agalactiae
atgacacgaattaaaatagtaaaacaaaaggccattttagatgtggctgaaagtttgggttattccttcagacgtttatcaggacaaatttatgaacacccagaccatgattcctttcggatttttgcggataccaatactttcaaatggttttcaagagatatacaaggggatgtgatagactttgtacagttagtggcaggagtgtctttcaaaaaagccttgtcttaccttgaaactggaggctttgaagaagctaaggtgattgaagaaacttatcaacccttccaatattatttgcgtgaagaaccctttcagcaagcacgtacttacttgaaagacatccgtggactaagtaatcagactattaattcctttggcagacaaggattgcttgctcaagctacttatcaagcggagtcagttttagtgtttaaaagctttgaccataatgggaccttacaggccgcaagccttcaaggtctcgtcaaaaatgaagaaaaatacgatcgaggttatctcaaaaaaatcatgaaaggatctcatggccatgtcggtattagtttcgatattgggaatcctaagcgactcattttttgtgaatcagttatcgatatgatgagttattatcaacttcaccaaaagcagctatcagatgttcgcctgatttcaatggaaggcctaaaactttcagtgattgcttatcagactttgcgtctagcagcagaggaacaggggaaattggcatttctagatacagtaaaaccaattagacttagccattatcttcaggcaatacaagagacgacaaccttttttcaaactcattcaaacgtcataactatggctgttgataacgatgaagcaggaagagaattttatcagaaactgtcagataaaggatttccgatttttcaagatttaccaccattgcaaagacttgaaacaaagtcagattggaatgatattgtgaaacgacaaaaggaattatctttaagagatcttatccagtcagcccaagcacaagtcaataagaatcatcctccacctaaacgagagcacgctttggaattg

SEQ ID NO: 6532 - protein, 358 aa, Streptococcus agalactiae
MTRIKIVKQKAILDVAESLGYSFRRLSGQIYEHPDHDSFRIFADTNTFKWFSRDIQGDVIDFVQLVAGVSFKKALSYLETGGFEEAKVIEETYQPFQYYLREEPFQQARTYLKDIRGLSNQTINSFGRQGLLAQATYQAESVLVFKSFDHNGTLQAASLQGLVKNEEKYDRGYLKKIMKGSHGHVGISFDIGNPKRLIFCESVIDMMSYYQLHQKQLSDVRLISMEGLKLSVIAYQTLRLAAEEQGKLAFLDTVKPIRLSHYLQAIQETTTFFQTHSNVITMAVDNDEAGREFYQKLSDKGFPIFQDLPPLQRLETKSDWNDIVKRQKELSLRDLIQSAQAQVNKNHPPPKREHALEL

SEQ ID NO: 6533 - DNA, 120 bp, Streptococcus agalactiae
ttggaatgggaaactggaggacatgaaagaagcaacagatggagccaattccagcataccaacgatccaaggaactacaacaagcgagaacaactagcaggagacagtcttctgcttttt

SEQ ID NO: 6534 - protein, 40 aa, Streptococcus agalactiae
MEWETGGHERSNRWSQFQHTNDPRNYNKREQLAGDSLLLF

SEQ ID NO: 6535 - DNA, 489 bp, Streptococcus agalactiae
gtgtcaaagaaaaagcaggaggaaagagcgacagtcctatcagatgagcttgtcaatgaatttctcactcaatatttcaccaaggtccagctgggtgaaaataacgctcgtatcaaaccctacatgacggactcggcattttcagaagaggaagcaaatcagaataaagcgatcaatcaagtttataaagactatatgcttgactaccgatttgaatcagccagtatctatgtcaatacagaaagccatgttgcacttgcggaagtttcctatcaagtaacttatgtttctgatttgagtgagcaacaacagcgaacaactcagacagaaaccaagacagttatgttatcctactccaaagtttccgacaagcttctagttaatcagttgaccatttggaatgggaaactggaggacatgaaagaagcaacagatggagccaattccagcataccaacgatccaaggaactacaacaagcgagaacaac

SEQ ID NO: 6536 - protein, 163 aa, Streptococcus agalactiae
MSKKKQEERATVLSDELVNEFLTQYFTKVQLGENNARIKPYMTDSAFSEEEANQNKAINQVYKDYMLDYRFESASIYVNTESHVALAEVSYQVTYVSDLSEQQQRTTQTETKTVMLSYSKVSDKLLVNQLTIWNGKLEDMKEATDGANSSIPTIQGTTTSENN

SEQ ID NO: 6537 - DNA, 252 bp, Streptococcus agalactiae
ttggcacaaggctatacaagtccagaagatagggcaaactaccaaactttaaaggaacagtatgaagatgagacctttgattacagtttttcaaagcgtgaaattactggacagctggaactcatcatcaaaagtcgtgagaatgatttttcaaacttagatgaggtgacgaagacggaataccttgacttggttacccaacttgatgaacttgaccaggaacaagccaactattatcgtaagcaattagcc

SEQ ID NO: 6538 - protein, 84 aa, Streptococcus agalactiae
MAQGYTSPEDRANYQTLKEQYEDETFDYSFSKREITGQLELIIKSRENDFSNLDEVTKTEYLDLVTQLDELDQEQANYYRKQLA

SEQ ID NO: 6539 - DNA, 1398 bp, Streptococcus agalactiae
ttggcacagcatggaattaaatcttacgtatttgaagctcttcgtccaacaccagaactctcttttgctgttcgccatttaaatgcctatgctggtattatggttactgcaagccacaatccagcacctttcaatggttataaagtctatggacaagacggaggtcaactaccaccagctgatgctgatgcactaacagactttatccgtgctattgaaaatccatttgcagttgaacttgctgatttagatgaaagcaaatcatcgggccttattcaggttatcggtgaagatgttgatattgaatatcttagagaggttaaagatgttaatatcaatcaagatttaatcaataactttggaaaagacatgaaaattgtctatactcctctccacggaactggtgagatgttgacacgccgtgcccttgctcaagccggttttgaatctgttgttgtagtagaatcacaagctaaggcagatccagacttttctactgtcaaatctcctaaccctgaaagccaagctgcctttgctcttgctgaagaactcggacgagaagttgatgcagatgtcttagtagctactgatcctgatgcagaccgcctaggcgttgaaattcgccaaccagatggttcttataaaaacctttctggaaatcaaattggagcgattattgcgaaatacatcctggaagctcataaaacagcaggaacacttccagaaaatgctgctctcgctaaatcaatcgtatcaacagaattagtaacaaaaattgccgaaagttacggcgctacaatgtttaacgttttaactggatttaaattcatcgctgagaaaattcaagagtttgaagaaaaacataaccacacctatatgtttggttttgaagaaagcttcggatatcttattaaaccatttgtccgtgataaagacgctattcaagcagttcttttggttgctgagatcgcagcttattaccgttcgcgtggtttaacacttgcagatggtattgatgaaatttacaaagaatatggttattttgctgaaaaaacgatttcagtaacactttcaggtgtggatggagctgctgaaattaagaagattatggacaaattccgtgaaaatggtccaaaacaatttaacaatactgacattgtattattagaagatttccaaaaacaaaccgctactaaaaatgatggaacaatatctaacttaacaactcctccaagtaatgttttgaagtacacgttagctgatgattcatggattgcagttcgcccttcaggaactgaaccaaaaatcaagttctatattgccacggtcggtaatgatttagcagatgcagaaacaaaaatcgccaatattgaaaaagagattacaacatttgtaaat

SEQ ID NO: 6540 - protein, 466 aa, Streptococcus agalactiae
MAQHGIKSYVFEALRPTPELSFAVRHLNAYAGIMVTASHNPAPFNGYKVYGQDGGQLPPADADALTDFIRAIENPFAVELADLDESKSSGLIQVIGEDVDIEYLREVKDVNINQDLINNFGKDMKIVYTPLHGTGEMLTRRALAQAGFESVVVVESQAKADPDFSTVKSPNPESQAAFALAEELGREVDADVLVATDPDADRLGVEIRQPDGSYKNLSGNQIGAIIAKYILEAHKTAGTLPENAALAKSIVSTELVTKIAESYGATMFNVLTGFKFIAEKIQEFEEKHNHTYMFGFEESFGYLIKPFVRDKDAIQAVLLVAEIAAYYRSRGLTLADGIDEIYKEYGYFAEKTISVTLSGVDGAAEIKKIMDKFRENGPKQFNNTDIVLLEDFQKQTATKNDGTISNLTTPPSNVLKYTLADDSWIAVRPSGTEPKIKFYIATVGNDLADAETKIANIEKEITTFVN

SEQ ID NO: 6541 - DNA, 831 bp, Streptococcus agalactiae
atggtcacaggaggattccgactagacctcttacttgagataactaagatagctcgtgcaacttactattatcaactaaagaaactgaataaaccagataaagacaaagcaatcaaatctgacattcaatccatttatgatgaacatagaggaaactatggctatcgtcggatttatttagaactgcgaaatcgtggctttgtcatcaaccacaaaagggtgcaaggcttgatgaaaagtatgggcttgactgctcgtattcgtcgtaagcgcaagtatgcctcttacaaaggtgaggttggtaagaaggctgataacctgattcaacgccagtttgaggggtcgaagccctatgagaagtgctataccgatgtgacggagtttgctttacctgaagggaaactttatctatcgcctgttcttgatggctataacagtgagataattgattttaccctgtctcggtctcctgacttgaaacaggttcaaaccatgcttgagagggcttttcctgcggcttcatacagcgaaactattctccacagcgaccaaggctggcagtaccagcacaagtcctaccatcaatttctggaggacaaaggcattcgtccttctatgtcacggaaggggaacagtcctgacaacggtatgatggaatctttctttgggattctaaagtctgagatgttctatggcttggagaagtcttataaatcacttgatgaccttgagcaagctatcacagattacattttttactacaacaacaagcgaatcaaagcaaaactaaaaggacttagtcctgtgcaatacagaactaaatccttcact

SEQ ID NO: 6542 - protein, 277 aa, Streptococcus agalactiae
MVTGGFRLDLLLEITKIARATYYYQLKKLNKPDKDKAIKSDIQSIYDEHRGNYGYRRIYLELRNRGFVINHKRVQGLMKSMGLTARIRRKRKYASYKGEVGKKADNLIQRQFEGSKPYEKCYTDVTEFALPEGKLYLSPVLDGYNSEIIDFTLSRSPDLKQVQTMLERAFPAASYSETILHSDQGWQYQHKSYHQFLEDKGIRPSMSRKGNSPDNGMMESFFGILKSEMFYGLEKSYKSLDDLEQAITDYIFYYNNKRIKAKLKGLSPVQYRTKSFT

SEQ ID NO: 6543 - DNA, 1731 bp, Streptococcus agalactiae
atgaaagcaagtcatcctaaaaagatacaaaaaaagcttgttcaagatcttctttctaaaaaaagcttagtaggaatggcattattagggacggttgtacaagtttgcctcactgtttatttgcctgttctaattggacaagcggtagacgttgtattatcgcctcattctatgatattattgttacctataatgtggaagatgattgcagtcattttagcaaatactattattcaatggattaatcctctgctctataaccgcttaatttttcattatgttgcttctttaagaaaggctgtaatggaaaagttgaatctattgcctatagcttaccttgataaacgtggcataggtgacttgattagtcgtgtgactaccgatacggagcaattatcaaatggtttattaatggtttttaaccagttctttgttggtttattaactattatagttactatttttagtatggcaaagattgatttattaatgctttttttggtattatttctgacgcctttatcactctttctagcccgctttattgctaaaaagagttatcacttatatcaaaatcaaacggcatcacgaggacgacaaactcaattcattgaagagatggtgagtcaagaaagccttattcaagcattcagtgcgcaagaagaaagtagtgatcattttaggactattaatcaagagtatgctaacttttctcaatcagcaattttttattcttcaactgtcaatccatcaacccgatttatcaatagtttgatttatggcttcttagctgggattggtgcccttcgcattatgtcaggggcttttagtgttggtcaattaatcactttcttaaattatgtcaatcaatatactaagccatttaatgacatctcttccgtcctgtctgagatgcaaagtgctctggcgtgtgcagaacgcctttactctattttagaagaatcgtcaccaaatataacaggtacagaaaaacttgattcatcaacggtcaaaggtcaaatcgattttaaaaacgttgtttttggttataataaatcaaaactactattgaatggtattaatttacacattccagcaggagctaaggtcgctattgtaggaccaacaggtgctgggaagtctactttaatcaatttaataatgcgtttctatgaagttgacgggggaaatatccttttagattgtaagcctattactgattatgagccatcacaattaaggcaagaaattggaatggtattacaagaaacgtggttaaaaagtgctacgattcacgataacattgcatatgccaatcctaaagctagccgtgaagaagtgatagaggctgcaaaagcagctaatgcagatttctttatcaaacaattaccgaatggatatgatacgtatttagaagatgctggagattcgttatcacaggggcaatgtcagctattgacaattgctcgtatttttcttaaattacctagaatattgatattagatgaggcgacatcgtctatagatactcgtactgaagttcttgttcaagaagcattccaaatgttgatgaaggggagaacaagctttattattgcacatcgcttatctaccattcaaacggcagatattattttagttatggtatctggtgaaattgtagaagtgggtaaccactctgaattaatggctcaaaaaggtatttattatcaaatgcaaaatgcacaaaag

SEQ ID NO: 6544 - protein, 577 aa, Streptococcus agalactiae
MKASHPKKIQKKLVQDLLSKKSLVGMALLGTVVQVCLTVYLPVLIGQAVDVVLSPHSMILLLPIMWKMIAVILANTIIQWINPLLYNRLIFHYVASLRKAVMEKLNLLPIAYLDKRGIGDLISRVTTDTEQLSNGLLMVFNQFFVGLLTIIVTIFSMAKIDLLMLFLVLFLTPLSLFLARFIAKKSYHLYQNQTASRGRQTQFIEEMVSQESLIQAFSAQEESSDHFRTINQEYANFSQSAIFYSSTVNPSTRFINSLIYGFLAGIGALRIMSGAFSVGQLITFLNYVNQYTKPFNDISSVLSEMQSALACAERLYSILEESSPNITGTEKLDSSTVKGQIDFKNVVFGYNKSKLLLNGINLHIPAGAKVAIVGPTGAGKSTLINLIMRFYEVDGGNILLDCKPITDYEPSQLRQEIGMVLQETWLKSATIHDNIAYANPKASREEVIEAAKAANADFFIKQLPNGYDTYLEDAGDSLSQGQCQLLTIARIFLKLPRILILDEATSSIDTRTEVLVQEAFQMLMKGRTSFIIAHRLSTIQTADIILVMVSGEIVEVGNHSELMAQKGIYYQMQNAQK

SEQ ID NO: 6545 - DNA, 1725 bp, Streptococcus pyogenes
atgattaaaacagatcatcacctcctaaagcgagtgcttcaggatttgttaaaaaaacctctacctgtttgtattctcgtgatcgctagttttgtacaagttggtttaagtgtttacttgcctgttcttatcggtaaagccgttgatatgagtttgtcagtcaattcttggcaaactttaaaatggctgttggggcaaatgttagttattattgtggtcaacacattgattcaatgggtgatgcctcttgtctatagtcgtttgctatatcaatatagccagcaattgaaagataagcttttggaaaaaattcatcgtcttccttttgcatatctagatcgtcaaaccattggagatttggttagtcgagtgataaccgacactgagcaactgatcaatggtctacaaatggtttttaaccagtttatacttggactattgacgattctgtgtaccattatagctatggcacagattgactggctcatgttaatcttggttttggtgttaacaccaagctccctctttttagctcgttttattgctcaaaagagttttcattatgcacaagcacagaccaaaagcagaggaaatttagctcagtttactgaagaaatccttcgtcaagaaggtttggttcaactgtttaatgctcaagagcagtctatctgtgattatcatgttttaaataaaacctattgcgaggcttcacaaaaagccattttttacgcctcaacagtcaatccagccactcgctttattaatagtgtcatttatgctttactggcaggtttaggggctgttcgtatcatggctggacttttttcagtaggtcagctaaccacttttttaaatgttgttgtccaatataccaaacctttcaacgatatttcatctgtcttggcagagatacagagttctttagcttgtgcgcaaaggctttatgaccttttagatattgaaataaaagagcaagagcactttctaacatttaaggcatcagcggttaaggggcaaattgactttgaagaagtaagtttttcttatcaaaaagacaggcccttactgaaagatattaatttttctgttcctgcgggttccaaggtagcgattgtagggcctacaggtgcaggtaaatcaactttaatcaatttactcatgcgcttttatgaacttgatgctggtagcatcaagttagataaagttcctattaagtgttatgctaaggaagaacttaggtccattactggcatagtattgcaagaaacctggttgaaagatgcgactgttcatgagttgattgcttacggcagtgaagaggctagccgtgatgaagtagtggcagcagccaaagcagctcatgcacacttctttattatgcaacttcctaagacttatgatacttacttaagtgcttctgatgatgctttgtcccaagggcagctccagttattagctattgccagaatgtttttgaaaaaaccaaaagtcttggttctagatgaagccacctcctctattgatattagaacagaagctgttattcaagaggcactaaaagaactcatgagaggaaggaccagctttatcattgcccatcgtttatcaacgattcaatcagctgatttgattcttgttatggatcaaggtcgattggttgagtggggaacacatgccagcttaatgtcaaaaaacggctgttatgttagattacaaaagatagaa

SEQ ID NO: 6546 - protein, 575 aa, Streptococcus pyogenes
MIKTDHHLLKRVLQDLLKKPLPVCILVIASFVQVGLSVYLPVLIGKAVDMSLSVNSWQTLKWLLGQMLVIIVVNTLIQWVMPLVYSRLLYQYSQQLKDKLLEKIHRLPFAYLDRQTIGDLVSRVITDTEQLINGLQMVFNQFILGLLTILCTIIAMAQIDWLMLILVLVLTPSSLFLARFIAQKSFHYAQAQTKSRGNLAQFTEEILRQEGLVQLFNAQEQSICDYHVLNKTYCEASQKAIFYASTVNPATRFINSVIYALLAGLGAVRIMAGLFSVGQLTTFLNVVVQYTKPFNDISSVLAEIQSSLACAQRLYDLLDIEIKEQEHFLTFKASAVKGQIDFEEVSFSYQKDRPLLKDINFSVPAGSKVAIVGPTGAGKSTLINLLMRFYELDAGSIKLDKVPIKCYAKEELRSITGIVLQETWLKDATVHELIAYGSEEASRDEVVAAAKAAHAHFFIMQLPKTYDTYLSASDDALSQGQLQLLAIARMFLKKPKVLVLDEATSSIDIRTEAVIQEALKELMRGRTSFIIAHRLSTIQSADLILVMDQGRLVEWGTHASLMSKNGCYVRLQKIE

SEQ ID NO: 6547 - DNA, 156 bp, Streptococcus agalactiae
atgcagatgttgcatcgtctaaaatcaaaaatggtatcttatcttgaactaaagctcttgcaatcgtcaacctttgcctttgaccaccagagaaattcctaccaaaactctctacaggggcgtcaagttgaccatctttttcttttacaaaatcac

SEQ ID NO: 6548 - protein, 52 aa, Streptococcus agalactiae
MQMLHRLKSKMVSYLELKLLQSSTFAFDHQRNSYQNSLQGRQVDHLFLLQNH

SEQ ID NO: 6549 - DNA, 1719 bp, Streptococcus agalactiae
atgaaaagactaacttattattttaaggggtatatcaaagaaactatctttggaccccttttcaaattattagaagcctcttttgaacttttggtaccaatcgttattgcaaaaatgattgacgagaccattccacgaggggatagaagtggtttactgttgcaaattggattgattttctttttggctgcggtgggtgttgtagtagcgataactgctcaatattattcttcaaaagccgcagttggttatacgagacaattgacagaggatctctaccaaaaagtcatgtcactgggtaaaaaagacagagatgaattgggaactgctagtttgattactcgtttgactgctgatacatttcaaatccaaactggtttaaatcaatttttacgtttatttttgagggctccgattattgtttttggtgccataattatggctttttccattagcccctcattgactatttggttcttggtaatggttgtcacgttatttatcattgtttttgtaatgtctcgactattaaatcctatttaccttaaaatcagaacttcaaccgattatttggtaaagttgactaggcaacaacttcaaggtgtacgagttatccgtgcctttaatcaagtagatagagagagtgaagcatttaatgatatcaattatcattatacgaatttacaattaaaagcaggtaggctttctagtttagtaacgcctctaacatttctagttgttaatatcactttggttgtgattatttggcgtggtaatttaaatatagctaatcatcttttatcacaaggaatgttggttgctttaattaattacttattgcaaattcttgttgaattgttaaaaatgacaatgttggtgacatcactgaaccaaagttatatcagtgctaagcgaattatagccgtttttgaaagaccgtctgaaataattgatgacaaacttgagccaaaatattcgaataaggctttagaagtgcaagaaatggcattttcttatccaaactcctctgaaaaagctttatctgatattactttttctatgaatgtaggagaaactttagggataattggtgggactggctctgggaaatcaaccttgattaatttattgcttcatatttataaagtgcaagaaggggatattgatatatatcatcagggaaaaagtccagatacaatttcaaattggcgtaccctggtaagagttgttcctcaaaatgctcagttgtttaaaggaactattcgttctaacctttctttgggacttggtaaagttagtgaggaaaaactttggactgctttagaaatagcacaagctagtgattttgtaaaagaaaaagatggtcaacttgacgcccctgtagagagttttggtaggaatttctctggtggtcaaaggcaaaggttgacgattgcaagagctttagttcaagataagataccatttttgattttagacgatgcaacatctgcattggattatttaacagaagctcgtttatttaaagctataactaaacatttcaaccaaactaatcttattattgtatcacagagaattaatagtatacaaaatgcagatagaatcttactccttgataagggcaaacaagttggttttgataatcatcaatctttattagctcataacaaagtttataagtccatttaccattcacaaaattttaaggaggaggag

SEQ ID NO: 6550 - protein, 573 aa, Streptococcus agalactiae
MKRLTYYFKGYIKETIFGPLFKLLEASFELLVPIVIAKMIDETIPRGDRSGLLLQIGLIFFLAAVGVVVAITAQYYSSKAAVGYTRQLTEDLYQKVMSLGKKDRDELGTASLITRLTADTFQIQTGLNQFLRLFLRAPIIVFGAIIMAFSISPSLTIWFLVMVVTLFIIVFVMSRLLNPIYLKIRTSTDYLVKLTRQQLQGVRVIRAFNQVDRESEAFNDINYHYTNLQLKAGRLSSLVTPLTFLVVNITLVVIIWRGNLNIANHLLSQGMLVALINYLLQILVELLKMTMLVTSLNQSYISAKRIIAVFERPSEIIDDKLEPKYSNKALEVQEMAFSYPNSSEKALSDITFSMNVGETLGIIGGTGSGKSTLINLLLHIYKVQEGDIDIYHQGKSPDTISNWRTLVRVVPQNAQLFKGTIRSNLSLGLGKVSEEKLWTALEIAQASDFVKEKDGQLDAPVESFGRNFSGGQRQRLTIARALVQDKIPFLILDDATSALDYLTEARLFKAITKHFNQTNLIIVSQRINSIQNADRILLLDKGKQVGFDNHQSLLAHNKVYKSIYHSQNFKEEE

SEQ ID NO: 6551 - DNA, 1722 bp, Streptococcus pyogenes
atgaaacgattacgtccatatgtgaaagggtacctaaaagaaagtatcttaggtcctctttttaaattattagaagctttatttgaattattagtccctttgttaattgctaacatgattgatatatcgattagtcaacacaacagccagggaattttgagggttgttttaacattatttggtttagcaaccattggcttattgctttccgttacagcccagtatttttcttcgaaagcagctgttggttttacaagacaaatgacagatgacttgtttaaaaaaatcatgtttttgagcaaggaggaccaagaccatcttggttatgctagtctgttatcacgattgaccagtgatagttttcaaattcaaactggtatcaatcaatttttgcgtctttttctaagggcccctattatcgtatgtggtgctatggtaatggcttattggattagtccaagtctaaccctatggtttgtgatgatggtgattgtcttactaacacttgtttttgttatgtcacatttattaggtcccctttatctcttaatccgccgagaaacagatcacttggttcgtttgactagccaacagttacaaggaatccgagtaattaaggcttttaatcaaacccaaaaagaactccaagcatttaagcagcaaaatatgctcttaagtcgccaccaatatcaagctgctaccctagccaatgtcttgaatcctatgacttttttagtggtcaatcttaccctgttaatcttgatttggcaaggaagttggcaagtagctcatagatcgcttagtcagggcatgttggttgctttaattaattacctcttgcagattttggcagaacttttgaaaatgaccatgttgatgggaaccatcaatcaaagtgtaacagccgcaaaacggattaatcaggtgtttgttttagctgatgaagcgcctttgcccttacttaaagatggtcctatttcaactcatctgttgaccatccggcacttgacctttacttatccaggagcagcagagccaagtctgtatgatattcagttaagtgctgatcagggagaatggattggcatcattggtggtactggagcaggcaaaacgactttgattgacttgatctgccaaacttattcacaatatagtggtgagattagtcttaattggcaaggagaagtgccaaaaacactaaccgagtggcgaaatgtgattgctcttgttcctcaaaaagctcaattatttaaaggaacgattagaagtaacctcctactgggacaatcaatgcctattagtgatgaggaactgtggcgggctcttgaattggctcaagcaaaagagtttgtcgctgccttaccagaacaattagaggcacctgttgaagccttcggccgtcatttttcaggagggcaacggcaacgtctagctattgccagagcacttctgaagccaaaacccattttgattttggatgatgccagttccgccttagacaatgagactcgaggacgactttttaaagctctaaaagaagagttatcagatgttttagtgattctagtcacgcaatctattaagaatttgcagtttgctgataagattttagtgttggaacagggccatcaattggattttgccagtcatgaccagttaaaagtaagcaatgcactttatcaagaaatgctagcgctttacgtgaagggggagcaaaaa

SEQ ID NO: 6552 - protein, 574 aa, Streptococcus pyogenes
MKRLRPYVKGYLKESILGPLFKLLEALFELLVPLLIANMIDISISQHNSQGILRVVLTLFGLATIGLLLSVTAQYFSSKAAVGFTRQMTDDLFKKIMFLSKEDQDHLGYASLLSRLTSDSFQIQTGINQFLRLFLRAPIIVCGAMVMAYWISPSLTLWFVMMVIVLLTLVFVMSHLLGPLYLLIRRETDHLVRLTSQQLQGIRVIKAFNQTQKELQAFKQQNMLLSRHQYQAATLANVLNPMTFLVVNLTLLILIWQGSWQVAHRSLSQGMLVALINYLLQILAELLKMTMLMGTINQSVTAAKRINQVFVLADEAPLPLLKDGPISTHLLTIRHLTFTYPGAAEPSLYDIQLSADQGEWIGIIGGTGAGKTTLIDLICQTYSQYSGEISLNWQGEVPKTLTEWRNVIALVPQKAQLFKGTIRSNLLLGQSMPISDEELWRALELAQAKEFVAALPEQLEAPVEAFGRHFSGGQRQRLAIARALLKPKPILILDDASSALDNETRGRLFKALKEELSDVLVILVTQSIKNLQFADKILVLEQGHQLDFASHDQLKVSNALYQEMLALYVKGEQK

SEQ ID NO: 6553 - DNA, 600 bp, Streptococcus agalactiae
atgtttaaatttttaaaacgtttgatagcattaattattattattttcattgggtaccgtctagttatcatccatgaaaatgttaaaaaagtgcttcaatatcatgatttagtgcagaatactcttgcagagaatggttcagaggctaatgtgcacttagtattatctatgatttatactgaaactaagggagatgctatagatgtgatgcaatcaagtgaaagtatcagtggaactacgaacagtattacggatagccacaccagtattaaacatggcgtcactctgttgtcacaaaatataagtcaagctaaaaaagctaaggttgatgtatggactgctgtccaagcatacaattttggttcttcttatattgattatgtagcggatcatgggggtgaaaattccattgagttggccaaaaattactctaaaaatgttgtagctcccagcctaggaaattataacggggacacttacttttactatcatcctctcgccttaatttcaggagggaagctctataaaaatggtggtaatatttactactcacgtgaagttcaattcaacctttatttgataaaaataatggagttgttt

SEQ ID NO: 6554 - protein, 200 aa, Streptococcus agalactiae
MFKFLKRLIALIIIIFIGYRLVIIHENVKKVLQYHDLVQNTLAENGSEANVHLVLSMIYTETKGDAIDVMQSSESISGTTNSITDSHTSIKHGVTLLSQNISQAKKAKVDVWTAVQAYNFGSSYIDYVADHGGENSIELAKNYSKNVVAPSLGNYNGDTYFYYHPLALISGGKLYKNGGNIYYSREVQFNLYLIKIMELF

SEQ ID NO: 6555 - DNA, 990 bp, Streptococcus agalactiae
atgagaattaatgttatgatggatttttatatcaaacagattattatacatcagttttctcctaacgacacagagttagtgctatcagatactccgctaaccctaactccaaggattgatgactactttcgtaaaaaattaagtaaagttttttctgatgaagctaagcgtggctattttggagaggataatgtatttatgagtcatttacaagatgatttatatgtttcttcctgtcaaattgcgcaactttggaaagaagagtttgtcatatcggaagatcaaaaaacgaatgacttagtttttattcaatttgacaaggatggaatggaacattttgctttccttcgaatctcattaaaggaacaatttgctcatgtttctgaaaatcaagagcagccaattacaataacacagaataaccttccaagtgctgctcaaactccagatgaagctttggttgttaacaagtcatcaaagcaatactatttaattgaaaagcgtatcaaacacaatggttcatttgctaattatttttctgaaaatttattacaagtacaaccagaacagtctgttaaaaaatctataaaaatggttgaacagacagctcaaaaaattgctgaaaatttcaacaaagatgatttttctttccaatcaaaaatgaaatcggctatttataagaatttagaagaagagcaagaattgtctccagaaaaattagcagatcaattatttgatgataatttaacagccaggctgacttttgttgatgaattgaaagacgcaatacctggacctgttcaagtaagtgatattgatcattcccgtcaaattaagaagttagagaatcagaagctatctctttcaaatggtattgaattgattgtacccaacaatgtctaccaagatgccgaatcagttgaatttatccaaaaccctgatggtacatactcaatactaatcaaaaacatacaggatattcaaaataaa

SEQ ID NO: 6556 - protein, 330 aa, Streptococcus agalactiae
MRINVMMDFYIKQIIIHQFSPNDTELVLSDTPLTLTPRIDDYFRKKLSKVFSDEAKRGYFGEDNVFMSHLQDDLYVSSCQIAQLWKEEFVISEDQKTNDLVFIQFDKDGMEHFAFLRISLKEQFAHVSENQEQPITITQNNLPSAAQTPDEALVVNKSSKQYYLIEKRIKHNGSFANYFSENLLQVQPEQSVKKSIKMVEQTAQKIAENFNKDDFSFQSKMKSAIYKNLEEEQELSPEKLADQLFDDNLTARLTFVDELKDAIPGPVQVSDIDHSRQIKKLENQKLSLSNGIELIVPNNVYQDAESVEFIQNPDGTYSILIKNIQDIQNK

SEQ ID NO: 6557 - DNA, 975 bp, Streptococcus pyogenes
atgttagatagttatataaaacgtattgtcattcatcaattttctcccaatgacactgagttactgttatcagatcgtttagtgagcattacaccgcgaattgatgaatatttccgaaaaaaattggccaaagtgttctcggacgaagccaaacgtggtcagtttgaggctaataataccttttttacaaccattggtgatgatttgttggaaacgtctgttaccattgcccagttatggaaggaagcctttgttatttcagaggatcaaaaaaccaatgacttagtctttgttcagtttgataaggatggcgaacccttttttgctttcttgcgaattgctttgaaagaacagtttgctcacctttctgacaattatgaacatccatttacggtgacgcagaataatctgccgagtcccacccagacaccagatgaagcactagtcattaatctcaaatctggtcagtactacttgattgaaaagcgtgtgaagcataatggcagttttgctaattatttttcagaacacctcttgaaagttacacctgagcaatctgttaaaaagtctatcaaaatgatagaacaaaccgctcaaaaaattgcagagcattttaatcaagatgattttacttttcagtcaaagatgaaatccactctttttaagcagttagaagcagacgacgttttatcaccagaaaaattagctgaccaactctttgatgataatttaacagcccgtttaacctttgtggatcaagtcaaagatgtcattccagaacctataaaaattagcgatattgaacattctagacagataaaaaaactagaaaatcaaaagctatcgttatcaaacgggatagaattaacagtaccaaatgccatttatcaggatgctgaagcggttgaatttttgttaaatgatgatgggacttattcaatcttgattaaaaatatagaggatattaaaaccaaa

SEQ ID NO: 6558 - protein, 325 aa, Streptococcus pyogenes
MLDSYIKRIVIHQFSPNDTELLLSDRLVSITPRIDEYFRKKLAKVFSDEAKRGQFEANNTFFTTIGDDLLETSVTIAQLWKEAFVISEDQKTNDLVFVQFDKDGEPFFAFLRIALKEQFAHLSDNYEHPFTVTQNNLPSPTQTPDEALVINLKSGQYYLIEKRVKHNGSFANYFSEHLLKVTPEQSVKKSIKMIEQTAQKIAEHFNQDDFTFQSKMKSTLFKQLEADDVLSPEKLADQLFDDNLTARLTFVDQVKDVIPEPIKISDIEHSRQIKKLENQKLSLSNGIELTVPNAIYQDAEAVEFLLNDDGTYSILIKNIEDIKTK

SEQ ID NO: 6559 - DNA, 1254 bp, Streptococcus agalactiae
atgatttttgataaagacaattttaaagaatttgaccaagaactttggcaggctattcatgatgaggaaattcgccaacaaaataatattgaattaattgcatcagaaaacgttgtttcaaaagctgttatggcagcacaaggttctgttttgacaaataaatatgccgaagggtatcctagtcatcgttattatggaggaacagattgtgttgatgtagttgaaagtttagctatagaacgagctaagacgttatttaatgctgagtttgctaatgttcaaccacattctggtagtcaggctaatgcagcagcttacatggctttaatcgagccgggagatactgtcttagggatggacttagcagcaggtgggcacttaacacatggcgcttcagttagcttctcaggaaaaacttatcattttgtttcttactctgttgatcctaagacggagatgctagactatgataacattttgaaaatagcacaggaaacgcagcctaaattaattgttgcaggggcgtcggcttattctcgcattattgattttgaaaaatttcgtcaaatagcagacgcagtagatgcttacttaatggttgatatggctcacattgcaggtttagttgcttctggtcatcaccctagtcctattccttatgctcatgtaacgacaacgacaacacataagactctacgtggacctagaggtggtttgattttaaccaatgatgaagcaattgctaaaaaaattaattctgcagtctttccaggactccaaggtggaccattagaacatgtaattgctgcaaaagctgtagctttgaaagaagccctagatccttcctttaaaatatacggtgaggatattattaaaaatgctcaagccatggctaaagtttttaaagaagatgatgactttcatttgatttctgatggtactgataatcatttgttcttagtagacgtcacaaaagttattgagaatggcaaaaaggcacaaaatgttcttgaagaagtcaatatcacccttaacaagaactctataccgtttgagcgactatcaccatttaaaacatcaggtattcgaattggtactccagcaattactagtcgaggaatgggagttgaagaatctcgaagaatcgctgaattaatgattaaggcactcaaaaatcatgaaaatcaagatgtcctcacagaagttcgtcaagaaattaaatcattaacggacgctttccctttgtatgagaat

SEQ ID NO: 6560 - protein, 418 aa, Streptococcus agalactiae
MIFDKDNFKEFDQELWQAIHDEEIRQQNNIELIASENVVSKAVMAAQGSVLTNKYAEGYPSHRYYGGTDCVDVVESLAIERAKTLFNAEFANVQPHSGSQANAAAYMALIEPGDTVLGMDLAAGGHLTHGASVSFSGKTYHFVSYSVDPKTEMLDYDNILKIAQETQPKLIVAGASAYSRIIDFEKFRQIADAVDAYLMVDMAHIAGLVASGHHPSPIPYAHVTTTTTHKTLRGPRGGLILTNDEAIAKKINSAVFPGLQGGPLEHVIAAKAVALKEALDPSFKIYGEDIIKNAQAMAKVFKEDDDFHLISDGTDNHLFLVDVTKVIENGKKAQNVLEEVNITLNKNSIPFERLSPFKTSGIRIGTPAITSRGMGVEESRRIAELMIKALKNHENQDVLTEVRQEIKSLTDAFPLYEN

SEQ ID NO: 6561 - DNA, 1260 bp, Streptococcus pyogenes
atgacaatgatttttgataaaggtaatgttgaagactttgataaagagctttgggatgccattcatgctgaagaagaaagacaagaacatcatatcgaattgattgcatctgaaaacatggtttcaaaagctgtcatggcagctcaaggttctgttttaaccaataagtatgcagaaggctatccaggtaatcgctattatggtggaacagaatgtgtggatattgtcgaaacgcttgctattgaacgtgctaagaaacttttcggtgccgcatttgccaatgttcaagcccattccggaagtcaagccaatgcagcagcttatatggccttgattgaggctggtgacaccgtattaggaatggatttggctgcaggtggtcatctcacgcatggctctccagtaaatttttctggaaaaacctaccattttgtgggttactcagtagatactgatactgaaatgttaaattatgaggcgattttagaacaagcaaaggcggtccaaccaaagcttatcgttgcaggggcttcggcctactctagaagcattgattttgaaaagtttcgtgccattgctgatcacgtaggtgcttacttaatggtggacatggctcacatcgctggccttgtagcagcaggtgtgcacccgagtcctgtcccttatgcgcatattgtgacatcaacaacccataaaaccttacgtggtcctcgtggaggcttgatattaaccaatgacgaagctcttgctaaaaagattaattcggccgttttccctggtttacaaggaggacctctggaacacgtgattgctgccaaagcggttgccttcaaagaagccttggatccagcctttaaagactatgcacaagctattattgataatactgcggctatggcagcagtttttgcacaagatgatcgtttccgtctgatctcaggtggtacagataatcatgtctttttagtagatgtcactaaggttattgctaatggtaaactagcgcaaaatcttctggatgaggttaatattacccttaataaaaatgccattccttttgaaaccttgtcgccatttaaaacctcaggtattcgcattggttgtgctgccataaccagccgtggtatgggtgttaaagagagtcagaccattgcccgtcttatcatcaaagccttggttaatcatgatcaagaaactattcttgaagaagtccgtcaggaagtgcgtcagttaaccgatgccttcccactctataaaaag

SEQ ID NO: 6562 - protein, 420 aa, Streptococcus pyogenes
MTMIFDKGNVEDFDKELWDAIHAEEERQEHHIELIASENMVSKAVMAAQGSVLTNKYAEGYPGNRYYGGTECVDIVETLAIERAKKLFGAAFANVQAHSGSQANAAAYMALIEAGDTVLGMDLAAGGHLTHGSPVNFSGKTYHFVGYSVDTDTEMLNYEAILEQAKAVQPKLIVAGASAYSRSIDFEKFRAIADHVGAYLMVDMAHIAGLVAAGVHPSPVPYAHIVTSTTHKTLRGPRGGLILTNDEALAKKINSAVFPGLQGGPLEHVIAAKAVAFKEALDPAFKDYAQAIIDNTAAMAAVFAQDDRFRLISGGTDNHVFLVDVTKVIANGKLAQNLLDEVNITLNKNAIPFETLSPFKTSGIRIGCAAITSRGMGVKESQTIARLIIKALVNHDQETILEEVRQEVRQLTDAFPLYKK

SEQ ID NO: 6563 - DNA, 594 bp, Streptococcus agalactiae
atgaatgatttgggacagattttagaggatcatggcgcagttattatgccaacagaaacagtctacggaatttttgccaaagctttgagtgaagaagctgtgaaccacgtctatgagcttaaaaaaaggcctcgtgataaggctatgaacttaaatatatgtgattttgagactattttaaaatattctaaaaatcaaccgacctatttaaagcaattgtacgatgcttttttaccaggaccgctaaccattattttggaagcttcacaagaagttccgcattggatcaattctgggttattaagcgtaggatttcggatgcctaaacaccctgtaacccttgatatgattgctaaccatggtccactgattggtccttctgctaatatttctggatgtgatagtggtcgtgtgttctcagaaattcaaaaacagtttaatcatcaagttttaggtattgaagatgataaagcattgacaggtgtggattctactattattgatttgtctggtgatagagttaagattttaaggcaaggtgcaatcacgcaagaggtactaacggctacgatacctgaattaatttttgaaaat

SEQ ID NO: 6564 - protein, 198 aa, Streptococcus agalactiae
MNDLGQILEDHGAVIMPTETVYGIFAKALSEEAVNHVYELKKRPRDKAMNLNICDFETILKYSKNQPTYLKQLYDAFLPGPLTIILEASQEVPHWINSGLLSVGFRMPKHPVTLDMIANHGPLIGPSANISGCDSGRVFSEIQKQFNHQVLGIEDDKALTGVDSTIIDLSGDRVKILRQGAITQEVLTATIPELIFEN

SEQ ID NO: 6565 - DNA, 618 bp, Streptococcus pyogenes
ttggcaaagaaaggatggtggttgttgattatggagtatctagctagtatcattgaatcaggtgatgcccttgttttaccaacagaaacggtttatggtctttttgccaaggctttagatgaaaaagcagtaaatgctgtttatgacttaaaacaaagaccccgagataaagcaatgaaccttaatgtggctgattttaatagtatcttagccttttcaaaagaacagccgagatacctcaagaaattataccaagcctttttaccaggtccgttaacgattattttaaaagctaatgaccaggttccttattggattaattcgggactttcaacggttggttttcgcttacccagtcatccaattaccgcagctttaattcaaaaaacaggccctttaattggtccttctgcaaacttatctggcaaagctagtggtcgagtttttgatcatattatgcaagattttgactttcaagtgtttggttatgcagatgatccttttctaacaggtaaggattcaaccatcttagacttatcaggtgagcgtgctgtgattttacgtcaaggtgctatcaccaaagaagaattattagctaacgtgcctgaacttcgcttt

SEQ ID NO: 6566 - protein, 206 aa, Streptococcus pyogenes
LAKKGWWLLIMEYLASIIESGDALVLPTETVYGLFAKALDEKAVNAVYDLKQRPRDKAMNLNVADFNSILAFSKEQPRYLKKLYQAFLPGPLTIILKANDQVPYWINSGLSTVGFRLPSHPITAALIQKTGPLIGPSANLSGKASGRVFDHIMQDFDFQVFGYADDPFLTGKDSTILDLSGERAVILRQGAITKEELLANVPELRF

SEQ ID NO: 6567 - DNA, 828 bp, Streptococcus agalactiae
atgaattatgcgcagttaatcaagcattacggacagttattagaagcttgtggtgaagaagtcgaaaattttatttatgtattaaaagacctaaaacaatggtcaacaactgattaccttttaaatcaaaatagtagtgtgagtgatactgatcagcaattaatggaaaatatttttcaacagcttaaaaaacatagatcaccgcagtatattacaggtaaagcttactttagagaccttattttctttgttgatgaacgagttttaattccgaggcctgaaacagaggagttggttgatctaatcttatcagagaataaagtagaagattgttctgttttagatattggtacaggtagtggagcaattgccatttctctaaaaaaagaacgcccctcttgggatgttctagctagtgacatttctgtatctgcattagacttggcaaaggaaaatgctaataattgtgatgcggaagtgacttttatagaatcagatgtctttagtaacatttcaggtaaatttgatattattgtgtctaatcctccctatatttcttacaatgacaaagacgaggtggggaagaatgtgctagcttcagagcctcatagtgccctttttgcagacgaagaaggattagctatttatcgtaaaatcattgaaaactcaagagaatatttgcaacctagaggtaaattatattttgaaataggttacaaacaaggtgatgatttacgaagtttattgaaaagatattttccaaacaatcgttgcagagttttgaaagatatatttggtaaagatagaatggtggtattagataatgaa

SEQ ID NO: 6568 - protein, 276 aa, Streptococcus agalactiae
MNYAQLIKHYGQLLEACGEEVENFIYVLKDLKQWSTTDYLLNQNSSVSDTDQQLMENIFQQLKKHRSPQYITGKAYFRDLIFFVDERVLIPRPETEELVDLILSENKVEDCSVLDIGTGSGAIAISLKKERPSWDVLASDISVSALDLAKENANNCDAEVTFIESDVFSNISGKFDIIVSNPPYISYNDKDEVGKNVLASEPHSALFADEEGLAIYRKIIENSREYLQPRGKLYFEIGYKQGDDLRSLLKRYFPNNRCRVLKDIFGKDRMVVLDNE

SEQ ID NO: 6569 - DNA, 837 bp, Streptococcus pyogenes
atgaactatgctacattaatcagaacttatgaagataaactagaacaaatagatgaggatcgcgaaaatctcgcctatgtttttagagaaatcaaagaatggtcaagtctagatatgttgattcaccaaaatcaagctgtgactcctgaagatgctgttcttttggaacatattttctgttctctaagtcagcatttatctcctcaatatattacaggtaatgcttattttcgtgatttgaagcttgcagtcgacaagcgtgtattaattccaaggccagaaacagaagaattagttgacatgattttagctgaaaatcttgatgcaccgttgaatgttttagatattggtacaggtagtggagcgattgctatttctctcaaaaaagaaaggcctaactggcaagtaacggcatctgatatttctagagctgctcttgacttggcaaaagccaatgctgatgcttaccagcttgatataacgtttattgaatcagatgtttttagtctcatttcagaaacatttgatattattgtgtcaaatcctccctacatatcctacgaggataaggaagaagtcagtctaaatgttttgcaatcagagcctcatttggcactttttgctaaagaaaatggctatgctatttaccgtaagattattgaacaagctgacaattacttaactaaggaggggaagctttactttgaaattggttataagcaagctgaaggtataaaagatatgttacaagcctattttcctcaaagacatatacgagccgtaacggatatatttggcaaagaaaggatggtggttgttgattatggagtatctagc

SEQ ID NO: 6570 - protein, 279 aa, Streptococcus pyogenes
MNYATLIRTYEDKLEQIDEDRENLAYVFREIKEWSSLDMLIHQNQAVTPEDAVLLEHIFCSLSQHLSPQYITGNAYFRDLKLAVDKRVLIPRPETEELVDMILAENLDAPLNVLDIGTGSGAIAISLKKERPNWQVTASDISRAALDLAKANADAYQLDITFIESDVFSLISETFDIIVSNPPYISYEDKEEVSLNVLQSEPHLALFAKENGYAIYRKIIEQADNYLTKEGKLYFEIGYKQAEGIKDMLQAYFPQRHIRAVTDIFGKERMVVVDYGVSS

SEQ ID NO: 6571 - DNA, 1077 bp, Streptococcus agalactiae
atgaatatttatgatcaattgcaggcagttgaagatcgttatgaagagttaggtgagttacttagtgatccagatgttgtttcagatacaaagcgatttatggaattatcacgtgaagaagctagtactcgagaaactgtcacagcttatagagaatataagcaagtcattcaaaatatttcagatgctgaagaaatgatcaaagatgcttctggtgatgctgaattggaagaaatggctaaagaagaacttaaagaatcaaaagcagctaaagaagagtatgaagaaagattaaaaatccttctattacctaaagatcctaacgatgataaaaacattattttagaaattcgtggtgctgctggtggcgatgaagcagcgctttttgctggtgatcttttaacaatgtatcaaaaatatgctgaaactcaaggatggcgttttgaagttatggaatcatccgttaatggtgttggtggtattaaagaagtggttgctatggtttctggtcagtcagtttattctaagcttaaatatgaatcaggagctcatcgtgttcaacgtgtcccggtgacagagagtcagggtcgtgttcatacttcaactgcaactgttttggtaatgccagaagttgaagaagtagaatacgaaattgatcaaaaagaccttcgcgtcgatatttaccacgcgtctggtgctggtggtcagaacgtcaataaagttgctactgcagttcgtatggtacacattcctacaggaatcaaagttgaaatgcaagaagaacgtactcagcaaaaaaaccgtgataaagcgatgaagatcattcgtgctcgtgttgctgaccattttgcgcaaattgctcaagatgaacaagatgctgaacgtaaatcaacagttggtactggtgatcgttcagaacgtattcgtacttataatttcccacaaaatcgtgtaacagatcatcgtattggtttgacacttcaaaaattagatactattttatctggaaaaatggatgaagttattgatgcactcgttatgtatgatcagactcaaaagttagaagccttaaataaa

SEQ ID NO: 6572 - protein, 359 aa, Streptococcus agalactiae
MNIYDQLQAVEDRYEELGELLSDPDVVSDTKRFMELSREEASTRETVTAYREYKQVIQNISDAEEMIKDASGDAELEEMAKEELKESKAAKEEYEERLKILLLPKDPNDDKNIILEIRGAAGGDEAALFAGDLLTMYQKYAETQGWRFEVMESSVNGVGGIKEVVAMVSGQSVYSKLKYESGAHRVQRVPVTESQGRVHTSTATVLVMPEVEEVEYEIDQKDLRVDIYHASGAGGQNVNKVATAVRMVHIPTGIKVEMQEERTQQKNRDKAMKIIRARVADHFAQIAQDEQDAERKSTVGTGDRSERIRTYNFPQNRVTDHRIGLTLQKLDTILSGKMDEVIDALVMYDQTQKLEALNK

SEQ ID NO: 6573 - DNA, 1077 bp, Streptococcus pyogenes
atgaatatttatgatcaattgcaggcagttgaagatcgttatgaagagttaggtgagttacttagtgatccagatgttgtttcagatacaaagcgatttatggaattatcacgtgaagaaactaatactcgagaaactgtcacagcttatagagaatataagcaagtcattcaaaccatttcagatgctgaagaaatgatcaaagatgccagtggtgatcctgaattagaagaaatggctaaagaagaacttaaagaatcaaaagcagctaaagaagagtatgaagaaaaattaaaaatccttctattacctaaagatcctaacgatgataaaaacattattttagaaattcgtggtgctgctggtggcgatgaagcagcgctttttgctggtgatcttttaacaatgtatcaaaaatatgctgaaactcaaggatggcgttttgaagttatggaatcatccgttaatggtgttggtggtattaaagaagtggttgccatggtttctggtcagtcagtttattctaagcttaaatatgaatcaggagctcatcgtgttcaacgtgtcccagtgacagagagtcagggtcgtgttcatacttcaactgcaactgttttggtaatgccagaagttgaagaagtagaatacgacattgatcctaaagaccttcgcgtcgatatttaccacgcgtctggtgctggtggtcagaatgtcaataaagttgctactgcagttcgtatggtacacattcctacaggaatcaaagttgaaatgcaagaagagcgtactcagcaaaaaaaccgtgataaagcgatgaaaatcattcgtgctcgtgttgctgaccattttgcgcaaattgctcaagatgaacaagatgctgaacgtaaatcaacagttggtactggtgatcgttcagaacgtattcgtacttataatttcccgcaaaatcgtgtaacagatcatcgtattggtttgacacttcaaaaattagatactattttatctggaaaaatggatgaagttattgatgcactcgttatgtatgatcagacaaagaaattagaatctctcaataac

SEQ ID NO: 6574 - protein, 359 aa, Streptococcus pyogenes
MNIYDQLQAVEDRYEELGELLSDPDVVSDTKRFMELSREETNTRETVTAYREYKQVIQTISDAEEMIKDASGDPELEEMAKEELKESKAAKEEYEEKLKILLLPKDPNDDKNIILEIRGAAGGDEAALFAGDLLTMYQKYAETQGWRFEVMESSVNGVGGIKEVVAMVSGQSVYSKLKYESGAHRVQRVPVTESQGRVHTSTATVLVMPEVEEVEYDIDPKDLRVDIYHASGAGGQNVNKVATAVRMVHIPTGIKVEMQEERTQQKNRDKAMKIIRARVADHFAQIAQDEQDAERKSTVGTGDRSERIRTYNFPQNRVTDHRIGLTLQKLDTILSGKMDEVIDALVMYDQTKKLESLNN

SEQ ID NO: 6575 - DNA, 567 bp, Streptococcus agalactiae
ttggctcaactctattataaatatgggacaatgaattctggtaaaaccattgaaattttaaaagttgctcataactatgaagaacaaggaaaacctgtggttattatgacaagcgccttggacactcgagatgaatttggagtcgtttcaagtcgtattggaatgcgtcgtgaagcagttccaatttcagatgatatggacattttctcctatattcagaatttaccacaaaagccttattgtgttttaattgatgaatgtcaatttttgagtaagaaaaacgtctacgatttagctagagtagtagatgacttagatgtaccagtcatggcttttggtttgaaaaatgatttccaaaacaatctttttgaaggttcaaaacatttgctattattggccgataagattgatgaaatcaaaacaatttgccaatactgtagtaagaaagcaaccatggttttaaggacagaaaacggaaaacctgtctatgaaggtgatcagatacaaattggtggtaatgaaacatatatcccagtttgtcgaaaacattattttaatccagatatt

SEQ ID NO: 6576 - protein, 189 aa, Streptococcus agalactiae
MAQLYYKYGTMNSGKTIEILKVAHNYEEQGKPVVIMTSALDTRDEFGVVSSRIGMRREAVPISDDMDIFSYIQNLPQKPYCVLIDECQFLSKKNVYDLARVVDDLDVPVMAFGLKNDFQNNLFEGSKHLLLLADKIDEIKTICQYCSKKATMVLRTENGKPVYEGDQIQIGGNETYIPVCRKHYFNPDI

SEQ ID NO: 6577 - DNA, 567 bp, Streptococcus pyogenes
ttggctcaactctattataaatatgggacaatgaattctggtaaaaccattgaaattttaaaagttgctcataactatgaagaacaaggcaaacctgttgtcattatgacaagtgctcttgatacacgtgatggttttggcatcgtctcaagccgtattggtatgcgacgagaagctatccccatttcaaatgacatggatattttcacatttattgcccaattggaggaaaaaccttattgtgtcctgattgacgaaagccaatttttaagcaagcaaaatgtttatgatttggcgcgtgtggtggatgagctaaatgttcctgtcatggcttttggtttgaaaaatgatttccaaaacaatctttttgaaggttcaaaacatttgctattattggccgataagattgatgaaatcaaaacaatttgccaatactgtagtaagaaagcaaccatggttttaaggacagaaaacggaaaacctgtctatgaaggtgatcagatacaaattggtggtaatgaaacatatatcccagtttgtcgaaaacattattttaatccagatatt

SEQ ID NO: 6578 - protein, 189 aa, Streptococcus pyogenes
LAQLYYKYGTMNSGKTIEILKVAHNYEEQGKPVVIMTSALDTRDGFGIVSSRIGMRREAIPISNDMDIFTFIAQLEEKPYCVLIDESQFLSKQNVYDLARVVDELNVPVMAFGLKNDFQNNLFEGSKHLLLLADKIDEIKTICQYCSKKATMVLRTENGKPVYEGDQIQIGGNETYIPVCRKHYFNPDI

SEQ ID NO: 6579 - DNA, 180 bp, Streptococcus agalactiae
atgccatttgtaaaaattgacttgtttgagggacgctcacaagaacaaaaaaatgaattagctcgcgaggttactgaagtagtatcacgcattgcaaaagcacctaaagaaaatatccatgtttttatcaacgatatgcctgaaggaacctactatcctcaaggtgaacttaagaaaaaa

SEQ ID NO: 6580 - protein, 60 aa, Streptococcus agalactiae
MPFVKIDLFEGRSQEQKNELAREVTEVVSRIAKAPKENIHVFINDMPEGTYYPQGELKKK

SEQ ID NO: 6581 - DNA, 183 bp, Streptococcus pyogenes
atgccatttgtaacaattgacttgtttgagggacgctcacaagaacaaaaaaatcaattagctcgcgaggttaccgaagtagtctcacgcattgcaaaagcacctaaagaaaatatccatgtttttatcaacgatatgcctgaaggaacttactatcctcaaggtgaaatgaaacaaaaatca

SEQ ID NO: 6582 - protein, 61 aa, Streptococcus pyogenes
MPFVTIDLFEGRSQEQKNQLAREVTEVVSRIAKAPKENIHVFINDMPEGTYYPQGEMKQKS

SEQ ID NO: 6583 - DNA, 951 bp, Streptococcus agalactiae
ttggaggtggaaaatttgcaactttctcatagtttaagactcatgggaacgactatcgatattcaaattaattctaaaaatgctcaaaaacaaatccgagaggtcatagaactcttggagctctacaaaaatcgctttagtgcaaatgactttaattcagagttaatggctataaataacaacgctggtatcaagcctattcaagtacatccagacctctttgaattaatcacaattgggaaagaacacagcttagctaggcctagtaacctaaatattgctattggtcctttagtgcaaacttggagaattggattttcagatgctaaactacctagccctagtgaaatatcagaagctatgattttatctgacccaactcatatacttctagattcaaataaacaatctgtttttttaaatcagataggaatgaaaattgatttgggtgcacttgcaaaaggatatatcgctgacaaaattatgacctatctcaaaaatgagatgattgattctgctattattaatttaggcggaaacgttttagttcacggagataatcctaatcgttcagaagggtattgggttatcggcattcaacatccgaaaaagaaacggggaaaaaatattggaactgtcaaaattaaaaaccaatctgttgtaacctcaggtacttatgaacgccgtctgattattgacgataaggaataccatcatatttttgatcgacagactggttatccgatacaaacagagatggctagcatttctattgtttctaaacaatccgtcgactgtgaaatctggaccacaaggttgttcggcttatccattaaagaggctcttgatattttaaacgctgtttcctacattgaaggcattatcatcactaaagatgatcgtatctatttatctgatggcttaaaacatcattttcaactattttatcat

SEQ ID NO: 6584 - protein, 317 aa, Streptococcus agalactiae
MEVENLQLSHSLRLMGTTIDIQINSKNAQKQIREVIELLELYKNRFSANDFNSELMAINNNAGIKPIQVHPDLFELITIGKEHSLARPSNLNIAIGPLVQTWRIGFSDAKLPSPSEISEAMILSDPTHILLDSNKQSVFLNQIGMKIDLGALAKGYIADKIMTYLKNEMIDSAIINLGGNVLVHGDNPNRSEGYWVIGIQHPKKKRGKNIGTVKIKNQSVVTSGTYERRLIIDDKEYHHIFDRQTGYPIQTEMASISIVSKQSVDCEIWTTRLFGLSIKEALDILNAVSYIEGIIITKDDRIYLSDGLKHHFQLFYH

SEQ ID NO: 6585 - DNA, 936 bp, Streptococcus pyogenes
atgtttgttacgcaacaattaaagctaatgggaacagttattgatattcagatcgaatctgacaaagcttgccaacaactaagtagagtcattgacttattatatacttacaaaaatcgtttttcagctaatgattcaaactctgaattgatggctattaatcaggcggctggtgttaaacccgtcagcgttcactctgatttatttaacctaatccaaattggtaaagctcatagcttgtcaacaccaagtaatcttaatatcgccattgggccacttgttcaagcctggcgaattggatttgaagatgctagagtgcctagtcataaccttatctcacaacagttagctctaacagatcctagacaggttcttatagatgacaaaaaacagactgtctttttacaacaagtaggaatggctttagacttaggagccttagcaaaaggttatattactgataagattatggcctacctgattgaagatggtattgactctgcccttattaatttaggtggaaatgtacgcgttcatggacctaatccgaaaagccctgacaagacttttcgaattggcattcaaaaaccagatgctaaacgtgggcaacatcttggtgtcatcaaggttaacaatcactctgttgtgacttctggaatttatgaaaggcagtttacatccaaagggaaacagtatcatcatatcttagatcgtcagacaggctaccctatagaaacagatatgcttagcttaacgatcatggctccttcttctttttattgtgacatatggactacccgtttatttggtcttgatagctcaatgattatcacacttttaaatacctttgataatattgaaggtcttctagtaacaagaaagcaccatgtccttatgtcaaatggtttgagacactattttcaaccatactatcat

SEQ ID NO: 6586 - protein, 312 aa, Streptococcus pyogenes
MFVTQQLKLMGTVIDIQIESDKACQQLSRVIDLLYTYKNRFSANDSNSELMAINQAAGVKPVSVHSDLFNLIQIGKAHSLSTPSNLNIAIGPLVQAWRIGFEDARVPSHNLISQQLALTDPRQVLIDDKKQTVFLQQVGMALDLGALAKGYITDKIMAYLIEDGIDSALINLGGNVRVHGPNPKSPDKTFRIGIQKPDAKRGQHLGVIKVNNHSVVTSGIYERQFTSKGKQYHHILDRQTGYPIETDMLSLTIMAPSSFYCDIWTTRLFGLDSSMIITLLNTFDNIEGLLVTRKHHVLMSNGLRHYFQPYYH

SEQ ID NO: 6587 - DNA, 600 bp, Streptococcus agalactiae
atgaaacttattggaatcgttggaactaactcaaataaatcaacaaatcgtcaattattacaatacatgcaacaacactttgctgacaaagcagaaattgaactcatcgaagttaaagaccttccgttatttaataaacctgctgataaaaatgttccccaagtaattttggatattgctgctaaaattgaagaaactgatggtgttattattggtacgccagaatatgatcattctataccttcggccttaatgagtgttttagcttggctatcatatggtatttacccacttctcaacaaacccgttatgattactggtgcttcatatggaacacttggatcatcacgtgcacaattacaattacgtcaaatacttaacgctcctgaactaaaagcaagtgttttacctgacgaattcttgttatcacactctctccaagcctttgataaagatggcaacctacacgatatcgaaacaagtcagaagctagatgctatctttgatgattttcgtctttttgttaagattactggtaaattatcaaatgctcgtgatttacttcaaaaagaagcagaaaattttgactgggaaagttta

SEQ ID NO: 6588 - protein, 200 aa, Streptococcus agalactiae
MKLIGIVGTNSNKSTNRQLLQYMQQHFADKAEIELIEVKDLPLFNKPADKNVPQVILDIAAKIEETDGVIIGTPEYDHSIPSALMSVLAWLSYGIYPLLNKPVMITGASYGTLGSSRAQLQLRQILNAPELKASVLPDEFLLSHSLQAFDKDGNLHDIETSQKLDAIFDDFRLFVKITGKLSNARDLLQKEAENFDWESL

SEQ ID NO: 6589 - DNA, 540 bp, Streptococcus pyogenes
atgaaacatattttatttattgttggctcgcttcgtgaagggtcttttaaccatcaattagcggctcaagcacaaaaagctctggaacatcaagcagttgtatcttacttaaattggaaagacgttcctgttttgaatcaagatatcgaagctaatgcacctttaccagttgttgacgctcgtcaagctgttcagtcagcggatgctatctggatttttacaccagtttacaacttctctattccaggttctgttaaaaacctgctagactggttgtctcgtgctcttgatttgtctgatccgacgggcccatctgctattggcggtaaggtggttacggtctcttcagttgcaaatggcgggcatgatcaagtatttgatcagtttaaagcactattgccgtttatccgaacttcagtagcaggagagtttacaaaagcaactgtgaatcctgatgcctggggaacaggaaggcttgagatttcaaaagagacaaaagcaaacttgctatctcaggcagaggctcttttagcggctatt

SEQ ID NO: 6590 - protein, 180 aa, Streptococcus pyogenes
MKHILFIVGSLREGSFNHQLAAQAQKALEHQAVVSYLNWKDVPVLNQDIEANAPLPVVDARQAVQSADAIWIFTPVYNFSIPGSVKNLLDWLSRALDLSDPTGPSAIGGKVVTVSSVANGGHDQVFDQFKALLPFIRTSVAGEFTKATVNPDAWGTGRLEISKETKANLLSQAEALLAAI

SEQ ID NO: 6591 - DNA, 192 bp, Streptococcus agalactiae
atgattatgttcaggagtagcaataataacgccatcagctcgtgtaatcttattattaagaagacgaagttggaaactttcttcccaattttggtcttgattaaacattggaatatcatcgatttcaaggacttccaattcaaatttggttttaaaattcttgcgaataaattcaagcaacatacgattata

SEQ ID NO: 6592 - protein, 64 aa, Streptococcus agalactiae
MIMFRSSNNNAISSCNLIIKKTKLETFFPILVLIKHWNIIDFKDFQFKFGFKILANKFKQHTII

SEQ ID NO: 6593 - DNA, 1233 bp, Streptococcus agalactiae
atgaaatttgtaggtattgttggctcaaatgcagagcaatcatataatcgtatgttgcttgaatttattcgcaagaattttaaaaccaaatttgaattggaagtccttgaaatcgatgatattccaatgtttaatcaagaccaaaattgggaagaaagtttccaacttcgtcttcttaataataagattacacgagctgatggcgttattattgctactcctgaacataatcatactattacagccgctcttaaaagtgtgcttgagtggctctcatttgctgtgcatccactcgaaaataaacctgttatgattgtcggtgcttcatattatgatcaaggcacatcacgtgctcaaatacaccttcgtaaaatccttgatgctcctggcgttaatgcttacacacttccaggaaatgaattcttattaggaaaagctaaagaagcctttgacgataatggaaacattatcaatcctgggactgttcaatttttagaaacttgtcttgataattttatcaaatatgtaggagttgtatcatcattgagaaaacctaaagctattgaatctgaagacctctactgtcagggacaaattgatacaaccattactggtatcgacccagatgatcctgattggttagacaaggcagctgagaaagttaacgccgttgaaggggatgcttacgttaaactagacaatggtttacttactgttaaccaacttaatatgtttttaaatgctatgccatttgagctaacatatgcagatgataataatcaatttctatattacaataataatcatccagatccagatacaatgttaggaaaacgtgttcgtgaacaagtaggaaaccgtatggctacagttcatggtagtttaccaccggcacgaatgaaaaatgttgaatgggttatcggtactcttcgtaatggaaatcaagaatatgtacgtacagtcgttcctggtacacctccagaagttatcaatactcacaactatcaagctatgtactacccagacggatcttatgctggtattaatgaaattatctttaactttaaaccgtggttagattggtacctccaaactactggacaacgtttggtcggtggaactactgctgctcctggagcttcagcagttgacgctacttctagcgcttcaactagcacaggggatgctcccgtggatcaagccacagatgccacttctggtgcctctgaacat

SEQ ID NO: 6594 - protein, 411 aa, Streptococcus agalactiae
MKFVGIVGSNAEQSYNRMLLEFIRKNFKTKFELEVLEIDDIPMFNQDQNWEESFQLRLLNNKITRADGVIIATPEHNHTITAALKSVLEWLSFAVHPLENKPVMIVGASYYDQGTSRAQIHLRKILDAPGVNAYTLPGNEFLLGKAKEAFDDNGNIINPGTVQFLETCLDNFIKYVGVVSSLRKPKAIESEDLYCQGQIDTTITGIDPDDPDWLDKAAEKVNAVEGDAYVKLDNGLLTVNQLNMFLNAMPFELTYADDNNQFLYYNNNHPDPDTMLGKRVREQVGNRMATVHGSLPPARMKNVEWVIGTLRNGNQEYVRTVVPGTPPEVINTHNYQAMYYPDGSYAGINEIIFNFKPWLDWYLQTTGQRLVGGTTAAPGASAVDATSSASTSTGDAPVDQATDATSGASEH

SEQ ID NO: 6595 - DNA, 687 bp, Streptococcus pyogenes
atgaaaaatgccatttccattttagcgctcttaacacctgaaaaccaacttgaagagacgtttattagagagctttcccaccacttctcacacctttttgaggtgactattctcactagcaaagccaacattcagtcaaatcaattgtcgactttccaaggaattttcagtttccatgagcatgacattgacttgcctacactctatttcaaaacttctcaacatggtcagggctttttagtgacagaaagtgtctttgatcaagcaacagcagtcttatcgttaagccaatacctcactggattttaccaaaaatttgatggacattttttacagtaccttcctttgcaagcaaggttatctgatgcaaatggaaacatcatagtcgataatcatgcttttaatggaagttttttgccaactactgataaagaaatagaagattggattcttgctgaattgcgtttatcagataacccttgtaaaaccttcctacttccttcgggttcattggatcatatttacatgcagcattatcaagctcttaaaaatcctcaaggtcagctggtgggagttttggataccgttcaagacattaaaccgttattaaaccagtatttagaagaaactggacaagccattgttggctggtccgatgtcacatcaggcccttccattttagatcac

SEQ ID NO: 6596 - protein, 229 aa, Streptococcus pyogenes
MKNAISILALLTPENQLEETFIRELSHHFSHLFEVTILTSKANIQSNQLSTFQGIFSFHEHDIDLPTLYFKTSQHGQGFLVTESVFDQATAVLSLSQYLTGFYQKFDGHFLQYLPLQARLSDANGNIIVDNHAFNGSFLPTTDKEIEDWILAELRLSDNPCKTFLLPSGSLDHIYMQHYQALKNPQGQLVGVLDTVQDIKPLLNQYLEETGQAIVGWSDVTSGPSILDH

SEQ ID NO: 6597 - DNA, 90 bp, Streptococcus agalactiae
atgaaagcaaatacaaaacctgatagagcaggagagattttaccaatagtatcagctgcgacgataccagcagcagtactcattgttaaa

SEQ ID NO: 6598 - protein, 30 aa, Streptococcus agalactiae
MKANTKPDRAGEILPIVSAATIPAAVLIVK

SEQ ID NO: 6599 - DNA, 786 bp, Streptococcus agalactiae
atgtcactttttcaagaaaaaattgcttacaattgcgctaaaaaggaagcgctttataaagagagtttaggacgctacgccttgaggtcaatgctagctggggcttatttaacaatgagtactgctgctggtatcgtcgcagctgatactattggtaaaatctctcctgctctatcaggttttgtatttgctttcatctttagttttggacttatttatgttttaatatttaatggtgaattggcgacatctaatatgctttatctcactgcaggagcctataataaaaatatctcttggaaaaaagccatgacaattttaatttattgtacttttttcaacctcgttggtgcttgtatattagcttggttgtttaatcaatcgtactcattccagcatttaacaaatgatagctttttagggcatgtcgttgctaaaaagttaggaaaacctagttcaggagctttcctagaaggtattattgctaatatgtttgtgaatttagctatccttgcttacatgttattaaaagaagaatcggcaaaaatgacggttattttatctgctatttttatgtttgtttttctatcaaacgaacacttaattgctaattttgcatcctttatgttagctgcttttagccatatcgaacatattaaaggttttactcttctaaacattatccgccaatggacacttgtattctttggtaactggataggagggggcgttttcatcggcctagcctatgcttggttaaataaaacaaaaacttctcaccatgaa

SEQ ID NO: 6600 - protein, 262 aa, Streptococcus agalactiae
MSLFQEKIAYNCAKKEALYKESLGRYALRSMLAGAYLTMSTAAGIVAADTIGKISPALSGFVFAFIFSFGLIYVLIFNGELATSNMLYLTAGAYNKNISWKKAMTILIYCTFFNLVGACILAWLFNQSYSFQHLTNDSFLGHVVAKKLGKPSSGAFLEGIIANMFVNLAILAYMLLKEESAKMTVILSAIFMFVFLSNEHLIANFASFMLAAFSHIEHIKGFTLLNIIRQWTLVFFGNWIGGGVFIGLAYAWLNKTKTSHHE

SEQ ID NO: 6601 - DNA, 879 bp, Streptococcus pyogenes
atgataatgacgagccctttcttgttgaaagggcttgcattttttaggaaaattgatatactaaagtgtgtgtttgtgaatacagtaacaaaaggagatatcatgaaaacaccagaacagattttagaagcaactattcatattggggaacataaggttaccaaaacttttttggctaaatctatcttaggctttattggtggagcgatgattagccttggttatttactatacgtgagaattgccgccagtggtttagaaacttttggtgctttttccagtatcgtaggagcttgtgcttttccgattggtctaattattattttaatggcgggtggagaattaattacagggaacatgatggctgtttctgcagctttgttggccaaaaaaattaagtttagcgagcttgccaagaattggcttatcattaccttgtttaatgtgattggagctgtttttgtagcttttgtgtttggtcattttctaggcttaacatcagctggtatttttaaagaagaagtgattgaggtggcccatgctaaaatagcagcgagccctttgcaggcactagtatcaggaattggttgtaactggtttgttggtttggccttgtggctatgctatggggcaaatgatgctgctggtaaattccttggtacttggtttcctgtcatgacctttgtagcccttggttttcagcatagtgtagcaaatgcttttgtcattcctgctgctatttttgaaggaggagcaacatggttggattttgtcactaattttatttttgtctatagtggtaatattatcggtggagccatttttgttagttttttatattttaaagtttactatcatccgcaaaagagtaaaactcaa

SEQ ID NO: 6602 - protein, 293 aa, Streptococcus pyogenes
MIMTSPFLLKGLAFFRKIDILKCVFVNTVTKGDIMKTPEQILEATIHIGEHKVTKTFLAKSILGFIGGAMISLGYLLYVRIAASGLETFGAFSSIVGACAFPIGLIIILMAGGELITGNMMAVSAALLAKKIKFSELAKNWLIITLFNVIGAVFVAFVFGHFLGLTSAGIFKEEVIEVAHAKIAASPLQALVSGIGCNWFVGLALWLCYGANDAAGKFLGTWFPVMTFVALGFQHSVANAFVIPAAIFEGGATWLDFVTNFIFVYSGNIIGGAIFVSFLYFKVYYHPQKSKTQ

SEQ ID NO: 6603 - DNA, 222 bp, Streptococcus agalactiae
ttgataaataaaggaaagtatcatattaattttttaggcaatccattcaaaatgatatttaaaacaacagctgtcagggttgagataacaataccatttgtcaaaaacatttgtaaagtattaggaagactaatgaagagatttgtcccattaaaacctactcctgctgcaattgatacggctgcaatgataaagttatgctcattatgctcaaaatcaacc

SEQ ID NO: 6604 - protein, 74 aa, Streptococcus agalactiae
MINKGKYHINFLGNPFKMIFKTTAVRVEITIPFVKNICKVLGRLMKRFVPLKPTPAAIDTAAMIKLCSLCSKST

SEQ ID NO: 6605 - DNA, 279 bp, Streptococcus agalactiae
atgagcccaataaggattgaaattgacttcaaaaagccttttgcgaaaatattaattaataaaacaacaccaatcgttaccagtgataaagttaaagattgtaagcttggctcttttgcattatcacccatatttcccatcgcaactggtattaatgtcaaaccaattgtagtaataactgatcctgttacaattggaggaaagaaatttgcaactttagaaaaaatgccagcaactaaaacgacatatattcctgaagcaattaaagctccaaacata

SEQ ID NO: 6606 - protein, 93 aa, Streptococcus agalactiae
MSPIRIEIDFKKPFAKILINKTTPIVTSDKVKDCKLGSFALSPIFPIATGINVKPIVVITDPVTIGGKKFATLEKMPATKTTYIPEAIKAPNI

SEQ ID NO: 6607 - DNA, 1272 bp, Streptococcus agalactiae
atgaaatttaatgtgcaaagtaattcgcaagcagcacttctaggcttgcaacacctgttagctatgtatgcaggatccattcttgtacctatcatgattgctagtgctcttggttataatgctaagcaactaacttatcttattgcgacagatatttttatgtgtgggattgccaccttattacaattacgattaagtaagcactttggagtgggtcttccagttgtattagggtgtgcctttcagtctgtagctcctttatcaattattggtgcacaacaaggttctggctatatgtttggagctttaattgcttcaggaatatatgtcgttttagttgctggcattttttctaaagttgcaaatttctttcctccaattgtaacaggatcagttattactacaattggtttgacattaataccagttgcgatgggaaatatgggtgataatgcaaaagagccaagcttacaatctttaactttatcactggtaacgattggtgttgttttattaattaatattttcgcaaaaggctttttgaagtcaatttcaatccttattgggctcatttcaggtacaattcttgcagcatttatgggcttagttgatgcttctgtggtagcagatgcaccacttgtacatattccgaagccattttattttggagctcctagatttgaatttacttctattttaatgatgtgtattattgcaacagtttctatggtagaatcaacaggtgtttaccttgcgctttcagatattacaaacgataaattagacagtaagagacttcgtaatggttaccgttcagaaggattggcagtattacttggcggcttatttaatacctttccatataccggtttttctcaaaatgtgggactggtacagatatctgggatacgtacgcgtaagccgatatattttacagctctcttcttagttatacttggcttgttacctaaatttggcgcaatggctcaaatgattccaagtccagttcttggtggtgccatgttagttttatttggtatggtagcacttcaagggatgaaaatgcttaatcaggttgattttgagcataatgagcataactttatcattgcagccgtatcaattgcagcaggagtaggttttaatgggacaaatctcttcattagtcttcctaatactttacaaatgtttttgacaaatggtattgttatctcaaccctgacagctgttgttttaaatatcattttgaatggattgcctaaaaaattaata

SEQ ID NO: 6608 - protein, 424 aa, Streptococcus agalactiae
MKFNVQSNSQAALLGLQHLLAMYAGSILVPIMIASALGYNAKQLTYLIATDIFMCGIATLLQLRLSKHFGVGLPVVLGCAFQSVAPLSIIGAQQGSGYMFGALIASGIYVVLVAGIFSKVANFFPPIVTGSVITTIGLTLIPVAMGNMGDNAKEPSLQSLTLSLVTIGVVLLINIFAKGFLKSISILIGLISGTILAAFMGLVDASVVADAPLVHIPKPFYFGAPRFEFTSILMMCIIATVSMVESTGVYLALSDITNDKLDSKRLRNGYRSEGLAVLLGGLFNTFPYTGFSQNVGLVQISGIRTRKPIYFTALFLVILGLLPKFGAMAQMIPSPVLGGAMLVLFGMVALQGMKMLNQVDFEHNEHNFIIAAVSIAAGVGFNGTNLFISLPNTLQMFLTNGIVISTLTAVVLNIILNGLPKKLI

SEQ ID NO: 6609 - DNA, 1281 bp, Streptococcus pyogenes
atgacacattcaacaaagcaggaacattctcactcgcaatcagctgtccttggcttacagcatgtgctttcgatgtatgccggatctattttagtaccaattatgatcgcaggtgctttaggttattccgctagagagttgacctacctgatttcgacagatattttcatgtgtggtgtggctactttcttacagttaaagttaaccaagcatacgggagtgggattaccagttgttttaggatgtgcttttcaatcagtggcacctctatccattattggagcgcaacaaggttcaggtgccatgtttggagccctcattgcgtcaggaatttatgtcattttagtggcaggtattttttctaagattgctcgtttcttcccaccaattgttacaggatcggtcattaccgttattggcttaagtctcgtaggtgttgctatggggaatatgggagataacgtcaaagagcctacggcacaaagcatgatgttatcattgttgacgattgtcattattcttttagtccaaaaatttaccaaaggttttgtgaaatccatttccattttgattgggcttgtagcgggaactttggtttcagctatgatgggattagtagatacaactcctgttgtagaggcttcttggattcatgtgccaaccccattttattttggcatgccaacttttgaaatcacttctattgtgatgatgtgtatcatcgcaacggtttctatggttgaatcaacaggtgtctacttagcgctttcagatttgactaatgatcaattagatgaaaaacgtttgcgcaatggttatcgctcagaagggatcgcagtctttctcggtgggttatttaacaccttcccttacactggtttttctcaaaacgttggacttgtccaaatctcaggtattaaaacccgtcgtccgatttactacgcagcaggtatccttgtggtcattggcctactccctaaatttagagcaatggcacaaatgattccaagcccagttcttggtggagccatgcttgttctctttggtatggttgctcttcaaggaatgcaaatgcttaatcgtgttgatttccaaaagaacgagtataattttattattgctgccgtttccatctcagcaggtttaggctttaatggcactaatctttttgccagcttaccagagacagctcaaatgttcttaacgaatggtattgtgattgccactttgacatctgttgtcttaaatttagttttaaatggcaaagacaaacaagatgaa

SEQ ID NO: 6610 - protein, 427 aa, Streptococcus pyogenes
MTHSTKQEHSHSQSAVLGLQHVLSMYAGSILVPIMIAGALGYSARELTYLISTDIFMCGVATFLQLKLTKHTGVGLPVVLGCAFQSVAPLSIIGAQQGSGAMFGALIASGIYVILVAGIFSKIARFFPPIVTGSVITVIGLSLVGVAMGNMGDNVKEPTAQSMMLSLLTIVIILLVQKFTKGFVKSISILIGLVAGTLVSAMMGLVDTTPVVEASWIHVPTPFYFGMPTFEITSIVMMCIIATVSMVESTGVYLALSDLTNDQLDEKRLRNGYRSEGIAVFLGGLFNTFPYTGFSQNVGLVQISGIKTRRPIYYAAGILVVIGLLPKFRAMAQMIPSPVLGGAMLVLFGMVALQGMQMLNRVDFQKNEYNFIIAAVSISAGLGFNGTNLFASLPETAQMFLTNGIVIATLTSVVLNLVLNGKDKQDE

SEQ ID NO: 6611 - DNA, 579 bp, Streptococcus agalactiae
atgaagttattggaagaacgtattcttaaagatggtgatgttttaggtgagaacattttaaaagttgattcttttttgactcatcaggtagattttgagttaatgcaggaaataggtaaagtttttgctgataaatataaagaagccggcattacgaaggttgttacaattgaagcatctggaattgcgccagcagtgtacgcagctcaagcattgggcgtaccaatgatatttgctaaaaaagctaagaacattactatgactgaaggtatcttaactgctgaagtgtattcttttacaaagcaagttacgagtcaagtttctattgtgagtcgctttttatctaacgatgatactgtactcatcattgatgactttttagcaaacggtcaagcggctaaaggattacttgaaattattggtcaagctggagctaaggttgctggtatcggaatcgttattgaaaaatctttccaagatgggcgtgatttgttagaaaaaacaggtgttccagttacttctcttgcccgtattaaagcgtttgaaaatggtcgagttgtttttgcggaggctgatgct

SEQ ID NO: 6612 - protein, 193 aa, Streptococcus agalactiae
MKLLEERILKDGDVLGENILKVDSFLTHQVDFELMQEIGKVFADKYKEAGITKVVTIEASGIAPAVYAAQALGVPMIFAKKAKNITMTEGILTAEVYSFTKQVTSQVSIVSRFLSNDDTVLIIDDFLANGQAAKGLLEIIGQAGAKVAGIGIVIEKSFQDGRDLLEKTGVPVTSLARIKAFENGRVVFAEADA

SEQ ID NO: 6613 - DNA, 579 bp, Streptococcus pyogenes
atgcagttacttgaagaacgcatcttaacagatggcaatattctaggagagaatattctaaaggtagataattttttaactcatcaagttgattaccggttgatgaaagcaattggtaaagtgtttgctcaaaaatatgctgaggctggcattacaaaagtggttacaatcgaagcttcaggtattgcaccagccgtatacgctgcagaagcaatggatgttcctatgatttttgcgaaaaaacataaaaacattaccatgacagaaggcattttgacagcagaagtttattctttcactaaacaagtgacgagcacggtgtctatcgctggtaaattcctatctaaagaagacaaggttttgattattgatgactttttagctaatggtcaggcagccaaaggcttgattgagattattggtcaagcaggggcacaagtcgtcggcgttggtattgtgattgagaaatctttccaagatggtcgtcgattgattgaagatatgggcattgaagtgacctcattagcccgtattaaaaactttgaaaatggtaatctaaacttcttggaggctgacgca

SEQ ID NO: 6614 - protein, 193 aa, Streptococcus pyogenes
MQLLEERILTDGNILGENILKVDNFLTHQVDYRLMKAIGKVFAQKYAEAGITKVVTIEASGIAPAVYAAEAMDVPMIFAKKHKNITMTEGILTAEVYSFTKQVTSTVSIAGKFLSKEDKVLIIDDFLANGQAAKGLIEIIGQAGAQVVGVGIVIEKSFQDGRRLIEDMGIEVTSLARIKNFENGNLNFLEADA

SEQ ID NO: 6615 - DNA, 981 bp, Streptococcus agalactiae
atgtttaacgatattcctgtttttgattatgaagatattcaattaataccaaacaagtgtattatatctagccgctcacaagctgacacaagtgtcaaacttggaaactatacctttaaacttccagtaatccctgctaatatgcagactattattgatgaagaggtagctgaaacattagcgtgtgaaggttatttttatattatgcaccgttttaatgaagaagaaagaaaaccttttatcaagcgtatgcatgataaaggtttaattgcatcgatttcggttggggtcaaagactatgaatatgacttcgtgacaagtctgaaagaagatgctcctgagtttatcactattgatattgcacatggccattctaacagtgttatagagatgatccaacacattaaacaagagcttccagaaactttcgttattgctggaaatgtaggaacgcctgaagctgttagagaattggaaaatgcaggtgcagatgcaactaaagttggtattggacctggtaaagtttgtattactaaagtcaagacaggttttggtactggaggttggcaattagctgccttacgttggtgttctaaagctgctcgcaagccaattattgctgatggtggtattcgaacacatggggatattgcaaaatctatccgctttggtgctagtatggtaatgattggttcgctgtttgctggtcaccttgaaagtcctggaaaacttgtggaagtagaaggacagcaatttaaagaatactatggctcagcttctgaatatcaaaagggagaacataaaaatgttgaaggtaagaaaattctattacctgttaaagggcgactagaggatactttgacagaaatgcaacaagatttgcaaagttctatttcttacgcaggaggaaaagaattggatagcttgagacacgttgattacgttattgttaaaaattctatttggaatggtgattccatt

SEQ ID NO: 6616 - protein, 327 aa, Streptococcus agalactiae
MFNDIPVFDYEDIQLIPNKCIISSRSQADTSVKLGNYTFKLPVIPANMQTIIDEEVAETLACEGYFYIMHRFNEEERKPFIKRMHDKGLIASISVGVKDYEYDFVTSLKEDAPEFITIDIAHGHSNSVIEMIQHIKQELPETFVIAGNVGTPEAVRELENAGADATKVGIGPGKVCITKVKTGFGTGGWQLAALRWCSKAARKPIIADGGIRTHGDIAKSIRFGASMVMIGSLFAGHLESPGKLVEVEGQQFKEYYGSASEYQKGEHKNVEGKKILLPVKGRLEDTLTEMQQDLQSSISYAGGKELDSLRHVDYVIVKNSIWNGDSI

SEQ ID NO: 6617 - DNA, 1002 bp, Streptococcus pyogenes
atgttaaaagaggagaaacttatgtttaatgacatccctgtatttgattatgaagatattcaactgattcctaacaagtgcattattactagtcgttcacaagcagatacaagtgtgacactcggaaaataccagttcaagctaccagttatcccagcaaatatgcaaaccattattgatgaaacaattgctgagcagttggcaaaagagggttatttttatattatgcatcgttttgatgaagatagccgcaaaccttttatcaaacgcatgcatgaacaaggcttgattgcatcaatctctgttggggttaaagcttgtgaatatgaatttgtgacctctttgaaagaggatgctcctgagtttatcaccattgatattgctcatggtcatgctaacagtgttattgatatgattaagcatatcaagactgaattaccagaaacatttgtcattgctggaaatgttggtacgccagaagctgtacgagaactcgaaaatgcaggtgctgatgctactaaagtaggcatcggtccaggcaaagtatgtatcactaaagttaaaaccggtttcggtacaggtggttggcagctagcagcactgcgctggtgcgcaaaggcagctcgtaaacctatcattgctgatggtgggattcgcacacatggtgatattgctaaatccatccgctttggagctagtatggtcatgattggatcgctttttgcaggacattttgaaagtcctggaaaaacggtagaagtggatggtgaaacgtttaaagaatattatggctcggcgtcagaatatcaaaaaggcgagcataaaaatgtagaaggcaaaaaaatcttattgcctacaaaaggtcacttatcagataccctgaccgaaatgcaacaggatttgcaatcgtccatttcttacgcgggtggtaaagatttagacagtttgcgtcatgttgattatgttatcgtcaaaaattctatttggaatggtgattccatt

SEQ ID NO: 6618 - protein, 334 aa, Streptococcus pyogenes
MLKEEKLMFNDIPVFDYEDIQLIPNKCIITSRSQADTSVTLGKYQFKLPVIPANMQTIIDETIAEQLAKEGYFYIMHRFDEDSRKPFIKRMHEQGLIASISVGVKACEYEFVTSLKEDAPEFITIDIAHGHANSVIDMIKHIKTELPETFVIAGNVGTPEAVRELENAGADATKVGIGPGKVCITKVKTGFGTGGWQLAALRWCAKAARKPIIADGGIRTHGDIAKSIRFGASMVMIGSLFAGHFESPGKTVEVDGETFKEYYGSASEYQKGEHKNVEGKKILLPTKGHLSDTLTEMQQDLQSSISYAGGKDLDSLRHVDYVIVKNSIWNGDSI

SEQ ID NO: 6619 - DNA, 1338 bp, Streptococcus agalactiae
atgactaaaaagggatggcgtattatgcctgccataattacaacggctatattaggtttttcagggattcttattgaaacatctatgaatgtcacttttccgcttttgatgaaagaatttggggttaaccccgctgttattcaatgggtgacaacaggaaatttgttagctgttgctgtgactgtgcctttgtcagcatttatgattaaaaatttatcagagagacaaatttttacattggcaaatgtgctttttttatctggtgttttaattgatagctttgcccctaatttagctatattgttagtagggagagttttgcaaggtgttgggacaggattagccctccctttattgtttcatatcattcttacacaaatcccgatggagcgtagaggactaatgatgggagtagctgctatggtcacacttttagcaccggcagttggacctacttatggcggtgttatttcaggaatgttaggatggaagatgatttttatgcttctggcaccaatacttatcatatccacctttataggtttggcttctattcccaaacgtcaagtaagaattaatgataaactcaattttcctgcctttatcagtttaggtattggcttggcaacccttcttttagctattgaaaagatgtctattttttacttattagtagctattgttagttttgttattttttactatttaaataaacagctagaatttttgaatttgaatgtttttaaagataaagatttctcaatcttattgtatggcgtcctggcttttcaaatgattcctctagcactttcgttcttattacctaacctcttgcaacttgttttacatcaaacttcaaccaaagctggtttgtttatgtttccaggtgcaatagcagtagtttttttatccccttttgcaggttatctcctggataaaattggtgcatttaagccaattatgataggcatctccctttctttgataggtttaattggtacagctatattcattcctgcgaagtctgttgtagtacttttagcctttgatatccttactaaaattggtatggggattggagcaagtaatatggttacgacagctttaacaaaactaaagccagcacagtcagcggatggtaatagtatcttgaatacactacaacaatttgcgggagcttttgcaaccgcagtagcctcacaaatttttaccatcggacaagtagctattccgaaaaatggagctataattggtagtcaatttgcagttctattcgttatcgttgttgttatcttagctattgtaggattaacttatcttcgaaaaagaaaagcaata

SEQ ID NO: 6620 - protein, 446 aa, Streptococcus agalactiae
MTKKGWRIMPAIITTAILGFSGILIETSMNVTFPLLMKEFGVNPAVIQWVTTGNLLAVAVTVPLSAFMIKNLSERQIFTLANVLFLSGVLIDSFAPNLAILLVGRVLQGVGTGLALPLLFHIILTQIPMERRGLMMGVAAMVTLLAPAVGPTYGGVISGMLGWKMIFMLLAPILIISTFIGLASIPKRQVRINDKLNFPAFISLGIGLATLLLAIEKMSIFYLLVAIVSFVIFYYLNKQLEFLNLNVFKDKDFSILLYGVLAFQMIPLALSFLLPNLLQLVLHQTSTKAGLFMFPGAIAVVFLSPFAGYLLDKIGAFKPIMIGISLSLIGLIGTAIFIPAKSVVVLLAFDILTKIGMGIGASNMVTTALTKLKPAQSADGNSILNTLQQFAGAFATAVASQIFTIGQVAIPKNGAIIGSQFAVLFVIVVVILAIVGLTYLRKRKAI

SEQ ID NO: 6621 - DNA, 690 bp, Streptococcus agalactiae
atgctaatacccaagaaaatagtggcttttgcctcaaatgaatctgaaaataatttctttattacgttaaagacttactttaattatttattttctatacaaatcattacagatatttcaactctcaatcatgcagattttgacggtagctttgcattccatgatatagaaactagcatacctcatctggtaattgactccaactacttagcgattagtcagactaactcaaaaatagaggctaacgatattaaaacgttctcggaactctccaaaacaatgaccgagtttcactatatgctaaattttgacttatttaaccatctcccatatcgttttagattgcataataaggacggtcaaacaatttattcgaaccataaacctgaagatccttttgatatttatcctgaagaagaatatcctatagacaaatgggttcaaaacagcctaatagagaaaaaagcgaaagagctacatttactcttacctagcgcatcacaagattatattctagtacaatcttataaacgcttagaaaatgatagtgggcaactagttggttatattgaacatgttcataatattaaaccactgctagagggttatttaaaagaatccggtcaagctatcgttggatggtctgatgtcacgtctggtgcttctatctctaacgatgattttgaacta

SEQ ID NO: 6622 - protein, 230 aa, Streptococcus agalactiae
MLIPKKIVAFASNESENNFFITLKTYFNYLFSIQIITDISTLNHADFDGSFAFHDIETSIPHLVIDSNYLAISQTNSKIEANDIKTFSELSKTMTEFHYMLNFDLFNHLPYRFRLHNKDGQTIYSNHKPEDPFDIYPEEEYPIDKWVQNSLIEKKAKELHLLLPSASQDYILVQSYKRLENDSGQLVGYIEHVHNIKPLLEGYLKESGQAIVGWSDVTSGASISNDDFEL

SEQ ID NO: 6623 - DNA, 2007 bp, Streptococcus agalactiae
ttggcagaaatgcaacatgtcaatcattcttcttttgataaagcatcaaaagcaggatttattattgctttaggcattgtttatggagatattggtacaagcccactctatacaatgcaatcattggttgaaaaccaaggtggtatttctagtgttacagaatcgtttatcttaggttctatatctttaatcatatggactctgacacttattacaactatcaagtatgtgcttgtagctttaaaggcggataatcaccacgaaggtggtattttttctttatatacccttgttcgaaaaatgacaccttggttaattgtgccagctgttattggaggtgcaaccttgttgtcagatggagctttgacgccagctgtaaccgtaacttcagccgttgagggattaaaagtagttcctagtttgcagcatattttccagaatcagagtaacgttatttttgcgaccttgtttattttactgttactttttgccatccaaaggtttggaacgggtgtgattgggaaattatttgggccaattatgtttatatggtttgcctttttaggtattagcggtctccttaatagttttgcccatccagaagttttcaaagcaattaatccatactacggtttgaaattgttatttagtccagagaatcataaaggtatttttattttaggatctattttcctggcgacaacgggggcagaagcactatactctgacttaggtcatgttgggcgtggaaatatacatgtttcatggccgttcgttaaggttgccattatactttcttattgtgggcaaggggcatggattttagctaataagaacgcaggaaatgaattgaatcccttttttgctagtatcccttcgcaatttacaatgcatgtcgttattttagctactttggcagctatcatcgcttcacaggcactgatttctggatcatttaccttagtttctgaagctatgcgactaaaaatattcccgcaatttcgttcaacttatcctggtgacaatattggtcaaacctacatacctgttattaattggttcttatttgccattacaacctctattgttttgctttttaagacttcagcgcacatggaagcagcatatggattagcgataacaattacgatgctaatgacaactattttactgtctttctttttaattcaaaaaggagtaaaaagaggtttagtcttattgatgatgattttctttggtattttagagggaatcttcttccttgcttcagctgttaaatttatgcatggaggctatgttgttgttattatagcagtagcaattatattcatcatgactatctggtataaaggtagtaaaattgtttcgcgttatgttaagttgttggatttaaaagattacatcggacaattagataaacttagacatgatcatcgttatccgatttatcatactaacgttgtttatttgacaaatcgtatggaagaagacatgattgataagtctatcatgtattctatccttgataagcgccctaaaaaagcacaagtttattggtttgtaaacattaaggtcactgatgaaccttatacagctgagtataaagttgacatgatgggaacagacttcattgtgaaggtagaactttaccttggatttaagatgcgtcagactgtgtcacgctatcttcgtacgattgtagaagaattacttgaaagtggacgtctgcctaaacaaggaaagacatacagcgttagacctgatagtaacgtaggagattttaggtttattgtccttgatgaacgtttctcaagtagtcaaaacctaaaacctggtgaacgatttgttatgctaatgaaatcatctataaagcattggacagcaacaccaatacgatggtttggtctacaattttccgaagttacaacagaagtagttcctttgatttttacagctaatcgaggtctaccaattaaagaaaaaagtgaacttacaacaactggagat

SEQ ID NO: 6624 - protein, 669 aa, Streptococcus agalactiae
MAEMQHVNHSSFDKASKAGFIIALGIVYGDIGTSPLYTMQSLVENQGGISSVTESFILGSISLIIWTLTLITTIKYVLVALKADNHHEGGIFSLYTLVRKMTPWLIVPAVIGGATLLSDGALTPAVTVTSAVEGLKVVPSLQHIFQNQSNVIFATLFILLLLFAIQRFGTGVIGKLFGPIMFIWFAFLGISGLLNSFAHPEVFKAINPYYGLKLLFSPENHKGIFILGSIFLATTGAEALYSDLGHVGRGNIHVSWPFVKVAIILSYCGQGAWILANKNAGNELNPFFASIPSQFTMHVVILATLAAIIASQALISGSFTLVSEAMRLKIFPQFRSTYPGDNIGQTYIPVINWFLFAITTSIVLLFKTSAHMEAAYGLAITITMLMTTILLSFFLIQKGVKRGLVLLMMIFFGILEGIFFLASAVKFMHGGYVVVIIAVAIIFIMTIWYKGSKIVSRYVKLLDLKDYIGQLDKLRHDHRYPIYHTNVVYLTNRMEEDMIDKSIMYSILDKRPKKAQVYWFVNIKVTDEPYTAEYKVDMMGTDFIVKVELYLGFKMRQTVSRYLRTIVEELLESGRLPKQGKTYSVRPDSNVGDFRFIVLDERFSSSQNLKPGERFVMLMKSSIKHWTATPIRWFGLQFSEVTTEVVPLIFTANRGLPIKEKSELTTTGD

SEQ ID NO: 6625 - DNA, 1998 bp, Streptococcus pyogenes
atgtctgatagccatcttactgcctttgacaaagcttcaaaagcaggttttattattgctttaggtattgtttatggagatattggaacaagccccctttatacgatacagtctctagttgaaaatcaaggaggggttaatcaggtttctgaatcctttattttaggatcaatctctttaattatttggacactgaccttaatcacaacaatcaagtacgttttgattgctctaaaagcggataaccaccatgaaggtgggattttttctttattcaccttggtacgtaaaatgtcaccgtggctcattattccggcgatgattggaggtgcaacacttttgtctgatggggctcttacacctgcggtaacagttacttcagctattgagggcttgaaagccgttcctggtctgagtcacatctaccaaaatcaaaccaatgtcattatcacaactctagtgattttaatagtcttgtttggtattcagcggtttggaacaggttttattggtaaaatttttggaccagttatgtttatctggtttagttttctaggtgttagtggtttttttaatacgttggggcatctggaaattttcaaggctatcaatccttactatgctctgcatttgctgtttagtcctgaaaaccatcgtgggatttttatcttggggtccatttttcttgcgacaacaggagctgaagctctttattcggatttaggacatgttggtcgaggaaatatttacgtgagctggccctttgttaagatgtgtattgtgttgtcttactgtggccaggctgcgtggattttagcgaataaacactcaggtattgaactaaaccctttctttgctagtgtgccatcacaattaagagtttaccttgttagtttggcaaccttggcagctattattgcctcacaggctcttatttcaggctcctttaccttggtttcagaggccatgcgtttgaaaattttccctttgtttcgtgtgacttacccaggggcaaatttggggcaattgtatattcctgtcattaactggattttatttgcagtgacctcttgtactgttttggcttttagaacatcagcccacatggaggcagcttatggtcttgctattaccatcaccatgttgatgacaacaatcctcttaaagtattacttaatcaagaaaggaacgagacccatcttggctcatttagtgatggctttctttgcccttgtagaattcattttcttcttggcttcagctatcaaatttatgcacggtggctatgcggttgttatcttggcacttgcaattgtctttgtcatgtttatctggcatgcgggcacacggattgttttcaagtatgtgaaatctcttaatttgaatgattacaaggagcagattaaacaacttcgtgacgacgtttgttttgacctctaccaaacaaatgttgtctacctatccaatcgtatgcaggatcatatgattgaccggtctattttatactccattttagacaagcggccaaaacgcgctcaagtttattggtttgtaaatgtccaggtaactgatgaaccttatacagctaagtacaaggtagatatgatgggaacggattatatggttcgagtcaacctttatcttggttttagaatgccacagactgtgccacgctatttgcgcacgattgttcaggatttgatggaaagtggccgtttacccaaacaagaacaggaatataccatcacacctggtcgtgatgttggtgattttcgctttgttttaatagaagaacgggtctccaatgcacgtcaattgagtaactttgaacgctttattatgcagactaaggcaagcattaaacatgttaccgctagtccaatgcgttggtttgggcttcaatattcagaagtaacccttgaagtggttcccttgattctatcagatgtcttgaagttaccaatcaaagaattggtgcctgtggaagacagtgaagca

SEQ ID NO: 6626 - protein, 666 aa, Streptococcus pyogenes
MSDSHLTAFDKASKAGFIIALGIVYGDIGTSPLYTIQSLVENQGGVNQVSESFILGSISLIIWTLTLITTIKYVLIALKADNHHEGGIFSLFTLVRKMSPWLIIPAMIGGATLLSDGALTPAVTVTSAIEGLKAVPGLSHIYQNQTNVIITTLVILIVLFGIQRFGTGFIGKIFGPVMFIWFSFLGVSGFFNTLGHLEIFKAINPYYALHLLFSPENHRGIFILGSIFLATTGAEALYSDLGHVGRGNIYVSWPFVKMCIVLSYCGQAAWILANKHSGIELNPFFASVPSQLRVYLVSLATLAAIIASQALISGSFTLVSEAMRLKIFPLFRVTYPGANLGQLYIPVINWILFAVTSCTVLAFRTSAHMEAAYGLAITITMLMTTILLKYYLIKKGTRPILAHLVMAFFALVEFIFFLASAIKFMHGGYAVVILALAIVFVMFIWHAGTRIVFKYVKSLNLNDYKEQIKQLRDDVCFDLYQTNVVYLSNRMQDHMIDRSILYSILDKRPKRAQVYWFVNVQVTDEPYTAKYKVDMMGTDYMVRVNLYLGFRMPQTVPRYLRTIVQDLMESGRLPKQEQEYTITPGRDVGDFRFVLIEERVSNARQLSNFERFIMQTKASIKHVTASPMRWFGLQYSEVTLEVVPLILSDVLKLPIKELVPVEDSEA

SEQ ID NO: 6627 - DNA, 99 bp, Streptococcus agalactiae
gtgtcatgggttgctagccaaccagaacacattaatattaatcgcatagaaataatgccagtcagtcaaacttatggacctcaacctgtttatcgtgat

SEQ ID NO: 6628 - protein, 33 aa, Streptococcus agalactiae
MSWVASQPEHININRIEIMPVSQTYGPQPVYRD

SEQ ID NO: 6629 - DNA, 156 bp, Streptococcus pyogenes
gtgaaggccatttatcaaggagcacatgccattcaacctcaaaatattgcgtcgaccgtatcatgggtgattcatcagccccctcatgttaatgttaatcgtattgagctgatgccagtgtcgcaaagttatggaccgcaaccagttactcgtgac

SEQ ID NO: 6630 - protein, 52 aa, Streptococcus pyogenes
VKAIYQGAHAIQPQNIASTVSWVIHQPPHVNVNRIELMPVSQSYGPQPVTRD

SEQ ID NO: 6631 - DNA, 651 bp, Streptococcus agalactiae
  misc_feature (1)..(651): n = a, c, g, or t
atgaaaacaagatcaaaacttgcagcaggctttttgacacttatgtcagttgccacattagctgcctgctcaggtaaaacatcaaatggaacaaatgttgttacaatgaagggcgacactattacagtctctgatttttatgatcaagtaaaaacatcaaaagctgcacaacaatcaatgcttacattgatcctctcacgtgtttttgatacacagtatggtgataaagtttcagataaaaaagtatcagaagcttataataagacagctaaaggctatggtaattcattttcaagcgcactttcacaagcaggtttgactccggaaggttacaaacaacaaattcgcacaactatgcttgtggaatatgctgtaaaagaagcagctaagaaagaattaacagaagcaaactataaagaagcatataaaaactatactcctgaaacttctgtacaagtaatcaaattggatgcagaagataaagctaaatctgtccttaaagatgtaaaggctgatggagctgattttgcaaagattgcaaaagaaaaaacaacagctactgataagaaagttgagtataaatttgattctgcagggacaaccctccctaaagaagttatgtcagcagcctttaagctagannnnnttaat

SEQ ID NO: 6632 - protein, 217 aa, Streptococcus agalactiae
  MISC_FEATURE (1)..(217): Xaa = Any Amino Acid
MKTRSKLAAGFLTLMSVATLAACSGKTSNGTNVVTMKGDTITVSDFYDQVKTSKAAQQSMLTLILSRVFDTQYGDKVSDKKVSEAYNKTAKGYGNSFSSALSQAGLTPEGYKQQIRTTMLVEYAVKEAAKKELTEANYKEAYKNYTPETSVQVIKLDAEDKAKSVLKDVKADGADFAKIAKEKTTATDKKVEYKFDSAGTTLPKEVMSAAFKLXXXN

SEQ ID NO: 6633 - DNA, 1053 bp, Streptococcus pyogenes
atgaaaaactcaaataaactcattgctagtgttgtgacattggcctcagtgatggctttagcagcttgtcaatcaactaatgacaatactaaggttatttcgatgaaaggtgatacaattagcgttagtgatttttacaatgaaacaaaaaacacagaagtatcgcaaaaagcgatgctaaatctggtaattagtcgtgtttttgaagctcaatatggtgataaggtttcaaaaaaagaagttgaaaaggcgtatcataaaacagctgaacagtatggcgcttcattctctgctgctttggcacaatcaagcttgacacctgagacttttaagcgtcagatccgctcttcaaaattagtagaatatgcggttaaagaagcagctaaaaaagaattgacaacacaagaatataagaaagcatatgaatcttatactccaacaatggcagtcgaaatgattactttagataatgaagagacagctaaatcagtcttagaggaactaaaagccgaaggcgcagactttacagctattgctaaagaaaaaacaacaacacctgagaaaaaagtgacctataaatttgattcaggtgcgacaaatgtaccgactgatgtcgtaaaagcggcttcaagtttgaatgagggtggcatatcagacgttatctcggttttagatccaacttcttatcaaaagaagttttacattgttaaggtgactaaaaaagcagaaaaaaaatcagattggcaagaatataagaaacgtttgaaagctatcattatagctgaaaaatcaaaagatatgaatttccaaaacaaggttattgcaaatgcattggataaagctaatgtaaaaattaaagacaaagcttttgctaatattttggcgcaatatgcaaatcttggtcaaaaaactaaagctgcaagtgaaagttcaacaaccagcgaatcatcaaaagctgcagaagagaacccatcagaatcagagcaaacacagacatcatcagctgaagaaccaactgagactgaggctcagacgcaagagccagctgcacaa

SEQ ID NO: 6634 - protein, 351 aa, Streptococcus pyogenes
MKNSNKLIASVVTLASVMALAACQSTNDNTKVISMKGDTISVSDFYNETKNTEVSQKAMLNLVISRVFEAQYGDKVSKKEVEKAYHKTAEQYGASFSAALAQSSLTPETFKRQIRSSKLVEYAVKEAAKKELTTQEYKKAYESYTPTMAVEMITLDNEETAKSVLEELKAEGADFTAIAKEKTTTPEKKVTYKFDSGATNVPTDVVKAASSLNEGGISDVISVLDPTSYQKKFYIVKVTKKAEKKSDWQEYKKRLKAIIIAEKSKDMNFQNKVIANALDKANVKIKDKAFANILAQYANLGQKTKAASESSTTSESSKAAEENPSESEQTQTSSAEEPTETEAQTQEPAAQ

SEQ ID NO: 6635 - DNA, 705 bp, Streptococcus agalactiae
gtggttcaatcttacagtaaaaatgctaatcataatatgcgtcgtccagtagttaaagaagaaattgttcaatatatgcgtcagcaccaaaaacaaaataatggctgtttagcagagttagaagcatttgctaaacaggaaaatatccctattatacctcatgaaacagcgacttattttcgttttttgatgcaaacattacaacctaagcacattttagaaattggaacagctattggtttttcggcccttttgatggcagaaaacgctcctgaagcaaagataacaacgatcgatcgtaatgaagagatgattgccttggctaaggaaaactttgcaaaatatgataatcacaatcagataacccttttggaaggcgatgctgtggatgtgttacaaacattggataaatcttacgattttgtattcatggattctgctaagtctaaatatatcgtttttttacctcaagtattaaaacatttagatgttggaggagtagttgttttagatgatattttccaaggtggagatattgcaaaacctatcgatgaagtgagaagaggtcagcgaactatctaccgaggtctgcaacgtttatttgactcgactttgcaacatcctgatttaactgctactttggtacctttgggagatggtttattgatgattcgtaaaaatgcagatcatattgtactagaagat

SEQ ID NO: 6636 - protein, 235 aa, Streptococcus agalactiae
MVQSYSKNANHNMRRPVVKEEIVQYMRQHQKQNNGCLAELEAFAKQENIPIIPHETATYFRFLMQTLQPKHILEIGTAIGFSALLMAENAPEAKITTIDRNEEMIALAKENFAKYDNHNQITLLEGDAVDVLQTLDKSYDFVFMDSAKSKYIVFLPQVLKHLDVGGVVVLDDIFQGGDIAKPIDEVRRGQRTIYRGLQRLFDSTLQHPDLTATLVPLGDGLLMIRKNADHIVLED

SEQ ID NO: 6637 - DNA, 705 bp, Streptococcus pyogenes
atggttaaatcatacagtaaaacagcaaatcataatatgcgtcgtcctgttgtcaaagaagagcttgttcattatatgcgaacacggcagaagcaaaccacaggttttttagcagagttagagcaattcgcaagacaagaaaacattcctattattcagcctgaggtcgtggcttatttcaggtttttattgcaaagcttacagccaaaacacattttggagattggcacagccattggtttttctgcgcttttaatggctgaaaatgcaccagatgcgacgattgtgactattgatcgtaatcgagagatgatcgattttgctaaagcaaattttgctaagtacgacagtcgccaacagatccgcctgttagaaggagatgcagcagatatattatctacacttgaaggaaattttgactttgtgtttatggattccgccaaatccaaatatattgtctttctaccagagattttaagactgctaaaagtcggtggtgtagtcattttggatgatgtctttcaaggaggtgacattacaaaaccgatcgaagatattcgacgaggtcagcgtactatttatcgtggcttacagtctttgtttgatgccaccttaactcatccaaacctaacaactagcctggtccctcttagtgatggattattaatgattcgtaaaaatcaagcagatattgtattaccagat

SEQ ID NO: 6638 - protein, 235 aa, Streptococcus pyogenes
MVKSYSKTANHNMRRPVVKEELVHYMRTRQKQTTGFLAELEQFARQENIPIIQPEVVAYFRFLLQSLQPKHILEIGTAIGFSALLMAENAPDATIVTIDRNREMIDFAKANFAKYDSRQQIRLLEGDAADILSTLEGNFDFVFMDSAKSKYIVFLPEILRLLKVGGVVILDDVFQGGDITKPIEDIRRGQRTIYRGLQSLFDATLTHPNLTTSLVPLSDGLLMIRKNQADIVLPD

SEQ ID NO: 6639 - DNA, 696 bp, Streptococcus agalactiae
gtggaaatacctacccaagttatgatttttatgagaccaaaactgctattgtcaaaaaagaagggaaataggatgaagaagcttacttttatttgggatttagatgggacattaatagattcgtatgtaccaattatggaagctcttgaagaaacctatcgtcattttggtttaatatttgataaagaattaatccatgaatatattttacaggaatcagtggggaaattattggtaaacctttcagaggaagagcaaatacctcatgaaaaactgaaagcatattttacaaaagaacaagaaagtcgagattctaaaatacatttaatgccatatgcaaaagagattttagaatggaccaaagaacaagatatccccaattttatgtatacacataaaggagcaagtacgcattcagtgttggaaaccttgcagatctctcattattttgatgaaattttaactggtgtttcgggattcgagcgaaaaccacatccacaagggattaattatttagttaaacgatattctttagataaatcaatgacttattacataggagatcgtccactagatttggaggttgctcaaaatgctggtataaaatccataaacttaaggttagagaattccaaagaaaactataatatttcaagtctcaaagatataatatcacttgatttcactcgtttggat

SEQ ID NO: 6640 - protein, 232 aa, Streptococcus agalactiae
MEIPTQVMIFMRPKLLLSKKKGNRMKKLTFIWDLDGTLIDSYVPIMEALEETYRHFGLIFDKELIHEYILQESVGKLLVNLSEEEQIPHEKLKAYFTKEQESRDSKIHLMPYAKEILEWTKEQDIPNFMYTHKGASTHSVLETLQISHYFDEILTGVSGFERKPHPQGINYLVKRYSLDKSMTYYIGDRPLDLEVAQNAGIKSINLRLENSKENYNISSLKDIISLDFTRLD

SEQ ID NO: 6641 - DNA, 1803 bp, Streptococcus agalactiae
atgtcagacaatcgctcacatattgaagaaaaataccaatgggatttaactactgtctttgcgactgatgagttatgggaaactgaagtggtagagcttactcaagccatcgataatgcaaagggtttttcaggtcatctgttggactcaagccaatctttattggagatcacggaggttgaattagatttatctcgccgtttagaaaaagtttatgtctatgcttcaatgaaaaatgaccaagacaccactgttgcgaaatatcaagaatttcaagcgaaagcgacagcgctctatgcaaaatttagtgaaacattttcgttttacgagccagaactattgcaactttcagagtctgattaccagtcattccttttagaaatgcctgacttgcaaaaatatgatcatttctttgagaaaatatttgcaaataaacctcatgtcttatctcaaaacgaagaagaattgttagctggtgctagtgagatttttggagcagctggtgagacatttgaaatccttgataatgcagatatggtcttcccagttgtaaaaaatgcaaaaggtgaggaagttgagcttacacatggtaatttcatttcccttatggaatctagcgataggacggttcgaaaagaagcatatcaagctatgtatagcacatatgaacaattccagcatacttacgctaaaacattacaaacaaatgtgaaatctcaaaattttaaggctcgtgtgcatcattatcaatcagcacgccaatcagctctatctgccaattttattccagaagaggtctacgaaactctaattaagacagttaatcatcatttaccgctcttacatcgttatatgaagttgcgtcaaaaagttcttgggctagatgatttgaagatgtatgacgtatatacacccctttctcaaatggatatgagttttacttatgatgaagctctaaaaaaatcagaggaggttctagctatttttggcgaagcatattctgaacgtgttcatcgtgcttttactgaacgttggattgatgtccatgttaacaaaggaaagaggtcaggcgcttattcaggtggatcttatgacactaatgctttcatgcttcttaactggcaagatactttagataatctttatacgctggtgcatgaaactggacatagtctacactcgacgtttactcgtgaaaatcaaccctatgtttatggtgattattctattttcctagctgaaattgcatcaacaacaaatgaaaatatattaacagaaacccttttgaaagaagttaaagatgataaaaatcgctttgcaattctcaatcattatttggacggtttcaaaggaacaatttttaggcaaacacagttcgctgaattcgaacatgccattcatgtagctgatcaggaggggcaagtactaactagcgaatacttaaacaatctttacgctgagcttaatgaaaaatattatggtttgactaaagaagataatcattttattcaatatgaatgggcaagaattccacacttttactacaattattatgttttccaatatgcaaccggcttcgcagcagcaaattatttagcagagcgtattgtaaacggtaatccggaggataaagaggcctacctaaattaccttaaagctgggaattcagattaccctctaaacgtcattgctaaagctggtgttgatatgactagtgcagactatctggatgcagcttttagagtatttgaagagcgtttagtggaactggaaaatcttgtagcaaaaggcgtccataatgat

SEQ ID NO: 6642 - protein, 601 aa, Streptococcus agalactiae
MSDNRSHIEEKYQWDLTTVFATDELWETEVVELTQAIDNAKGFSGHLLDSSQSLLEITEVELDLSRRLEKVYVYASMKNDQDTTVAKYQEFQAKATALYAKFSETFSFYEPELLQLSESDYQSFLLEMPDLQKYDHFFEKIFANKPHVLSQNEEELLAGASEIFGAAGETFEILDNADMVFPVVKNAKGEEVELTHGNFISLMESSDRTVRKEAYQAMYSTYEQFQHTYAKTLQTNVKSQNFKARVHHYQSARQSALSANFIPEEVYETLIKTVNHHLPLLHRYMKLRQKVLGLDDLKMYDVYTPLSQMDMSFTYDEALKKSEEVLAIFGEAYSERVHRAFTERWIDVHVNKGKRSGAYSGGSYDTNAFMLLNWQDTLDNLYTLVHETGHSLHSTFTRENQPYVYGDYSIFLAEIASTTNENILTETLLKEVKDDKNRFAILNHYLDGFKGTIFRQTQFAEFEHAIHVADQEGQVLTSEYLNNLYAELNEKYYGLTKEDNHFIQYEWARIPHFYYNYYVFQYATGFAAANYLAERIVNGNPEDKEAYLNYLKAGNSDYPLNVIAKAGVDMTSADYLDAAFRVFEERLVELENLVAKGVHND

SEQ ID NO: 6643 - DNA, 1803 bp, Streptococcus pyogenes
atgactgataatcgcagccatttagaagaaaaatacacttgggatttgagcactatttttgcaacagataaggattgggaagctgaagtcagtgacttagctactgaagttgaggcatctaaaggttttgctggtcatttgctggattctagtgctaatttgttaaaggttacaaaaacatatttagaattggctcgtcgtgtggagaaagtctatgtttatgctcacatgaaaaatgaccaagacactactgttgccaagtatcaagaataccaagctaaggcttcaggcttgtatgcaaagtttagcgaagtcttttcattctatgatccagaagtgatgatgcttcatcaagaagactatcaggcttttcttactgaaacccctgagttgaaagtgtacaaccatttctttgacaaattattccaagcccgcgaacatgttcttagtcaagcagaagaggaattattagcaggagctcaagaaattttcaatggtgcggaagaaacctttagtattcttgataacgctgacattgtctttccagtagttaaaaatgataagggggaagatgttgaattaacccatggtaacttcattagcctaatggaatctaaggaccgtagcgttcgccaagctgcttatgaagccatgtatagtacttatgaacagttccaacatacttacgctaaaaccttgcaaaccaatgtgaaagtgcaaaactataaggcgcgtgttcataaatacgattcagcacgtcaagctgccatggctgctaactttattccagaagctgtttacgacactttattagaaacggttaataaacatttgccactcttacaccgttatttgaaattgcgtcaagaggttcttggtttagacgatttgaagatgtatgatgtttacacaccattatctgaaacagatctagccattggttatgatgaggctttggaaaaggctgagaaggttttggctgtttttggtaaagattacgcagatcgtgtgcatcgtgcttttaccgaacgttggattgatgttcatgtcaataaagggaagcgctctggggcttattcaggtggttcctatgataccaatgcctttattctgttgaattggcaagatacacttgataatctttacacacttgtccacgaaacaggccacagtttgcattctactttcactcgtgaaacacagccttatgtgtatggggattatagtatcttcttggcagaaattgcatccacaacgaatgaaaatattatgacagaagctctcttaaatgaggttcaagatgagaaagaacgctttgccattttaaaccattacctcgatggtttccgtggaacagttttccgtcaaacccaatttgctgagtttgaacatgccattcatcaagctgatcaaaaaggagaagtgttaacaagtgaataccttaaccagctatacgctgatttaaatgaaaaatattatggtttaagtaaaaaagataatcattttattcagtatgaatgggcacgtattcctcatttctattacaattattatgtttaccaatatgcaacaggttttgcagctgcaagctatttagcagataagattgtgcatggcacacaagatgatatcgatcattacttggcctacctcaagtcaggaaattctgattacccacttgaagtgattgctaaagcaggcgttgatatggaaaaaggtgattatttggaagccgcctttaaagtctttgacgaacgtctaacagaacttgaagtactcgtgtccaaaggcatacacaaaagc

SEQ ID NO: 6644 - protein, 601 aa, Streptococcus pyogenes
MTDNRSHLEEKYTWDLSTIFATDKDWEAEVSDLATEVEASKGFAGHLLDSSANLLKVTKTYLELARRVEKVYVYAHMKNDQDTTVAKYQEYQAKASGLYAKFSEVFSFYDPEVMMLHQEDYQAFLTETPELKVYNHFFDKLFQAREHVLSQAEEELLAGAQEIFNGAEETFSILDNADIVFPVVKNDKGEDVELTHGNFISLMESKDRSVRQAAYEAMYSTYEQFQHTYAKTLQTNVKVQNYKARVHKYDSARQAAMAANFIPEAVYDTLLETVNKHLPLLHRYLKLRQEVLGLDDLKMYDVYTPLSETDLAIGYDEALEKAEKVLAVFGKDYADRVHRAFTERWIDVHVNKGKRSGAYSGGSYDTNAFILLNWQDTLDNLYTLVHETGHSLHSTFTRETQPYVYGDYSIFLAEIASTTNENIMTEALLNEVQDEKERFAILNHYLDGFRGTVFRQTQFAEFEHAIHQADQKGEVLTSEYLNQLYADLNEKYYGLSKKDNHFIQYEWARIPHFYYNYYVYQYATGFAAASYLADKIVHGTQDDIDHYLAYLKSGNSDYPLEVIAKAGVDMEKGDYLEAAFKVFDERLTELEVLVSKGIHKS

SEQ ID NO: 6645 - DNA, 945 bp, Streptococcus agalactiae
atgttaattgctaaagacaaacaaggaaatttaattaatctactcgagtctcatccgggaaagggacagtatttttgtccaacttgttgttcagctgtaaggttaaaggcaggtcgaatcatgagaagacactttgcacatattagtctaaaaaattgtcagttttatcatgaaaatgagtctaatgagcacttgcaattaaaagcaaagttatatatgagtttaagtagagagaatgaaactatgctcgagcatcatttgccagaaattaatcagattgcagatttatttgtgaatgagacattggctttagaagttcagtgtagccgactatcagagcagcgactcagggagcgaacaaaagcatatctacaggcagactttcaagtgagatggttactaggggaaaaactctggttaaagcatcgtttaacaaatctacataaacaatttttacaattttctcaaagtatcggatttcatatttgggagttagatttgaggttagaagtactgagactaaaatatttgatttacgaagatttacgcggacatgtctattacttaagtaaaacttgccctcttagtggagacgttctagcatttttgaagtggccataccaatcaaaaaatctaaatttttataaggttaaacaagacagaaatatcagagattatgtgcgtcagcagttacgctatggcaatcaattttggttacgaaaacaagaaaaggcctacctttctggtcagaatctattgacccaagagctaatgatgttttttcctcaaatacagccaccacgtgtagatactgatttttgtcaaataacaaattctctaacatcgttttatcagaattttacaaattattatcaaaaaaataagaataacttagaccaaacactttatccccctgtattttatgataaaatagtcactaagaat

SEQ ID NO: 6646 - protein, 315 aa, Streptococcus agalactiae
MLIAKDKQGNLINLLESHPGKGQYFCPTCCSAVRLKAGRIMRRHFAHISLKNCQFYHENESNEHLQLKAKLYMSLSRENETMLEHHLPEINQIADLFVNETLALEVQCSRLSEQRLRERTKAYLQADFQVRWLLGEKLWLKHRLTNLHKQFLQFSQSIGFHIWELDLRLEVLRLKYLIYEDLRGHVYYLSKTCPLSGDVLAFLKWPYQSKNLNFYKVKQDRNIRDYVRQQLRYGNQFWLRKQEKAYLSGQNLLTQELMMFFPQIQPPRVDTDFCQITNSLTSFYQNFTNYYQKNKNNLDQTLYPPVFYDKIVTKN

SEQ ID NO: 6647 - DNA, 960 bp, Streptococcus pyogenes
gtgacaaaaatattaaccgctttagatgataagaatcagctcatttcgctagtaactcagcctatttcaacgaaaccgccttttcgttgcccagcttgcaaatctcctgttcgcttgcgtcaggggacaattagacgacctcattttgcccatgtacaactagctcattgtcaattccaagcagaaaatgaatctgaggaacatttgacgttgaaggcaaaactttacaccagtttagtccgaacagaagctgtctgtattgaaaaatatcttcctgagctgcaacagatagcagacctttgggtgaatgataagttagccttagaaattcagtgcagtcccttgccagttgagcgtctaaagaaacgcaccaaagcctatcaagaaaaggggtatccggtacgatggttactgggaagaaaattgtggcttaacactcacttaactgctttgcaaaaacagtttctttacttttcatctagtttgggctttcatttgtgggagctggatgcagctgcaaatctgctacgtctcaaatatttaatccatgaagacttatttggtaaggtaagttacctaaccaaaaccatttctttagaccacaatattatggaaatgtttcggttaccctatcagcaagaaatcctttattcttatcagaaaaaaatgactgtgaacctatctaaaagaatacaaagagctcttttagctagacacccgaaatggctacgacgacaagaaaaggcttacttatcaggctataatttacttatgttaacaactgatgctttttatcctcaatggagaccagttcaatcttccagcggtttttgtcaaattaaaggaaatcttcgcccttattatgaaagttttaaagtctattataaaaaagaaaaggataagaaggtgcaaacgcttttttcaccaaaatattatgttaaaatggatagtaatagaaaa

SEQ ID NO: 6648 - protein, 320 aa, Streptococcus pyogenes
VTKILTALDDKNQLISLVTQPISTKPPFRCPACKSPVRLRQGTIRRPHFAHVQLAHCQFQAENESEEHLTLKAKLYTSLVRTEAVCIEKYLPELQQIADLWVNDKLALEIQCSPLPVERLKKRTKAYQEKGYPVRWLLGRKLWLNTHLTALQKQFLYFSSSLGFHLWELDAAANLLRLKYLIHEDLFGKVSYLTKTISLDHNIMEMFRLPYQQEILYSYQKKMTVNLSKRIQRALLARHPKWLRRQEKAYLSGYNLLMLTTDAFYPQWRPVQSSSGFCQIKGNLRPYYESFKVYYKKEKDKKVQTLFSPKYYVKMDSNRK

SEQ ID NO: 6649 - DNA, 1149 bp, Streptococcus agalactiae
ttgaattcaaaactttcattgaaattgactattttatcgatttctatctttttgatgtctcatttagcaattgctcctgcaattcctaaattgtatgccttttaccatactcaaaaccctcatattggactagcttcagtagagagtttagttactattccagctatgatgattactatttttgttattttgagtaattttgtagtcacaaaacttggcaaaaaaaacacggtcttacttggtttatgtttaatcttaatgtctgggtttatctcattttttacaagtaatttttcacttgcgatggctagtcgactacttttgggtattggtattggtctctataattcgctatcaattagtatcataacggatttatatgaggctgatgagagagccagtatgattggtcttagaacagcatcactcaatatcggtaaagccttaactacatttattgttggattggttttagctattggtgtgaattatatttatttggtttaccttctggttattcctgttttctttttcttttggaaaaatgttccagaggttgaaaatcaaacacatacccttaaagctagtacaacatttgatactaaagcggctttgttgatgctcatcacgttcttagtaggtattgcttatataggagcaactgtcaaaattccaaccttactagtgacaaaatatcactacgcgacgagcttctctagtaatatgttaactctccttgcttttagtggtattttagttggatctgtatttggaaaattagttaaagtattccaagagaagacgctattaatcatgattctagctatgggaataggtaatgtgctatttgctttagctaataatcagatcatttttatcgtagctagtattttaataggagctagttttgttggcaccatgtcttctgtattcttttatatttcaaaaaactatgcaaaagaacataataactttatcacaagccttgccttaacagctggtaatataggagttattttgacaccgcttattttaacgaaacttccaagccagctacatctggaaccttttatgacaccatttttaataacaagtgggctgatggtgattaatgtctttgtttacctagttttaatgtcaaaaaataaa

SEQ ID NO: 6650 - protein, 383 aa, Streptococcus agalactiae
MNSKLSLKLTILSISIFLMSHLAIAPAIPKLYAFYHTQNPHIGLASVESLVTIPAMMITIFVILSNFVVTKLGKKNTVLLGLCLILMSGFISFFTSNFSLAMASRLLLGIGIGLYNSLSISIITDLYEADERASMIGLRTASLNIGKALTTFIVGLVLAIGVNYIYLVYLLVIPVFFFFWKNVPEVENQTHTLKASTTFDTKAALLMLITFLVGIAYIGATVKIPTLLVTKYHYATSFSSNMLTLLAFSGILVGSVFGKLVKVFQEKTLLIMILAMGIGNVLFALANNQIIFIVASILIGASFVGTMSSVFFYISKNYAKEHNNFITSLALTAGNIGVILTPLILTKLPSQLHLEPFMTPFLITSGLMVINVFVYLVLMSKNK

SEQ ID NO: 6651 - DNA, 717 bp, Streptococcus agalactiae
atgcgtttagataaattattaggtcaggcaggatttgggtctagaaatcaggttaagaaattaatttgttctaggcaagtttctgtagatggtcaaattgttacaaaggataatgttattgtagatagtggtctacaatcgatttttgtaggaaaagagagggtctgcctaaaagaaagttcttattaccttctttataagccatcaggagttgtttcagcagttagagattcagaacataaaacagtcatagacttaattagcgaaaaagataaggtggagggattgtatccgattggtcgtctagatcgtgatacggaagggcttttaatagtcacgaataatggtccactgggttaccgaatgttacatccaaaacaccacgttgcaaaaacatattatgttgaagtaaatggtttcttggaaagagatgctattaccttttttgaagaaggagttgtatttgacgatggaacaaagtgtaaaccagctgaattaacgattgatacggctaataatgacaaaagtaccgcaagaataactatcacagaagggaaatttcaccaagtaaaaaagatgtttcttgcatatggcgttaaagttatatacttgaggcgtatttcttttggtgacttgaggcttgatatgaatttgaaaccaggtcagtatcgtagattgagagattcagaggcagctatcttaaaaaggtatttagat

SEQ ID NO: 6652 - protein, 239 aa, Streptococcus agalactiae
MRLDKLLGQAGFGSRNQVKKLICSRQVSVDGQIVTKDNVIVDSGLQSIFVGKERVCLKESSYYLLYKPSGVVSAVRDSEHKTVIDLISEKDKVEGLYPIGRLDRDTEGLLIVTNNGPLGYRMLHPKHHVAKTYYVEVNGFLERDAITFFEEGVVFDDGTKCKPAELTIDTANNDKSTARITITEGKFHQVKKMFLAYGVKVIYLRRISFGDLRLDMNLKPGQYRRLRDSEAAILKRYLD

SEQ ID NO: 6653 - DNA, 582 bp, Streptococcus pyogenes
atgcgtttagataaattattagaaggtacaaaagttggctctagaagtcaagtgaagaaactgattaaggctcaaggggtttgggttgatcacatgcctgccagaaatggtcgacaaaatgttgatcctggcttgcaactgattgaggtgactggacagcgagtgacgcatcctaaacattcttacattatcctcaacaagccatcaggggtggtctcagctaagaaagatactaactatttaaccgttattgatcagcttgctgaagaagataaaagtccagacttgtatcctgttggcagattggatagagataccgaagggttggttttactcactgataatggtcccctagggtttcggatgttgcaccctagtcatcatgtttctaaaacgtatcttgtaaccgttaatggcttgttagcagaagatgcctcagatttttttgcagctggtatttgtttcccaacaggtgaacaatgccaaccagctcaattgactattcttaaagccgatacagaccagtcacaggctagtttgaccatttcagaaggaaaatttcaccaagtgaaaaaatgtttt

SEQ ID NO: 6654 - protein, 194 aa, Streptococcus pyogenes
MRLDKLLEGTKVGSRSQVKKLIKAQGVWVDHMPARNGRQNVDPGLQLIEVTGQRVTHPKHSYIILNKPSGVVSAKKDTNYLTVIDQLAEEDKSPDLYPVGRLDRDTEGLVLLTDNGPLGFRMLHPSHHVSKTYLVTVNGLLAEDASDFFAAGICFPTGEQCQPAQLTILKADTDQSQASLTISEGKFHQVKKCF

SEQ ID NO: 6655 - DNA, 1017 bp, Streptococcus agalactiae
ttgctaattctttttaaaatctttatactactaattagtaatagaaaaacaaaggagattatcatgggacttttagtagatggcaaatgggttgatcaatggtatgatactgcatcaactggtggtaaattcgtccgaaccgttacacaattccgtcattgggttactaaagatggttcagcagggcctagtggggatgcaggttttaaagcagaatctggacgatatcatctctacgtttcactagcttgcccttgggcatcacgtgtattaatcatgagaaagcttaaaaatctagaatctcatatctctatctccattgttaaccctttaatgttggagaatggttggacttttcaagaatataaaggcgttattcctgatatgattaaccaaagccaatacctttaccaaatctatcaagcaagtcaaagtgattatacaggacgcgtgacagtccctgttctttgggataaaaaattccatacaatcgttaacaatgaatcatctgaaattatgcgtatgttaaatactgcatttaatcatattactggaaatactgacgattactatcccgattccttacaaggacaaattgacgaaatgaataattttatttatccaaaaataaataatggtgtctataaagctggttttgccacttctcagaacgtttatcaaaaggaagttgaaaccttattcacagctttagatcagttagaaaaacacttatctgataaccattatcttgttggagaacaatttaccgaagctgatattcgccttttcacaactttagttcgctttgacaccgtttattatggtcattttaaatgtaatttaaaagcgctacatgattacccacatttatggcattatacaaaacgtatttacaacctacctggaattgctgagacagttaattttgatcatatcaaaaaacactattacggtagccataaaaccattaaccctactggtattattccagctggacctaacttagactggacaatt

SEQ ID NO: 6656 - protein, 339 aa, Streptococcus agalactiae
MLILFKIFILLISNRKTKEIIMGLLVDGKWVDQWYDTASTGGKFVRTVTQFRHWVTKDGSAGPSGDAGFKAESGRYHLYVSLACPWASRVLIMRKLKNLESHISISIVNPLMLENGWTFQEYKGVIPDMINQSQYLYQIYQASQSDYTGRVTVPVLWDKKFHTIVNNESSEIMRMLNTAFNHITGNTDDYYPDSLQGQIDEMNNFIYPKINNGVYKAGFATSQNVYQKEVETLFTALDQLEKHLSDNHYLVGEQFTEADIRLFTTLVRFDTVYYGHFKCNLKALHDYPHLWHYTKRIYNLPGIAETVNFDHIKKHYYGSHKTINPTGIIPAGPNLDWTI

SEQ ID NO: 6657 - DNA, 699 bp, Streptococcus agalactiae
atgagagttattacagttaagaacgacattgaggggggaaaaattgcatttactcttttagaagagaaaatgaaagctggtgctcaaactttaggattggcaacaggaagtagcccaatcaccttttacgaagagattgtaaaaagtaatcttgatttttcaaatatggtttctattaaccttgatgaatatgttggaattgccgcaagtaatgatcaaagttactcttattttatgcataaacatctttttgatgctaaacctttcaaggaaaataaccttccaaacggcttggctaaagatttgaaagaagaaataaaacgatacgatgctgtcataaatgctaatccaattgattttcaaatccttggaattggtcgtaacggtcatattggttttaatgaaccaggtacaccttttgatattacaacacatgtggttgatttagctccaagtacaattgaagctaatagtcgtttctttaatagtattgatgatgtaccaaagcaagccttatcaatgggtataggctctattatgaaatcaaaaacaatcgtattagtggcgtatggtattgaaaaagcagaagcgattgcaagtatgattaaaggacctatcacagaagatatgccagcaagtatcctccaaaaacatgatgatgttgtgattattgtggatgaagcagcggcatcaaagttg

SEQ ID NO: 6658 - protein, 233 aa, Streptococcus agalactiae
MRVITVKNDIEGGKIAFTLLEEKMKAGAQTLGLATGSSPITFYEEIVKSNLDFSNMVSINLDEYVGIAASNDQSYSYFMHKHLFDAKPFKENNLPNGLAKDLKEEIKRYDAVINANPIDFQILGIGRNGHIGFNEPGTPFDITTHVVDLAPSTIEANSRFFNSIDDVPKQALSMGIGSIMKSKTIVLVAYGIEKAEAIASMIKGPITEDMPASILQKHDDVVIIVDEAAASKL

SEQ ID NO: 6659 - DNA, 702 bp, Streptococcus pyogenes
atgaaaattattcgggtccaagatcagattgaaggtgggaaaatcgcttttaccttattgaaagatagcttagctaagggagctaagacgttaggattagcaacaggaagttcaccaattagtttttaccaagaaatggtcaaaagtcctttggatttttcggacttaacaagtattaacttggatgaatatgtcggtctttcagtagagagcgatcagagttatgattattttatgcgtcaaaacctttttaatgcgaagccttttaaaaagaattacttgcccaatggtttagcaaccgatgtcgaagcagaagctaaacgatataaccaaatcattgcagagcatccgattgattttcaagtgcttgggattgggcgtaatgggcacattggttttaacgaacctgggacctcttttgaagaagaaacgcatgtggtggatcttcaagaatcaaccattgaagccaatagtcgtttctttacaagtattgaggatgtgccaaaacaagctatctctatgggaattgcctccatcatgaagtccgaaatgattgttcttcttgcctttggacaagaaaaagctgatgcgatcaagggaatggtttttggaccaatcacagaacacctcccagcaagtattctccaaaaacatgatcatgttatcgtcattgtggatgaagctgctgcgtcacaattagac

SEQ ID NO: 6660 - protein, 234 aa, Streptococcus pyogenes
MKIIRVQDQIEGGKIAFTLLKDSLAKGAKTLGLATGSSPISFYQEMVKSPLDFSDLTSINLDEYVGLSVESDQSYDYFMRQNLFNAKPFKKNYLPNGLATDVEAEAKRYNQIIAEHPIDFQVLGIGRNGHIGFNEPGTSFEEETHVVDLQESTIEANSRFFTSIEDVPKQAISMGIASIMKSEMIVLLAFGQEKADAIKGMVFGPITEHLPASILQKHDHVIVIVDEAAASQLD

SEQ ID NO: 6661 - DNA, 678 bp, Streptococcus agalactiae
atgaaagaagcaaaaaatttttcccaacaattgaatattttaagagctggtgttcttggtgctaatgatggtatcatctctgtagctggtgttgttattggtgttgcgagtgcaactcataacctttggattatttttttatcagcagcttccgcgattttagctggtgcattttctatggctggcggggagtatgttagtgtttctactcaaaaagatactgaacaagcagcagttgcgcgtgaagagaaactactagaaaataatccagaacttgccaaaaaatccttagttgatatctacttagcaaaaggagaaagtcacgaacatgctcaatggctagttgacaaggctttttcaaagaatgctattgagcatttagttgaagaaaaatatggtattgagttcggtgaatatacaagcccctggcatgctgctatatctagttttatagcttttgccatcggatcaatttttccaactataactattctgttattgccattttcggtacgaattgtaggaacggtaataattgttattgtttcactattatcaactggttatgtaagtgctaagttaggtcaagctcctacagtacctgccatgcgtcgaaatgtgatgattggttgtttgacaatgttggcaacctacgtcattggacaattattttcaata

SEQ ID NO: 6662 - protein, 226 aa, Streptococcus agalactiae
MKEAKNFSQQLNILRAGVLGANDGIISVAGVVIGVASATHNLWIIFLSAASAILAGAFSMAGGEYVSVSTQKDTEQAAVAREEKLLENNPELAKKSLVDIYLAKGESHEHAQWLVDKAFSKNAIEHLVEEKYGIEFGEYTSPWHAAISSFIAFAIGSIFPTITILLLPFSVRIVGTVIIVIVSLLSTGYVSAKLGQAPTVPAMRRNVMIGCLTMLATYVIGQLFSI

SEQ ID NO: 6663 - DNA, 1026 bp, Streptococcus agalactiae
atgaatacaaacgattttgatttttatttaccagaagaactcattgcccaaacaccacttgaaaaaagagacgcttctaaattattagtcattgatcataagaataagacgatgacagatagccatttcgatcatatcttagatgaactcaagcctggtgatgctttagtaatgaataacacacgtgttctgcccgctcgcctttatggtgaaaagcaagatacacacggccatgtagagttattacttctcaaaaatacagaaggcgatcaatgggaagtgcttgctaaacccgctaaacgcttacgagtagggaccaaagtttcatttggtgatggtcggttaatagcaacagtcacaaaggaattagaacatggtgggcgtattgtagaattctcatatgatggtatttttctagaagtccttgaaagtttgggcgaaatgccacttccgccatatattcatgaaaaactagaagatcgtgaccgctatcagactgtgtatgcaaaagaaaatggttctgctgctgcaccaacagccggtctccattttacaaaagaactattggaaaaaattgaaacaaaaggtgtgaagcttgtctatttgacgcttcacgttggacttggaactttccgtcctgtttcagttgataatcttgatgaacacgaaatgcattctgagttttaccaattatctaaagaagctgctgatactctcaatgcagttaaagaatctggtggacgtattgtagctgttggtacaacttctattcgcacattagagacaatcggttctaaattcaatggtgaattaaaagccgactcagggtggacaaatatttttatcaagcctggttatcagttcaaggttgtagacgctttttcaaccaactttcacttaccaaagtctactcttgtcatgttagtatcagcatttgctggacgtgattttgtactagaagcttacaaccatgcagttgaagaacgatatcgtttcttcagctttggtgatgctatgtttgttaag

SEQ ID NO: 6664 - protein, 342 aa, Streptococcus agalactiae
MNTNDFDFYLPEELIAQTPLEKRDASKLLVIDHKNKTMTDSHFDHILDELKPGDALVMNNTRVLPARLYGEKQDTHGHVELLLLKNTEGDQWEVLAKPAKRLRVGTKVSFGDGRLIATVTKELEHGGRIVEFSYDGIFLEVLESLGEMPLPPYIHEKLEDRDRYQTVYAKENGSAAAPTAGLHFTKELLEKIETKGVKLVYLTLHVGLGTFRPVSVDNLDEHEMHSEFYQLSKEAADTLNAVKESGGRIVAVGTTSIRTLETIGSKFNGELKADSGWTNIFIKPGYQFKVVDAFSTNFHLPKSTLVMLVSAFAGRDFVLEAYNHAVEERYRFFSFGDAMFVK

SEQ ID NO: 6665 - DNA, 1026 bp, Streptococcus pyogenes
atgaatactaacaattttgattttgagttaccagaagaattgattgcccaaaccccactcgaaaaaagagacagttcaaaactattgattattgatcaccgtcaaaaaactatggttgatagccattttgaccatatcattgatcaattaaatccaggggatgccctcgtcatgaataacacccgtgtcttgcctgccagactttatggagaaaaacccgatactcatggtcatgtggaattgcttttgcttaaaaatacacaaggagatcaatgggaagttttagccaagccagccaaacggctcaaggttggtagccaagtcaattttggagatgggcgtctcaaagccaccattatcgacgaattagaacatggtggacgaattgttgaattcagctatgatgggattttcttagaagttttagagagcctcggcgaaatgccattgcctccttatattcacgaaaaattagaggatgctgagcgataccaaaccgtttatgctaaagaaaatggctctgcggccgccccaactgctggtctccacttcacaacagacttgctcaaaaaaatcgaagccaaaggggtacatttggtttatttgaccctacatgtagggcttgggacttttagacctgtttccgtggataacctcgatgagcatgatatgcattcggaattttattccctctcagaagaagcagcgcaaaccctaagagacgtcaaacaagctggcggtcgtgttgtcgctgtaggaaccacctctattcgtacgttggaaaccatcggaggtaagttccaaggggacattcaagctgattcaggttggaccaatatttttattaaaccaggctaccaattcaaggtagttgatgctttttcaactaatttccatcttccaaaatcaacccttgtgatgctagtatcagcctttgcagggcgtgactttgtccttgaagcttacagacacgcggttgacgaaaagtatcgtttctttagctttggcgatgccatgtttgtcaac

SEQ ID NO: 6666 - protein, 342 aa, Streptococcus pyogenes
MNTNNFDFELPEELIAQTPLEKRDSSKLLIIDHRQKTMVDSHFDHIIDQLNPGDALVMNNTRVLPARLYGEKPDTHGHVELLLLKNTQGDQWEVLAKPAKRLKVGSQVNFGDGRLKATIIDELEHGGRIVEFSYDGIFLEVLESLGEMPLPPYIHEKLEDAERYQTVYAKENGSAAAPTAGLHFTTDLLKKIEAKGVHLVYLTLHVGLGTFRPVSVDNLDEHDMHSEFYSLSEEAAQTLRDVKQAGGRVVAVGTTSIRTLETIGGKFQGDIQADSGWTNIFIKPGYQFKVVDAFSTNFHLPKSTLVMLVSAFAGRDFVLEAYRHAVDEKYRFFSFGDAMFVN

SEQ ID NO: 6667 - DNA, 1062 bp, Streptococcus agalactiae
gtgaaacaaacaaagaaagaatttattttaggattaaccattattattacccttactttattaatcatgctgatttttttagtaatgtttaataagtccagtaactctaagttgaagcagacaaaagatagaagaatatcatctacttcaaccacaaggacatccagtagctcacatgatcaaaaaattgtagaaaagtctcttgaaaaaaagaaaatggtcatggaacaagatatggaattgatgaatgcctataggctctattatgattatgcccatttgtccttgaaagaggttgttctggcctatatgtctgaatatggcattgaaaaaaatagtgttgctttttcttataaaaatttaaaaacaggacaaagggacgctatgaatgatactcaggctatgacagcagggagcacctataagttacctcttaacatgttggtagtagatgcagtggtcaagggcaagttgtccatggaagaacgctttgatattaccgagactgactatgaatatattggtgaacataataattatgttgctgctttctcgggggcaatgtctattgatgatatgcaaaaatactctttagtttattcagaaaatacacccgcctatgctttagctgagcgtattggtggcatggatagtgcttattcaaagtttggtcgttatggccaatctaaaggagacatcaaaaatatacaaaaaaacggtaataaagtgacaacagattactatattcaagtgctagactatctctggaaacatcgtaaaaagtatgatagtttaattacttatttagaagaagcttttccaacagattattatcgtgctttgataccatctgatgttgttgttgctcaaaagccagggtatgtccgtgaggcgttgaatgttggagcaattgtcaaagaagaagtgccttatattgttgctatttatactgcaggtttaggtggctctactcaggaagattcagaaattaatggagtgggactatatcagctagaacaattatgttttgttattaatcaatggcatcgtgttaatatgaat

SEQ ID NO: 6668 - protein, 354 aa, Streptococcus agalactiae
MKQTKKEFILGLTIIITLTLLIMLIFLVMFNKSSNSKLKQTKDRRISSTSTTRTSSSSHDQKIVEKSLEKKKMVMEQDMELMNAYRLYYDYAHLSLKEVVLAYMSEYGIEKNSVAFSYKNLKTGQRDAMNDTQAMTAGSTYKLPLNMLVVDAVVKGKLSMEERFDITETDYEYIGEHNNYVAAFSGAMSIDDMQKYSLVYSENTPAYALAERIGGMDSAYSKFGRYGQSKGDIKNIQKNGNKVTTDYYIQVLDYLWKHRKKYDSLITYLEEAFPTDYYRALIPSDVVVAQKPGYVREALNVGAIVKEEVPYIVAIYTAGLGGSTQEDSEINGVGLYQLEQLCFVINQWHRVNMN

SEQ ID NO: 6669 - DNA, 588 bp, Streptococcus pyogenes
atgacagagcgttttgacattacagaaactgattatgaatatgatcaggaacatcatgcctatgttgctcagttcaatggtgccatgtctattccggatatgcaagaatattccttggtgtactcagaaaacacgccagcttatgctctagcagaacgattgggtggcatgaataaggcttaccaattatttgaccgctacgggaaggtatccggggctattacgaccattgatcgtaatggcaataaaatcaccaccgcttactatttgcaagttttggattacttgtggcagcatcaggataaatataaggatatcttgtactacattggtgaatctttccctgatttgtattacaagacttatttgcctcatgtaaaggtttatcaaaaaccgggttatgtcagagaagccttaaatgtaggtgccattgtttgcgaagagtctccttatttgattgctctttattcatctggtttgggtggagcaacacaagcatcagaggaagtcaatggccttggttatgtgcagcttgttcagctaccatatgtaattaatgagtggtatagaggcaatctcaacatgatc

SEQ ID NO: 6670 - protein, 196 aa, Streptococcus pyogenes
MTERFDITETDYEYDQEHHAYVAQFNGAMSIPDMQEYSLVYSENTPAYALAERLGGMNKAYQLFDRYGKVSGAITTIDRNGNKITTAYYLQVLDYLWQHQDKYKDILYYIGESFPDLYYKTYLPHVKVYQKPGYVREALNVGAIVCEESPYLIALYSSGLGGATQASEEVNGLGYVQLVQLPYVINEWYRGNLNMI

SEQ ID NO: 6671 - DNA, 513 bp, Streptococcus agalactiae
ttggaaacaatctttgctaatataatcgtaactactaaagctgcaattgcaggaataatattttgtaccattaagcttgttaaatcaaccttaaatgcttctgaagcagcaattgtattaggattgggtgagataatattcccagccttaccaccaccaatcattgctaacagtatgctagatttagaaagattagcttttttacctattgctaatgcaatcggagcaactgtaataactgcaatatcaataaagacacctactgcacaaataatcattgttgcgatggctaaagctgtgatggctcgctgttgtcctaattttttaatgatactttctgcaattttttcagctgatccggttttaattaaagcacccgctaaaatccctgatgttaaaatgcgtaatatggatgacatcatcccttgcgcacctaataccattgtattgacaattgtaactaaatcaccgccaccaatcaaaccaccaactaatgctccaagaatgagacta

SEQ ID NO: 6672 - protein, 171 aa, Streptococcus agalactiae
METIFANIIVTTKAAIAGIIFCTIKLVKSTLNASEAAIVLGLGEIIFPALPPPIIANSMLDLERLAFLPIANAIGATVITAISIKTPTAQIIIVAMAKAVMARCCPNFLMILSAIFSADPVLIKAPAKIPDVKMRNMDDIIPCAPNTIVLTIVTKSPPPIKPPTNAPRMRL

SEQ ID NO: 6673 - DNA, 1254 bp, Streptococcus agalactiae
atggaagctacatttacaacaacaggggctttaataggattagcgcttgctattttactgattatcaaaaaagttcatcctgcctatagtctcattcttggagcattagttggtggtttgattggtggcggtgatttagttacaattgtcaatacaatggtattaggtgcgcaagggatgatgtcatccatattacgcattttaacatcagggattttagcgggtgctttaattaaaaccggatcagctgaaaaaattgcagaaagtatcattaaaaaattaggacaacagcgagccatcacagctttagccatcgcaacaatgattatttgtgcagtaggtgtctttattgatattgcagttattacagttgctccgattgcattagcaataggtaaaaaagctaatctttctaaatctagcatactgttagcaatgattggtggtggtaaggctgggaatattatctcacccaatcctaatacaattgctgcttcagaagcatttaaggttgatttaacaagcttaatggtacaaaatattattcctgcaattgcagctttagtagttacgattatattagcaaagattgtttccaagaaaaataacgatatttcttatgatagtgaggagcaagtgggctctgatctgccagcattcttaccggctatttctggtccacttgtggttatctgcttattagctcttcgtcctttatttggaatcactattgatcccttgattgcactgccgttgggtggtctaattagtattttagcaacaggttacctaaaagaaacggtaccgtttgttgaatacggtttatcaaaagttgttggcgtttcaattcttttgattggaacaggtacgctctcaggtattattaaagcatctaatctacaatttgatatgattcatctccttgaatttttaaatatgccgacctttatccttgccccactctcaggtatttttatgggagcagcaacagcatcaacgacttctggaacaactattgcttcacaaacgtttgctgaaaccttgattaaatcaggggtaccggcggtttcgggtgcagctatgattcacgcaggtgcgactgttttggattcgctacctcatggatccttcttccatgcgacaggcggagctgtcaatatggctataaaagatcgtatgaaactaattagctatgaagctttgattggattaactagcacaatagttgctgtcgtttactattgtttctttggg

SEQ ID NO: 6674 - protein, 418 aa, Streptococcus agalactiae
MEATFTTTGALIGLALAILLIIKKVHPAYSLILGALVGGLIGGGDLVTIVNTMVLGAQGMMSSILRILTSGILAGALIKTGSAEKIAESIIKKLGQQRAITALAIATMIICAVGVFIDIAVITVAPIALAIGKKANLSKSSILLAMIGGGKAGNIISPNPNTIAASEAFKVDLTSLMVQNIIPAIAALVVTIILAKIVSKKNNDISYDSEEQVGSDLPAFLPAISGPLVVICLLALRPLFGITIDPLIALPLGGLISILATGYLKETVPFVEYGLSKVVGVSILLIGTGTLSGIIKASNLQFDMIHLLEFLNMPTFILAPLSGIFMGAATASTTSGTTIASQTFAETLIKSGVPAVSGAAMIHAGATVLDSLPHGSFFHATGGAVNMAIKDRMKLISYEALIGLTSTIVAVVYYCFFG

SEQ ID NO: 6675 - DNA, 1329 bp, Streptococcus pyogenes
atggaaattattggttctctgggggtcttggtaggtgttattgttattatttacctgtatgtcaaagaagttaacattatcatcgctgcgcctcttgctaccagcttggtcattttgtttaatcaaatggatccaaccacaaccttacttggaaaagaacccaaccaatttatgggggcactctccacttatattctcaattattttgctatctttttattaggttctatcttagccaaattaatggaaacaagcggtgcaaccacttctattgcagattatattttaaaaaaagttggtcatgatagtccttataaagtactcgttgctatttttctgatcagtgctatattaacttatgggggaatcagcctctttgttgtcatgtttgctgtcttgccgcttgcacgaagcctattcaaaaaaatggacttggcttggaacttaattcaagttcctctttggctcggtattgcaacttttaccatgacgattttacccggaacacctgccattcaaaatgttattcctattcaatacttggacacctcactaactgctgccgccattccgagtatcgttggctcaattggctgcgtggcttttgggctcttttatatgaaatattgtctagcaaaaagtatggcaaggggtgaaacttatgccacttatgcttttgacaatgagatacaagtgaaaacaaaaaatctcccacatttccttgccagtatcttacctttattgttgctcattattatcgccctaaccggtagccttttcggaaacgatttttttaagaagaacattattttcatagcacttttagctgtcattctcaccgcaagctggctctttagacagtttattcctaataagattgctgtctttaatttaggagctagcagctctattgcacctatttttgcgacagcatctgcagttgccttcggagccgttgtgatgattgtcccaggtttcacattcttctcagatctcattttgaatattcccggtaatcctcttattagtttagccgtgttgacttcctctatgtcagctattaccggctcttcttccggtgctctaggaattgtcatgcctaactttgcccagtattatttagatcaaggccttaatcccgaaatgattcaccgtgttgccactattgcttctaatatctttaccattgtgccccaaagtggtgtctttctcaccttcttagcattgacaggacttaaccacaaaaatgcttttaaagaaacctttattactgtttctgtaagtacttttatcgcacaggtcattgtgatagcctttgatctgttttct

SEQ ID NO: 6676 - protein, 443 aa, Streptococcus pyogenes
MEIIGSLGVLVGVIVIIYLYVKEVNIIIAAPLATSLVILFNQMDPTTTLLGKEPNQFMGALSTYILNYFAIFLLGSILAKLMETSGATTSIADYILKKVGHDSPYKVLVAIFLISAILTYGGISLFVVMFAVLPLARSLFKKMDLAWNLIQVPLWLGIATFTMTILPGTPAIQNVIPIQYLDTSLTAAAIPSIVGSIGCVAFGLFYMKYCLAKSMARGETYATYAFDNEIQVKTKNLPHFLASILPLLLLIIIALTGSLFGNDFFKKNIIFIALLAVILTASWLFRQFIPNKIAVFNLGASSSIAPIFATASAVAFGAVVMIVPGFTFFSDLILNIPGNPLISLAVLTSSMSAITGSSSGALGIVMPNFAQYYLDQGLNPEMIHRVATIASNIFTIVPQSGVFLTFLALTGLNHKNAFKETFITVSVSTFIAQVIVIAFDLFS

SEQ ID NO: 6677 - DNA, 1140 bp, Streptococcus agalactiae
atgaaggtagtagtagctattgattctttgaaagggagtctttcttctttagaagctggcaatgctataaaggagtcaattaatgaagtaatctcaggggcggatgtggaagtacatccattagcagacgggggagaaggaactgttgaagctttgacgctaggtatggggggtacgatcgaaacaatccctgttaaggggcctcttggagaaaaagtacatgcgagttatggtattattccacagcgtcagttagctattattgaaatggctgcagctgctggtattaccctaattgctactgaagagagaaatcctctccacacaaccacttatggagttggagaaatgataaaggatgctataagtaaaggctgtaggcactttattattggtattggaggtagtgctactaatgatggtggggcaggtatgctacaagctttgggatatgcattattagataaagataatcaagaaatcagtttgggagcacaaggattggcagatttaaaatctatctctactgataaggttattgaggaattaaaagaatgtgattttaaaattgcatgtgatgtaacaaatcctttatgtggtgctcaaggttgtagttcgatttttggaccgcaaaaaggtgctgatgaagatatgattacaaaaatggatacttggttaagtaattatgctaccttagctacttcagttagtgaaaaagcagatgcaactattgaaggaacaggtgcagcgggtgggcttggatttgcctttttagcctttacaaatgctaccttagaacctggtattgatattattctatcagaaattaatatagaaaaagcgatttctgaagctgatttagtagttactggtgaaggtcgtttggatgggcaaacggtgatgggaaaagctccaattggcgtagcaaaattagctaaaaaatatggtaagaaagtagtggcattttctggatctgtcaccgaagatgctatactttgtaatcaacatggtattgatgctttttttccaatcgtacgacgccttatcagcttagatgaggctatgtctaaagaggtagcttataaaaatatgaaagaaactgctactcaagtctttagattaatcaatttgtataatcat

SEQ ID NO: 6678 - protein, 380 aa, Streptococcus agalactiae
MKVVVAIDSLKGSLSSLEAGNAIKESINEVISGADVEVHPLADGGEGTVEALTLGMGGTIETIPVKGPLGEKVHASYGIIPQRQLAIIEMAAAAGITLIATEERNPLHTTTYGVGEMIKDAISKGCRHFIIGIGGSATNDGGAGMLQALGYALLDKDNQEISLGAQGLADLKSISTDKVIEELKECDFKIACDVTNPLCGAQGCSSIFGPQKGADEDMITKMDTWLSNYATLATSVSEKADATIEGTGAAGGLGFAFLAFTNATLEPGIDIILSEINIEKAISEADLVVTGEGRLDGQTVMGKAPIGVAKLAKKYGKKVVAFSGSVTEDAILCNQHGIDAFFPIVRRLISLDEAMSKEVAYKNMKETATQVFRLINLYNH

SEQ ID NO: 6679 - DNA, 1140 bp, Streptococcus pyogenes
ttgactattaatagggttttaaaggatgataatctgctacaatatacagaaaaggaatttattgaagatatgaaaattttggtagccatagattcttttaagggatcggtaacgtctccagaacttaacactagtgtagctcaagcccttctttctgtcgataagcagttagttattgaaacaagagctatcgctgatggaggagaaggaagtttagtagccctctcacaaaccgtggcggggaggtggcatcaagtaaaaaccattgatctattaagacgcccgattaaagtcgcttattatcgtcacgcaaagcaagcttttattgaatctgcgagtattattggtattgataagatcacctccaattcagtaacctatgcacaagccacttcctacggtttgggtttggcagttaaagatgccattcaaaaaggagctactcaaatcgaaatcatgctaggaggcacaggcacttctgatggtggcaaagggtttttggaaagtttaaactatgatttcatgacaggaagatcttatcttgatactttagcatcacctgttacgctattagggctgactgatgtgaccaatccatatcatggccctcaaggatttgctgcggtctttggccctcaaaaaggtgggagtcttagtcaaattgaagaaactgatcaaattgcaagtaactttgctaaaaaagttttttgccaaacaaccattgatttacagacaataccaggaagtggagcagctggaggattaggaggtgccattgtcctattaggaggcaccttaactagtggttttagcaggattgcagagctactaaatctggataattcccttcagtcttgtgatttagttattactggagaaggatgcctggatacacaatcacaatctggcaaggtacctgttgcgattgcaagaatggctaaaaaatatcaagttccaacgattgctctatgtggttctgtaaagattgagacaggactagcagcagaagactttttggctgttttttcaatacaacagcagccaatttccttagaagcagcgatagataaaacaacaacactttctaatatcaaaatattagcagctaaccttatgctattgatagctcagtttaataag

SEQ ID NO: 6680 - protein, 380 aa, Streptococcus pyogenes
LTINRVLKDDNLLQYTEKEFIEDMKILVAIDSFKGSVTSPELNTSVAQALLSVDKQLVIETRAIADGGEGSLVALSQTVAGRWHQVKTIDLLRRPIKVAYYRHAKQAFIESASIIGIDKITSNSVTYAQATSYGLGLAVKDAIQKGATQIEIMLGGTGTSDGGKGFLESLNYDFMTGRSYLDTLASPVTLLGLTDVTNPYHGPQGFAAVFGPQKGGSLSQIEETDQIASNFAKKVFCQTTIDLQTIPGSGAAGGLGGAIVLLGGTLTSGFSRIAELLNLDNSLQSCDLVITGEGCLDTQSQSGKVPVAIARMAKKYQVPTIALCGSVKIETGLAAEDFLAVFSIQQQPISLEAAIDKTTTLSNIKILAANLMLLIAQFNK

SEQ ID NO: 6681 - DNA, 1092 bp, Streptococcus agalactiae
atgaaattaagaaaacaactcgcacaacaaatcgttacctctatcaaagatgtttgtcaacaagatattaattttattaataccaaaggaatcattttcgctagtaccaatccaaaacgtgttggagaattccatgaaattggtttaaaagtagcacagacaggacaaatgattgaagtaacagatcaagaatcttattttgggacacaagcagggatcaatattcctttctattataattgtgaattattagctactattgggattagtggaaaccccaaccaagtaggaaaatatgctttacttgctcaaaaaatgactcgactcatcttaaaagagcatgaattagattatctggatttcgggcgaaaaaacgaagcttctattgtcttacatcatcttgttgaaggcagagagttagactactattacctcaatcaatttttaaaccaataccacctatcagaaaaaactgactatcgtctactcacttttgaaatcaatagtcaaaaacaaaaattactcttaagtcaatctgaaatgtcactcttgaacttttttgataaacttgacactgctatttatacctttaattatcccaatcaatactggcttttactttctgaccatatgtttgactattattatccaaatatcctatcaaagtttgaatgcgaaaagggcctctataaagttggtatcggacaaaaatcatctttatcacttttaaaaagatcatatgaaacgtctatcttagccctgaaagctttaaaaggtcaacaaaaggtcaacctcgtcgacgaccttgatcttgaactgttattaacaagtattgattctaatattaaacaatatgtgctaaataaagcgcttgtaaacttatctgaaaatgataagatcttgcttaactcatattttaagcataatctatcattaaaagaatgtagtcaggaactttttatccataaaaatactgttcaatataggttaaataagatttatgaatcaacgcaactcaatccaagaaactttaaggatgcaactttattgtatctagcacttaaatcagaagatattaaccttcataaatta

SEQ ID NO: 6682 - protein, 364 aa, Streptococcus agalactiae
MKLRKQLAQQIVTSIKDVCQQDINFINTKGIIFASTNPKRVGEFHEIGLKVAQTGQMIEVTDQESYFGTQAGINIPFYYNCELLATIGISGNPNQVGKYALLAQKMTRLILKEHELDYLDFGRKNEASIVLHHLVEGRELDYYYLNQFLNQYHLSEKTDYRLLTFEINSQKQKLLLSQSEMSLLNFFDKLDTAIYTFNYPNQYWLLLSDHMFDYYYPNILSKFECEKGLYKVGIGQKSSLSLLKRSYETSILALKALKGQQKVNLVDDLDLELLLTSIDSNIKQYVLNKALVNLSENDKILLNSYFKHNLSLKECSQELFIHKNTVQYRLNKIYESTQLNPRNFKDATLLYLALKSEDINLHKL

SEQ ID NO: 6683 - DNA, 1425 bp, Streptococcus agalactiae
atgacggtttttcctaaacattttctatggggaggtgcagttgctgccaatcaggtagagggtgcatttagaacagatggcaaaggtttatctgtacaagatgtacttccaaatggtggtttaggcgatttcaccgccaaacctactccagacaatttgaagctagaagcaattgatttttatcataactataaaaatgatataaaactgtttgcagagatgggctttaaagtttttagaacctctattgcctggtctcgaatttttccaaatggtgatgatagtgctccaaacgaagctggcttacaattttatgataatttatttgatgagttgcttaaatataatatcgagcccttggttaccttatctcattatgaaacaccgcttcatcttgcaaaaacttataatggttgggctgatagacgtttgatagcattttttgagaaatttgctcaaacagtcatggagcgttataaagataaggtgaaatattggttgacttttaatgaagtgaattctattttacatatgcctttcaccagtggtgctattatgaccgacaaatcacaactaagtcctcaggagctttatcaagctattcatcatgaattagtagcatcggctagagtgacaaaattagggcgttctatcaatcctaattttaaaattggctgtatgattctggctatgccagcttatcctatgacatctgatccaagagatgtcctggctgcaagacaatttgaacaacataatctgctattttcagatatacatgtcagaggtaaatatcccacttatattcagtcctatttcaaaaataatggtattaaaattaaatttgaagaaggagatgaggaagtattggcacaaaatacagtagattttctatcgtttagttactatatgagcgtgacacaagcttatgactttgaaaattatcaaagtggtcagggaaatatccttggaggcctaactaatcctcatttaacaacttcagaatggggatggcaaatcgatcccatcgggctacgcctagtcttaaatcagtattatgaacgttatcagattccgttgtttattgtagaaaatggattgggagcaaaagatcaattgatagaaacactagacggtgattatactgtcgaagatgattatcgtattgattatatgaatcaacatttagttcaagttgctaaagctattgaagatggtgttgaaataatgggatatacatcttgggggtgtattgattgtgtatccatgtctacagctcaactaagtaaacgttatggtctaatatatgttgatcgaaatgatgatggaacagggagtctacaacgttacaagaagaagtcatttggttggtaccaaaaagtgattaagacaaatggccaatcattgtttgaacatcataacaga

SEQ ID NO: 6684 - protein, 475 aa, Streptococcus agalactiae
MTVFPKHFLWGGAVAANQVEGAFRTDGKGLSVQDVLPNGGLGDFTAKPTPDNLKLEAIDFYHNYKNDIKLFAEMGFKVFRTSIAWSRIFPNGDDSAPNEAGLQFYDNLFDELLKYNIEPLVTLSHYETPLHLAKTYNGWADRRLIAFFEKFAQTVMERYKDKVKYWLTFNEVNSILHMPFTSGAIMTDKSQLSPQELYQAIHHELVASARVTKLGRSINPNFKIGCMILAMPAYPMTSDPRDVLAARQFEQHNLLFSDIHVRGKYPTYIQSYFKNNGIKIKFEEGDEEVLAQNTVDFLSFSYYMSVTQAYDFENYQSGQGNILGGLTNPHLTTSEWGWQIDPIGLRLVLNQYYERYQIPLFIVENGLGAKDQLIETLDGDYTVEDDYRIDYMNQHLVQVAKAIEDGVEIMGYTSWGCIDCVSMSTAQLSKRYGLIYVDRNDDGTGSLQRYKKKSFGWYQKVIKTNGQSLFEHHNR

SEQ ID NO: 6685 - DNA, 1866 bp, Streptococcus agalactiae
atgactaaataccaagagactgctaaagctattttagcagcagtagggggagaaaaaaatattcaacacgtaacccactgtgtgacacgattacgattagttttagacaatgatgaaattgtcaacgatcaggttattaaaactattccgaatgttatcggtgttatgcgtaaaaatgatcaataccaaattattttgggaaatgatgtcaataattattataatgcttttttggccttaggtcattttgaaaatactaccagagaattttcatcacaaaaaaagagttcaatacttgagaaattaattgaaacgattgcaggagtcattacgccgcttatacctgctcttctaggaggagggatgctcaaggttataggtattttgctccctatgctcggtatagcaagctctagttctcaaacagtagcttttatcaatttttttggtgatgccgcttattattttatgccaataatgattgcttattcagctgcgtcacgatttaaagttacacctgtattagctgctacagtaggagggattctcttacaccctgcttttgtgacaatggtagctgaaggaaaaccattatctttatttggagctccggttacactggctagttatggttcttctgttattccaatcttaattatggtttttcttatgcaatatattgagagatggattaataaaattgttcctagtgtaatgaagagttttttacaaccgactttgattattctcatttctggctttttagctttagtggtcgtggggccactgggggtaattattggtaaaggattgtctagtgcaatgctttcgatttaccatgtggcgccatggttagctttatctattcttggtgctattatgccattggttgttatgacaggaatgcactgggcatttgctccaatatttttagctgcttctgttgcgacaccagatgttttgattttaccagcaatgttagcttctaatttagctcaaggtgcggcttctcttgctgttgcagttaaggctaaacaaaaacaaacacgtcaggtggcctttgcagcaggtttatcagcactactagctggtatcacagaacctgcactttatggtgtcacactgaaattcaagaagcctttatacgctgcaatgatatcaggtggtttagtaggagcttatattggattagttaatattgcttcctatacatttgtagtaccatctattattggtttgccacaatatatcaatccacaggggggcaataatttcagtaatgctgttattgcagcaatagctactattattttgactttcattattacatggttcttgggaattgatgaaggagaaaacgaaaaaagtagtattaatgctcaagagcacacacatattagaagtggtttatcaaaaaaagagacattgtattcacctatggtaggcaatgtattacctttatctaaagtacccgatgaaacattttcatctaaattactaggtgaaggtttagcaatcactcctagtgtgggtgaagtttatgcaccatttgatggtgaaattataagtttatttcctacaaaacatgccattgccttaaaggatgataagggagtcgaagtgttaatccatattggaatagatactgtagaactaaatggagaaggttttgaacaattggtcaaagttggcgattttgttaaacgaggacagttacttttgcgaatggatattgattttattagttcaaaggggtattctcttattagtccggttgtagttacaaattcaattgaccaacttgaaattatcgttaaagacgcagagacaatggttacaaatgaagatgatttacttgtaattctt

SEQ ID NO: 6686 - protein, 622 aa, Streptococcus agalactiae
MTKYQETAKAILAAVGGEKNIQHVTHCVTRLRLVLDNDEIVNDQVIKTIPNVIGVMRKNDQYQIILGNDVNNYYNAFLALGHFENTTREFSSQKKSSILEKLIETIAGVITPLIPALLGGGMLKVIGILLPMLGIASSSSQTVAFINFFGDAAYYFMPIMIAYSAASRFKVTPVLAATVGGILLHPAFVTMVAEGKPLSLFGAPVTLASYGSSVIPILIMVFLMQYIERWINKIVPSVMKSFLQPTLIILISGFLALVVVGPLGVIIGKGLSSAMLSIYHVAPWLALSILGAIMPLVVMTGMHWAFAPIFLAASVATPDVLILPAMLASNLAQGAASLAVAVKAKQKQTRQVAFAAGLSALLAGITEPALYGVTLKFKKPLYAAMISGGLVGAYIGLVNIASYTFVVPSIIGLPQYINPQGGNNFSNAVIAAIATIILTFIITWFLGIDEGENEKSSINAQEHTHIRSGLSKKETLYSPMVGNVLPLSKVPDETFSSKLLGEGLAITPSVGEVYAPFDGEIISLFPTKHAIALKDDKGVEVLIHIGIDTVELNGEGFEQLVKVGDFVKRGQLLLRMDIDFISSKGYSLISPVVVTNSIDQLEIIVKDAETMVTNEDDLLVIL

SEQ ID NO: 6687 - DNA, 849 bp, Streptococcus agalactiae
atgattataaaacgcgtattaaatcataatgcagtcatatcagtaacacatcaaggattagatgtgctactgatggggaaaggaattgcatttaagaaaagaataggtgataggattaatagcgatgctattgagaagtcatttgttttaaaaaatagtgataacatgaaccgttttacggagttatttattactgttccagaagaagtagttgcatgttcagaacgaattatcaacctaggtaaaatcaaattgggtaagaacttagatgaaattctttatatcaatttgacagatcatattcattcggctattgaaagacatgaacaaggaatggttatccaaaatccactaaggttggaaatccaacgttactatcctgatgaatactccattgggatgaaggctctggaacttataaaggatgaattgggcatttgtttaacaatcgatgagtcggcttttattgctatgcactttgtaaatgctggattggataatccgtttaatgaagcgcataaaatcactgagattgtatcttacattgaacagaaagtaaaaatagattttcgaacagaactagatgaaagttcaattgattattatcgtttcatgacacataccaaattatttgctcaacgcgttttatcaggaatgaaatacgaagatgatgatgctgatttacttttggtagttaagaaaaaatatccgagagaatataaatgtgttaaagagatcggcaacaatatggctatccaataccaatatcaacttaattcaagtgaactcctatatctgacggtgcatgttaaacgattagttaaaaatttaaaggagatatcagatgac

SEQ ID NO: 6688 - protein, 283 aa, Streptococcus agalactiae
MIIKRVLNHNAVISVTHQGLDVLLMGKGIAFKKRIGDRINSDAIEKSFVLKNSDNMNRFTELFITVPEEVVACSERIINLGKIKLGKNLDEILYINLTDHIHSAIERHEQGMVIQNPLRLEIQRYYPDEYSIGMKALELIKDELGICLTIDESAFIAMHFVNAGLDNPFNEAHKITEIVSYIEQKVKIDFRTELDESSIDYYRFMTHTKLFAQRVLSGMKYEDDDADLLLVVKKKYPREYKCVKEIGNNMAIQYQYQLNSSELLYLTVHVKRLVKNLKEISDD

SEQ ID NO: 6689 - DNA, 840 bp, Streptococcus pyogenes
atgttgattaaacgcgttttaaaccataatgcggcgatttcgaccaaccatcaaggattagatattttattgatgggaaaagggattacctttggaaaaaaagttggagatagtattgagcttaatgctatcgaaacatcatttgttttaaaaaatagtgacaatatgaatcgcttcacagagttatttattacggtgccacaagaagttgttgcttgctcagagagaattatcaatctaggtaaaattaaattaggcaaaaccttagatgaaattctctatattaatttaacggatcatattcactctgctattgaaaggcatgagcaaggaatgttgattcataacccactacggtgggaaattcaacgctattatcctgatgaatatagtctaggggtaaaagccttagagctaattgagcgtaatctaggagtcactctagctattgatgaagcagcttttattgccatgcattttgtcaatgctagtttggacactccttttaaggagccacatcgcctgacggagattgtttcttatattgagcaaaaaatcaaaacagacttcaaaacagaattggatgacacatccatcgattattaccgctttatgacccatattaaattatttgctcaacgtgtgttatcacagatgtcttacgatgatgatgatgcggaactgcttttagtggtgaaaacgaaataccctaaagaatatcggtgcgtcttagatattagtgaggagataaaaaagcggtacaactaccaccttaattcaagcgaacttttgtatttgacggttcatgttaaacgtttagtgaaacatttaaaggagact

SEQ ID NO: 6690 - protein, 280 aa, Streptococcus pyogenes
MLIKRVLNHNAAISTNHQGLDILLMGKGITFGKKVGDSIELNAIETSFVLKNSDNMNRFTELFITVPQEVVACSERIINLGKIKLGKTLDEILYINLTDHIHSAIERHEQGMLIHNPLRWEIQRYYPDEYSLGVKALELIERNLGVTLAIDEAAFIAMHFVNASLDTPFKEPHRLTEIVSYIEQKIKTDFKTELDDTSIDYYRFMTHIKLFAQRVLSQMSYDDDDAELLLVVKTKYPKEYRCVLDISEEIKKRYNYHLNSSELLYLTVHVKRLVKHLKET

SEQ ID NO: 6691 - DNA, 537 bp, Streptococcus agalactiae
atgacactacatcatgataagcaccatgcaacttatgttgctaatgcaaatgctgctcttgagaaacatcctgaaattggagaagacttagaggcgctcttagctgatgtttctcaaattccagaagatattcgtcaggcagtcatcaataacggtggtggacatcttaaccacgctcttttctgggaattgatgtcaccagaagaaactcaaatttcacaagagttatctgaagacattaatgcaacttttggttcatttgaagactttaaagctgctttcacagcagcagcaacaggacgttttggttcaggttgggcttggcttgttgttaatgctgaaggcaaacttgaagtgctttcaactgccaatcaagatactccaattatggaaggcaagaaacctattttagggcttgatgtatgggagcatgcttattacttaaactatcgtaatgttcgtcctaactacatcaaagctttctttgaaattattaactggaataaagtaaatgaactttaccaagctgctaaagct

SEQ ID NO: 6692 - protein, 179 aa, Streptococcus agalactiae
MTLHHDKHHATYVANANAALEKHPEIGEDLEALLADVSQIPEDIRQAVINNGGGHLNHALFWELMSPEETQISQELSEDINATFGSFEDFKAAFTAAATGRFGSGWAWLVVNAEGKLEVLSTANQDTPIMEGKKPILGLDVWEHAYYLNYRNVRPNYIKAFFEIINWNKVNELYQAAKA

SEQ ID NO: 6693 - DNA, 603 bp, Streptococcus pyogenes
atggctattattttaccagaacttccatacgcgtatgatgctcttgaaccacagtttgatgcggagacaatgactcttcatcatgataaacaccatgccacttatgtcgctaataccaatgcggctttagaaaaacacccagagatcggagaaaatctggaggaactattggcagatgtcactaagattccagaagatattcgtcaaaccttaattaataatggtggcggacacctaaaccatgcgcttttctgggaactattatcacctgaaaaacaagacgtcactcctgatgttgcacaagccattgatgatgcttttgggtcatttgacgcctttaaagaacaatttacagcagctgctactggacgttttggttcaggttgggcatggttagttgttaataaagaaggacaactcgaaatcacatcaaccgctaaccaagatactccaatttcagaaggcaaaaaaccaattctagcgcttgatgtgtgggagcatgcttactacttgaattatcgtaatgtacgtccaaattatatcaaagctttctttgaaatcgttaattggaaaaaagtatcagaactttaccaagccgctaaa

SEQ ID NO: 6694 - protein, 201 aa, Streptococcus pyogenes
MAIILPELPYAYDALEPQFDAETMTLHHDKHHATYVANTNAALEKHPEIGENLEELLADVTKIPEDIRQTLINNGGGHLNHALFWELLSPEKQDVTPDVAQAIDDAFGSFDAFKEQFTAAATGRFGSGWAWLVVNKEGQLEITSTANQDTPISEGKKPILALDVWEHAYYLNYRNVRPNYIKAFFEIVNWKKVSELYQAAK

SEQ ID NO: 6695 - DNA, 132 bp, Streptococcus agalactiae
ttgaaagctgttccaaattcctatagaataagggtaataatagatgaaaagaggatttcgacatggcaattattttaccagatttaccctatgcatatgatgcgcttgagccacatattgatgctgagacaa

SEQ ID NO: 6696 - protein, 44 aa, Streptococcus agalactiae
MKAVPNSYRIRVIIDEKRISTWQLFYQIYPMHMMRLSHILMLRQ

SEQ ID NO: 6697 - DNA, 1035 bp, Streptococcus agalactiae
atgattgcgattgaagaaattgggagaattaccccagataatttagggttagtaactgttttagcaggagaagatttagggcaatatgctcagatgaaagagaagctatttcaggtaattggattcaataaagacgatttagcctattcttattttgatttaagtgaagaagactatcaaaatgcggaattagacttagaaagtttaccttttttatcagactacaaggttgttatttttgatcagtttcaagatattacaactgataaaaaaacttatttagatgaacaagcaatgaagcgctttgaagcctacttgcagaatcctgtagatactacgagacttgttatttgtgctccaggaaaacttgatggaaaacgtcgacttgtaaagttattgaaacgtgatgctcgtgttttagaggctaatactttaaaagaatcagatttaaagacgtattttcaaaaatatgctcaccaagaaggattagtttttgaagcaggtgtttttgatgagttattgattaagtctaactatgattttagtgatactttaacgaatatcgctttcttaaagtcatataaaacagacggtcatatttcgtccaatgatgttagagaggctatccctaaaagcctgcaagataatatatttgatttgactcaagatgtcttacttggcaggatagatttagcgcgtgatttagtaagagatttacgtctacaaggcgaagacgaaatcaaattgattgcaatcatgttaggacagtttcggatgtttttgcaagttaaaatattggctagtaaagggaagtcagagagtcaaattgtttctgaactatcccattacataggacgtaaaatcaacccttatcaagtaaaatttgctgtcagagattctagaaaccttccccttgcttttttaaaagaagcgattaggattttaatcgagactgactatgctattaaaagagggacttatgataaggattatctctttgatttagccttattaaaaattgctcataaaaagccc

SEQ ID NO: 6698 - protein, 345 aa, Streptococcus agalactiae
MIAIEEIGRITPDNLGLVTVLAGEDLGQYAQMKEKLFQVIGFNKDDLAYSYFDLSEEDYQNAELDLESLPFLSDYKVVIFDQFQDITTDKKTYLDEQAMKRFEAYLQNPVDTTRLVICAPGKLDGKRRLVKLLKRDARVLEANTLKESDLKTYFQKYAHQEGLVFEAGVFDELLIKSNYDFSDTLTNIAFLKSYKTDGHISSNDVREAIPKSLQDNIFDLTQDVLLGRIDLARDLVRDLRLQGEDEIKLIAIMLGQFRMFLQVKILASKGKSESQIVSELSHYIGRKINPYQVKFAVRDSRNLPLAFLKEAIRILIETDYAIKRGTYDKDYLFDLALLKIAHKKP

SEQ ID NO: 6699 - DNA, 1038 bp, Streptococcus pyogenes
atgattgcgatagaaaagattgaaaaactgagtaaagaaaatttgggtcttataacccttgtcacaggagatgacattggtcagtatagccagttgaaatcccgcttaatggagcagattgcttttgataaggatgatttggcctattcttactttgatatgtctgaggccgcttatcaggatgcagaaatggatctagtgagcctacccttctttgctgagcagaaggtggttatttttgaccatttgttagatatcacgaccaataaaaaaagtttcttaaaagaaaaagacctaaaggcctttgaagcctatttagaaaatcccttagagactactcgactaattatctttgctccaggtaaattggatagtaagagacggcttgttaagcttttgaaacgtgatgcccttgttttagaagccaaccctctgaaagaagcagagctaagaacttattttcaaaaatacagtcatcaactgggtttaggtttcgagagtggtgcctttgaccaattacttttgaaatcaaacgatgattttagtcaaatcatgaaaaacatggcctttttaaaagcctataaaaaaacgggaaatattagcctaactgatattgagcaagccattcctaaaagtttacaagataatattttcgatctgactagacttgtcctaggaggtaaaattgatgcggctagagatttgattcatgatttacggttatctggagaagatgacattaaattaatcgctatcatgctaggccaatttcgcttatttttgcagctgactattcttgctagagatgtaaaaaacgagcaacaactagtgattagtttatcagatattcttgggcggcgggttaatccttaccaggtcaagtatgcgttaaaggattctaggaccttatctcttgcctttctaacaggagcggtgaaaaccttgattgagacagattaccagataaaaacaggactttatgagaagagttatctagttgatattgctctcttaaaaatcatgactcactctcaaaaa

SEQ ID NO: 6700 - protein, 346 aa, Streptococcus pyogenes
MIAIEKIEKLSKENLGLITLVTGDDIGQYSQLKSRLMEQIAFDKDDLAYSYFDMSEAAYQDAEMDLVSLPFFAEQKVVIFDHLLDITTNKKSFLKEKDLKAFEAYLENPLETTRLIIFAPGKLDSKRRLVKLLKRDALVLEANPLKEAELRTYFQKYSHQLGLGFESGAFDQLLLKSNDDFSQIMKNMAFLKAYKKTGNISLTDIEQAIPKSLQDNIFDLTRLVLGGKIDAARDLIHDLRLSGEDDIKLIAIMLGQFRLFLQLTILARDVKNEQQLVISLSDILGRRVNPYQVKYALKDSRTLSLAFLTGAVKTLIETDYQIKTGLYEKSYLVDIALLKIMTHSQK

SEQ ID NO: 6701 - DNA, 726 bp, Streptococcus agalactiae
atgtttcacagagaagatttttcaaaagcattattaaaaaaagctttgcagcccggtatgagagttatggatattggttgtggtagtggggaattgacgcgtttggctgctgatatcgttggtaaagaaggtgatgttgtaggaattgatattaatgagcaacttttatggcaagctagacatgataatggctatgctaatgttagttatcaaaacgcagatttagcagcactttcctcctttgaaacaaaaagttttgatgcaattattggacgtcgtgtattaatgtatcaaaaagatccaaagaaagtaatagaaagtttaacacctttgttaaagccaaatggtttttatgtttttcaagaaagtgatgcaatgtgtttagaactagctaagcctagctttgtaaatatgaataaaatacaatcactaatctggcaaactgttgagaaggaaggaggacacattcatattggaagtcaacttgagcaattaatgttagaagcaggcttaatcgttgaccattttgtatcagaaaatgtcattcaaacgtcacaaactggtacagatttatcttggctactaaatatcatgaaagaaagaatacaaaaatatagtgaccttcagggattagaagatgtcaatttacaaaaagaattagaagagaataatgaccattttatccgagattgtcaatttggaattatttctcatagagttgatgaa

SEQ ID NO: 6702 - protein, 242 aa, Streptococcus agalactiae
MFHREDFSKALLKKALQPGMRVMDIGCGSGELTRLAADIVGKEGDVVGIDINEQLLWQARHDNGYANVSYQNADLAALSSFETKSFDAIIGRRVLMYQKDPKKVIESLTPLLKPNGFYVFQESDAMCLELAKPSFVNMNKIQSLIWQTVEKEGGHIHIGSQLEQLMLEAGLIVDHFVSENVIQTSQTGTDLSWLLNIMKERIQKYSDLQGLEDVNLQKELEENNDHFIRDCQFGIISHRVDE

SEQ ID NO: 6703 - DNA, 990 bp, Streptococcus agalactiae
atgaaaaactatcgaaaacttattgtactactacttctaaccttttttgtcatttttatgggagcatatgcttacactcatattgttgaaaaaagatccctaactagcaatactattgaaaaaactctacctgtggtaaatcagattaagcctcaaaccatcaaagaataccaaaattacttaactaaggtagctaaacgtaatgttcttcctgtagacattcctcaggcattaaataatgaaaaggtagaaattaccgctactgatggcatgcaaacattcacttggaatgataaaaataatcctaagcaaaaggttatcttctatgttcatggaggatcatatatccatcaagcttctgaattacaatatatttttgtcaataaactagctaaaaaattagatgcaaaagttgtctttcctatttaccctaaagctcctacatataattatagtgatgctatccccaaaattaaaaaattataccaaaatacattagctagcgtcacatctcccaaacaaattatcctagtaggtgaaagtgcaggcggaggtcttgctttaggtcttgctgataaccttgtcacggagcatatcaaacaaccaaaagaaattattttaatatcaccatggttagatattgctactaataatccaaagattgaaaaagttcaaaaaaaagatccccttcttaaagcttggcaattacaacaagtagctccttactgggcaaatggaaaaaagaattttaaaaatcctcaagttagtcctctttacagtagccaatttaacaagatggctccaatatcattttttataggaacgcacgatattttctaccccgataatcaattattacatcaaaaattagcaaaagaaaacattaaacaccactatatcgttggtcaaaaaatgaaccacgtttatccagtcttaccgattcctgaagcagagactgctttcaaacaaatgcttaaaattatcaatcat

SEQ ID NO: 6704 - protein, 330 aa, Streptococcus agalactiae
MKNYRKLIVLLLLTFFVIFMGAYAYTHIVEKRSLTSNTIEKTLPVVNQIKPQTIKEYQNYLTKVAKRNVLPVDIPQALNNEKVEITATDGMQTFTWNDKNNPKQKVIFYVHGGSYIHQASELQYIFVNKLAKKLDAKVVFPIYPKAPTYNYSDAIPKIKKLYQNTLASVTSPKQIILVGESAGGGLALGLADNLVTEHIKQPKEIILISPWLDIATNNPKIEKVQKKDPLLKAWQLQQVAPYWANGKKNFKNPQVSPLYSSQFNKMAPISFFIGTHDIFYPDNQLLHQKLAKENIKHHYIVGQKMNHVYPVLPIPEAETAFKQMLKIINH

SEQ ID NO: 6705 - DNA, 942 bp, Streptococcus agalactiae
atgacaagtattagtgatatagctaaaaaggcaggtgttgctaaatcaacagtttcccgtgttatcaatcatcacccacatgtttctgatgagacgcgacaaaaagtaatggctcttatcaccgaattggattatataccaaatcaactagcgcgggatttaagtcgaggcaaaacacaaaaaataggtgtcgtcattccccacacgcgccatccttattttacacaattaataaatggcctattagatgctgctaaaactaccgactatcaacttgttatgatgccttcggattacaaccaagaattagaactttcctacttgaaacagctcaagatggaagctattgatgctttaatattcacttcaagagcaattagcctcgatattattgaaacttatgcaaaatatggacgaatagtagtttgtgaaaaattgcaggaatataatcatctatcctctgcttaccttgatcgctattcttcatttctagaggcgttttctgatatgaagttacgaggtttggagcacttagttttattattttcaaggaataatgaatcctctgctacctatcaatccgcattattagcttatcaagaggtctatgggcaactatcctctccatatatggtagttgggaatgttcatgactttaatgatggactaaatttatcttatcaattggtaaaagaagttagtatagatggtatattagctacaagtgatgaagttgcggcagggctaataaaaggttatgaagaaagtaggaaaaaatgtccttatattattggtcaggaatgtttattagttgggcaacttttgaaactcccaacaattgaccacaaatcctattatttagggaaattagcttttaaacaggctttagctgaaaagattagtcaagaagttttattctcagagtttttatctcaagacaat

SEQ ID NO: 6706 - protein, 314 aa, Streptococcus agalactiae
MTSISDIAKKAGVAKSTVSRVINHHPHVSDETRQKVMALITELDYIPNQLARDLSRGKTQKIGVVIPHTRHPYFTQLINGLLDAAKTTDYQLVMMPSDYNQELELSYLKQLKMEAIDALIFTSRAISLDIIETYAKYGRIVVCEKLQEYNHLSSAYLDRYSSFLEAFSDMKLRGLEHLVLLFSRNNESSATYQSALLAYQEVYGQLSSPYMVVGNVHDFNDGLNLSYQLVKEVSIDGILATSDEVAAGLIKGYEESRKKCPYIIGQECLLVGQLLKLPTIDHKSYYLGKLAFKQALAEKISQEVLFSEFLSQDN

SEQ ID NO: 6707 - DNA, 807 bp, Streptococcus agalactiae
atgactatcaaacgtattttttgtgacatggatggtacactattaaatagtgaaggacaagtgagtaaaagtaacgctaccttaatacgtgaggcagcgattccagtaactttagtgtctgctagggcacctatggaaatgaaggatgccgtagatgcacttcaattaggaggagtccaagttgcttttaatggaggattgatttatagaataggagataataatcaagttctacctattcatacacaaatcattaaaaaaagcacagtaaaacaattgctaagaggaatacggtttcattttcctcaagttagtttatcttattacgatcttaataactggtattgtgataaaatagatgaaggaatccgatacgaacatagtttaactcaacaatgcccaacgtttattcataatgaggatcagtttttagaaggtcacacaaatacttttaaaattatgatgattactttcgatgaagcaaatatgctagaattagaaaaatatcttcaaagtttggagttaccagaaatcactattcaacgttcaggtaaagcgtatcttgaaattacacatctcttagccaaaaaatctaaaggaattgcttacatccttcaaaaagagcagttagctagagaagaaacggctgcatttggagatggacataatgatttgcctatgcttgaaatggtaggttaccctattgttatggataatgcttttgatgatatcaaagcgatagcatatcaactaactaagtctaatgatgaagacggagtgggatatgggattcaaaaatttttaaag

SEQ ID NO: 6708 - protein, 269 aa, Streptococcus agalactiae
MTIKRIFCDMDGTLLNSEGQVSKSNATLIREAAIPVTLVSARAPMEMKDAVDALQLGGVQVAFNGGLIYRIGDNNQVLPIHTQIIKKSTVKQLLRGIRFHFPQVSLSYYDLNNWYCDKIDEGIRYEHSLTQQCPTFIHNEDQFLEGHTNTFKIMMITFDEANMLELEKYLQSLELPEITIQRSGKAYLEITHLLAKKSKGIAYILQKEQLAREETAAFGDGHNDLPMLEMVGYPIVMDNAFDDIKAIAYQLTKSNDEDGVGYGIQKFLK

SEQ ID NO: 6709 - DNA, 216 bp, Streptococcus agalactiae
atgactattaaaagaaaaaggctgggctttccaaaaataagtggccttggaaacagttgcccagtccattttaataacacttctaggatttcaaacaaactattaatacaacttaatttaacgataggcgataagacaaatataacagttaataaaggcaaaaatataatatcaaatgcaaaagataaaagtgctgttaatataattgatattggt

SEQ ID NO: 6710 - protein, 72 aa, Streptococcus agalactiae
MTIKRKRLGFPKISGLGNSCPVHFNNTSRISNKLLIQLNLTIGDKTNITVNKGKNIISNAKDKSAVNIIDIG

SEQ ID NO: 6711 - DNA, 2235 bp, Streptococcus agalactiae
atgttacaattgactaagtattttcctctaaaacctatttatttagcattgttggtcttccaaatttacttactagtgttttcttggacaatgcttggttgtgcctttcttttattttcttttatttttctgatttatcaatatgatcgtgaaactatttttaaaacaatagcaatagtaatttttttcttattttattttttatggcaaaatcacaatatgaatgtccaatatcaaagagtaccgaatcatattagccagattaaagtgcgtattgatactatttctatcaatggtgatgttttatcattccaggcagatgcttcaggtaacacttatcaagctttttacacattaaaaaataaaagtgagaaagattattttcaaaatcttgataataatataatgataattgcagatatcaaacttgaagaagcagaggagagaaggcattttaatggctttgattatcgtcagtatttaaaaagacatggaatttatcgtatcgccaaagtgacaaagataaaacagatacgcttatttcaacataggtctttctttgctcttatgtctaagtggcgtagaagtgcaattgttattagtcaaacttttccaaatcctatgcgtcactatatgtcagggcttttgtttggatatctagataagacctttgatgacatgtccgatttatatagtagtctaggtattatacatttatttgctttgtcaggtatgcaagtaggtttttttctcggtatttttcgttatatctgtctacgtattggcttacgtctagaccatgtttggttacttcaaataccattctcgctaatttatgctggtttaacaggctttagtatctcagtcgttagggcacttattcaatctttattatcacatagcggtgtcaagaaagatgagaactttgctctctgcttgttaatttgtcttatctccctcccccactcacttttgactacgggaggagttcttagctttgcttatgcttttatacttacgatgacctcctttgatcatttttcgagtataaaaaaagtagctatcgaatctttgacagtctctgtaggaattcttcccatactaacctactatttttcgggttttcaaccaatatcaattatattaacagcacttttatcttttgcatttgatattatatttttgcctttattaactgttatatttgtcttatcgcctatcgttaaattaagttgtattaatagtttgtttgaaatcctagaagtgttattaaaatggactgggcaactgtttccaaggccacttatttttggaaagcccagcctttttcttttaatagtcatgattataattttgggattactttatgattattatcattctaaatgttttcgttattgctcccttcttattatctttaccttgttttttatcactaagaatccaattactaacgaggttgcgattttagatgttggacagggagatagtattttagtgagggattggttaggaaaaacaattttaattgatactgggggaagggtgagatttgaacagcctgaagaatggaaacaaaaagtaaatcagtctaatgctaagagaacgctcattccttacttgaaaagcagaggtattagcaagatagatgatttagtgataactcataccgatacagatcatatgggggatatggaagttatctcaaagcattttaaagttgcacgtttgattacaagttcaggttctttaacgaattcgcagtacgttaagcatttatcaaagataggtgtagcggtaaaatctatagaagccggtgataaacttgctgtcatgggaagttatttacaagtactttacccatggcacaagggtgatggaaaaaataatgattcaattgttttatatggacatttattaggaaaaggcttcttatttaccggtgatttggaggaagagggagaaaagcagttattagaagcttatcctaatttatcagtagatatccttaaagcaggacatcatggttctaagggctcatcaagtctatcctttctgaaaaagttgtctcctagtgtggttctagtttcagctggtaaaaataatcgttaccagcatcctcatcaagagactttacaaaggttccaaaagattaaaagcaagattttccgaacggatcaatcaggtacaattaggctaacaggatggtggaagtggcatattcagacagttcgt

SEQ ID NO: 6712 - protein, 745 aa, Streptococcus agalactiae
MLQLTKYFPLKPIYLALLVFQIYLLVFSWTMLGCAFLLFSFIFLIYQYDRETIFKTIAIVIFFLFYFLWQNHNMNVQYQRVPNHISQIKVRIDTISINGDVLSFQADASGNTYQAFYTLKNKSEKDYFQNLDNNIMIIADIKLEEAEERRHFNGFDYRQYLKRHGIYRIAKVTKIKQIRLFQHRSFFALMSKWRRSAIVISQTFPNPMRHYMSGLLFGYLDKTFDDMSDLYSSLGIIHLFALSGMQVGFFLGIFRYICLRIGLRLDHVWLLQIPFSLIYAGLTGFSISVVRALIQSLLSHSGVKKDENFALCLLICLISLPHSLLTTGGVLSFAYAFILTMTSFDHFSSIKKVAIESLTVSVGILPILTYYFSGFQPISIILTALLSFAFDIIFLPLLTVIFVLSPIVKLSCINSLFEILEVLLKWTGQLFPRPLIFGKPSLFLLIVMIIILGLLYDYYHSKCFRYCSLLIIFTLFFITKNPITNEVAILDVGQGDSILVRDWLGKTILIDTGGRVRFEQPEEWKQKVNQSNAKRTLIPYLKSRGISKIDDLVITHTDTDHMGDMEVISKHFKVARLITSSGSLTNSQYVKHLSKIGVAVKSIEAGDKLAVMGSYLQVLYPWHKGDGKNNDSIVLYGHLLGKGFLFTGDLEEEGEKQLLEAYPNLSVDILKAGHHGSKGSSSLSFLKKLSPSVVLVSAGKNNRYQHPHQETLQRFQKIKSKIFRTDQSGTIRLTGWWKWHIQTVR

SEQ ID NO: 6713 - DNA, 2241 bp, Streptococcus pyogenes
atgacattttcttggactaagctagtgcccctgtcaaagattcaatttgcttttttaatcttggttttcttttatcaaatccatagccctagctggttaacgtttctccttagccttagtttgatttgcttacttgtcaagcgtttgtctaaaaaagaatttctcggtgtctttgccatccttagtttctgtgctttgtttttgctgtatcagaaacagcagttggttcaaaaactggaaattcagccagtacaaataacctctgtagcattagttcctgatagtattcggattaatggtgatcaattagctgttcttggacgtcacgggaaacattcttatcagttattttaccgtttgaaaagccaagcagaagcccaattgttcaagaaagagcaccgttggttagtgatgcacgcaaaagtgacattggaaaaagctgaggaagttcgaaattttaaaggctttaattatcagacttttttgacttatcaaggaatttacaggatagggaaggtagagcaaatagaacagcttgaagtgatttcacccgagtcaatatgtgactatttgtcctctttaagacgacgagccattgttcattgccagcagcattttccaagacctatgtctcactacctgacgggcctcctttttggttatttagataagtcgtttggtgagatgacagattattatagtcagttgggtatcattcatctctttgctttatcagggatgcaggttggcttctttctcacttgttttagaagggtgttgctattactcgcagttcctttggaatggataaaatggatagagcttccttttgcttgcttttatgccgcgttgacaggttatagtatttctgttattcgaagcctcgtgcagtcgcagttgcgtcatttaggaataaaaggattagacaatctggcttgtacttttttacttgtctttttatgggatgctcatttcttaatgactgttggtggcgtattaacgtttagctatgcttttttgttaacagtggttactgttgaagaattatcaggagctaaaagacagttggtacaagtcttgaccatttccctaggaatattaccatttttgctcttttatttttccagttttaacccaatgtcaatggtcttaacagggctcttgtcttatctctttgacctttttattttgccccttctttgtctggttttttgtctatcccctttggtgactgtctcaatatgtaaccatctttttattttattagaaaaagtcattcaatttctcggaaatactttcaatagttcccttgtttttggaagcccgaccagttggcacttgcttatcttggtgattagcttcgctattttttatgattatcggcaggtgcgacaacgagttatcacttgcggtttggttatagcgttgacacttttgtctgtcaaatatcctttgaccaatgaagtgacctttatcgacattggccagggagatagtattttggtgagggagtggacagggaaaaatctcttaatagatgtaggtgggcgccctttcttttcttcaaaagagcactggcgacgaggacatcacgtagctaatgctcagaaaaccttaattccttacttaaaaagtagaggtattcacacaattgaccaactattagtaactcacgcagatactgatcatatgggggatatcgaagtggttgccaaagctattcggataaaggagattttgactagtcaaggcagtttaagccatccaagctttgttaggcggctaaggcgtttaaaatgtcacgttagggttttagcagctggagaccagttgcctattatgggaagtgtcttacaggtactctacccttggcagttaggggacgggaaaaataacgattctttggtactttatggcaggctcttaaatcgaacttttcttttcacaggtgacttggaaaaagagggggaaaacgagatcataaaacgttatcctcaactaagagtagattatttaaaagcaggtcaccatggatcaaatacctcttctagtgcagcttttttagaccatattcagcctaaagtggcctttatttctgctggaaaaaataaccgttatcagcatcctcacagagaaaccttagcccgtttggaagacagacaaatcacttattaccgaacggatacgcaaggagctattcgtttgactggtcggacaagctggcatcttgaaacggttcgt

SEQ ID NO: 6714 - protein, 747 aa, Streptococcus pyogenes
MTFSWTKLVPLSKIQFAFLILVFFYQIHSPSWLTFLLSLSLICLLVKRLSKKEFLGVFAILSFCALFLLYQKQQLVQKLEIQPVQITSVALVPDSIRINGDQLAVLGRHGKHSYQLFYRLKSQAEAQLFKKEHRWLVMHAKVTLEKAEEVRNFKGFNYQTFLTYQGIYRIGKVEQIEQLEVISPESICDYLSSLRRRAIVHCQQHFPRPMSHYLTGLLFGYLDKSFGEMTDYYSQLGIIHLFALSGMQVGFFLTCFRRVLLLLAVPLEWIKWIELPFACFYAALTGYSISVIRSLVQSQLRHLGIKGLDNLACTFLLVFLWDAHFLMTVGGVLTFSYAFLLTVVTVEELSGAKRQLVQVLTISLGILPFLLFYFSSFNPMSMVLTGLLSYLFDLFILPLLCLVFCLSPLVTVSICNHLFILLEKVIQFLGNTFNSSLVFGSPTSWHLLILVISFAIFYDYRQVRQRVITCGLVIALTLLSVKYPLTNEVTFIDIGQGDSILVREWTGKNLLIDVGGRPFFSSKEHWRRGHHVANAQKTLIPYLKSRGIHTIDQLLVTHADTDHMGDIEVVAKAIRIKEILTSQGSLSHPSFVRRLRRLKCHVRVLAAGDQLPIMGSVLQVLYPWQLGDGKNNDSLVLYGRLLNRTFLFTGDLEKEGENEIIKRYPQLRVDYLKAGHHGSNTSSSAAFLDHIQPKVAFISAGKNNRYQHPHRETLARLEDRQITYYRTDTQGAIRLTGRTSWHLETVR

SEQ ID NO: 6715 - DNA, 651 bp, Streptococcus agalactiae
atgtttgaaatagtattggaaaaaattaaatcgcataaatgggagacaacaggaattattgtaggactcttattatttggaattttgggtttaaatcattttggcactcatcataaagaagacaatttaaatatcaatttagagaaaaaagtatcaactataacagaaaaaaaggtaccaatgattagtcacgtcaaagataaagtatctaatcaagtaacggttgacgtaaaaggggcagtcaatcatccaggtgtttatagtttgccttctcaaagtcgtgtaacagatgcgattaagcgtgcaggtggactaagcaatctcgctgatagtaaatccgttaatctagcacagaaattacaagatgagacggttatctatgttgctcaaaaaggtgaaaaaataactgttgtggaagaggagaaagcaaataatatcgctactcagggaaatagtaaggggaaaattaatcttaataaagcagatttatcaagtcttcagaccatatcaggcgttggggctaaaagagctcaagatattttagattatcgtgatagtcaaggtggttttaaaactattgatgacctcaaaaacgtatcaggtattggtgagaaaacactagaaaaattacgtcaagatgttacaattgac

SEQ ID NO: 6716 - protein, 217 aa, Streptococcus agalactiae
MFEIVLEKIKSHKWETTGIIVGLLLFGILGLNHFGTHHKEDNLNINLEKKVSTITEKKVPMISHVKDKVSNQVTVDVKGAVNHPGVYSLPSQSRVTDAIKRAGGLSNLADSKSVNLAQKLQDETVIYVAQKGEKITVVEEEKANNIATQGNSKGKINLNKADLSSLQTISGVGAKRAQDILDYRDSQGGFKTIDDLKNVSGIGEKTLEKLRQDVTID

SEQ ID NO: 6717 - DNA, 660 bp, Streptococcus pyogenes
atgttagacgaattattaattaaaggaaaatcgtttttgagagagcggtattttctgccatacctaattagtcttttattaggactttttctaatactaagcttcagttttttgttctggggaaataggcagagcaaggcagccgttcctgctttgagagaaatatcgcctgtgaaacagcaggttagtgaagaaaaaaaggaaattcaagaagatagcagtattttagtggatttaaaaggcgccgtacaaaaagagggagtttataagctaactgctagcagtcgtgtgcgagatgtcattgaactagctggaggcctaacttcagaagctgataaacatgctattaattttgcagaaaaactaactgatgagcaagttgtttatgtacctaaacaaggagaagagatttctgtgctaccaagatcattagtttctggtaaaaaagaaactgccagcaaggatcagtcaaaggttcatattaataaggccagcttagaagaactacaacatatcccaggtattggtgctaaaagagctcaggatattattgatatgagagataagttaggtggttttaaagcgttagaagatctccgtcaggtttcggggattggcgaaaaaacgctcgagaaattaaaagatgacattttcttggac

SEQ ID NO: 6718 - protein, 220 aa, Streptococcus pyogenes
MLDELLIKGKSFLRERYFLPYLISLLLGLFLILSFSFLFWGNRQSKAAVPALREISPVKQQVSEEKKEIQEDSSILVDLKGAVQKEGVYKLTASSRVRDVIELAGGLTSEADKHAINFAEKLTDEQVVYVPKQGEEISVLPRSLVSGKKETASKDQSKVHINKASLEELQHIPGIGAKRAQDIIDMRDKLGGFKALEDLRQVSGIGEKTLEKLKDDIFLD

SEQ ID NO: 6719 - DNA, 738 bp, Streptococcus agalactiae
atgttctatacttacttacgtactttagttatgttcttgatttgggtggctaatggtaatgcgcactatcataatgaagataaaatgttaaaagatgatgaaaattatattttagtagctccacacagaacattttgggatcctgtgtacatggcttttgctgctagacccaaacagtttatttttatggccaaaaaagaattattcacgaatcgtttgtttggttggtggattaaaatgtgtggtgctttccctattgatcgtgaaaagccagggcaagatgctattcgatatcctgtaaagatgctgaaaaatagcaaccgttctttggtgatgtttccgagtggaagccgccactccaaagatgtcaaaggaggcgtagctgttattgcaaaaatggcaaaagtcagaattatgccagcagcatatagaggtcctatggtttttaaaaatctattaaaggggcatcgtgttgatatgaattttggtaaccctattgatgtttctgatattaagcgtatggatgccgaagggattgcagaagtatctcgtcgtattcaggaagaatttgatcgtttagatagagaaaatgaaacttatgatgatggtaagaaattaaatccattgacttatatttatcgtctacctttagcaattatagctattgtcttgcttgtcctaactctaatttttagttatttagcaagctttgtgtgggatccacaaaaacatctaaaa

SEQ ID NO: 6720 - protein, 246 aa, Streptococcus agalactiae
MFYTYLRTLVMFLIWVANGNAHYHNEDKMLKDDENYILVAPHRTFWDPVYMAFAARPKQFIFMAKKELFTNRLFGWWIKMCGAFPIDREKPGQDAIRYPVKMLKNSNRSLVMFPSGSRHSKDVKGGVAVIAKMAKVRIMPAAYRGPMVFKNLLKGHRVDMNFGNPIDVSDIKRMDAEGIAEVSRRIQEEFDRLDRENETYDDGKKLNPLTYIYRLPLAIIAIVLLVLTLIFSYLASFVWDPQKHLK

SEQ ID NO: 6721 - DNA, 816 bp, Streptococcus pyogenes
ttgaagagtgattttgactttcgaaaagtcagctttcgtgatacaataagtaagattattctattaaaggagaagcctgtgttttacgcttacttacgcggtttagtagtctttttattatgggttgtcaatggcaatgcccactaccatcatgaagaaaagatgttagatgcttctgagaattatattctggtagcaccccatcgaaccttttgggatccagtttacatggcatttgcagcacgtcctaagcagtttatttttatggctaaaaaagagttgtttgcaaatcgtctctttgcttggtggattaaaatgtgtggtgcttttcctattgatcgtgacaaaccgagtccagatgctattcgttaccctgttaatatgctcaaaaagagcaatcgttctcttcttatgtttccaagtggaagtaggcattcgcaagaggtcaaaggaggggtcgctgtgattgctaaattggctaaggtcaagattatgccagcagcctatcaggggcctatgtcggtcaagggattactagcgggagaacgggttgacatgacttttgggaatcccattgacgtctcagatattaaacgcatgaatgatgaagggattgctgaggtggcaaaccgtattcaggcagagtttgatcggattgatgacgagttggcacctttccaaccaggcaaagcaaggaaccctttaacttatctctaccgtttaccattaggattggttttggtggtggtattattattaaccatgttattttcctatattgctagttttgtttggaatccagataaacatcgccat

SEQ ID NO: 6722 - protein, 272 aa, Streptococcus pyogenes
LKSDFDFRKVSFRDTISKIILLKEKPVFYAYLRGLVVFLLWVVNGNAHYHHEEKMLDASENYILVAPHRTFWDPVYMAFAARPKQFIFMAKKELFANRLFAWWIKMCGAFPIDRDKPSPDAIRYPVNMLKKSNRSLLMFPSGSRHSQEVKGGVAVIAKLAKVKIMPAAYQGPMSVKGLLAGERVDMTFGNPIDVSDIKRMNDEGIAEVANRIQAEFDRIDDELAPFQPGKARNPLTYLYRLPLGLVLVVVLLLTMLFSYIASFVWNPDKHRH

SEQ ID NO: 6723 - DNA, 762 bp, Streptococcus agalactiae
atgatagatacaattttaaaagaaaatgaacgcattgatcagcttttttcaactgatgtcaaaatcatccaaaacaaagaagttttttcctattccatagatagtgttttattgtctcggttccctaaacttccttctcgtggtcttatcgttgacttatgtagtggtaatggtgctgtcggtttgtttgccagcaccaaaacaaatgcgacaattatagagatcgaactacaagagagccttgcggatatggctaagcgttcgattaagctcaataaattggaaaaacaggttactatgattaatgatgatttaaaaaatcttcttgatcatgttcaacgttcaaacgttgatttaatgctttgcaatccaccttatttcaaagcaagcgaaacctctaaaaaaaatctaagcccgcattatctccttgcaagacacgaaataacaacaaaccttagagagatttgtcaaattgctcaacatgctctaaaaacaaaaggacgtatcgctatggtacatcgtccagaccgtttccttgaaattattgatacgatgcgtcagttcaatttagcacctaaacgtatccaatttgtttatccaaaattaggaaaagatgctaatatgcttttaattgaagctattaaagatggctcgacagaaggtatgaaaatacttcctcctcttgttgttcatcaagataatggagactatactgagactatttttgatatatatttcggagaaaacggaaaatctcatgat

SEQ ID NO: 6724 - protein, 254 aa, Streptococcus agalactiae
MIDTILKENERIDQLFSTDVKIIQNKEVFSYSIDSVLLSRFPKLPSRGLIVDLCSGNGAVGLFASTKTNATIIEIELQESLADMAKRSIKLNKLEKQVTMINDDLKNLLDHVQRSNVDLMLCNPPYFKASETSKKNLSPHYLLARHEITTNLREICQIAQHALKTKGRIAMVHRPDRFLEIIDTMRQFNLAPKRIQFVYPKLGKDANMLLIEAIKDGSTEGMKILPPLVVHQDNGDYTETIFDIYFGENGKSHD

SEQ ID NO: 6725 - DNA, 774 bp, Streptococcus pyogenes
atgataaaagcaatcttaaaagaaggcgaacgtattgatcaactcttttcaagtgatgttggcattattcaaaacaaggatgtctttagttactctattgatagcgtcctcttatcccgcttccccaagatgccttccaaagggttaattgtggatttgtgctcaggaaatggggcggttggcttatttgctagcactagaaccaaggcagccatcgttgaagtagaattacaagaacggcttgctgatatgggacaacgctctatccagctcaatcaactggaagaccaagtaaccatgatttgtgatgatttaaaaaacctcctaaaccatgtgccacgttcaggagttgatttgatgctctgcaatcccccttactttaaaagtcacgaaagttctaagaagaacgtctctgaacattatttactggctcgtcatgaagtgaccactaatttagaagagatttgtcaggtagcccgtcatgcccttaaatcaaatggtcgtctggcaatggttcatcgaccagatcgattcttggaaattatagatagccttagagctaatggtcttgcccctaaaagggtacaatttgtctatcctaaattaggtaaatcagctaatatgttacttattgaagcaatcaaagacggttctattgaagggatgactattttacctcctttagttgtccacaaggaaaacggagaatacactgatcatatttttgagatttattttggtgctgcttccaaaggaaaacctaatcatgaccac

SEQ ID NO: 6726 - protein, 258 aa, Streptococcus pyogenes
MIKAILKEGERIDQLFSSDVGIIQNKDVFSYSIDSVLLSRFPKMPSKGLIVDLCSGNGAVGLFASTRTKAAIVEVELQERLADMGQRSIQLNQLEDQVTMICDDLKNLLNHVPRSGVDLMLCNPPYFKSHESSKKNVSEHYLLARHEVTTNLEEICQVARHALKSNGRLAMVHRPDRFLEIIDSLRANGLAPKRVQFVYPKLGKSANMLLIEAIKDGSIEGMTILPPLVVHKENGEYTDHIFEIYFGAASKGKPNHDH

SEQ ID NO: 6727 - DNA, 264 bp, Streptococcus agalactiae
atgattaaagttcctgcttatatgtatgttttagaatgttcagatggaacactttatacaggttatactacagatgtcaagcgccgtctcaatacacacaatactggaaaaggtgctaaatatactcgtgcgagattgccagtaaaacttctttattctgaagcttttaatagcaaacaagaagcaatgagggcagaagcattatttaaacaaaagactcggcaagcaaaattgacttatattaaacaacataaaaatgaacaa

SEQ ID NO: 6728 - protein, 88 aa, Streptococcus agalactiae
MIKVPAYMYVLECSDGTLYTGYTTDVKRRLNTHNTGKGAKYTRARLPVKLLYSEAFNSKQEAMRAEALFKQKTRQAKLTYIKQHKNEQ

SEQ ID NO: 6729 - DNA, 276 bp, Streptococcus pyogenes
atgaccactaaaaaagcttatatgtatgtgttagaatgtgttgataaaaccctctacactggttatacaactgatttgaaaaaacgcttagctacacataacgcaggaaagggggctaaatatactcgctaccggttacctgtttctttactttattacgaagtgtttgatagcaaagaggctgcgatgagcgctgaagcactctttaaaaaacgaaaaacaagaagccagaaattggcctatattgctactcatcaaaaagaaaagaaaaatcat

SEQ ID NO: 6730 - protein, 92 aa, Streptococcus pyogenes
MTTKKAYMYVLECVDKTLYTGYTTDLKKRLATHNAGKGAKYTRYRLPVSLLYYEVFDSKEAAMSAEALFKKRKTRSQKLAYIATHQKEKKNH

SEQ ID NO: 6731 - DNA, 1584 bp, Streptococcus agalactiae
ttgaaatttacagaacttaacttatcgcaagatattctttcagcggtagaaaaagcaggctttgtagagccatcaccaatccaagaaatgactatcccacttgctcttgaaggcaaagatgtcattggtcaagcgcagacaggtacaggaaaaactgcagcttttgggttaccaactttaaataaaattcatactgaagataatactatccaagcacttattattgctcctacacgtgaacttgcagtacaatcacaagaagaattgttccgttttggacgcgataaaggtgttaaggtccgctctgtttatggtgggtcaagtattgaaaaacaaatcaaggcattacgttcaggagcacacgttgttgttggaactccaggtcgattacttgatttaattaaacgtaaagcacttaaacttaatcacattgaaactcttattcttgatgaagcagacgaaatgcttaacatgggatttttagaggacattgaagcaatcattagtcgtgtaccagaaacacgtcaaactcttttattctcagcgacaatgcctgatccaatcaaacgtatcggcgttaaattcatgaaagatcctgagcatgttaaaattaaagcaactgaattaactaatgtgaatgttgatcagtattatgttcgtgttaaggaaaatgaaaaattcgatactatgacacgtttgatggacgttgatcaaccagaattgtcaattgtctttggacgtacgaaacgtcgtgtagatgaattaactcgtggactaaaattacgtggtttccgagcagaaggaattcatggagacttagatcaaaataaacgtcttcgtgttatcagagactttaaaaatgaccatattgatattcttgttgccacagatgttgctgcgcgtggtttagatatttcaggcgttacacatgtttacaactatgatattccccaagatcccgaaagttatgttcaccgtattggacgtactggtcgtgctggtaaatctggtcaatctatcacttttgtttcaccaaacgaaatgggatatttgacaattattgaaaacttaactaaaaaacgtatgactggaatgaagcctgctactgcaagcgaagcatttcaggctaagaaaaaagttgcattgaaacgtattgcacgtgactttgaggatcaggaattagtttctaaatttgataaatttaaagccgatgctttagaattagcaactcaatacacaccagaagaacttgctctttatgtcttaagcttaacagttcaggatccagaatcgttaccagaagttgaaatcacacgtgaaaaaccattaccatttaaaccatcaggtggtggctttaaaggtaaaggtggacgaggcaatggccgtggtggcgatcgtcgacgcaatgatcgtggtgatcgtcgtggaaatcgtgaccgtgatgatcgtggtagtcgttgtgattttaaacgtcgtgatgataagttcaagaaagataatcgtcgtcaagaaaataaaaaacctcataaaaacacttcaagtgaaaaacaaactggatttgttattcgcaacaaaggcgataaa

SEQ ID NO: 6732 - protein, 528 aa, Streptococcus agalactiae
MKFTELNLSQDILSAVEKAGFVEPSPIQEMTIPLALEGKDVIGQAQTGTGKTAAFGLPTLNKIHTEDNTIQALIIAPTRELAVQSQEELFRFGRDKGVKVRSVYGGSSIEKQIKALRSGAHVVVGTPGRLLDLIKRKALKLNHIETLILDEADEMLNMGFLEDIEAIISRVPETRQTLLFSATMPDPIKRIGVKFMKDPEHVKIKATELTNVNVDQYYVRVKENEKFDTMTRLMDVDQPELSIVFGRTKRRVDELTRGLKLRGFRAEGIHGDLDQNKRLRVIRDFKNDHIDILVATDVAARGLDISGVTHVYNYDIPQDPESYVHRIGRTGRAGKSGQSITFVSPNEMGYLTIIENLTKKRMTGMKPATASEAFQAKKKVALKRIARDFEDQELVSKFDKFKADALELATQYTPEELALYVLSLTVQDPESLPEVEITREKPLPFKPSGGGFKGKGGRGNGRGGDRRRNDRGDRRGNRDRDDRGSRCDFKRRDDKFKKDNRRQENKKPHKNTSSEKQTGFVIRNKGDK

SEQ ID NO: 6733 - DNA, 1617 bp, Streptococcus pyogenes
ttgaaatttacagaatttaacttatcacaagacatccaatcagctgttgttaccgctggttttgagaaagcatctcctatccaggaaatgacgattcctctcgcactagaagggaaggatgttattggtcaagcacaaacaggaactggtaaaacagcagcgtttggtctaccaaccttgaataagattcgtactaacgaaaatatcatccaagcattggtcattgcaccaacgcgtgaattggctgtacaaagtcaggaagaattgttccgttttggacgtgaaaaaggggttaaggttcgctctgtttacggtggatcaagtattgaaaaacaaatcaaagcccttaaatcaggtgcccacattgtcgtgggaacaccgggtcgcttgttagatttgattaagcgcaaggctcttattttagatcatgtggaaaccttaatccttgatgaagcagatgaaatgcttaacatgggattcttggaagacattgaagctattattagtcgtgtcccagcagaccgtcaaaccttgctcttctccgcaacgatgccggcacctattaaacaaatcggggttaaattcatgaaagaccctgaacatgttcaaattaagaacaaagaattaacaaacgtcaatgttgatcaatactatgttcgtgtgaaagaacaagaaaaatttgatactatgacccgtctgatggatgttaaccagccagaattatccatcgtttttgggcggactaagcgccgagttgatgaaattacacgtggcttgaaacttcgtggtttccgtgccgaaggaatccatggtgatcttgaccaaaataaacgcttacgtgttatccgtgatttcaaaaacgaccaaattgatattcttgttgccactgatgtagcagcgcgtggccttgatatttcaggagttacccacgtttataactacgatattacccaagatccagaaagttatgttcaccgtattggtcgtacaggtcgtgccggtaaatctggtgagtctatcacttttgtctcaccaaatgagatgggctacctctcaatgattgagaacttaacgaaaaaacagatgaaacctcttcgtccagcaactgctgaagaggcctttcaagccaagaaaaaagtagccctcaagaaaattgaacgcgactttgcggatgagactattcgttcaaactttgataaattcaaaggcgatgctgtccaattggctgccgaattcactcctgaagaattagctttatatattttgagcttaacggttcaagatccagatagcttaccggaagttgaaattgcacgtgaaaaaccattaccattcaaatatgtgggtggtggtcacggcaataaaaatggcaaaggtggtcgtggacgtgacaaccgtaaccgtggtgatcgccgtggcggctatcgtggtgaccgtaacagagatgagcgtgatggtgaccgtcgtcgtcaaaaacgtgataagcgtgatggtcacgatggcagtggcaaccgcgatttcaaacgtaaatcaaaacgtaatagtaaagactttttcaataaagagaaaaaatcaagtgctaaaaatactggttttgtgattcgtcacaaaggtgaa

SEQ ID NO: 6734 - protein, 539 aa, Streptococcus pyogenes
LKFTEFNLSQDIQSAVVTAGFEKASPIQEMTIPLALEGKDVIGQAQTGTGKTAAFGLPTLNKIRTNENIIQALVIAPTRELAVQSQEELFRFGREKGVKVRSVYGGSSIEKQIKALKSGAHIVVGTPGRLLDLIKRKALILDHVETLILDEADEMLNMGFLEDIEAIISRVPADRQTLLFSATMPAPIKQIGVKFMKDPEHVQIKNKELTNVNVDQYYVRVKEQEKFDTMTRLMDVNQPELSIVFGRTKRRVDEITRGLKLRGFRAEGIHGDLDQNKRLRVIRDFKNDQIDILVATDVAARGLDISGVTHVYNYDITQDPESYVHRIGRTGRAGKSGESITFVSPNEMGYLSMIENLTKKQMKPLRPATAEEAFQAKKKVALKKIERDFADETIRSNFDKFKGDAVQLAAEFTPEELALYILSLTVQDPDSLPEVEIAREKPLPFKYVGGGHGNKNGKGGRGRDNRNRGDRRGGYRGDRNRDERDGDRRRQKRDKRDGHDGSGNRDFKRKSKRNSKDFFNKEKKSSAKNTGFVIRHKGE

SEQ ID NO: 6735 - DNA, 828 bp, Streptococcus agalactiae
atgaaaaaattactttccctaacatgtctaatcatgatgtctttatgtttagtggcatgtactaagcaagcaatgtcgtctaagaaaattaaagataagaatagtaaagaaaaggtgattactgttgcaacttacagcaaacctacatctacctttttagatttggttaaagataatgtaaaagaaaaaggatatactttaaaggttgtcatggtctctgactatattcaggctaacattgctttagaaaacaaagaacatgatgctaaccttttacaacatgaatttttcatgagtatctttaataaggaaaatgatggtcatctagtatcaattacaccaatttatcattcattggctggtttttatggtcaacatttgaaaaatattgccgagcttaaagacggtgctaaggtagcgattccgtctgatcctgccaatatgactagagctctgctattattgcaagaaaagaaacttatcaccttaaagaatacgtccaaaaagaccaaggctatcgaagatattattactaaccctaaaaaattacgaattgaacctgtagcattacttaacctcaatcaggcctattttgaatatgaccttgtctttaatttccctggatatgtgacaaaaatcaatctagttcctaaaagggatagattattatatgagaaaaaaccagatatccgttttgcaggtgccttggtagctcgtgaagataataaaaatagtgataaaataaaagtacttaaagaagtactaacaagtaaagagattcgtcactatatcactaaggagattccaagtgaagcagccgttgcgttc

SEQ ID NO: 6736 - protein, 276 aa, Streptococcus agalactiae
MKKLLSLTCLIMMSLCLVACTKQAMSSKKIKDKNSKEKVITVATYSKPTSTFLDLVKDNVKEKGYTLKVVMVSDYIQANIALENKEHDANLLQHEFFMSIFNKENDGHLVSITPIYHSLAGFYGQHLKNIAELKDGAKVAIPSDPANMTRALLLLQEKKLITLKNTSKKTKAIEDIITNPKKLRIEPVALLNLNQAYFEYDLVFNFPGYVTKINLVPKRDRLLYEKKPDIRFAGALVAREDNKNSDKIKVLKEVLTSKEIRHYITKEIPSEAAVAF

SEQ ID NO: 6737 - DNA, 660 bp, Streptococcus agalactiae
atgattgacattattgaaaaacatggcgaaggtatcttaaaatcattttgggaaaccaatttaatgttagggttaaccttgattctttgttttctaattgcttttccaacaggtattttattgttttcattgagaaagtcttacttgattaaacattctttagcctatcaactactaaatttatttttaggtacgttacggagtgtccctttccttatttttatttttatcttaatccctctcaatcgattaatttttgggacctcatttggaacgatagcggcaatcttacctcttactttggtttcagtcagtttgtatgcacgttatgtggaacaagctttattaaatatacctcaagttgttgtagatcgagctctcagtctaggggctaacaagagacagataatttattattttttaatcccctccatcaagattgaccttgttttatcatttactgcaacggctataagtattcttggctactcgacaataatgggagttattggtgcaggaggtttgggtgaatatgcctatcgttttggctatcaagagtatgactacccagttatgtacttgattgttgtcttatttataatatatgtgtttatcttacagagtttgggctattttatagcaaaccgctactcaagaaaa

SEQ ID NO: 6738 - protein, 220 aa, Streptococcus agalactiae
MIDIIEKHGEGILKSFWETNLMLGLTLILCFLIAFPTGILLFSLRKSYLIKHSLAYQLLNLFLGTLRSVPFLIFIFILIPLNRLIFGTSFGTIAAILPLTLVSVSLYARYVEQALLNIPQVVVDRALSLGANKRQIIYYFLIPSIKIDLVLSFTATAISILGYSTIMGVIGAGGLGEYAYRFGYQEYDYPVMYLIVVLFIIYVFILQSLGYFIANRYSRK

SEQ ID NO: 6739 - DNA, 597 bp, Streptococcus agalactiae
ttgaagatgattaatggcttaatcccttatgataaaggaaatatttattatcaaggaaaagaagtgaagtctttttctgataataagttacgtcagatgcgtaaagatattgcttatatttttcaaaatcataatttgttagcaggagaaagtgtatattatcatctagctttagtttataaattaaatcatcaaaaagtaaatcatgacgcaattaatgatatcttagattttttaggtttgatggatttaaaacaggtgaaatgccatagtttgagtggtgggcagcaacaaaaagttgcaatcgctatggctgttttgcaaaaaccgaaacttattctatgtgatgagatcagctctgccttagatactaatagtgaaaaagagatatttaacttgttgtctgatcttcgtgaaaaatatggtatctctatcttgatgattgctcatcacctatctcttttaaaacaatattgtgatcgtgtaatgattttggatcaccagactattgtagatactgttgttccagtgaaagcaactctgaatcaattaaagtcaaactacgtagatcaagtaaaggagtttttgttacatgat

SEQ ID NO: 6740 - protein, 199 aa, Streptococcus agalactiae
MKMINGLIPYDKGNIYYQGKEVKSFSDNKLRQMRKDIAYIFQNHNLLAGESVYYHLALVYKLNHQKVNHDAINDILDFLGLMDLKQVKCHSLSGGQQQKVAIAMAVLQKPKLILCDEISSALDTNSEKEIFNLLSDLREKYGISILMIAHHLSLLKQYCDRVMILDHQTIVDTVVPVKATLNQLKSNYVDQVKEFLLHD

SEQ ID NO: 6741 - DNA, 108 bp, Streptococcus agalactiae
gtgattttggaaaaatttttccaacactctttaattctattatcattatttaatactcctcaaaaaaatatcttatcaaaaaaatacagcgttttcaaaatatatgct

SEQ ID NO: 6742 - protein, 36 aa, Streptococcus agalactiae
MILEKFFQHSLILLSLFNTPQKNILSKKYSVFKIYA

SEQ ID NO: 6743 - DNA, 390 bp, Streptococcus agalactiae
ttggagattaacatgggaattttttcgggattaatgggaaatgcttcacaaatggataccgataaagtcgagaatcagttatctgatattctgatttcagatgaacaggttgatttagcttataccttaattcgtgatttgattgtttttactaattatcgtttaattttagtcgataaacagggggtgacaggtaaaaaggtttcttataattctataccttatgcttctatatcacgttttacagtggaaactagtggtcattttgatttagatgctgagttaaagatttggatatcatcagcaatagaaccagcagaagtacttcagtttaagaacgaccgtaacatagtgagtatacagaaagctttggcgacagctgttttaaaa

SEQ ID NO: 6744 - protein, 130 aa, Streptococcus agalactiae
MEINMGIFSGLMGNASQMDTDKVENQLSDILISDEQVDLAYTLIRDLIVFTNYRLILVDKQGVTGKKVSYNSIPYASISRFTVETSGHFDLDAELKIWISSAIEPAEVLQFKNDRNIVSIQKALATAVLK

SEQ ID NO: 6745 - DNA, 1374 bp, Streptococcus agalactiae
atggatattgaaaagcaacggggtatctctgttacttcatctgttatgcaatttgattacgcgggtaaacgtgttaatattttggatacacctggacatgaggatttctcggaagatacataccggaccttaatggctgtggatgcagctgtcatggttgtagattcggctaaaggtattgaggctcaaactaaaaaactttttgaagttgttaagcatcgtaatattccggtttttacgtttattaataaattggaccgtgatggacgtgagccattggatttgcttgaagagttagaagaagtactaggtattgcttcttatccaatgaattggccgattggtatggggaaatcatttgaagggctttatgatttacataataaacgtttagaactctataagggagacgagcgttttgcaagtattgaagacggtgatcagctgtttgccaataatccattttatgaacaagtcaaagaagatattgaacttcttcaagaagcaggtaatgacttttcagaacaagctattcttgatggtgacctaactccagtattctttggctctgcccttacgaactttggagttcagacttttcttgatactttcttggagtttgctccagaacctcatggtcacaagactacagaaggtaatgttattgaccccttggctaaagatttttcaggttttgtctttaaaattcaagctaacatggacccacgtcatcgcgaccgtattgcttttgttcgtattgtttctggtgaatttgagcgcggtatgggagttaatttgacacgtactggtaaaggtgctaagctctccaatgttactcaatttatggcagaatcacgtgaaaatgtgacgaatgctgttgctggggatattatcggggtttatgatacaggaacttatcaagttggggataccttaacagttgggaaaaataaatttgaatttgaaccattaccaacttttaccccagaattatttatgaaagtatcagcaaaaaatgttatgaagcagaaatcattccacaaaggtattgagcaattagtacaagaaggagcaatccagctttataagaattatcagacaggcgaatacatgctgggtgctgtgggtcaacttcagtttgaagtttttaaacatcgtatggaaggtgaatacaatgctgaagttgttatgacaccaatgggtaaaaagactgtacgttggattaactcagacgatttagacgaacgcatgtcttcaagccgaaatattttagcaaaagatcgttttgaccaaccagttttcctatttgaaaatgattttgcacttcgctggtttgctgataagtatcctgatgtgaagcttgaagaaaaaatg

SEQ ID NO: 6746 - protein, 458 aa, Streptococcus agalactiae
MDIEKQRGISVTSSVMQFDYAGKRVNILDTPGHEDFSEDTYRTLMAVDAAVMVVDSAKGIEAQTKKLFEVVKHRNIPVFTFINKLDRDGREPLDLLEELEEVLGIASYPMNWPIGMGKSFEGLYDLHNKRLELYKGDERFASIEDGDQLFANNPFYEQVKEDIELLQEAGNDFSEQAILDGDLTPVFFGSALTNFGVQTFLDTFLEFAPEPHGHKTTEGNVIDPLAKDFSGFVFKIQANMDPRHRDRIAFVRIVSGEFERGMGVNLTRTGKGAKLSNVTQFMAESRENVTNAVAGDIIGVYDTGTYQVGDTLTVGKNKFEFEPLPTFTPELFMKVSAKNVMKQKSFHKGIEQLVQEGAIQLYKNYQTGEYMLGAVGQLQFEVFKHRMEGEYNAEVVMTPMGKKTVRWINSDDLDERMSSSRNILAKDRFDQPVFLFENDFALRWFADKYPDVKLEEKM

SEQ ID NO: 6747 - DNA, 1542 bp, Streptococcus pyogenes
atgtcacttacagaagaaattaaaaaacgccgtacttttgccatcatttctcacccggatgctggtaagacgactattactgagcaactattatattttggtggtgaaattagagaagcagggacagtaaaaggcaaaaaatcaggtacgtttgcaaagtccgactggatggatattgaaaagcaacgtggtatctctgttacttcatctgttatgcaatttgattacgcgggtaaacgtgttaatattttggatacacctggacatgaggatttctcggaagatacataccgtaccttaatggctgtggatgcggctgtcatggttgtagattcggctaaaggtattgaggcgcaaacgaaaaaactttttgaagttgtcaaacatcgtaatattcctgtcttcacctttattaacaagttagaccgtgatgggcgtgagcctttagaactcttggaagaattagaagaagttttagggattgcttcttatccgatgaactggccgattggtatgggacgcgcctttgagggcttatatgatttacataataaacgtttagaactctataagggagacgagcgttttgcaagtattgaagacggtgatcagctgtttgccaataatcccttttatgaacaagtcaaagaagatattgaacttcttcaagaagcaggtaatgacttttcagaacaagctattcttgatggtgacctaactccagtcttttttggctctgcccttacgaactttggagttcagacttttcttgatactttcttggagtttgccccagaacctcatggtcacaagactacagaaggtaatgttgttgaccccttagctaaagatttttcaggttttgtctttaaaattcaagctaacatggaccctaaacaccgtgaccgtattgcttttgtgcgtattgtttctggtgaatttgagcgcggtatgggagttaatttgacacgcactggcaaaggcgctaagctctccaatgttactcaatttatggcagaatcacgggaaaatgtgacgaatgctgttgctggggatattatcggggtttatgatacaggaacttatcaagttggggataccttaacagttgggaaaaataaatttgaatttgaacccttaccaacttttaccccagaaatcttcatgaaggtttctccgaaaaatgttatgaagcagaaatccttccacaaaggtattgaacaattagtacaagaaggagcaattcagctttataagaattatcagacaggcgaatacatgctgggtgctgtgggtcaactgcagtttgaagtctttaaacatcgtatggaaggtgaatacaacgctgaagttgtgatgacaccaatgggtaaaaagactgttcgctggatttcagaagatgatttggatcaacgcatgtcttcaagccgaaacattttagctaaggatcgttttgaccaaccagttttcctatttgaaaatgattttgcccttcgctggtttgcagacaaatacccagatgtcactttagaagagaaaatg

SEQ ID NO: 6748 - protein, 514 aa, Streptococcus pyogenes
MSLTEEIKKRRTFAIISHPDAGKTTITEQLLYFGGEIREAGTVKGKKSGTFAKSDWMDIEKQRGISVTSSVMQFDYAGKRVNILDTPGHEDFSEDTYRTLMAVDAAVMVVDSAKGIEAQTKKLFEVVKHRNIPVFTFINKLDRDGREPLELLEELEEVLGIASYPMNWPIGMGRAFEGLYDLHNKRLELYKGDERFASIEDGDQLFANNPFYEQVKEDIELLQEAGNDFSEQAILDGDLTPVFFGSALTNFGVQTFLDTFLEFAPEPHGHKTTEGNVVDPLAKDFSGFVFKIQANMDPKHRDRIAFVRIVSGEFERGMGVNLTRTGKGAKLSNVTQFMAESRENVTNAVAGDIIGVYDTGTYQVGDTLTVGKNKFEFEPLPTFTPEIFMKVSPKNVMKQKSFHKGIEQLVQEGAIQLYKNYQTGEYMLGAVGQLQFEVFKHRMEGEYNAEVVMTPMGKKTVRWISEDDLDQRMSSSRNILAKDRFDQPVFLFENDFALRWFADKYPDVTLEEKM

SEQ ID NO: 6749 - DNA, 429 bp, Streptococcus agalactiae
ttgttagagtttgcagcacaaaaaacaggtaaagagaataaagaaatggctgtaacgtttgtcactaatgaacgtagccatgaattgaatttagagtatcgagataccgatcgtccgactgatgttatcagtttagaatataagcctgaggttgatatttcttttgatgaagaagatctggctgaaaatcctgaacttgctgagatgctagaagattttgattcttatattggtgaactttttatttctattgataaagctaaagaacaagcagaagagtacggtcactcttatgaacgtgaaatgggttttttagctgtacatggttttttgcatattaacggttatgatcattatacacccgaagaagaaaaagagatgttcagcttacaggaagaaattttaactgcttatggacttaaacgacaa

SEQ ID NO: 6750 - protein, 143 aa, Streptococcus agalactiae
MLEFAAQKTGKENKEMAVTFVTNERSHELNLEYRDTDRPTDVISLEYKPEVDISFDEEDLAENPELAEMLEDFDSYIGELFISIDKAKEQAEEYGHSYEREMGFLAVHGFLHINGYDHYTPEEEKEMFSLQEEILTAYGLKRQ

SEQ ID NO: 6751 - DNA, 396 bp, Streptococcus agalactiae
atggacttaaacgacaataatcacaaaaaatggaaaaatcgcaccttaacatcaagcatggaatttgctgttacagggatttttacagcttttaaagaagaaagaaatatgcgtaagcatttggtttctgccattttagtaatacttgctggtcttactttccaagtatctatggtggagtggttatttcttttattgagtatttttttggtaattacttttgaaattatcaattcagctattgaaaatgtagttgatttggcaagtaattaccatttctcgatgctggctaaaaatgctaaagatatggcagcaggagcggttttagttgtttccttatttgccgtattggtgggattgattatttttatacccaagatacttgctttactttta

SEQ ID NO: 6752 - protein, 132 aa, Streptococcus agalactiae
MDLNDNNHKKWKNRTLTSSMEFAVTGIFTAFKEERNMRKHLVSAILVILAGLTFQVSMVEWLFLLLSIFLVITFEIINSAIENVVDLASNYHFSMLAKNAKDMAAGAVLVVSLFAVLVGLIIFIPKILALLL

SEQ ID NO: 6753 - DNA, 405 bp, Streptococcus pyogenes
atggccttacacgacaataataccaccaaacggaaatggaaaaacagaaccattacctcaagcttggagtttgccttgacaggggttttcacagcttttaaggaagaacgcaatctcagaagccaccttttgtctgcctgtttagcttgtgttgctggtttattttttagcatttcagccatcgaatggttatttttacttctagccatttttttggtcattaccttagaaattgtcaattctgctattgaaaatgtagttgatttggctagtgactatcacttttctatgctagctaaaaatgccaaggatatggcagcaggtgctgttttgatgatttctggctatgctgtcttgacaggacttattatttttattcctaaaatttggaatattttcgttcat

SEQ ID NO: 6754 - protein, 135 aa, Streptococcus pyogenes
MALHDNNTTKRKWKNRTITSSLEFALTGVFTAFKEERNLRSHLLSACLACVAGLFFSISAIEWLFLLLAIFLVITLEIVNSAIENVVDLASDYHFSMLAKNAKDMAAGAVLMISGYAVLTGLIIFIPKIWNIFVH

SEQ ID NO: 6755 - DNA, 942 bp, Streptococcus agalactiae
atgatgagaagtattacgaataaattgaatggagaaagaaaagaaatgacatttaagtcaggatttgtagcaattttaggtcgtccaaatgttggaaaatcaaccttcctaaaccatgttatgggacaaaaaattgctatcatgagtgataaagctcaaacaacacgtaataaaattatggggatttatacaacagaaactgagcaaattgttttcattgataccccaggaattcataaaccaaagaccgcccttggtgattttatggttgaatctgcttatagtactttacgtgaagttgaaacagttcttttcatggttcctgccgatgaaaagcgaggcaaaggcgatgatatgattattgaacgtcttaaggctgccaagattcctgttattttagtaatcaacaaaattgataaggttcatccagaccaacttttggaacagattgatgacttccgtagtcaaatggattttaaagaagtagtgccaatttctgcccttcaaggaaataatgtgccaaccctaatcaagttattgactgataatcttgaagaaggtttccaatatttcccagaagatcagattactgatcatccggaacgatttttagtatcagaaatggttcgtgagaaggtacttcatttaacgcaacaagaggttcctcactcagtagctgttgttgtcgaatccatgaaacgtgatgaagaaactgataaagtgcatattcgtgcaactatcatggttgaacgtgatagtcaaaaaggcattatcattggaaaacaaggtgctatgctcaagaaaataggaaaaatggcgcgccgtgatattgaacttatgttaggtgataaagtttacctagagacttgggtaaaagtcaagaaaaactggcgtgataaaaagcttgatttagctgattttggctataatgaaaaagagtat

SEQ ID NO: 6756 - protein, 314 aa, Streptococcus agalactiae
MMRSITNKLNGERKEMTFKSGFVAILGRPNVGKSTFLNHVMGQKIAIMSDKAQTTRNKIMGIYTTETEQIVFIDTPGIHKPKTALGDFMVESAYSTLREVETVLFMVPADEKRGKGDDMIIERLKAAKIPVILVINKIDKVHPDQLLEQIDDFRSQMDFKEVVPISALQGNNVPTLIKLLTDNLEEGFQYFPEDQITDHPERFLVSEMVREKVLHLTQQEVPHSVAVVVESMKRDEETDKVHIRATIMVERDSQKGIIIGKQGAMLKKIGKMARRDIELMLGDKVYLETWVKVKKNWRDKKLDLADFGYNEKEY

SEQ ID NO: 6757 - DNA, 894 bp, Streptococcus pyogenes
atgtttaaatcaggctttgtagccattcttggtcgtccaaatgttggcaaatccacctttttaaatcacgtcatggggcaaaaaattgccatcatgagtgacaaggctcagaccacccgtaataaaattatgggcatttacaccacagaaacagaacaaattgtctttattgatacgccaggtattcataaaccaaagaccgcccttggtgattttatggttgaatctgcttatagtactttacgtgaagttgagacggttcttttcatggttcctgccgatgaaaagcgtggtaagggtgacgacatgattatcgagcggctaaaagcagctaagattcccgttattttagtcatcaacaaaattgataaggttcatccagaccaacttttggaacagattgatgacttccatagccaaatggattttaaagaagtggtcccaatttctgccctagaaggtaataatgtgccaactttgatcaagttattaactgataatcttgaagaaggtttccaatattttccagaagatcagattactgatcatccagaacgtttccttgtgtcagaaatggttcgtgagaaggtactgcatttgacgcaacaagaggttccacattccgtagctgttgttgtcgaatccatgaagcgagatgaagagactgataaagtgcatatccgtgcaaccattatggtggagcgcgatagccaaaaaggcatcatcattggaaaacaaggagccatgctcaaaaaaatcggaaaaatggcgcgccgtgatattgaactcatgttaggcgacaaggtctacttagaaacgtgggtcaaagtcaagaaaaactggcgggataaaaagcttgatttagctgattttggctataatgagaaagaatac

SEQ ID NO: 6758 - protein, 298 aa, Streptococcus pyogenes
MFKSGFVAILGRPNVGKSTFLNHVMGQKIAIMSDKAQTTRNKIMGIYTTETEQIVFIDTPGIHKPKTALGDFMVESAYSTLREVETVLFMVPADEKRGKGDDMIIERLKAAKIPVILVINKIDKVHPDQLLEQIDDFHSQMDFKEVVPISALEGNNVPTLIKLLTDNLEEGFQYFPEDQITDHPERFLVSEMVREKVLHLTQQEVPHSVAVVVESMKRDEETDKVHIRATIMVERDSQKGIIIGKQGAMLKKIGKMARRDIELMLGDKVYLETWVKVKKNWRDKKLDLADFGYNEKEY

SEQ ID NO: 6759 - DNA, 111 bp, Streptococcus agalactiae
ttggtaaaaatcgaaaagttaccagactttaaaggggagttttttatttgtcaacagttagtagaaaaacgatatattgctccatttagattaattatggagataaccaaa

SEQ ID NO: 6760 - protein, 37 aa, Streptococcus agalactiae
MVKIEKLPDFKGEFFICQQLVEKRYIAPFRLIMEITK

SEQ ID NO: 6761 - DNA, 1590 bp, Streptococcus agalactiae
atgaagattaaaaaaattattagtggccttgccgcagctttaattatcagttcactatcaactattaactatgaggttaaagctgatgacaccaccagtgagtatcactatatcagtaagcaaaataatgaagagcagcttattagttacatcaaggaacaacatcgtttgctcaatcaatttgttgttgataatgtcaactcattcactcaactaaatgctaatccaactattgaacagttaaatagagctataacattatttaaacaaaaagatgagcaattatttaaccaggtgaaagctggtcatctctctcccagtaactataatgctatcgttaatcaacgtaatgtcattaaccaaactgttcaaaatctgattgaccaaaatcataataagcttcagacaagtcaaaataaagcagctcagctcgtggggcaacgtaatcaggttgttaacaaaattcaagctattttagcaactgtaaactacaactctgtgaattctatacaagaagctgaaaatttatttcattcactcagaaatcaaattgaacctcttgtagctgaagttaataattacaaagctgctatggcaatccttcaacaagaagtagatgccctatcaacagcggctattgaaactgagacttctaaacttgctactctcaaagttagcgaaaatacttctgttcctgcaaacaaagtagaagaaaaaactactcaatcagaagcgtcaggcaataaacaagaagtaactaagagtgaggaaaaacaggctacctctgatgcaaaggcatcacagcctgagtcagctaatattgccgattacgatagtttaaaagaagttttacgaaataatattagcaaccaagtaccacacatcagtgttcaaatggagtttaaaactcaagaacaagttgacgaataccaaaaaaatctcggaagcatcatccgggaaattggagatacacttggaacagcaactgaattcaatgccaaaagtaacattagcacttatactcttggtggacaaatccaacgcattattgtaaaaagcgacatcacaatcacctatactcttaaaggtgacatggtaggattacataaagaatataaacagtttgtagattcttttgtcaaagaaaatattactaacaaaaatatcacaagtgattatgaaaaagctaaagtaattcatgaccacttggttaataattacacttacgcgactgaagaactggcaaccactcgtgaaactgctagtggtatcagtatccatgctcctgaagcactctacaaagataaacgtggtgtttgtcaagcctttgcagtaatgtttaaagatatggctgctactgctggcttatcagtatggtatgtaactggtcaagctggaggtggaaatcacgcttggaacattgttactattaatggcgttaaatattatgttgatacaacatgggataataatataaaaagcaataaatatttccttgttggtaaaacaataatggatgctgatcatcttttggatagtcaatacaatgcattagctaaagatattccagctgatcgccatcaaggtgca

SEQ ID NO: 6762 - protein, 530 aa, Streptococcus agalactiae
MKIKKIISGLAAALIISSLSTINYEVKADDTTSEYHYISKQNNEEQLISYIKEQHRLLNQFVVDNVNSFTQLNANPTIEQLNRAITLFKQKDEQLFNQVKAGHLSPSNYNAIVNQRNVINQTVQNLIDQNHNKLQTSQNKAAQLVGQRNQVVNKIQAILATVNYNSVNSIQEAENLFHSLRNQIEPLVAEVNNYKAAMAILQQEVDALSTAAIETETSKLATLKVSENTSVPANKVEEKTTQSEASGNKQEVTKSEEKQATSDAKASQPESANIADYDSLKEVLRNNISNQVPHISVQMEFKTQEQVDEYQKNLGSIIREIGDTLGTATEFNAKSNISTYTLGGQIQRIIVKSDITITYTLKGDMVGLHKEYKQFVDSFVKENITNKNITSDYEKAKVIHDHLVNNYTYATEELATTRETASGISIHAPEALYKDKRGVCQAFAVMFKDMAATAGLSVWYVTGQAGGGNHAWNIVTINGVKYYVDTTWDNNIKSNKYFLVGKTIMDADHLLDSQYNALAKDIPADRHQGA

SEQ ID NO: 6763 - DNA, 1230 bp, Streptococcus pyogenes
atgggagttatgatgaaacaaaagattaaaatcttaacagtaattggccttatgacagttggtatgtctgcgtgtcacaacactagcaaaccttctaataccgattctgttttttctttaaccggaaaaaagcgccaacaaatcgtcaaacaagtaagacaacggtattatttccaacaattatccaaaaccgaacaagaaaattacctcactttatacgatagtttagcacaatttcgtgaaatcatcagtttgacgccggcttctaaaaaaagcttaattaaaacaattgacgcctttgtgatggataatcccgaattttactggattacatctgccgattatcgatttgagttttctgatcaaacggtctttgtcacctttcctatcccagaagatgccaagaacatttatcaagacttgcaagcaatcggtaatgatatcgtcgcaaacacgccatcaaaggatcgctatgagcaggtcaaatatttttatgaggtcatcattcgagacacagactacaataaaaaagcctttgaagcctatcaatcaggcagtcaagcccaggtcgcttctaatcaagacattaaaagtgtttttattgatcatttatctgtttgtaatggctatgcccaagcctttcagtttctttgtcaaaaagctggcattccagtcgcctatatccgtggaactggtacatctcagcaacctcagcaatcttttgcacatgcatggaatgctgttcaaattaataacacttattatggcgttgatgtcacttggggtgaccctgtttttgataaccatctctcacatcaaaagcaaggaactatcaattacagttttctatgcctgccagattatctaatggccttatcacatcagccaagcaaagacattgcttttaatactaaagaacgttttgaaaatgtttggactataccttcttgtacagatgattctttgctttattctaaacgtcatcaaagctatatctcaacgtttgacagtgacgccatccttgcaagccttgaaaatcagttgttaaatagacaagagccactgtctctacaatttgctcatcaagatgattatcaacaaatggtaactgatttaacgacgaatcaaacaggttatcataaccttttcaatcagtattggaataattatacgggctttacctatggactcttaccagagactcttagtatttcatttgctagtaggaac

SEQ ID NO: 6764 - protein, 410 aa, Streptococcus pyogenes
MGVMMKQKIKILTVIGLMTVGMSACHNTSKPSNTDSVFSLTGKKRQQIVKQVRQRYYFQQLSKTEQENYLTLYDSLAQFREIISLTPASKKSLIKTIDAFVMDNPEFYWITSADYRFEFSDQTVFVTFPIPEDAKNIYQDLQAIGNDIVANTPSKDRYEQVKYFYEVIIRDTDYNKKAFEAYQSGSQAQVASNQDIKSVFIDHLSVCNGYAQAFQFLCQKAGIPVAYIRGTGTSQQPQQSFAHAWNAVQINNTYYGVDVTWGDPVFDNHLSHQKQGTINYSFLCLPDYLMALSHQPSKDIAFNTKERFENVWTIPSCTDDSLLYSKRHQSYISTFDSDAILASLENQLLNRQEPLSLQFAHQDDYQQMVTDLTTNQTGYHNLFNQYWNNYTGFTYGLLPETLSISFASRN

SEQ ID NO: 6765 - DNA, 861 bp, Streptococcus agalactiae
gtgaaagtgggaaaaatggaaaaagaattaggaaaaacactaagaagattacgtaaaggaaaaaaagttagtatttcttctttagcagatgagcacctatccaagtcacaaatctcaaggtttgagagaggagagtcagaaattacttgtagtcgtttgcttaatattttagacaaactcaacatcactattgatgaatttgtgtcgattcattctaaggcgcacactcatttttttatccttttaaatcgagtaagaaaatattgtgctgaaaaaaatgtaactaaattagtggctctcttagaggatcataaccataaagactatgaaaagattatgattaaggctcttattttttcaattgatcaatcaatagagcctaatcaagaagaattagcacgcttaacagactatctttttacggtggagcagtggggatattatgaaattattctcttaggaaattgctcacgtctcattaattacaatactttatttttattgaccaaagaaatggttaattcgtttgcttattcagaacaaaataaaaccaataaaatcctagttacacaattagcaattaattgtctaatcatcagcattgatcactcttactttgagcatagccactacttaattgataaggttagatcattgttacaggatgaagttaatttctatgaaaaaactgttttcttatatgtaactggatactatcatttaaaacttggtgatacttcttcaggaaaagaagatatgaggaaagctttacagatttttaaatatttaggtgaagattcattttacaatacttataatgaacattattgtcaaaaagtacttggcaataataaagaatgc

SEQ ID NO: 6766 - protein, 287 aa, Streptococcus agalactiae
MKVGKMEKELGKTLRRLRKGKKVSISSLADEHLSKSQISRFERGESEITCSRLLNILDKLNITIDEFVSIHSKAHTHFFILLNRVRKYCAEKNVTKLVALLEDHNHKDYEKIMIKALIFSIDQSIEPNQEELARLTDYLFTVEQWGYYEIILLGNCSRLINYNTLFLLTKEMVNSFAYSEQNKTNKILVTQLAINCLIISIDHSYFEHSHYLIDKVRSLLQDEVNFYEKTVFLYVTGYYHLKLGDTSSGKEDMRKALQIFKYLGEDSFYNTYNEHYCQKVLGNNKEC

SEQ ID NO: 6767 - DNA, 819 bp, Streptococcus agalactiae
atgccagaattaccagaagtagaaaccgttagaaaaggactagaaagacttgtagttaatcaagaaatagcttctataacgattaaagtccctaaaatggtgaaaactgatttgaatgactttatgataagtctaccaggaaaaacaattcaacaggtattgagacgagggaagtatcttctttttgattttggtgaaatggttatggtatcacatttacgcatggaaggaaaatatctactcttcccaaataaagtaccagataacaaacattttcacctttatttcaaattgactaatggcagcacattggtttaccaagatgtccgtaaatttgggacatttgagttggttcgtaaatcatctctcaaagattattttactcaaaaaaaattaggtcctgagccaactgctgacacatttcaatttgagcctttttcaaaaggcttagcaaactccaaaaagccaataaaacctttactattagatcagagattagtagcaggacttggaaatatttacgtagatgaagtcttgtgggcagcaaaaattcacccacagcgtttggctaatcaattgaccgaatctgaaacaagcttattacacaaggaaattattcgcattttaactttaggcatcgaaaaaggtggctccacgattagaacatataagaatgctcttggagaggacggtacgatgcaaaagtatttacaggtctatggtaaaactgggcaaccgtgtccaaggtgtggttgtttaattaagaagataaaagtaggagggagagggacgcattattgccctcggtgtcaatgctta

SEQ ID NO: 6768 - protein, 273 aa, Streptococcus agalactiae
MPELPEVETVRKGLERLVVNQEIASITIKVPKMVKTDLNDFMISLPGKTIQQVLRRGKYLLFDFGEMVMVSHLRMEGKYLLFPNKVPDNKHFHLYFKLTNGSTLVYQDVRKFGTFELVRKSSLKDYFTQKKLGPEPTADTFQFEPFSKGLANSKKPIKPLLLDQRLVAGLGNIYVDEVLWAAKIHPQRLANQLTESETSLLHKEIIRILTLGIEKGGSTIRTYKNALGEDGTMQKYLQVYGKTGQPCPRCGCLIKKIKVGGRGTHYCPRCQCL

SEQ ID NO: 6769 - DNA, 825 bp, Streptococcus pyogenes
atgccagaattaccagaagttgaaacggtccgacgaggacttgagactttagtgcttggccaagaaattgtggctgttacgcttaaagtgccaaaaatggttaaaaccgacttagagacgtttgccctgaccctacctggtcaaatcattcagtcagttggccgtcggggaaaatatttattaattgatttggggcaattagtgttggtatcacatttgcggatggaaggcaaatatttgctttttccagatgaggtccctgataacaaacactttcatgtcttttttgaattgaaaaatggttcgaccttggtttaccaagatgtgcgtaaatttggaacctttgatttgatagcaaaatctcaattatcagcgttttttgccaaacgaaaactaggccctgaaccaaagaaagagacctttaagttaaaaacctttgaggctgctctgctatcctcccaaaaacccataaaaccacatcttttagaccagaccttggttgctggtttagggaatatttatgtggacgaggtactttgggctgctaaggttcatccagaaactgcgtcttctaggttgaataaggcggagataaaacggctgcatgatgaaaccatacgaatcctagctttaggaattgaaaagggcggttcgaccgtccgtacttaccgtaatgctttgggagctgatggcaccatgcaggactatttgcaggtttatggtcaaactgggaaaccgtgtcctcgttgtggacaggctattgtcaaattaaaagttggaggaagggggacgcacatttgtccaaaatgccagaaaaaaagacta

SEQ ID NO: 6770 - protein, 275 aa, Streptococcus pyogenes
MPELPEVETVRRGLETLVLGQEIVAVTLKVPKMVKTDLETFALTLPGQIIQSVGRRGKYLLIDLGQLVLVSHLRMEGKYLLFPDEVPDNKHFHVFFELKNGSTLVYQDVRKFGTFDLIAKSQLSAFFAKRKLGPEPKKETFKLKTFEAALLSSQKPIKPHLLDQTLVAGLGNIYVDEVLWAAKVHPETASSRLNKAEIKRLHDETIRILALGIEKGGSTVRTYRNALGADGTMQDYLQVYGQTGKPCPRCGQAIVKLKVGGRGTHICPKCQKKRL

SEQ ID NO: 6771 - DNA, 606 bp, Streptococcus agalactiae
ttgccctcggtgtcaatgcttatgacaaaaataataggactgacaggagggatagcttctggaaagtcaacggtaacaaaaataatacgagaatcaggttttaaagtcatagatgcggatcaagtggttcataaattgcaagctaagggtgggaaactttaccaagctttattagaatggttgggtcccgagatacttgatgctgatggtgagttggatagaccaaagctttctcaaatgatttttgctaatccagacaatatgaagacatcagctaggctacaaaatagtatcattcgtcaagagttagcatgtcagcgcgaccaattaaaacaaacagaagagatatttttcatggatattcctttattgattgaagaaaagtatataaaatggtttgatgagatttggttggtatttgttgataaagaaaaacaattacaacgattaatggcccgtaacaactacagtcgagaagaagcagaattacgactttcacaccaaatgcctttaacagataaaaaaagtttcgctagtcttattattgacaataatggtgatttaataactttaaaagagcaaatattggatgctcttcaacgttta

SEQ ID NO: 6772 - protein, 202 aa, Streptococcus agalactiae
MPSVSMLMTKIIGLTGGIASGKSTVTKIIRESGFKVIDADQVVHKLQAKGGKLYQALLEWLGPEILDADGELDRPKLSQMIFANPDNMKTSARLQNSIIRQELACQRDQLKQTEEIFFMDIPLLIEEKYIKWFDEIWLVFVDKEKQLQRLMARNNYSREEAELRLSHQMPLTDKKSFASLIIDNNGDLITLKEQILDALQRL

SEQ ID NO: 6773 - DNA, 618 bp, Streptococcus pyogenes
ttgtccaaaatgccagaaaaaaagactatgattattggcatcacaggaggcattgcatcaggaaaatcgactgtggttaaggtcattagaaaagctggttatcaggtgattgatgcggatcaagtggtccatgacttgcaagaaaaaggcggtcgtctttacgaggctcttagagaagcttttgggaatcagattttaaaagcagatggtgagttagatcgcacaaagctgtcagaaatgcttttttcaaacccagataatatggcaacatcctcagccattcaaaatcaaatcattaaggaagaattggcggctaagcgtgaccacttagcacagagccaagccatttttttcatggatattccccttttaatggaattgggctaccaagactggtttgatgcgatttggctggtttatgtagatgctcagacacaattgcagcgcttaatggctagaaatcgtttagacaaaggaaaagcaaggcagcgaatagccagtcagttaccaatagaggaaaaaaagccctatgccagtctagtgattgataatagtggggatattgcagccttaataaagcaagtacaatctgcgttgttgttattagccaatccgagg

SEQ ID NO: 6774 - protein, 206 aa, Streptococcus pyogenes
LSKMPEKKTMIIGITGGIASGKSTVVKVIRKAGYQVIDADQVVHDLQEKGGRLYEALREAFGNQILKADGELDRTKLSEMLFSNPDNMATSSAIQNQIIKEELAAKRDHLAQSQAIFFMDIPLLMELGYQDWFDAIWLVYVDAQTQLQRLMARNRLDKGKARQRIASQLPIEEKKPYASLVIDNSGDIAALIKQVQSALLLLANPR

SEQ ID NO: 6775 - DNA, 699 bp, Streptococcus agalactiae
atggagttagtaattagagatattcgtaagcggtttcaggaaacagaggtcttgagaggagcaagttaccgattttattcaggtaaaataacaggggtcttaggtaggaatggtgctgggaaaacaactttatttaatatactttatggggatcttgcagctgacaacgggaccatttgtttattgaaggataatcacgagtatcctcttaccgataaggatattggtattgtttattccgaaaactaccttccagaatttttaacagggtatgaatttgtaaaattttacatggatttacatccttcagatgatttaatgacaatagatgattatttagattttatggaaataggacaaacagagcgtcatagaattatcaaaggatattctgatggaatgaagagtaagctctcattaatttgcctgatgatttctaagccaaaagtaattttactagatgagccactgactgcagttgatgttgtatcaagtattgcaataaaacgccttttgttggaattaagtgaggatcatattattatattatcaactcatataatggccttagcagaagatctatgtgatattgtggctgtattagacaaaggaaaactccaaacattagatattgatcgtaaacatgaacaattcgaagagcgtcttcttcaagtgttgaagggagatgaatatgacaag

SEQ ID NO: 6776 - protein, 233 aa, Streptococcus agalactiae
MELVIRDIRKRFQETEVLRGASYRFYSGKITGVLGRNGAGKTTLFNILYGDLAADNGTICLLKDNHEYPLTDKDIGIVYSENYLPEFLTGYEFVKFYMDLHPSDDLMTIDDYLDFMEIGQTERHRIIKGYSDGMKSKLSLICLMISKPKVILLDEPLTAVDVVSSIAIKRLLLELSEDHIIILSTHIMALAEDLCDIVAVLDKGKLQTLDIDRKHEQFEERLLQVLKGDEYDK

SEQ ID NO: 6777 - DNA, 111 bp, Streptococcus agalactiae
atgataagtcctgcaataccggtgtaccatgaaaaaaatggatatggagagaactgtttgccaagaagaaggaaaaagagagaaaggaagactcctataccaatccctaag

SEQ ID NO: 6778 - protein, 37 aa, Streptococcus agalactiae
MISPAIPVYHEKNGYGENCLPRRRKKRERKTPIPIPK

SEQ ID NO: 6779 - DNA, 1650 bp, Streptococcus agalactiae
atgaatatgacaagtaaagcattaatatggtctatattacagattgatagtgctagagcttataatagttttttatattaccttcagaaaatcccctggttgggaagaaaaatccctaaccgatggtttaaaaccgatgatataaaaggtgtagtactatttattcgtatcattttctttttcttaagaggttttggtcgttccataggttacgtactatattgttatgttttatcattttttgttagaagtggcatgaagcagttaaatattttaccgcaagaaggttttaccctaactttaacattgatggtgattacctctcttttaattgtcataaatttctatataaaacttatagaacctaatgatatgcaacaaactcatatgattcgccttttcagaattgagccatcgaggtatttccaatccgctgaacttttagaagccagtagtgaactattttttagaagtttgagctttggcatatttttccatttaaatcactttgctttttggcatggtttgacttttgctttatttttagcaggtagtcgccttggaatcaaggtgctctgtttacctttatatggtagaggtaaagaccaagagaatccagagtctttactaaatattttattttacttagggattggtataggagtcttcctttctctctttttccttcttcttggcaaacagttctctccatatccatttttttcatggtacaccggtattgcaggacttatcatatggttagttagttactatcgattaaaaacttattctaaacttaaccacttgacctaccttaccctaacgcatgagacgatgaaggagaaaattgcaaagattgataatatagagctgcttgggattgaaatgaaagatagggatataaatgtcagtgaactttctcccctgctatttgaaaatttatcaggtatttcatatttaaacgctatctttttaaaacggatgagtatatacttgcaaaggaaaattttggtacgtttagctgttttaagtgttctgtttggaatagaactccttttcctgctattttttaaagaaaagataaatattccgatgaatgagcatagtttttcaaaattcctatttttgagtgcagttccaggatatctaatatatatcggtgaatcctattcaaaattttgtttctatcatttggatcgtccattattaagatataatttctatcgtgaaagagaaaatatcttagcaaccttaaaaatacgtttcctttatagtataaaacttaatttccccatttttgtagctttaaacatatgttttggaacctattattttaattttttcacccctaagattgatcagattatcatattagtaattacacaagctatatcaatgattttatttagtttttactttttgtatctttatttcttcttacagccttttacagaaggattaaaatcaaagagtgctatgtataatattttaacctttattatatactatatgggatataagctatttacctttactaaatctataacgatgccaatattattagtaagcctaggaattatagttgttattttaattattggctatttagcagttgtagtatttgctccaaaaactttccgtttaaaaagt

SEQ ID NO: 6780 - protein, 550 aa, Streptococcus agalactiae
MNMTSKALIWSILQIDSARAYNSFLYYLQKIPWLGRKIPNRWFKTDDIKGVVLFIRIIFFFLRGFGRSIGYVLYCYVLSFFVRSGMKQLNILPQEGFTLTLTLMVITSLLIVINFYIKLIEPNDMQQTHMIRLFRIEPSRYFQSAELLEASSELFFRSLSFGIFFHLNHFAFWHGLTFALFLAGSRLGIKVLCLPLYGRGKDQENPESLLNILFYLGIGIGVFLSLFFLLLGKQFSPYPFFSWYTGIAGLIIWLVSYYRLKTYSKLNHLTYLTLTHETMKEKIAKIDNIELLGIEMKDRDINVSELSPLLFENLSGISYLNAIFLKRMSIYLQRKILVRLAVLSVLFGIELLFLLFFKEKINIPMNEHSFSKFLFLSAVPGYLIYIGESYSKFCFYHLDRPLLRYNFYRERENILATLKIRFLYSIKLNFPIFVALNICFGTYYFNFFTPKIDQIIILVITQAISMILFSFYFLYLYFFLQPFTEGLKSKSAMYNILTFIIYYMGYKLFTFTKSITMPILLVSLGIIVVILIIGYLAVVVFAPKTFRLKS

SEQ ID NO: 6781 - DNA, 1125 bp, Streptococcus agalactiae
atgccttttatggtattatatgtagaacaattaggagcacctagcaacaaagtagagtggtatgcaggcctatcagtatccttatcagccttgtcttcagctttagttgccccattatgggggcgcttagctgataaatatggtagaaaaccgatgatggtaagagcagggttgatgatgacttttactatgggaggtcttgctttcattcatagtgttacaggacttctgattttacgtatattaaacggcatttttgcaggctatgtacctaactctacagctttgatagcaagtcaagctcctcaagaggaatcaggatatgccttaggaaccttagcgacaggagtgactggaggtatgttaattggtccacttttagggggacttttagcagagtggtttggtattagggaagtttttttattagtgggaaccatattgttaatatctactttaatgaccatttttatggtaaaggaagatttcaaacccatttctaacgaagaaaccatgccaactacagaagtgttcaaaagcgttaaaagcttacaaattttaatagggctgtttgtaacaagcatgattattcaaatttctgcacaatcaattgcacctattttaacactttacattcgtcatttaggacagactgaaaacttgatgtttgtttccggattaattgtttctggtatgggattctctagtattctgagtagtccaaagctaggaagaatcggggatcgcataggcaatcatcgtttgctattattagctctactgtatagtttcctcatgtatgtcttatgttcattggcacagacttcattacagctaggggttattagattcctgtatggttttggaacaggtgccttgatgccgagtattaattcaatcttgactaaaattgctccaagacaaggtttatcaaggattttcagttataaccaaatgtttagcaatttaggacaagtattaggtccttttgtcggttcagcagtttctattcatttaggattccgatgggttttctttgtgactagcttcatcgttttagctaattttgtttggtgttttattaattttagaaaatatattagagttaaggaaattgttgagagt

SEQ ID NO: 6782 - protein, 375 aa, Streptococcus agalactiae
MPFMVLYVEQLGAPSNKVEWYAGLSVSLSALSSALVAPLWGRLADKYGRKPMMVRAGLMMTFTMGGLAFIHSVTGLLILRILNGIFAGYVPNSTALIASQAPQEESGYALGTLATGVTGGMLIGPLLGGLLAEWFGIREVFLLVGTILLISTLMTIFMVKEDFKPISNEETMPTTEVFKSVKSLQILIGLFVTSMIIQISAQSIAPILTLYIRHLGQTENLMFVSGLIVSGMGFSSILSSPKLGRIGDRIGNHRLLLLALLYSFLMYVLCSLAQTSLQLGVIRFLYGFGTGALMPSINSILTKIAPRQGLSRIFSYNQMFSNLGQVLGPFVGSAVSIHLGFRWVFFVTSFIVLANFVWCFINFRKYIRVKEIVES

SEQ ID NO: 6783 - DNA, 1191 bp, Streptococcus pyogenes
gtgaactggcgacaaaatctaaaagtggcttggcttggtaacttctttactggggcaagcttttcacttgttatgccttttatggctctatatgtggaaaatttaggtactccgacagaattagtagaatactatgctggtctggcagttgctgtgacggcacttgcttcagctttatttgctcctgtttgggggaagttggctgatcgttatggccgaaaacctatgatgctgcgagccagttttgttatgacatttacaatgggtggtttagctattattcctaatgtgttttggttactcattttgagattattaacaggtgtctctgcgggctatgtgccaaatgccactgccttgattgccagccaagccccaaaagaggagtcaggttatgctttaggcacattagcaacaggagtgacagcaggcgctttaattggtcctttactagggggaattttggcagagctattaggaattcgacaagttttcttattagttggtgtgatattatttttatgttctttaatgacagctgtttatgttaaagaagagtttaagccggttaggcgctttgagatgatacctacaaaagtcattttaaaacaggtaaaaagtccccagattatgcttggtttatttgtgactagtatgattattcaaatttcagctcaatcagtggcccccattttatcattgtatattcgtcatcttggtcaaactcacaacttaatgtttacttcaggcctggtagtttcggccatggggttttctagcttatttagcagttcttacttaggaaaattaggagatcgatttggcaatcatcggttattgttagccgctttgtgttatagctttatcatgtattttagcagtgccttagcgcagaccagttttcaattaggagtactacgctttgcttatgggtttggtgtgggcgctttgatgccaagtattaactctttactaactaagttaacaccaaaagaaggtatttctagagtatttgcctataatcaaatgtttagtaaccttggtcaagtcattggcccttttattggatcaaatgtggctgtagtgttaggctaccgttctgttttttatgtgactagtttgattgtgtttgttaatttaatatggagtttgattatatttcgaaaatatattaaagttaaggatattgtg

SEQ ID NO: 6784 - protein, 397 aa, Streptococcus pyogenes
VNWRQNLKVAWLGNFFTGASFSLVMPFMALYVENLGTPTELVEYYAGLAVAVTALASALFAPVWGKLADRYGRKPMMLRASFVMTFTMGGLAIIPNVFWLLILRLLTGVSAGYVPNATALIASQAPKEESGYALGTLATGVTAGALIGPLLGGILAELLGIRQVFLLVGVILFLCSLMTAVYVKEEFKPVRRFEMIPTKVILKQVKSPQIMLGLFVTSMIIQISAQSVAPILSLYIRHLGQTHNLMFTSGLVVSAMGFSSLFSSSYLGKLGDRFGNHRLLLAALCYSFIMYFSSALAQTSFQLGVLRFAYGFGVGALMPSINSLLTKLTPKEGISRVFAYNQMFSNLGQVIGPFIGSNVAVVLGYRSVFYVTSLIVFVNLIWSLIIFRKYIKVKDIV

SEQ ID NO: 6785 - DNA, 582 bp, Streptococcus agalactiae
atgtcttcagaagaaaaatacattatggcgattgaccagggaacaacaagctctcgagcaattatttttaataaaaaaggtgaaaaaattgcgagtagccaaaaagaatttccccaaatttttcctcaagcaggctgggtagagcataatgctaatcagatttggaattctgttcaatctgtcattgctggagcttttattgaatcaagcatcaaacctggacagatagaggctattgggattaccaatcaacgtgaaacaactgttgtttgggataaaaaaacaggtcttccaatttataatgctattgtatggcaatcgcgacaaacagccccgattgctgatcaattgaagcaagaaggtcatactaacatgattcatgaaaaaactggtcttgtcattgatgcttacttctcagcaacaaaagttcgttggattttagaccacgttcctggagcacaggaacgtgctgaaaaaggagagttgctttttggaacaattgatacttggttagtttggaagttaactgatggtctcgtccatgttacagactattcaaatgctggctcgtacgatgcttta

SEQ ID NO: 6786 - protein, 194 aa, Streptococcus agalactiae
MSSEEKYIMAIDQGTTSSRAIIFNKKGEKIASSQKEFPQIFPQAGWVEHNANQIWNSVQSVIAGAFIESSIKPGQIEAIGITNQRETTVVWDKKTGLPIYNAIVWQSRQTAPIADQLKQEGHTNMIHEKTGLVIDAYFSATKVRWILDHVPGAQERAEKGELLFGTIDTWLVWKLTDGLVHVTDYSNAGSYDAL

SEQ ID NO: 6787 - DNA, 2037 bp, Streptococcus agalactiae
atgactaaagatttattattggagcttggccttgaagagttgccagcttatgttgtgacaccgagtgagaagcaattgggccaaaaaatggtcaagtttttagaggatcatcgtttatcatttgaaactgttcaaattttttcaactccacgtcgtttggctgttcgtgtgaaaggattggcagaccagcagacagatttaacagaagatttcaagggtccttctaagaaaattgctttggatgcagaagggaatttttctaaagcagcccaaggttttgttcgcggaaaaggtttaagtgttgatgatatcgaatttcgtgaagttaagggagaagaatatgtttatgtcactaagcatgaaactggaaaaagtgcgattgatgttttagcgagtgtgacagaggtattaacagaattgactttcccagtgaacatgcattgggcaaataatagttttgaatatattcgtccagttcacactttagtggtattattagatgatcaagccttagagctagacttccttgatattcattcagggcgtattagtcgaggacaccgtttcttgggttctgacactgaaatttcatctgccagttcgtatgaagatgacttgcgacaacaatttgttattgctgatgcaaaagaacgccagcaaatgattgttaatcaaattcatgctatcgaagaaaagaaaaatatttcagttgaaattgacgaagatttactaaatgaagtgcttaatttagttgagtatccgacagcattcttgggttcttttgacgagaaataccttgatgtacctgaagaagttttagtcacttcaatgaaaaatcatcaacgctattttgttgttcgcgacagggatggaaaattgttaccaaactttatttctgtgcgtaatggaaatgctgagcatatcgaaaatgttataaaaggtaatgaaaaagttttagtggctcgtcttgaagatggtgaattcttctggcaagaagatcagaaacttaatattgcagatttagttgagaaattaaaacaagtaactttccatgaaaaaattggttcactttatgaacatatggatcgtgtaaaagttatttcacaatatttggctgagaaggcagatctttctgatgaagaaaaattagctgtgcttcgagctgcaagtatttataaatttgacctcttaactggaatggttgatgagtttgatgaattacaaggtattatgggtgagaaatatgccttacttgcaggggaacagcccgcagtagcagcagcgatacgtgaacattatatgccgacatctgcagatggagagcttccagaaaccagagttggtgcaattctagctttagctgataaatttgacaccttactttcattcttctcagttggtttgattccaagtggttcaaatgatccatatgctcttcgtcgagctactcaggggattgtccgtattttggaagcttttggttgggatatcccacttgatgaattagtaactaacctttatggtctatcgtttgctagtttagattatgctaatcaaaaagaggtcatggcctttatttcagctcgtattgaaaagatgattggctctaaggtccctaaagatattcgagaagccgttttagaatcagacacttatattgttagccttattctagaagctagtcaagcattggtgcaaaagagcaaggatgctcaatataaagtttccgttgaaagtttgtcacgtgcatttaatttagctgaaaaagttactcattctgtattggtggactcttcattgtttgaaaataatcaagagaaggcgctatatcaagctattttgtcacttgaactgactgaggatatgcatgacaacttagataagcttttcgcacttagtccaattattaatgatttctttgataatacaatggtaatgacagatgatgaaaaaatgaaacaaaatcgtctggctatactcaatagccttgttgcaaaggcaagaacagtcgctgcttttaacttattaaacacaaaa

SEQ ID NO: 6788 - protein, 679 aa, Streptococcus agalactiae
MTKDLLLELGLEELPAYVVTPSEKQLGQKMVKFLEDHRLSFETVQIFSTPRRLAVRVKGLADQQTDLTEDFKGPSKKIALDAEGNFSKAAQGFVRGKGLSVDDIEFREVKGEEYVYVTKHETGKSAIDVLASVTEVLTELTFPVNMHWANNSFEYIRPVHTLVVLLDDQALELDFLDIHSGRISRGHRFLGSDTEISSASSYEDDLRQQFVIADAKERQQMIVNQIHAIEEKKNISVEIDEDLLNEVLNLVEYPTAFLGSFDEKYLDVPEEVLVTSMKNHQRYFVVRDRDGKLLPNFISVRNGNAEHIENVIKGNEKVLVARLEDGEFFWQEDQKLNIADLVEKLKQVTFHEKIGSLYEHMDRVKVISQYLAEKADLSDEEKLAVLRAASIYKFDLLTGMVDEFDELQGIMGEKYALLAGEQPAVAAAIREHYMPTSADGELPETRVGAILALADKFDTLLSFFSVGLIPSGSNDPYALRRATQGIVRILEAFGWDIPLDELVTNLYGLSFASLDYANQKEVMAFISARIEKMIGSKVPKDIREAVLESDTYIVSLILEASQALVQKSKDAQYKVSVESLSRAFNLAEKVTHSVLVDSSLFENNQEKALYQAILSLELTEDMHDNLDKLFALSPIINDFFDNTMVMTDDEKMKQNRLAILNSLVAKARTVAAFNLLNTK

SEQ ID NO: 6789 - DNA, 639 bp, Streptococcus agalactiae
atgaacacactcattgttaatagtcatcctgatttttcgaatccgtactcatttacaactattctacaagaaaagtttattgaactttataatgagcattttcctaaccatcagttatctattttaaatttatatgattgtgttttgccagaaattacgaaagaagtactactttcgatttggtctaaacaaagaaagggtttggaattaacagccgatgagattgttcaagctaaaatctctaaagatttacttgaacagtttaagtcacatcaccgtattgtctttgtttctccaatgcacaattacaatgtgactgctagagcaaaaacttatattgataatatttttattgcaggtgagactttcaagtacactgaaaatggttcagtcggattaatgacagatgactatcgtctgcttatgttagaatctgcgggttctatttattctaaaggacagtatagtccatatgaatttcctgttcattatttaaaagctatctttaaagattttatggcttttgatgatttctgtgttgttcgtgcagaaggtaccgatattttagataggcaagttgttcttgataagatgaatcaggatttaagagaagcatttgaagcgttttacagtaaggag

SEQ ID NO: 6790 - protein, 213 aa, Streptococcus agalactiae
MNTLIVNSHPDFSNPYSFTTILQEKFIELYNEHFPNHQLSILNLYDCVLPEITKEVLLSIWSKQRKGLELTADEIVQAKISKDLLEQFKSHHRIVFVSPMHNYNVTARAKTYIDNIFIAGETFKYTENGSVGLMTDDYRLLMLESAGSIYSKGQYSPYEFPVHYLKAIFKDFMAFDDFCVVRAEGTDILDRQVVLDKMNQDLREAFEAFYSKE

SEQ ID NO: 6791 - DNA, 915 bp, Streptococcus agalactiae
atgatgtctaagaaattaacttttcaagaaattattctaactttacaacagttttggaatgaccaaggctgtatgttaatgcaagcttatgataatgagaaaggagcagggacaatgagcccttatactttcttacgtgctataggccctgagccttggaatgctgcatacgttgaaccatcacgtcgtccagctgacggccgctatggcgaaaatccaaaccgtctttaccaacatcatcaatttcaagtggtaatgaagccttcgccgtcaaatattcaagaactttatttgaagtctttggaattactaggtatcaatccacttgagcatgatatccgttttgttgaagataactgggaaaatccatctacaggttcagctggattaggttgggaagtttggcttgatggaatggaaataacacaatttacttatttccaacaagtaggtggacttcaaacaggtcctgtaacttctgaagttacttatggactagagcgtttagcctcttatattcaagaggtagattctgtttatgatattgagtgggcaccaggtgttaaatatggtgaaatctttactcagccagagtatgagcattcaaaatattcatttgagatatcagaccaagtaatgttacttgaaaactttgagaaatttgaaagagaagcaaaacgtgctttagaagaaggacttgttcatccagcttatgactacgtccttaaatgttcacacacctttaatttattagatgcacgtggagcagtatctgttactgagcgtgcaggctatattgcacgtatccggaatttagcacgtgttgttgctaaaacctttgttgccgaacgtaaaaaacttggtttcccacttttggatgaggaaactcgtatcaaattacttgctgaggaagac

SEQ ID NO: 6792 - protein, 305 aa, Streptococcus agalactiae
MMSKKLTFQEIILTLQQFWNDQGCMLMQAYDNEKGAGTMSPYTFLRAIGPEPWNAAYVEPSRRPADGRYGENPNRLYQHHQFQVVMKPSPSNIQELYLKSLELLGINPLEHDIRFVEDNWENPSTGSAGLGWEVWLDGMEITQFTYFQQVGGLQTGPVTSEVTYGLERLASYIQEVDSVYDIEWAPGVKYGEIFTQPEYEHSKYSFEISDQVMLLENFEKFEREAKRALEEGLVHPAYDYVLKCSHTFNLLDARGAVSVTERAGYIARIRNLARVVAKTFVAERKKLGFPLLDEETRIKLLAEED

SEQ ID NO: 6793 - DNA, 915 bp, Streptococcus pyogenes
atgtctaaaaaacttacctttcaagaaatcatcttgaccttacaacaatattggaatgatcagggttgtatgctcatgcaagcctatgacaatgaaaaaggagctgggaccatgagtccttacacgttcttacgtgctataggtcctgagccatggaatgcggcttatgtagagccatcacgtcgtcctgcagatggccgttacggagaaaacccaaatcgtctttaccaacaccaccaatttcaagtggtcatgaaaccatcaccatcaaatattcaagaactttaccttgcttctttggaaaaattgggcatcaatcctttagaacatgatattcgttttgttgaagataactgggaaaacccatcaacaggatcagcagggcttggttgggaagtttggcttgatggaatggaaatcacacaatttacgtatttccaacaagttggtggccttgcgacatctccagtgacagcagaagtaacttatggtcttgagcgcttagcttcctatattcaagaagtggattcggtctatgatattgagtgggcaccaggtgttaaatatggtgaaatcttcttacaacctgagtatgaacattcaaaatattccttcgaaatatcagaccaagacatgctgcttgaaaactttgaaaagtttgaaaaagaagcctcgcgtgccctagaagaaggtttggttcacccagcttatgattacgtgctcaaatgttctcatacgtttaacctgctggatgcccgtggcgctgtttccgtcacagaacgtgcaggctacattgctcgtatccgtaatttggcacgtgtcgttgctaagacctttgttgcagaacgcaagaagcttggatttccactgttggatgaagcaacacgcgcaatcttgctagctgaagatgacgaa

SEQ ID NO: 6794 - protein, 305 aa, Streptococcus pyogenes
MSKKLTFQEIILTLQQYWNDQGCMLMQAYDNEKGAGTMSPYTFLRAIGPEPWNAAYVEPSRRPADGRYGENPNRLYQHHQFQVVMKPSPSNIQELYLASLEKLGINPLEHDIRFVEDNWENPSTGSAGLGWEVWLDGMEITQFTYFQQVGGLATSPVTAEVTYGLERLASYIQEVDSVYDIEWAPGVKYGEIFLQPEYEHSKYSFEISDQDMLLENFEKFEKEASRALEEGLVHPAYDYVLKCSHTFNLLDARGAVSVTERAGYIARIRNLARVVAKTFVAERKKLGFPLLDEATRAILLAEDDE

SEQ ID NO: 6795 - DNA, 2328 bp, Streptococcus agalactiae
atggcaggcgcaaaagcatttccaaaattaatcaaaacaatctcaaatttggagagccacaggcaattaagatttgacgataatggaagtctttctcttcaaaagaaagaagctaagaaaaaggaaatcacagtaaggggtctttttagagcaaataaagcaggatttggttttcttagtattgaccaagacgaagatgatatgtttatcggaaaaaacgatattgcttatgctattgatggtgacacggtagaagctgttgtaaagaaaccagcggaccgtcttaacgggactgcagcagaagcgcgtgttgttaatattgttgaacgtagtttaaagacgcttgttggtaagtttgtcttagacgatgagcgccctaaatacgcaggatatatcaaatcgaaaaatcaaaaaatcaatcaaaagatttatatacgcaaagaaccggtcgttttagacggaacagaaattatcaaagtagatattgataaatatccgacacgaggacatgattacttcgtagcaagtgttcgtgatatcgttggacatcaaggagatgttggtattgatgttttagaagtcttggaaagtatggatatcgtctcagaatttcctgaggacgttattgcagaagccaatgctatcccagatgctccaacggagaaagatttaattgggcgtgttgatttacgtcaagaggtcactttcactattgatggagcggacgccaaagatttagacgatgctgtgcatattaaattactggataatggtcattttgaacttggagttcatatcgcagatgtatcatactacgttactgaaggctctgccttaaatcgtgaagcacttagtcgtggtacgtccgtatatgtcacagatcgcgttgtaccaatgttaccagagcgtctatctaacggtatatgttcattaaatccaaatcttgatcgtttaacgcagtcttgtattatggaaattgaccaaaatgggagagttgttaatcatcaaattacacagtcagtgattaataccacttatcgtatgacttataccgctgtaaatgatattattgctggcgatgaggaaatctgctcagaatatgagtctattgtgtcctcagtacagcatatggtcactttacaccatactttggaagctatgcgtacgcgtcgtggagcgctgaattttgacacatctgaagcaaaaattatggttaatgataagggaatgccagttgatattgttattcgcaacagaggcattgctgaacgcatgattgagtcatttatgttggcggcaaatgaaacggttgctgaacattatgctcgtctaaaactgccatttatttatcgtatacacgaagagcctaaagctgaaaaattacaaaaattcatcgattatgcttctgttttcggtgttcagattcaaggaacagcaactaaaatcacccaatctgctttacaggactttatgaaaaaagtacaagggcagccaggaagtgaagtgttatctatgatgttattgcgctcgatgcaacaagctagatattctgaacacaaccatggacattatggacttgctgcggaatattacactcactttactagccccattcgacgttatccagacttgttagttcatcgtatgattcgtgattatgatgataaagcgatggataaagctgatcattttgctaaccttatcccagaaattgcaactcaaacgtctagtcttgagagacgtgccattgatgctgaacgtattgtagaggcaatgaagaaagccgaatatatggaagaatatgttggtgaggaatttgaaggtgtggttgcaagcgttgttaaatttggtatgtttgtagaattaccaaatactattgaaggattgattcacgtaacgaccttgcctgaatattatcactttaatgaacgtacgctgacgcttcaaggtgagaaatctgggaaagttttccgtgttggtcaacaaattaaggttaagttgattcgttctgataaggaaactggtgatatcgattttgattatttaccatcagattttgatattgttgaaaaggtaagtaaaagttcgcgtgagggtcgtcctaatagaagttctaaacgagaacatcagcatagaatttctgatcgtgataataagaataaaaatacatctaagaaaaaagcatctcgaaaacccaaaaggaactcggatagcaaatcacatcatcataaagacgatagaacaacaggttcaaccaagaaaaaaacgaaaaaacctttctataaaggcgttgctaagaaaggtcagaaacggaaatctaagaaaggt

SEQ ID NO: 6796 - protein, 776 aa, Streptococcus agalactiae
MAGAKAFPKLIKTISNLESHRQLRFDDNGSLSLQKKEAKKKEITVRGLFRANKAGFGFLSIDQDEDDMFIGKNDIAYAIDGDTVEAVVKKPADRLNGTAAEARVVNIVERSLKTLVGKFVLDDERPKYAGYIKSKNQKINQKIYIRKEPVVLDGTEIIKVDIDKYPTRGHDYFVASVRDIVGHQGDVGIDVLEVLESMDIVSEFPEDVIAEANAIPDAPTEKDLIGRVDLRQEVTFTIDGADAKDLDDAVHIKLLDNGHFELGVHIADVSYYVTEGSALNREALSRGTSVYVTDRVVPMLPERLSNGICSLNPNLDRLTQSCIMEIDQNGRVVNHQITQSVINTTYRMTYTAVNDIIAGDEEICSEYESIVSSVQHMVTLHHTLEAMRTRRGALNFDTSEAKIMVNDKGMPVDIVIRNRGIAERMIESFMLAANETVAEHYARLKLPFIYRIHEEPKAEKLQKFIDYASVFGVQIQGTATKITQSALQDFMKKVQGQPGSEVLSMMLLRSMQQARYSEHNHGHYGLAAEYYTHFTSPIRRYPDLLVHRMIRDYDDKAMDKADHFANLIPEIATQTSSLERRAIDAERIVEAMKKAEYMEEYVGEEFEGVVASVVKFGMFVELPNTIEGLIHVTTLPEYYHFNERTLTLQGEKSGKVFRVGQQIKVKLIRSDKETGDIDFDYLPSDFDIVEKVSKSSREGRPNRSSKREHQHRISDRDNKNKNTSKKKASRKPKRNSDSKSHHHKDDRTTGSTKKKTKKPFYKGVAKKGQKRKSKKG

SEQ ID NO: 6797 - DNA, 2331 bp, Streptococcus pyogenes
atgatgaaagaaagaattatgacttacctcaaggagcatggcaagtccaatgtgaacgacttggctgcggccttggagatggctggagctaagcattttcccagccttattaaaaccatttccaaaatggaaagtcagagcctgttacggttttcagatgatggcagtctggctcttagaaaagagcgtgaaaagaaaaaagaacctactgttcagggtgtttttcgtgccaataaagcaggctttggtttcttacatgtggatgagaatgaagatgacatgtttatcggtcgtaatgatgttgggtatgctattgatggtgatactgtcgaagtagtggttaaaaagccagcagaccgtctcaaaggcacagcggctgaagctaaggtcgttgctattgttgaccgttctttaaaaacagctgttggaacctttattttagatgatgacaaaccaaaatatgctggttatatcaggtccaaaaaccaaaagattcaacaaaaaatctatatcaaaaaagaacctgttgtgcttaaaggcactgaaatcatcaaggttgatattgataaatacccgatacgcgggcacgattattttgtagccagtgtgcgtgatatcgtaggccatcaaggagacgttggaattgatgtcctagaagtccttgaatcgatggatatcgtgtcagaatttccagcagaagttttagctgaggccaatgctatttcagaagcaccaactgctaaagatttaataggccgtgtggatttgcgtcaagaaaccaccattactattgatggtgcggacgccaaagacttagatgatgctatccatattaagctattggataacgggaattatgaacttggggtacatattgcggatgtctcatattatgtgacagaaggatctgcccttgataaggaagctatcgcccgtggcacttctgtctatgtcaccgatcgtgtggttccgatgttaccagagcgtttgtcaaatggcatctgctctttgaaccctaacattgatcgtttgacccagtcagccttgatggaaattaattctcaagggcatgtggtcaattatcaaatctgtcaatcagtgattaagacaacttaccgaatgacgtatagtacggtcaatgacatgattgcaggagatgaagaagcgctccaagaattcgctagcattgctgatgatgtgaccctcatggtggctttgcataggattttggaagctatgcggtcaaaacgaggcgccttgaattttgatacgcaagaagcaaaaattattgttaatgacaaaggaatgccggttgatgtggtgcttcgtcaaaggggcattgcggagcggatgattgaatcctttatgctagcagccaatgagtgtgttgcggagcattttgcaaaagctaagttaccgtttatctaccgtattcacgaagaaccaaaggccgaaaaacttcaacaatttattgattacgctagcacctttggtattcacattcaaggaacagccaacaagatttctcaggaagccttgcaagcctttatggcaaaagtcgaaggtcaaccaggagcagaagtgctcaacatgatgcttctacgttccatgcaacaagcgaggtattctgaacataatcatggccattacggtttggccgcagaatattacactcactttaccagtccgattcgtcgttaccctgacttattggttcaccgcatggttcgtgagtacaatcaacctagtcaagaaaagcgcgaccattttgctcagatcattccagaattagcaacatcttcttcacagttagagcgtcgtgctattgatgctgaacgcgtggttgaagccatgaaaaaagctgagtatatggcagagtatgtcggcgaagaatttgacggtatcgtttccagtgtcgttaaatttggtttttttgtagaattgccaaatacgattgaaggtttggttcatatcactagcttaccggaatactatcactttaatgaaagaacgctaagccttcaaggtgaaaaatcaggtaaggtctttaaggtcggtcaacctattcgtgtgaaattggttaaggctgacaaggaaactggtgacattgactttgagtatttacctagcgactttgatgtggttgaaaaaatcaagatgtcggataaagctagtcgacgagatcgccgtaaatcctcaaaatcatctaaagggacaaagaaaaaagaacctaaagaagtagccaaggcaaaaaccaagggtaaaactaaaaaagggtctaaaaaaccattttacaaagaacaagcaaaaaagaagagtcgtaaaaggagt

SEQ ID NO: 6798 - protein, 777 aa, Streptococcus pyogenes
MMKERIMTYLKEHGKSNVNDLAAALEMAGAKHFPSLIKTISKMESQSLLRFSDDGSLALRKEREKKKEPTVQGVFRANKAGFGFLHVDENEDDMFIGRNDVGYAIDGDTVEVVVKKPADRLKGTAAEAKVVAIVDRSLKTAVGTFILDDDKPKYAGYIRSKNQKIQQKIYIKKEPVVLKGTEIIKVDIDKYPIRGHDYFVASVRDIVGHQGDVGIDVLEVLESMDIVSEFPAEVLAEANAISEAPTAKDLIGRVDLRQETTITIDGADAKDLDDAIHIKLLDNGNYELGVHIADVSYYVTEGSALDKEAIARGTSVYVTDRVVPMLPERLSNGICSLNPNIDRLTQSALMEINSQGHVVNYQICQSVIKTTYRMTYSTVNDMIAGDEEALQEFASIADDVTLMVALHRILEAMRSKRGALNFDTQEAKIIVNDKGMPVDVVLRQRGIAERMIESFMLAANECVAEHFAKAKLPFIYRIHEEPKAEKLQQFIDYASTFGIHIQGTANKISQEALQAFMAKVEGQPGAEVLNMMLLRSMQQARYSEHNHGHYGLAAEYYTHFTSPIRRYPDLLVHRMVREYNQPSQEKRDHFAQIIPELATSSSQLERRAIDAERVVEAMKKAEYMAEYVGEEFDGIVSSVVKFGFFVELPNTIEGLVHITSLPEYYHFNERTLSLQGEKSGKVFKVGQPIRVKLVKADKETGDIDFEYLPSDFDVVEKIKMSDKASRRDRRKSSKSSKGTKKKEPKEVAKAKTKGKTKKGSKKPFYKEQAKKKSRKRS

SEQ ID NO: 6799 - DNA, 465 bp, Streptococcus agalactiae
atggttaaaggtcaaggaaacgttgtagcacaaaataaaaaagcgcatcacgactatactatcgttgaaacaatagaagcaggaattgttttgacaggaacagaaatcaaaagtgtccgcgcagcgcgtattacattgaaagatggatatgcacaaataaaaaatggtgaagcgtggttgattaatgttcatattacaccatatgatcaaggtaacatatggaatcaagatcctgatcgtacacgaaagttattactaaaaaaacgtgagattgaaaaaatatcaaatgaactgaaagggactggtatgactctggtacctctaaaagtttacttaaaagatggttttgctaaagttctattgggtttggcaaaaggaaaacatgattatgataagcgagagtctatcaaacgtcgtgagcaaaaccgtgatattgcccgtcagttaaaaaactataattcacga

SEQ ID NO: 6800 - protein, 155 aa, Streptococcus agalactiae
MVKGQGNVVAQNKKAHHDYTIVETIEAGIVLTGTEIKSVRAARITLKDGYAQIKNGEAWLINVHITPYDQGNIWNQDPDRTRKLLLKKREIEKISNELKGTGMTLVPLKVYLKDGFAKVLLGLAKGKHDYDKRESIKRREQNRDIARQLKNYNSR

SEQ ID NO: 6801 - DNA, 465 bp, Streptococcus pyogenes
atggcaaaaggtgaaggtcatatactggcgcaaaataaaaaggctagacatgattatcacattgttgaaaccgttgaagcagggattgtcttaacgggaactgagattaaaagtgttcgtgcagctcgtattcaactgaaagatggctttgcccaaattaagaatggggaagcgtggttggtcaacgtgcatattgcaccttttgaacaaggtaatatttggaacgctgatcctgaacgaacccgcaaactgctgctcaaaaaacgtgagattacgcatctagcaaatgaacttaaaggatctggcatgaccttagttcctctcaaagtttacctcaaggatggctttgctaaagttctgattggtctagctaaagggaaacacgagtatgacaaacgcgaaaccattaaacgccgtgatcaggaaagagatattaaaaaacaaatgaaacactacaatgcaagg

SEQ ID NO: 6802 - protein, 155 aa, Streptococcus pyogenes
MAKGEGHILAQNKKARHDYHIVETVEAGIVLTGTEIKSVRAARIQLKDGFAQIKNGEAWLVNVHIAPFEQGNIWNADPERTRKLLLKKREITHLANELKGSGMTLVPLKVYLKDGFAKVLIGLAKGKHEYDKRETIKRRDQERDIKKQMKHYNAR

SEQ ID NO: 6803 - DNA, 99 bp, Streptococcus agalactiae
atggttgctccaatagccccgatgtatgttgaatcttgcaagaagagagaaacgaatacaaagaggaagaagagaagtgtgattggtgaaaggattttg

SEQ ID NO: 6804 - protein, 33 aa, Streptococcus agalactiae
MVAPIAPMYVESCKKRETNTKRKKRSVIGERIL

SEQ ID NO: 6805 - DNA, 1101 bp, Streptococcus agalactiae
ttggggatttttctaacactttcttattggatttccctaatatttatcggtatggcagagattacagccgtaggagagtatgttcaattttggttccctgaatggccatcctggattatccaaattgtttttttagctatcctaagttctatcaacttaattgctgtaaaagcattcggagaaaccgagttttggtttgctatgataaaagttattgcaattcttggtttaatagcaaccggtatctttatggtattgacaaactttgacaccggtcacggataccatgcttcaatctcaaatatcaccaatcattttgaatggttccctaaaggtaaattgaatttcttcatggctttccaaatggtattctttgcttatttagctattgaatttgtcggagtaacaacttctgaaacagctaatccacgtaaagttttaccaaaagcaatccaagaaattccgatgcgtattattttattctacgcaggttcattattagcaattatggccatcttcccatggcaacagttaccagttaatgagtcacctttcgttacagtattcaaactagctgggattaagtgggctgccgctttgattaactttgttgtcctaacgtctgcagcatctgctcttaattctactttgtactcaacagggcgtcatttattccaattggctaatgaatcaccaaatgctcttacaaaagcgttaaaattagaccaattatctcgtcaaagcgttccaagtcgagctattattgcatcagctgtaatcgttggagcttcagcacttatcagtgttttacctggtatttcagatgccttctccttaattactgcatcatcttctggtgtttacatttctatctatgttcttattatgattgcacattggaaatatcgtaaatcacctgattttatggaagatggttataaaatgcctgcctacaaaatcctttcaccaatcacacttctcttcttcctctttgtattcgtttctctcttcttgcaagattcaacatacatcggggctattggagcaaccatctggattattggatttggtttatatagtcacttcaaacataaatcacat

SEQ ID NO: 6806 - protein, 367 aa, Streptococcus agalactiae
MGIFLTLSYWISLIFIGMAEITAVGEYVQFWFPEWPSWIIQIVFLAILSSINLIAVKAFGETEFWFAMIKVIAILGLIATGIFMVLTNFDTGHGYHASISNITNHFEWFPKGKLNFFMAFQMVFFAYLAIEFVGVTTSETANPRKVLPKAIQEIPMRIILFYAGSLLAIMAIFPWQQLPVNESPFVTVFKLAGIKWAAALINFVVLTSAASALNSTLYSTGRHLFQLANESPNALTKALKLDQLSRQSVPSRAIIASAVIVGASALISVLPGISDAFSLITASSSGVYISIYVLIMIAHWKYRKSPDFMEDGYKMPAYKILSPITLLFFLFVFVSLFLQDSTYIGAIGATIWIIGFGLYSHFKHKSH

SEQ ID NO: 6807 - DNA, 684 bp, Streptococcus agalactiae
atgatagaattcttttctaatatcagaacagagattccgcagatgcctttacttatccatagtttgattttatctgtcttaccttttctgatgtggctgactttggttaatagagataagcctttgtataaaactatttggagtatccttttaggacttcagttaattacgatttatacttggtttttctgggcaaaattgcctttatctgaaagtcttcccctttaccattgtcgaataggcatgtttgtcgttctcttggcgaggcctggaatattaaaggattatttcgcattgttaggagtagtaggtggagtattggcaatgattcacccagacttttacccttaccagtttctacatgtgactaatattttcttctttattggacattttgctttatttgtccttagtttactacatctgatgacacagtccaatttggacaaattaaatccaaaattgattatacaactaacgcttctcattaatatgtctttgatttttattaacctcttgactggggggaattatggctttatgatgaagacaccaatactaggaataacaaatccctttttaaacctttttatagtgacaactctattaagttttctcgtcctatttgttaaacaaattttccaaaaagtgagaatgagagctagtcttaaaacagaagaatct

SEQ ID NO: 6808 - protein, 228 aa, Streptococcus agalactiae
MIEFFSNIRTEIPQMPLLIHSLILSVLPFLMWLTLVNRDKPLYKTIWSILLGLQLITIYTWFFWAKLPLSESLPLYHCRIGMFVVLLARPGILKDYFALLGVVGGVLAMIHPDFYPYQFLHVTNIFFFIGHFALFVLSLLHLMTQSNLDKLNPKLIIQLTLLINMSLIFINLLTGGNYGFMMKTPILGITNPFLNLFIVTTLLSFLVLFVKQIFQKVRMRASLKTEES

SEQ ID NO: 6809 - DNA, 693 bp, Streptococcus pyogenes
atggatttttttgcaattgaccccatcggactgcctcatacctcacttatcttttacttgtcgtcactcttgatagcgcttttgcttgtttttttgacttttcaagcatataggttaaaatctcatcgttattttttcttgtttttacagttatctcaggtgattggcttatacacatggtacgtgttaagggggtttcctttagatgaagctttgccgttgtatcattgtcgcatcgctatgttagctatcttttttctacctgatcgtaacaagtttaagcaattatttatggttttggggataggtggaacattccttgcacttttatcgccagatctttatccgtttagattatggcatgtagcaaatgtctcgttttattttggtcattatgctttgttagtgaatggtttgatttacctcttgcgtttttacgatgccagtcagttaagactgctatcagtagtacgctatttagcaactgttaactttcttcttctgttggtcagtttagccacgaaaggaaattatggttttgtgatggatattccagtgattcatacgcgtcatttgctacttaattttgtgatcgttacaagtggcttgacttttatggttaaaataaccgaatatttttaccttaaatttggtgaagctcaacagctggcacttgctttctctaaagaaaag

SEQ ID NO: 6810 - protein, 231 aa, Streptococcus pyogenes
MDFFAIDPIGLPHTSLIFYLSSLLIALLLVFLTFQAYRLKSHRYFFLFLQLSQVIGLYTWYVLRGFPLDEALPLYHCRIAMLAIFFLPDRNKFKQLFMVLGIGGTFLALLSPDLYPFRLWHVANVSFYFGHYALLVNGLIYLLRFYDASQLRLLSVVRYLATVNFLLLLVSLATKGNYGFVMDIPVIHTRHLLLNFVIVTSGLTFMVKITEYFYLKFGEAQQLALAFSKEK

SEQ ID NO: 6811 - DNA, 102 bp, Streptococcus agalactiae
gtgtggcttaggtttaatatcagcagcttcaccaatggcacaagatttagcaggctattccgcagaatctgcagccttattagtaggggtactagggatatt

SEQ ID NO: 6812 - protein, 34 aa, Streptococcus agalactiae
MWLRFNISSFTNGTRFSRLFRRICSLISRGTRDI

SEQ ID NO: 6813 - DNA, 1218 bp, Streptococcus agalactiae
ttgaaaaatttaaatcgttatgtagttgcggtttctggagtcgttttacatttaatgctaggatcaacttatgcttggagtgtgtttcgtaacccaatcatctcagagactggttgggatatttcatcagtttcattcgcttttagtttggctattttttgtctaggaatgtctgcagcttttatgggacacttagtagagcgttttggtcctaggataatgggaatgatttctgctattttatatggagcagggaatgtgttaacaggtttagccattgaaactcagcagttatggttactgtatgttgcatacggtattttaggaggaatcggacttggttcaggttatattactccagtatcgactattattaaatggtttcctgataggaggggactagcaacaggattcgctattatgggatttggctttgcttctttagtaacaagtccgcttgcacaatccttaatgattaggattggtgtaggtaaaacattttatattttgggattagtatatttttttgtcatgatgattgcctcacaatttattaaacaaccacctcaggaaaaaataactattttgactcacgacggtaaaaagaatgctatgaattcacaaattattactggattaaaagcaaatgctgctataaaatcaaaaaccttttacatcatttggttgactttgtttattaatatttcgtgtggcttaggtttaatatcagcagcttcaccaatggcacaagatttagcaggctattccgcagaatctgcagccttattagtaggggtactagggatatttaacggttttggacgtctgttatgggcaagtctctctgactacattggacgcccgttgacctttataatattatttattgtgaactttattatgacttctagtttatttttgtcattcaatgctattgtatttgcaatagcaatgtctattttaatgacttgttatggtgcaggcttttccttattacctgcttatctaagtgatatttttggaacaaaggaattagctactttacatggttatagtttaacagcatgggcaatagcaggtctgtttgggcccctattgttatcaaagacatattcatggggaaattcctatcaattgacattaatggtttttggttttttattcttattcggattattgttatctctatatttaagaaaattaacaactaaagttgtg

SEQ ID NO: 6814 - protein, 406 aa, Streptococcus agalactiae
MKNLNRYVVAVSGVVLHLMLGSTYAWSVFRNPIISETGWDISSVSFAFSLAIFCLGMSAAFMGHLVERFGPRIMGMISAILYGAGNVLTGLAIETQQLWLLYVAYGILGGIGLGSGYITPVSTIIKWFPDRRGLATGFAIMGFGFASLVTSPLAQSLMIRIGVGKTFYILGLVYFFVMMIASQFIKQPPQEKITILTHDGKKNAMNSQIITGLKANAAIKSKTFYIIWLTLFINISCGLGLISAASPMAQDLAGYSAESAALLVGVLGIFNGFGRLLWASLSDYIGRPLTFIILFIVNFIMTSSLFLSFNAIVFAIAMSILMTCYGAGFSLLPAYLSDIFGTKELATLHGYSLTAWAIAGLFGPLLLSKTYSWGNSYQLTLMVFGFLFLFGLLLSLYLRKLTTKVV

SEQ ID NO: 6815 - DNA, 1194 bp, Streptococcus pyogenes
atggaaaaaacaaaacgttatatcattgcaacagcagggatacttctccacttaatgttgggatcgacctatgcttggagtgtttatcgtaatccaattttacaagagaccggttgggaccaagctcctgtcgcttttgccttttctttagctattttttgtttaggtttatctgctgcttttatgggaaatttagttgaacaatatggtcctcgtctaaccggaacggtgtcagctattctttatgcttctggaaatatgctgactggtttagcgattgatcgtaaagaaatttggcttttatatattggttatggtgttattggtggcttaggacttggagcgggatatatcacaccgatatcaactattataaaatggtttccagataaaagaggcatggcaacagggtttgctattatggggtttggttttgcgtctttattaacaagtccgattgcccagtggctaattgaaacagaaggtttggtagcaacattttaccttttagggctgatttatctaatagttatgctttttgcttctcaattgataataaaaccaactgctgctgagatagctatactagataaaaaaagattacaaaataacagttatttaatcgaaggaatgaccgctaaagaagcacttaaaacaaaatcattttattgtctttgggtaattttatttatcaatatcacatgtggcttaggacttatctcagttgttgcgccaatggcacaagatctaactggtatgagtccagaaatgtcagcaattgtggttggtgctatggggatttttaacggtttcggtcgtttagtgtgggctagtttgtcagactatattggacgccgtgtgacagtaatacttttatttttagtaagcataattatgactattagtttaatatttgcacatagttccctaattttcatgataagcattgccacccttatgacttgttatggtgcgggtttttctctcattccgccttatttaagtgatctttttggggcaaaggaactggctacattacatgggtatatattgacagcttgggcaatagctgcattaactggacctatgttattatctatcactgttgaatggactcataattatcttcttaccttatgtgtttttattgtcttatacattttaggattaatggtagcattaaggttaaagaaa

SEQ ID NO: 6816 - protein, 398 aa, Streptococcus pyogenes
MEKTKRYIIATAGILLHLMLGSTYAWSVYRNPILQETGWDQAPVAFAFSLAIFCLGLSAAFMGNLVEQYGPRLTGTVSAILYASGNMLTGLAIDRKEIWLLYIGYGVIGGLGLGAGYITPISTIIKWFPDKRGMATGFAIMGFGFASLLTSPIAQWLIETEGLVATFYLLGLIYLIVMLFASQLIIKPTAAEIAILDKKRLQNNSYLIEGMTAKEALKTKSFYCLWVILFINITCGLGLISVVAPMAQDLTGMSPEMSAIVVGAMGIFNGFGRLVWASLSDYIGRRVTVILLFLVSIIMTISLIFAHSSLIFMISIATLMTCYGAGFSLIPPYLSDLFGAKELATLHGYILTAWAIAALTGPMLLSITVEWTHNYLLTLCVFIVLYILGLMVALRLKK

SEQ ID NO: 6817 - DNA, 1458 bp, Streptococcus agalactiae
atgaaagtgtgttataatttaggagtatattcgtttataagggatagcatactatctacaacattgttgctaaataatagaaaaggaaatgatatgaagcttagtttgcatgaagttgctaaagtagttggcgctaaaaatcaagtatcagagtttgaagacgttcccctgggaaatattgaatttgatagtcgtaatatcagtgaaggtgacttatttcttcccttaaaaggagcaagagatggacatgagtttatagagatggcttttgataatggagcaatagcaaccatttcagagaaggaaatagagggtcatccttatcttttagtgtctgatgcacttaaagcatttcaagtcttggcacagtattatattgaaaagatgaacgttgatgttattgcagtaactggctcaaatggtaagacaacaactaaagatatgatagctgcaatcttatcaaccacatataagacttataaaacacaaggaaactacaataacgagattggcttaccctatactgtgctacacatgccagaagatactgaaaaaattattttggagatgggacaggatcatcttggagatatccatgtgttatctgaaattgcaaaaccacgtattgctgttgttactttgattggtgaagcacacttagaattttttggtagtcgagaaaagattgcagaagggaaaatgcaaatcacagatggtatgagttcagatggcatattaattgcaccgggagatccaattattgatccatatcttccagcaaaccagatgactattcgttttggtcatgaccaagaattgcaagtgacagaactcaaagaagaaaaacattccttaacttttaaaactaatgctttggagcaccaattacgtataccagtacctggtaagtacaatgcaactaatgcgatggtcgctgcctatgttggaaaattattagcagtagcagaagaagatatagtggatgctctagaaaatcttcaactaactcgtaatcgcaccgaatggaagaaatcagccaatggagcagatattttatcagatgtttacaatgctaacccaacggctatgcgattgatactagaaaccttttcagctattcccaataatgatggtggaaagaagattgctcttttagctgatatgaaagaactgggagaacaatctgtggatttacataatcaaatgattatgagtatcagacctgactctattgatactttgatttgttatggccaggatattgaggggttggctcaattagcaagccagatgttcccaattggtaaagtgtatttctttaaaaagaatcaagaagtagatcagtttgatcaattgcttgcaaaagtaaaagatactcttaaggagaaagatcaaatattattaaaaggttctaactcaatgaatctttctaaaatagttgatattcttgaagtagga

SEQ ID NO: 6818 - protein, 486 aa, Streptococcus agalactiae
MKVCYNLGVYSFIRDSILSTTLLLNNRKGNDMKLSLHEVAKVVGAKNQVSEFEDVPLGNIEFDSRNISEGDLFLPLKGARDGHEFIEMAFDNGAIATISEKEIEGHPYLLVSDALKAFQVLAQYYIEKMNVDVIAVTGSNGKTTTKDMIAAILSTTYKTYKTQGNYNNEIGLPYTVLHMPEDTEKIILEMGQDHLGDIHVLSEIAKPRIAVVTLIGEAHLEFFGSREKIAEGKMQITDGMSSDGILIAPGDPIIDPYLPANQMTIRFGHDQELQVTELKEEKHSLTFKTNALEHQLRIPVPGKYNATNAMVAAYVGKLLAVAEEDIVDALENLQLTRNRTEWKKSANGADILSDVYNANPTAMRLILETFSAIPNNDGGKKIALLADMKELGEQSVDLHNQMIMSIRPDSIDTLICYGQDIEGLAQLASQMFPIGKVYFFKKNQEVDQFDQLLAKVKDTLKEKDQILLKGSNSMNLSKIVDILEVG

SEQ ID NO: 6819 - DNA, 1389 bp, Streptococcus pyogenes
atgaaattaaccttacacgaagtggctaaaatagttgacgcccaaaataatgtgtctgacttagacgacgttcctctgcatcacattgaatttgatagccgaaagattacaaaaggagacctctttttacccttaaaaggtcaaagggatggtcatgagtttattgatttagcctttcaaaatggagctgtcgctactttttcagaaaaagaattgccggggaaacctcaccttcttgttgaagactgcctaaaagcttttcaaaagctagcccattattatattgataagatgcgcgtggatgttattgctgtgacaggctcaaatggtaaaacttccaccaaagatatgataggagctgtcctatcaaccacttacaaaacttacaaaacgcaaggaaattacaataatgagattggtttgccttacaccgttctccacatgcctgacgatacggaaaaaattgttcttgaaatgggacaagatcacatgggagatattcgtcttctgtctgaaattgcaaggcctcgtattgcagttttaaccttagtcggcgaagctcatttagaatattttggaagccgagacaaaatagcccaaggcaaaatgcagattgttgacggcatgaattcagatgggattttaattgctccgggagatccgattattgacccatatcttccagaaaatcagatggttatccgttttggaaatcagcaggaaattgacgttactggtattcaagaagacaaagatagcttaacgtttacaacaaatgtgttagcaacacctgtgtccctacctctaccaggaaaatacaacgcgaccaatgctatggtagcagcctatgtaggaaaactattggcagtaacagacgaggatattatagctgctttacagactgtgacgttgacaggtaatcgtacggagtggaaaaaagcagccaatggtgctgatattttgtcagatgtctacaatgccaacccaacagccatgcgtctgattttagaaacatttgctaacatagcaaagaaccccggaggaaaaaagattgcagtgctagcagatatgaaagaacttggaaaggattcagtgatacttcattctcagttaattgacagcttaacatcaggtaatattgatcagcttgttttttatggggatcatattaaagaattagcacggttggcaagtcaggtttatcctgctgagcaagtacattattttttaaaaactgaacaagaagaccagtttgaagccatggcacaatatgttcaaaacattcttaatccctttgatcaaattcttttaaaaggcagccactcgatgtcgctagaaaagttagtagatcgattagtgactgacaagaattgtgacagctatcagcct

SEQ ID NO: 6820 - protein, 463 aa, Streptococcus pyogenes
MKLTLHEVAKIVDAQNNVSDLDDVPLHHIEFDSRKITKGDLFLPLKGQRDGHEFIDLAFQNGAVATFSEKELPGKPHLLVEDCLKAFQKLAHYYIDKMRVDVIAVTGSNGKTSTKDMIGAVLSTTYKTYKTQGNYNNEIGLPYTVLHMPDDTEKIVLEMGQDHMGDIRLLSEIARPRIAVLTLVGEAHLEYFGSRDKIAQGKMQIVDGMNSDGILIAPGDPIIDPYLPENQMVIRFGNQQEIDVTGIQEDKDSLTFTTNVLATPVSLPLPGKYNATNAMVAAYVGKLLAVTDEDIIAALQTVTLTGNRTEWKKAANGADILSDVYNANPTAMRLILETFANIAKNPGGKKIAVLADMKELGKDSVILHSQLIDSLTSGNIDQLVFYGDHIKELARLASQVYPAEQVHYFLKTEQEDQFEAMAQYVQNILNPFDQILLKGSHSMSLEKLVDRLVTDKNCDSYQP

SEQ ID NO: 6821 - DNA, 1044 bp, Streptococcus agalactiae
atgtcaaaagaaacattgatcttgctttacggtggtcgctctgcggaacgtgaagtatctgtactgtctgcagaaagcgtcatgcgtgctattaattatgataaattttttgttaaaacttattttatcacgcaagtaggtcaatttattaaaacacaagaatttgatgaaatgccatcttcagatgaaaagttaatgacaaaccaaactgttgatttagacaaaatggttcgtccaagtgatatctatgatgataatgcaattgttttccccgttttacatggaccaatgggggaagatggttctatccaaggatttttagaagttttaaggatgccttatgttgggactaatattctatcttcaagcgtggctatggataaaattacaacaaaacaagtccttgcaacagtaggtgtacctcaggttgcatatcaaacttattttgagggtgatgatttggaacatgcgattaaactctctttagaaactttaagtttcccaatttttgtaaaaccggctaatatggggtcatcagtaggtatttcaaaagcgacagatgaatcctcacttcgctctgcaattgacttagctctcaagtatgatagccgtattttgattgaacaaggcgtgacagctcgtgaaattgaagtaggtattttaggcaataatgatgttaagacaacttttcctggcgaagtcgttaaagacgtcgatttctatgactatgacgccaaatatattgataataaaattactatggatattccagctaaagttgatgaagcaactatggaagcaatgcgtcaatatgcaagtaaagcttttaaagcaatcggggcttgtggtttatcacgctgtgatttctttttgacgaaagatggacaaatcttcttaaacgaactgaatacaatgcccggttttactcagtggtcaatgtatcccctgctttgggaaaatatggggctaacttatagtgatttgattgaaaagttagttatgttagctaaagaaatgtttgaaaaacgtgagagtcatttaatt

SEQ ID NO: 6822 - protein, 348 aa, Streptococcus agalactiae
MSKETLILLYGGRSAEREVSVLSAESVMRAINYDKFFVKTYFITQVGQFIKTQEFDEMPSSDEKLMTNQTVDLDKMVRPSDIYDDNAIVFPVLHGPMGEDGSIQGFLEVLRMPYVGTNILSSSVAMDKITTKQVLATVGVPQVAYQTYFEGDDLEHAIKLSLETLSFPIFVKPANMGSSVGISKATDESSLRSAIDLALKYDSRILIEQGVTAREIEVGILGNNDVKTTFPGEVVKDVDFYDYDAKYIDNKITMDIPAKVDEATMEAMRQYASKAFKAIGACGLSRCDFFLTKDGQIFLNELNTMPGFTQWSMYPLLWENMGLTYSDLIEKLVMLAKEMFEKRESHLI

SEQ ID NO: 6823 - DNA, 594 bp, Streptococcus agalactiae
atgctttacccaacaccaattgctaaattgattgacagcttttcaaaattaccgggtataggtactaaaacagcaacacgtttagctttttacaccattggtatgagtgatgaagatgttaatgaatttgctaagaatttattagctgctaagcgggaattaacctattgttctgtttgtggtaatttgactgatgatgatccttgcttaatttgtacagataagacgcgtgaccagtctgttatcttggttgttgaagatagtaaagatgtgtcagctatggaaaaaattcaagagtataatggtttgtatcatgtcttacatggcttaatttcacctatgaatggtattagccctgatgacattaatttgaaaagtttaattactcgattgatggatggtcaggtgacagaagttattgttgctaccaatgcgactgctgatggtgaagctacatcaatgtatatttcacgagtcttaaaaccagctggtatcaaagtgacacgattagcgagaggtttagctgttggttcagatatcgaatatgcagatgaagtaaccttgcttcgagcaatcgaaaatcgtacagagtta

SEQ ID NO: 6824 - protein, 198 aa, Streptococcus agalactiae
MLYPTPIAKLIDSFSKLPGIGTKTATRLAFYTIGMSDEDVNEFAKNLLAAKRELTYCSVCGNLTDDDPCLICTDKTRDQSVILVVEDSKDVSAMEKIQEYNGLYHVLHGLISPMNGISPDDINLKSLITRLMDGQVTEVIVATNATADGEATSMYISRVLKPAGIKVTRLARGLAVGSDIEYADEVTLLRAIENRTEL

SEQ ID NO: 6825 - DNA, 594 bp, Streptococcus pyogenes
gtgctttatccaacacccattgcaaagttaattgacagttactctaaacttccaggaattggtatcaagacggcgacgagattagccttttatactattggaatgtcaaatgaagatgtcaatgattttgctaaaaacttattagcagctaaaagagaactgacctattgttcgatttgtggaaaccttaccgatgacgatccttgtcacatttgcacagacacgagtcgtgatcagacgaccattctggtagtagaagatgctaaagatgtttctgccatggaaaaaatccaagagtatcatggctattatcatgtgcttcacggcttgatttcgcctatgaatggtgtggggccagatgacatcaaccttaaaagtttaattacccgtctaatggatggtaaggtgagcgaagttatcgtagctaccaatgccacagcagatggggaagcaacgtccatgtatatttcacgtgtcttgaaaccagccgggattaaggtaactcgtttggcaagaggtctcgcagtaggttcagatattgagtatgctgatgaagtaacattattgagagctattgagaatcgtactgaactt

SEQ ID NO: 6826 - protein, 198 aa, Streptococcus pyogenes
VLYPTPIAKLIDSYSKLPGIGIKTATRLAFYTIGMSNEDVNDFAKNLLAAKRELTYCSICGNLTDDDPCHICTDTSRDQTTILVVEDAKDVSAMEKIQEYHGYYHVLHGLISPMNGVGPDDINLKSLITRLMDGKVSEVIVATNATADGEATSMYISRVLKPAGIKVTRLARGLAVGSDIEYADEVTLLRAIENRTEL

SEQ ID NO: 6827 - DNA, 102 bp, Streptococcus agalactiae
gtgcgacgctatcatcaggatgggaaaataaagttcttagaggaaatgaagtgctttatgaccaagaaattgctaatatacggtcatggtttacacgaggtt

SEQ ID NO: 6828 - protein, 34 aa, Streptococcus agalactiae
MRRYHQDGKIKFLEEMKCFMTKKLLIYGHGLHEV

SEQ ID NO: 6829 - DNA, 2043 bp, Streptococcus agalactiae
atgttgaatcgtaaaaaaaggtatcgtctcactgtaaaaaagcaaaatgctagcatacctagacgattaaatcttctattttttattattgttttattatttactgttctaattcttcgtttagagcaaatgcagattgggcaacaatcattttacatgaaaaaactgacagctcttacgagttatacagtgaaagaatcaaaagcgagaggtcagatttttgatgctaagggagttgtcttagttgaaaatgatgaacgtcctactgtggcgttttctagaggaaacaatatttcatctcagtctatcaaagagttagcgaataaattatcacattacattaccttaaccgaagttgcttcaagcgatagagcaaagagagattattatttagcagataaagccaactacaaaaaagttgttgaaagtttaccagattctaaacgttacgataaatttggtaaccatctagccgaatcaaccgtatatgcaaatgcagttgctgcagttccagtgagcgctattaactattctgaagatgagttaaaagtggttgccttatttaaccaaatgaatgcgacaccaacgtttggttcagtgaaattaagtacaggcgaattaagtgatgatcaaatcaagaaactggatgctgataagaaggaactgttaggaatttctgtaacaagtaattggcatcgtcgtaaaaaaggaacttctttatcggatatattaggtactatttctacagaaaaggcaggtttaccaagagaagaagttaaaaaatatttgaaaaaaggctattcactgaatgaccgagtgggaacttcttaccttgaaaaacaatatgaagatgacttacaaggaatcagacaaattcgcaaagtagttgttaataaaaaaggtaaagttgtttcagataatattacgcaagaaggtaagtcaggaagaaatcttaaattaacgattgatcttaattaccaaaacaaagtagaaagtatcttgaaacaatactatggcagtgaattatctagtggacgcgctagtttttccgaagggatgtatgcagttgctatagaaccttcaactggtaaagtgttagcaatggctggtctgaaaaatgatcatgggaatttagttgatgacagcctaggcactattgctaagaatttcacgccaggatctgttgtgaaaggtgcgacgctatcatcaggatgggaaaataaagttcttagaggaaatgaagtgctttatgaccaagaaattgctaatatacggtcatggtttacacgaggtttgactccaatatctgcggcacaagcgctagagtattcatctaatacttatatggttcaagtagcacttcgtttaatgggacaagactataatacaggagatgctttaactgatcgaggctatcaagaagcaatggctaaactaaggaaaacttacggcgaatatggtttaggggtttctacaggattagatttacctgaatcagaaggttatgtacctggaaaatacagcttaggaacaactctaatggaatcgttcggtcagtatgatgcctatacaccaatgcaacttggtcagtatatctcaactattgcgaataatgggaatcgtttagcacctcacgtggtttcagatatctatgaagggaatgattctaataagttcgctcaattggttcgttcaatcactcctaaaacactaaataagatagctatctcagatcaagagttagccattattcaagaaggtttttataacgttgtcaatagtggaagtggctatgcaactggtacgtcaatgagggggaatgtgacaaccattagtggtaaaactggtaccgctgaaacatttgctaaaaatgtaaatggacaaacagtttctacctacaacttaaacgctattgcctacgatactaatcgtaaaatagcagtagcggtaatgtatccgcatgttacaactgatacaacaaaatcccatcaattagttgcacgagatatgattgatcaatatatttcacagttcacaggacaa

SEQ ID NO: 6830 - protein, 681 aa, Streptococcus agalactiae
MLNRKKRYRLTVKKQNASIPRRLNLLFFIIVLLFTVLILRLEQMQIGQQSFYMKKLTALTSYTVKESKARGQIFDAKGVVLVENDERPTVAFSRGNNISSQSIKELANKLSHYITLTEVASSDRAKRDYYLADKANYKKVVESLPDSKRYDKFGNHLAESTVYANAVAAVPVSAINYSEDELKVVALFNQMNATPTFGSVKLSTGELSDDQIKKLDADKKELLGISVTSNWHRRKKGTSLSDILGTISTEKAGLPREEVKKYLKKGYSLNDRVGTSYLEKQYEDDLQGIRQIRKVVVNKKGKVVSDNITQEGKSGRNLKLTIDLNYQNKVESILKQYYGSELSSGRASFSEGMYAVAIEPSTGKVLAMAGLKNDHGNLVDDSLGTIAKNFTPGSVVKGATLSSGWENKVLRGNEVLYDQEIANIRSWFTRGLTPISAAQALEYSSNTYMVQVALRLMGQDYNTGDALTDRGYQEAMAKLRKTYGEYGLGVSTGLDLPESEGYVPGKYSLGTTLMESFGQYDAYTPMQLGQYISTIANNGNRLAPHVVSDIYEGNDSNKFAQLVRSITPKTLNKIAISDQELAIIQEGFYNVVNSGSGYATGTSMRGNVTTISGKTGTAETFAKNVNGQTVSTYNLNAIAYDTNRKIAVAVMYPHVTTDTTKSHQLVARDMIDQYISQFTGQ

SEQ ID NO: 6831 - DNA, 690 bp, Streptococcus agalactiae
atggtaaaattagtattcgcacgccacggtgaatctgagtggaataaagctaaccttttcactggatgggctgacgtagatctttcagaaaaaggtacacaacaagctattgatgctgggaaattaattcaagcagcaggtattgagttcgaccttgcttttacatcagttcttaaacgtgccatcaaaacaactaaccttgcccttgaagcagctgatcaactttgggtaccagttgaaaaatcatggcgcttgaacgaacgtcattacggtggattgacaggaaaaaataaagcagaagcagctgaacaatttggtgatgagcaagttcatatttggcgtcgttcatatgatgtattgcctccagatatggctaaagatgatgaacattcagcacatactgatcgtcgctatgcttcactagatgattctgttattccagatgcagaaaacctaaaagttactttagagcgtgctcttcctttctgggaagataaaattgctcctgctcttaaagatggtaaaaatgtgtttgttggtgcacacggtaactcaatccgtgctcttgtaaaacatatcaaacaattgtcagatgatgaaatcatggacgttgaaattcctaacttcccaccacttgttttcgaatttgatgaaaaattaaaccttgtttcagaatattacttaggtaaa

SEQ ID NO: 6832 - protein, 230 aa, Streptococcus agalactiae
MVKLVFARHGESEWNKANLFTGWADVDLSEKGTQQAIDAGKLIQAAGIEFDLAFTSVLKRAIKTTNLALEAADQLWVPVEKSWRLNERHYGGLTGKNKAEAAEQFGDEQVHIWRRSYDVLPPDMAKDDEHSAHTDRRYASLDDSVIPDAENLKVTLERALPFWEDKIAPALKDGKNVFVGAHGNSIRALVKHIKQLSDDEIMDVEIPNFPPLVFEFDEKLNLVSEYYLGK

SEQ ID NO: 6833 - DNA, 693 bp, Streptococcus pyogenes
atggtaaaattggttttcgctcgccacggtgagtcagaatggaacaaagctaacctcttcactggttgggcagatgttgatctttcagaaaaagggacacaacaagcgattgatgcaggtaaattgatcaaagaagcaggtattgaatttgaccttgctttcacttcagtattgacacgtgctatcaaaacaactaaccttgcccttgaaaatgcaggtcaattgtgggttccaactgaaaaatcatggcgcttgaacgagcgtcactatggtgctttgactggcaaaaacaaagctgaagctgcagaacaattttgtgatgaacaagttcatatctggcgtcgttcatacgacgtgttgccgccagctatggctaaagatgatgagtattcagcacacaaagaccgtcgttatgctgatcttgacccagcccttattccagatgctgaaaacttaaaagtcactcttgaacgcgcaatgccttactgggaagaaaaaattgctccagctcttcttgacggtaaaaacgtctttgttggcgcacatggtaactcaatccgcgctcttgtgaaacacattaaaggtctttcagatgacgaaatcatggatgtggaaattccaaacttcccaccacttgtttttgaattagatgaaaaacttaacattgttaaagaatactaccttggtggtgaa

SEQ ID NO: 6834 - protein, 231 aa, Streptococcus pyogenes
MVKLVFARHGESEWNKANLFTGWADVDLSEKGTQQAIDAGKLIKEAGIEFDLAFTSVLTRAIKTTNLALENAGQLWVPTEKSWRLNERHYGALTGKNKAEAAEQFCDEQVHIWRRSYDVLPPAMAKDDEYSAHKDRRYADLDPALIPDAENLKVTLERAMPYWEEKIAPALLDGKNVFVGAHGNSIRALVKHIKGLSDDEIMDVEIPNFPPLVFELDEKLNIVKEYYLGGE

SEQ ID NO: 6835 - DNA, 756 bp, Streptococcus agalactiae
atgtcacgtaaaccatttatcgctggtaactggaaaatgaataaaaatccagaagaagcaaaagcattcatcgaagcagtagcttctaaattaccatcatcagaacttgttgaagcagggattgctgctccagcgcttactttatcaacagttcttgaagcagctaaaggttcagaattgaaaatcgctgctcaaaatagctattttgagaattcaggtgcattcactggtgaaaacagccctaaagtattggctgaaatgggtacagactacgttgttatcggtcactcagaacgtcgtgattatttccatgaaactgaccaagatatcaacaaaaaagcaaaagctatctttgctaatggtttgactccaatcatttgttgcggtgagtctcttgaaacttacgaagctggtaaagcggttgaattcgtaggtgctcaagtttcagcagctcttgcaggtttgtcagaagagcaagtatcatcacttgttatcgcttacgaaccaatctgggctattggtactggtaaatcagcaactcaagacgacgcacaaaacatgtgtaaagcagttcgtgacgttgttgcagcagacttcggtcaagcagttgctgacaaagttcgcgttcaatacggtggttcagttaaacctgaaaacgttgcagaatatatggcttgcccagacgttgacggtgcccttgtaggtggagcttcacttgaagcagaaagcttccttgccttattagattttgttaaa

SEQ ID NO: 6836 - protein, 252 aa, Streptococcus agalactiae
MSRKPFIAGNWKMNKNPEEAKAFIEAVASKLPSSELVEAGIAAPALTLSTVLEAAKGSELKIAAQNSYFENSGAFTGENSPKVLAEMGTDYVVIGHSERRDYFHETDQDINKKAKAIFANGLTPIICCGESLETYEAGKAVEFVGAQVSAALAGLSEEQVSSLVIAYEPIWAIGTGKSATQDDAQNMCKAVRDVVAADFGQAVADKVRVQYGGSVKPENVAEYMACPDVDGALVGGASLEAESFLALLDFVK

SEQ ID NO: 6837 - DNA, 756 bp, Streptococcus pyogenes
atgtcacgtaaaccaattattgctggtaactggaaaatgaacaaaaaccctcaagaagcaaaagcattcgttgaggctgtagcaagcaaattaccttcaactgaccttgttgatgttgccgtagcagccccagctgttgatttggtaaccactattgaagctgctaaagattcagttcttaaagttgctgcacaaaactgctactttgaaaacacaggggcattcactggtgaaacatcaccaaaagtgcttgctgaaatgggagctgactatgttgtgattggtcactcagaacgccgtgattacttccatgaaacagatgaagacattaataaaaaagccaaagcaatctttgctaacggtttaactccaattgtttgttgtggtgagtctcttgaaacttatgaagctggtaaagccgttgagtttgtaggtgcgcaagtttcagcagcacttgcaggtctttcagcagagcaagtagcttcacttgttttagcttatgagccaatctgggctatcggtactggtaaatcagctactcaagatgatgctcaaaacatgtgtaaagctgttcgtgatgtggtagcagcagactttgggcaagaagttgctgataaagttcgcgttcaatacggtggttctgtaaaacctgaaaacgttaaagattacatggcttgtccagatgttgacggtgcccttgtaggtggtgcatcacttgaagctgatagcttccttgctttgcttgatttccttaac

SEQ ID NO: 6838 - protein, 252 aa, Streptococcus pyogenes
MSRKPIIAGNWKMNKNPQEAKAFVEAVASKLPSTDLVDVAVAAPAVDLVTTIEAAKDSVLKVAAQNCYFENTGAFTGETSPKVLAEMGADYVVIGHSERRDYFHETDEDINKKAKAIFANGLTPIVCCGESLETYEAGKAVEFVGAQVSAALAGLSAEQVASLVLAYEPIWAIGTGKSATQDDAQNMCKAVRDVVAADFGQEVADKVRVQYGGSVKPENVKDYMACPDVDGALVGGASLEADSFLALLDFLN

SEQ ID NO: 6839 - DNA, 135 bp, Streptococcus agalactiae
atggttatgcctggtgataacgttactatcgaagttgaattgattcacccaatcgccgtagaacaaggtactactttctcaatccgtgaaggtggacgtactgttggttcaggtatcgtttcagaaatcgaagct

SEQ ID NO: 6840 - protein, 45 aa, Streptococcus agalactiae
MVMPGDNVTIEVELIHPIAVEQGTTFSIREGGRTVGSGIVSEIEA

SEQ ID NO: 6841 - DNA, 291 bp, Streptococcus agalactiae
ttgacatgggaagtttattttctaagaaaagagagcatgttgaaaaaatatgtaaaatggttaattcccatatctattattgggatgttactagcaggctgtcaaatgaatagtgaatctaaaagtcagtcaaacgaagtaaaaaatagcaaacagtcagcagtaaagaaaggtaaaaaagtaataaaaaaagaacaagtagcttatctcaaaaagcatgaaaaagaattaactgaatatgtcaaaatccagatattagtgaaattaagtatgattggaatagtgtgcgca

SEQ ID NO: 6842 - protein, 97 aa, Streptococcus agalactiae
MTWEVYFLRKESMLKKYVKWLIPISIIGMLLAGCQMNSESKSQSNEVKNSKQSAVKKGKKVIKKEQVAYLKKHEKELTEYVKIQILVKLSMIGIVCA

SEQ ID NO: 6843 - DNA, 177 bp, Streptococcus agalactiae
gtgcgcatagtggaagctagtagtggaacccctcaaggcggagagcaactattattaattttgggttatgcaaatggcagtgaattaaccaattttactctaaatttcacattgggtgataatcaaatgcctaatattgactcagttggctcagataatttatcaactattgaagat

SEQ ID NO: 6844 - protein, 59 aa, Streptococcus agalactiae
MRIVEASSGTPQGGEQLLLILGYANGSELTNFTLNFTLGDNQMPNIDSVGSDNLSTIED

SEQ ID NO: 6845 - DNA, 168 bp, Streptococcus agalactiae
atggcagaaagtgctaatacaggtcgatcgaattcttttgttttagaagaattaactgaatttcaaagagaaaagttaaaaaatggggagtcagttaagtttaatttttctaaagatgttaagaaagaaaataaggttatcgaaggagggcacccccaagtcataggg

SEQ ID NO: 6846 - protein, 56 aa, Streptococcus agalactiae
MAESANTGRSNSFVLEELTEFQREKLKNGESVKFNFSKDVKKENKVIEGGHPQVIG

SEQ ID NO: 6847 - DNA, 549 bp, Streptococcus agalactiae
atgactaaaatttatcatatgattttatgtaattctgatataatgaagattttagctataataaaatctcttccactgaatgattgttggctgtgtgctggcacattgagaaactttgtatggaataaactttctggaataaatgagacattgacatcagatattgatgttgtattttttgataaaaatatttcttatgaagaaacggtggtattagaacaacaattaaaggataactatccacagtacgattgggaacttaaaaatgaattttacatgaacactcattctcctaataccccaaagtatactagctctaaagatgctatttcaaaatttcctgaaaagtgtactgcagtgggagcaaggttagatgatagaaatcaactcgaactttacctcccttatggtgaagaggaaatattaaatttcattgttagtcctacgccatattttgaagaggatctattacgttataatgtttatttgaagcgagtggataagaagaaatggaataatatttggcctcgtttaacaatcataaaaaaa

SEQ ID NO: 6848 - protein, 183 aa, Streptococcus agalactiae
MTKIYHMILCNSDIMKILAIIKSLPLNDCWLCAGTLRNFVWNKLSGINETLTSDIDVVFFDKNISYEETVVLEQQLKDNYPQYDWELKNEFYMNTHSPNTPKYTSSKDAISKFPEKCTAVGARLDDRNQLELYLPYGEEEILNFIVSPTPYFEEDLLRYNVYLKRVDKKKWNNIWPRLTIIKK

SEQ ID NO: 6849 - DNA, 417 bp, Streptococcus agalactiae
atgaaaatgacagtctattttgatggtaatttttggttgggtttgattgagtacgatgatgatggtgattacaaagtttttcggtatttttttggaaaagaacctaaagatgatgatgtttttaattttataaatcataaacttaatgatttgataaaaaaatatgagtttgttaaaacggatatttctctaaagcgtacgaatgaacacaaaaaaagtcctaaaagaatgcaaagagaaattaatagagaaaaacgtaagccagtagtatctacaaaagcgcaattggcgatgaaaactattcatatgagtataaaaaacgaacgtcaattaagtcagaaatgtaagaaaaatgagttaagaaaacatcggtaccaattaaaacaagaaaaacgttaccaaaagaaaaaaggacat

SEQ ID NO: 6850 - protein, 139 aa, Streptococcus agalactiae
MKMTVYFDGNFWLGLIEYDDDGDYKVFRYFFGKEPKDDDVFNFINHKLNDLIKKYEFVKTDISLKRTNEHKKSPKRMQREINREKRKPVVSTKAQLAMKTIHMSIKNERQLSQKCKKNELRKHRYQLKQEKRYQKKKGH

SEQ ID NO: 6851 - DNA, 477 bp, Streptococcus agalactiae
ttgagagattttgaggagttgtttgataaagtaaagccaatcgtaatgaagctgagaagaaattattttgttcaactttgggaatatgatgattggattcaagaaggacgtattgtactttttaggttgcttgaagagcatccgtatttattggataatgaaagcaaactattcatttactttaaaacaaaattttcaaattatttaaacgatgtattaagacaccaagattgtcaaaagcgacaatttaataaaatgccttatgaagaaataagtgaagttagtcactatgttaagagtaaaggactagttttagatgactatattgcttatcgtgatactttaacaaaagtggaagaaactttgtcagatattgataaagaaaaatttgaaaaactgattagtggtgaacgttttgcggggaagaaacaattcatacgagatattcaaccctttttcaatgcttttaaagcggat

SEQ ID NO: 6852 - protein, 159 aa, Streptococcus agalactiae
MRDFEELFDKVKPIVMKLRRNYFVQLWEYDDWIQEGRIVLFRLLEEHPYLLDNESKLFIYFKTKFSNYLNDVLRHQDCQKRQFNKMPYEEISEVSHYVKSKGLVLDDYIAYRDTLTKVEETLSDIDKEKFEKLISGERFAGKKQFIRDIQPFFNAFKAD

SEQ ID NO: 6853 - DNA, 579 bp, Streptococcus pyogenes
gtgcataatgaaaaaaacaacaggacattaatgtcctgttgtttttttgtggttctctttatactagggatagttaaaaagaaaaggagactcaaaatgtcgatagagacaagagcagcgtttgaaaaagttaagcccattattttgaaattaaagcgacactattatattcaattgtgggatagagatgactggttacaagaaggacatattatcttattacagttactagaaaggtacccagagttaattgaggaagaagagcgtttatatcgctattttaaaacaaaattttcatcttatttgaaagatttattacgccgtcaagaaagtcaaaagcgtcagttccataagttagcatatgaagagataggggaggttgcacatgccattccatcgagagggttatggctagacgactatgtggcttatcaagaggtaatagctagcttagagaaccaattaaattcgcaagagcgtatgcagtttcaagcacttatcaggggcgaacgtttcaagggaagacgtgctctacttaggaagatcagtccctattttaaggaatttgcacagcagttg

SEQ ID NO: 6854 - protein, 193 aa, Streptococcus pyogenes
VHNEKNNRTLMSCCFFVVLFILGIVKKKRRLKMSIETRAAFEKVKPIILKLKRHYYIQLWDRDDWLQEGHIILLQLLERYPELIEEEERLYRYFKTKFSSYLKDLLRRQESQKRQFHKLAYEEIGEVAHAIPSRGLWLDDYVAYQEVIASLENQLNSQERMQFQALIRGERFKGRRALLRKISPYFKEFAQQL

SEQ ID NO: 6855 - DNA, 690 bp, Streptococcus agalactiae
atgagtaaagttcgtttatatatcgctcgtcatggtaaaacaatgtttaatacaattggtcgcgctcaggggtggagtgatactcctttaactacttttggagaactcgggattaaagagcttggtttgggactaaaggcttcaaatattagttttaaagaggctttttctagtgatagtggacgtactttacaaactatggaaattattctcagggaagtgcaacaagaaaatattccctatacgagagataaacgaatccgcgagtggtgctttggtagtttggatggaggatatgatggcgacctttttaatggcgttctgcctcgagtttcaaacggagatatgagccatttgacacacgaagaaattgctaatttgatttgtcaagttgatacggctggctgggcagaaccgtgggcaatattgagtaaccgtattctgtcaggcttcactgctatagctaaaaaaatagaggatattgggggaggtaatgcgattgttgtcagtcatgggatgactattgcgacttttttatggttaatcgaccatagtacccctcgtagtttaggcttagataatggtagtgtctcagtcgttgattttgaagatggaacattttctattcaatctattggggatatgtcctatcgagaaaaaggaagagaaattttagaaaaaacattgcaa

SEQ ID NO: 6856 - protein, 230 aa, Streptococcus agalactiae
MSKVRLYIARHGKTMFNTIGRAQGWSDTPLTTFGELGIKELGLGLKASNISFKEAFSSDSGRTLQTMEIILREVQQENIPYTRDKRIREWCFGSLDGGYDGDLFNGVLPRVSNGDMSHLTHEEIANLICQVDTAGWAEPWAILSNRILSGFTAIAKKIEDIGGGNAIVVSHGMTIATFLWLIDHSTPRSLGLDNGSVSVVDFEDGTFSIQSIGDMSYREKGREILEKTLQ

SEQ ID NO: 6857 - DNA, 705 bp, Streptococcus pyogenes
atgacaaaaacaaggttgtatattgccagacatggaaaaacgatgtttaataccattggtcgcgctcagggttggagtgacacacctcttacaaaaaaaggagaagaaggtattcgagaacttggcctaggtttaaaagatgcaactataccatttaaggctgcgttttcaagtgattcaggtcgaaccatgcagacaatagaaattattttaagagaatcagaaaacgaatttttgccttatactaaagataatcgtattcgtgagtggtgttttgggagtctagaagggacttatgattcagaattatttctaggtgtccttccaagaacaaaagcctttgaaaatcgtgataacctacgtgatgttccctattctgaactggcagaaagcatcgtggaagtagataccgctaattgggcagaaccatgggaagttcttcgtaagcgcatttgggaggggtttgaagctattgccttgtctattcaaaatgctggcggcggaaatgctcttgtggttagccatggtatgacaattggaacgtttctgtggttgattgatccagatcgagacaaacagtatattgataatgggagcgttacagttgttgaatttgatgatggccaatttacgataaagactattggagatatgagttaccgctaccgcggtcgtgaaataatagaagaacggtcagatgaaata

SEQ ID NO: 6858 - protein, 235 aa, Streptococcus pyogenes
MTKTRLYIARHGKTMFNTIGRAQGWSDTPLTKKGEEGIRELGLGLKDATIPFKAAFSSDSGRTMQTIEIILRESENEFLPYTKDNRIREWCFGSLEGTYDSELFLGVLPRTKAFENRDNLRDVPYSELAESIVEVDTANWAEPWEVLRKRIWEGFEAIALSIQNAGGGNALVVSHGMTIGTFLWLIDPDRDKQYIDNGSVTVVEFDDGQFTIKTIGDMSYRYRGREIIEERSDEI

SEQ ID NO: 6859 - DNA, 750 bp, Streptococcus agalactiae
atgaaaaaaaataaaattatccgattcagtttagttggtgttctacttgcgatactatgctttagtctttttgctttattgaagcctaacagtcaacaatcatcatctcaaaagttgaggaatgaggatataaaaaagatatcctctcaaaaaagaaataagaaattacaattaccagctgtatcatcaaaagattggaacttgattttggtcaatcgtgaccataaacatgaagaattaagtccagatgtggttcctgttgaaaatatttatttggataaacgtattacgaagcaagctactcagtttttagaggctgctagagcaattgattcacgagaacatttaatttcgggttatcgtagtgttgcctatcaggagaagttgttcaattcttatgttactcaagagatgactagtaaccctaatttgacgaggggacaagcagaaaagttggtaaaaacttactctcagcctgcaggtgctagtgaacaccagactggattagcgatggatatgagtactgtagattctttgaatgagagcgatcctagagtagtcagtcagttgaaaaagatagctccacaatatggttttgtcttacggtttccggatggtaaaacagcagaaacaggggtaggttatgaagattggcattaccgctatgttggggtagagtctgcaaaatatatggccaaacatcatttaacattagaagaatacataactttattaaaggagaataaccaa

SEQ ID NO: 6860 - protein, 250 aa, Streptococcus agalactiae
MKKNKIIRFSLVGVLLAILCFSLFALLKPNSQQSSSQKLRNEDIKKISSQKRNKKLQLPAVSSKDWNLILVNRDHKHEELSPDVVPVENIYLDKRITKQATQFLEAARAIDSREHLISGYRSVAYQEKLFNSYVTQEMTSNPNLTRGQAEKLVKTYSQPAGASEHQTGLAMDMSTVDSLNESDPRVVSQLKKIAPQYGFVLRFPDGKTAETGVGYEDWHYRYVGVESAKYMAKHHLTLEEYITLLKENNQ

SEQ ID NO: 6861 - DNA, 741 bp, Streptococcus pyogenes
atgaaatataattcgttaaactatttagtgcaattgctaattgttattgtttttttaggagggctttacctctttataaaaccagaagagtcagtaacaccaactcagttgaataaaaaagaaatccaacaaaaagatatcaaaaaaacggaccgtttacgagctttacctaaggtatctgttgaagattgggagttggttttagtaaaccgcgatcacattacaaaagaaatgagtcctgaattagctgacattaatggtatttctgtggataaacgcattgagcaagccactagtgactttttagcagcagcacaagctatcgacttgcaagaacatcttatctctgggtaccgttccgtagactaccaaacagagctttaccaatcttatattaaaaaagagatggctaacgatccaacattgacacaagaagctgcggaggctttggtgcaaacctattcacagccgccaggggctagtgaacatcacactggtcttgctattgacatgagcactgtagatactttaaatgccagtgatccatcagtagctaaagcagttcaaaaaattgcacctgattatgggtttgtcttgcgctttccagaaggaaaaaagactagtacaggggttgattatgaggattggcattaccgctatgtaggcaaggcgtctgctcgttatatggctcagcacaacctaacgttggaagagtacattgctgctttaaaggagaaacga

SEQ ID NO: 6862 - protein, 247 aa, Streptococcus pyogenes
MKYNSLNYLVQLLIVIVFLGGLYLFIKPEESVTPTQLNKKEIQQKDIKKTDRLRALPKVSVEDWELVLVNRDHITKEMSPELADINGISVDKRIEQATSDFLAAAQAIDLQEHLISGYRSVDYQTELYQSYIKKEMANDPTLTQEAAEALVQTYSQPPGASEHHTGLAIDMSTVDTLNASDPSVAKAVQKIAPDYGFVLRFPEGKKTSTGVDYEDWHYRYVGKASARYMAQHNLTLEEYIAALKEKR

SEQ ID NO: 6863 - DNA, 573 bp, Streptococcus agalactiae
atgaggaaacgtttttccttgctaaattttattgttgttacttttattttctttttctttattctttttccgcttttaaaccataagggaaaagtagatgctaattctaggcagagtgttacctacaccaaagaagaatttatacaaaaaattgtgccagatgcgcaagatctaggaaagtcgtacggtattcgtccttcatttattattgcacaggcggctttggattctgatttcggagagaaaatattagctaataagtatcataatctgtttggtttgcttgcagaaccaggaacgccctcaattaccttaaatgatagtagtacaggaaaaaaacaggaaaagcaatttactcattataaatcttggaagtattcaatgtatgattaccttgctcatataaaatctggagcgacaggcaaaaaagattcatatactataatggtgtctgttaaaaatccaaaaactttagtgcaaaaattacaagatagtggttttgataatgacaaaaagtacgctaaaaaaatgacggaaatcattgatttgtatgatttaacaagatatgataag

SEQ ID NO: 6864 - protein, 191 aa, Streptococcus agalactiae
MRKRFSLLNFIVVTFIFFFFILFPLLNHKGKVDANSRQSVTYTKEEFIQKIVPDAQDLGKSYGIRPSFIIAQAALDSDFGEKILANKYHNLFGLLAEPGTPSITLNDSSTGKKQEKQFTHYKSWKYSMYDYLAHIKSGATGKKDSYTIMVSVKNPKTLVQKLQDSGFDNDKKYAKKMTEIIDLYDLTRYDK

SEQ ID NO: 6865 - DNA, 567 bp, Streptococcus pyogenes
atgagaaaacgactaaagtttccgtattttttaacgcttctagcttgctttttattgctgattgtttgtcccttactgagtagccaaaggatagctagtgcagataaagaagtaagggtgaactacagccaaaaacaatttattacaaaaatgggtaaagaagttaaaccattggcaaaatattatggcattagaccatctattttgattgctcaaattcttttggaaacccatgatggaaaaacattactagcgtctaagtatcataatctttttagcaagaaagcaactccaggacaagtggccattaccctaaagtcccctaaacaaaccaaccaaaacgtgagatatgctatttataaagatgacgctagtgcaattagagattatttacgaatgcttcggcagggaaaagaagtcgataagcgtttgtatcgtaatcttgctacagaaaaagggtataaagcaccagctaaaagtttacaaaagtatttgcattatactgataaaacctatgctaggcgactaattcaggtcattgaaagtaacgatttaacaaactatgac

SEQ ID NO: 6866 - protein, 189 aa, Streptococcus pyogenes
MRKRLKFPYFLTLLACFLLLIVCPLLSSQRIASADKEVRVNYSQKQFITKMGKEVKPLAKYYGIRPSILIAQILLETHDGKTLLASKYHNLFSKKATPGQVAITLKSPKQTNQNVRYAIYKDDASAIRDYLRMLRQGKEVDKRLYRNLATEKGYKAPAKSLQKYLHYTDKTYARRLIQVIESNDLTNYD

SEQ ID NO: 6867 - DNA, 1080 bp, Streptococcus agalactiae
atgtgtaagagtgctaatttcagaaagaccgagaggggtgatgtttttgtgattacacaacgtcaaaatgatattttgaatttaatcgttgagttatttacacaaactcatgaaccagtagggtctaaagctttacagagaacgattgattctagtagcgccactattcgtaatgatatggcaaaactagagaagttggggttattggaaaaagcacacacttctagtggacggatgccgagtccagctggttttaagtattttgtagagcactcccttagactagatagtattgatgagcaagatatttatcatgttataaaagcttttgactttgaagcattcaaattagaagacatgcttcaaaaagctagtcatattttatcggagatgacgggctatacatccgttattttagatgtggagccagctcgtcaacgtttgacagggtttgatgttgttcagcttagcaaccatgatgctctagcagtcatgactttagatgaatctaagccagtgacagtgcagtttgctattccaagaaactttttgacacgtgacttgatagcatttaaagctatcgtagaggagcgcttgctggatggtagtgtcatggatattcattataagttgaggacagaaattcctcagatcgttcagaagtattttgtaactacggataatgttttacaactatttgattatgttttttcagagctgtttctggaaacggtatttgtagctggcaaggtaaattctttaacgtattcagatctatcaacgtatcagtttttggataatgagcagcaagtagcgatttctttgaggcaaagtctgaaagagggtgagatggcttctgtccaagtggcagatagtcaagaagccgcacttgcagatgtgtcagttttaactcacaaatttttgattccttaccgtggatttggactcctgagtttgattggtcctattgatatggattatcgtaggtctgttagtttggtaaacattatcggaaaggtattggctgctaaattaggtgattattatcgatacctaaattctaaccattatgaagttcac

SEQ ID NO: 6868 - protein, 360 aa, Streptococcus agalactiae
MCKSANFRKTERGDVFVITQRQNDILNLIVELFTQTHEPVGSKALQRTIDSSSATIRNDMAKLEKLGLLEKAHTSSGRMPSPAGFKYFVEHSLRLDSIDEQDIYHVIKAFDFEAFKLEDMLQKASHILSEMTGYTSVILDVEPARQRLTGFDVVQLSNHDALAVMTLDESKPVTVQFAIPRNFLTRDLIAFKAIVEERLLDGSVMDIHYKLRTEIPQIVQKYFVTTDNVLQLFDYVFSELFLETVFVAGKVNSLTYSDLSTYQFLDNEQQVAISLRQSLKEGEMASVQVADSQEAALADVSVLTHKFLIPYRGFGLLSLIGPIDMDYRRSVSLVNIIGKVLAAKLGDYYRYLNSNHYEVH

SEQ ID NO: 6869 - DNA, 1032 bp, Streptococcus pyogenes
gtgattacacaacgtcaaaatgatattttgaatttaatcgttgagctatttacacaaactcatgaaccagtagggtctaaagctttacagagaacgattgattctagtagcgccactattcgtaatgatatggcaaaactagagaagttgggattgttggaaaaagcgcacacttctagtggacggatgccaagtccagctggttttaagtattttgtagagcactccctcaggctagatagtattgatgagcaagatatttatcatgtcataaaagcttttgattttgaagcattcaaattagaagacatgcttcaaaaagctagtcacattttagcggagatgacgggctatacatccgttattttagatgtggagccagctcgtcaacgtttaacagggtttgatgttgttcagcttagcaaccatgatgctctagcagtcatgactttagatgaatctaagccagtgacagtgcagtttgctattccaagaaactttttgacacgtgacttgatagcatttaaagctatcgtagaggagcgcttgctggataatagtgtcatagatattcattataagttgaggacagaaattcctcagatcgttcaaaagtattttgtgactacggataatgttttacaactatttgattatgttttttcagagctgtttttggaaacggtatttgttgctggcaaggtaaattctttaacgtattcagatctatcaacgtatcagtttttggataatgaacagcaagtagcaatttctttgaggcaaagtctgaaagaaggtgagatggcttctgtccaagtggcagatagtcaagaagccgcacttgcagatgtgtcagttttaactcacaaatttttgattccttaccgtgggtttggactcctgagtttgattggtcctattgatatggattatcgtaggtctgttagtttggtaaacattattggaaaggtattggctgctaaattaggtgattattatcgatacctaaattctaaccattatgaagttcac

SEQ ID NO: 6870 - protein, 344 aa, Streptococcus pyogenes
VITQRQNDILNLIVELFTQTHEPVGSKALQRTIDSSSATIRNDMAKLEKLGLLEKAHTSSGRMPSPAGFKYFVEHSLRLDSIDEQDIYHVIKAFDFEAFKLEDMLQKASHILAEMTGYTSVILDVEPARQRLTGFDVVQLSNHDALAVMTLDESKPVTVQFAIPRNFLTRDLIAFKAIVEERLLDNSVIDIHYKLRTEIPQIVQKYFVTTDNVLQLFDYVFSELFLETVFVAGKVNSLTYSDLSTYQFLDNEQQVAISLRQSLKEGEMASVQVADSQEAALADVSVLTHKFLIPYRGFGLLSLIGPIDMDYRRSVSLVNIIGKVLAAKLGDYYRYLNSNHYEVH

SEQ ID NO: 6871 - DNA, 570 bp, Streptococcus agalactiae
atggcagtattcaataagttatttaaaaggaggcactcagtgtcagaagaaattaaaaaagacgatttacaggaagaagtggaagccactgaaactgaagagacagttgaggaagttattgaagaaattcctgaaaaatcagagttagaactcgcaaacgagcgtgctgatgagtttgaaaataaatacttgcgagctcatgcagaaatgcagaatatacaacgtcgctctagtgaagaacgtcaacaacttcaacgctatcgttctcaggatctggcaaaagcaatcttaccatcgcttgacaatctagaacgtgccttggctgttgaagggttgacagatgatgttaaaaaaggtttagaaatgactcgtgatagccttattcaagcactaaaggaagaaggcgtagaagaagtagaagtcgactcatttgaccacaactttcatatggcagttcagactctcccagccgatgatgaacatccagccgatagcattgcagaagtctttcaaaagggatataaattgcacgagcgtctgctaagaccagcgatggtagttgtctataac

SEQ ID NO: 6872 - protein, 190 aa, Streptococcus agalactiae
MAVFNKLFKRRHSVSEEIKKDDLQEEVEATETEETVEEVIEEIPEKSELELANERADEFENKYLRAHAEMQNIQRRSSEERQQLQRYRSQDLAKAILPSLDNLERALAVEGLTDDVKKGLEMTRDSLIQALKEEGVEEVEVDSFDHNFHMAVQTLPADDEHPADSIAEVFQKGYKLHERLLRPAMVVVYN

SEQ ID NO: 6873 - DNA, 570 bp, Streptococcus pyogenes
atggcagtattcaataagttatttaaaaggaggcactcagtgtcagaagaaattaaaaaagacgatttacaagaagaagtggaagccactgaaactgaagagacagttgaggaagttattgaagaaactcctgaaaaatcagagttagaacttgcaaacgaacgtgctgatgagtttgaaaataaatacttgcgagctcatgcagaaatgcagaatatacagcgtcgctctagtgaagaacgtcaacaacttcaacgctatcgttctcaggatctggcaaaagcaatcttaccatcgcttgacaatctagaacgtgccttggctgttgaagggttgacagatgatgttaaaaaaggtttagaaatgactcgtgatagccttattcaagcactaaaggaagaaggcgtagaagaagtagaagtcgactcgtttgaccacaactttcatatggcagttcagaccctcccagccgatgatgaacatccagccgatagcattgcagaagtctttcaaaagggatataaattgcacgagcgtctgctaagaccagcgatggtagttgtttataac

SEQ ID NO: 6874 - protein, 190 aa, Streptococcus pyogenes
MAVFNKLFKRRHSVSEEIKKDDLQEEVEATETEETVEEVIEETPEKSELELANERADEFENKYLRAHAEMQNIQRRSSEERQQLQRYRSQDLAKAILPSLDNLERALAVEGLTDDVKKGLEMTRDSLIQALKEEGVEEVEVDSFDHNFHMAVQTLPADDEHPADSIAEVFQKGYKLHERLLRPAMVVVYN

SEQ ID NO: 6875 - DNA, 1827 bp, Streptococcus agalactiae
atgtctaaaattattggtattgacttaggtacaacaaactcagcagtagcagttcttgaagggactgaatcaaaaatcattgctaacccagaaggcaatcgtacaactccttcagtagtatcattcaaaaatggtgaaattatcgtgggtgatgctgcaaaacgtcaagcggtaacaaatccagatactgttatctctatcaaatcaaagatgggaacttctgaaaaagtttctgcaaatggtaaagaatatactcctcaagaaatttcagcaatgattcttcaataccttaaaggttatgctgaagactatcttggagaaaaagtagaaaaagcagttattactgttccagcttacttcaacgatgcacaacgtcaggcaactaaagacgctggtaaaattgcaggtcttgaagtagaacgtatcgttaacgaaccaacagcagccgcacttgcttatggtatggacaagactgacaaggatgaaaaaatcttagtttttgaccttggtggtggtacatttgacgtatcaatccttgaattaggtgatggtgtcttcgacgttcttgcaacagcaggtgataacaaacttggtggtgacgactttgaccagaaaattattgatttcttggtagaagaattcaagaaagaaaatggtattgatctttctcaagacaaaatggctcttcaacgcttgaaagatgctgctgaaaaagctaaaaaagacctttcaggtgtaactcaaactcaaatttcattaccgttcatcactgctggttctgctggtcctcttcacttggagatgagcttatcacgtgctaaatttgacgatctcactcgtgaccttgttgaacgtacgaaaactccagttcgtcaagctctttcagatgcaggcttgtcattgtcagaaattgatgaagttatcctcgttggtggatcaacacgtatcccagcagttgttgaagctgtaaaagctgaaactggtaaagaaccaaataaatctgttaaccctgatgaagtggttgctatgggtgctgctatccaaggtggtgttatcactggggatgtgaaagacgttgtacttcttgacgtaacaccattgtcacttggtatcgaaacaatgggtggtgtcttcactaaattgatcgaccgcaacacaacaatcccaacatctaaatcacaagtcttctcaacagcagcagacaaccaaccagccgttgatatccatgttcttcaaggtgaacgcccaatggcagcagataacaaaacactcggtcgcttccaattgactgatatcccagctgcacctcgtggaatcccacaaattgaagtaacatttgatatcgataaaaatggtattgtatctgttaaagctaaagatctcggtactcaaaaagaacaacacattgttatccaatctaattcaggattaactgatgaagaaattgataaaatgatgaaagatgctgaagcaaatgctgaagcagatgcaaaacgtaaagaagaagttgatcttaaaaatgaagttgaccaagccatctttgcaacagaaaaaactattaaagaaactgaaggcaaaggctttgatacagaacgtgatgcagcgcaatcagcacttgatgagttgaaaaaagctcaagaatcaggtaaccttgacgacatgaaagctaaacttgaagctcttaacgaaaaagcacaagctcttgcagttaaactttacgaacaagcggctgcagcacaacaagcagctcaaggggctgaaggtgcacaatcagctgattcatcaagcaagggtgatgatgttgtagatggcgaattcactgagaaa

SEQ ID NO: 6876 - protein, 609 aa, Streptococcus agalactiae
MSKIIGIDLGTTNSAVAVLEGTESKIIANPEGNRTTPSVVSFKNGEIIVGDAAKRQAVTNPDTVISIKSKMGTSEKVSANGKEYTPQEISAMILQYLKGYAEDYLGEKVEKAVITVPAYFNDAQRQATKDAGKIAGLEVERIVNEPTAAALAYGMDKTDKDEKILVFDLGGGTFDVSILELGDGVFDVLATAGDNKLGGDDFDQKIIDFLVEEFKKENGIDLSQDKMALQRLKDAAEKAKKDLSGVTQTQISLPFITAGSAGPLHLEMSLSRAKFDDLTRDLVERTKTPVRQALSDAGLSLSEIDEVILVGGSTRIPAVVEAVKAETGKEPNKSVNPDEVVAMGAAIQGGVITGDVKDVVLLDVTPLSLGIETMGGVFTKLIDRNTTIPTSKSQVFSTAADNQPAVDIHVLQGERPMAADNKTLGRFQLTDIPAAPRGIPQIEVTFDIDKNGIVSVKAKDLGTQKEQHIVIQSNSGLTDEEIDKMMKDAEANAEADAKRKEEVDLKNEVDQAIFATEKTIKETEGKGFDTERDAAQSALDELKKAQESGNLDDMKAKLEALNEKAQALAVKLYEQAAAAQQAAQGAEGAQSADSSSKGDDVVDGEFTEK

SEQ ID NO: 6877 - DNA, 1824 bp, Streptococcus pyogenes
atgtctaaaattattggtattgacttaggtacaacaaactcagcagtagcagttcttgaagggactgaatcaaaaatcattgctaacccagaaggcaatcgtacaactccttcagtagtatcattcaaaaatggtgaaattatcgtgggtgatgctgcaaaacgtcaagcagtgacaaacccagaaacagtaatctctattaaatctaaaatgggaacttctgaaaaagtttctgcaaatggtaaagaatatactcctcaagaaatttcagcaatgattcttcaataccttaaaggttatgctgaagactatcttggagaaaaagtagaaaaagcagttattactgttccagcttacttcaacgatgcacaacgtcaggcaactaaagacgctggtaaaattgcaggtcttgaagtagaacgtatcgttaacgaaccaacagcagccgcacttgcttatggtatggataagactgacaaggatgaaaaaatcttagtttttgaccttggtggtggtacatttgacgtatcaatccttgaattaggtgatggtgtcttcgacgttcttgcaacagcaggtgataacaaacttggtggtgacgactttgaccaaaaaattattgatttcttagtggctgaatttaagaaagaaaatggcattgacttatcacaagataagatggcacttcaacgcttgaaagatgctgctgaaaaagctaaaaaagatctttcaggtgtgacacaaacacaaatttcattaccgttcatcactgctggttctgccggtcctcttcacttggagatgagcttatctcgtgctaaatttgacgatctcactcgcgaccttgtagaacgtacgaaaactccagttcgtcaagccctttcagatgcaggattgtcattgtcagaaattgatgaagttatccttgttggtggatcaactcgtatcccagcagttgtcgaagctgtaaaagctgaaactggtaaagaaccaaataaatctgtaaaccctgatgaagtggttgctatgggtgctgctatccaaggtggtgttatcactggggatgtgaaagacgttgtccttcttgacgtaacaccattgtcacttggtattgaaacaatgggtggtgtcttcactaaattgatcgaccgcaatacaactatcccaacatctaaatcacaagtcttctcaacagcagcagacaaccaaccagctgttgatatccatgttcttcaaggtgaacgcccaatggcagcagataacaagactcttggtcgcttccaattgactgatatcccagctgcacctcgtggaatcccacaaattgaagtaacatttgatatcgataaaaacggtattgtttctgtaaaagctaaagaccttggtacgcaaaaggaacaacacatcgttatcaaatcaaacgacggactttctgaagaagaaattgatcgcatgatgaaagacgctgaagctaatgccgaagccgatgcgaaacgtaaagaagaagttgaccttaaaaacgaagttgaccaagctatctttgctactgaaaaaacaatcaaagaaactgaaggtaaaggctttgatacagaacgcgatgcagcgcaatcagctcttgacgagttaaaagctgcgcaagaatctggcaaccttgacgacatgaaagctaaacttgaagcattaaatgaaaaagcgcaagctttggctgttaaaatgtacgagcaagctgcagcagctcaacaagcagcacaaggtgcagaaggtgcacaagctaatgattcagcaaataatgatgatgttgtagatggcgaatttacagaaaag

SEQ ID NO: 6878 - protein, 608 aa, Streptococcus pyogenes
MSKIIGIDLGTTNSAVAVLEGTESKIIANPEGNRTTPSVVSFKNGEIIVGDAAKRQAVTNPETVISIKSKMGTSEKVSANGKEYTPQEISAMILQYLKGYAEDYLGEKVEKAVITVPAYFNDAQRQATKDAGKIAGLEVERIVNEPTAAALAYGMDKTDKDEKILVFDLGGGTFDVSILELGDGVFDVLATAGDNKLGGDDFDQKIIDFLVAEFKKENGIDLSQDKMALQRLKDAAEKAKKDLSGVTQTQISLPFITAGSAGPLHLEMSLSRAKFDDLTRDLVERTKTPVRQALSDAGLSLSEIDEVILVGGSTRIPAVVEAVKAETGKEPNKSVNPDEVVAMGAAIQGGVITGDVKDVVLLDVTPLSLGIETMGGVFTKLIDRNTTIPTSKSQVFSTAADNQPAVDIHVLQGERPMAADNKTLGRFQLTDIPAAPRGIPQIEVTFDIDKNGIVSVKAKDLGTQKEQHIVIKSNDGLSEEEIDRMMKDAEANAEADAKRKEEVDLKNEVDQAIFATEKTIKETEGKGFDTERDAAQSALDELKAAQESGNLDDMKAKLEALNEKAQALAVKMYEQAAAAQQAAQGAEGAQANDSANNDDVVDGEFTEK

SEQ ID NO: 6879 - DNA, 1137 bp, Streptococcus agalactiae
atgaacaatacagaattttatgatcgtcttggcgtttcaaaagatgcttctcaggacgaaataaaaaaagcttaccgtaggatgtctaagaaataccatccagatattaataaggagacgggagcagaggaaaaatataaagaggttcaagaagcttatgaaaccttgagtgatacacaaaaacgtgctgcctatgatcaatatggcgctgctggggcaaatggcggttttggtggcttcgatggtggcggttttggtggcttcgatggtggtggctttggtggttttgaagacatcttctcaagcttttttggtggaggagggatgcgcaatcctaatgcaccacgtcaaggagatgacctacaatatcgtgttaatttaagttttgaagaagctatctttggagctgaaaaagaagtatcttataatcgggagtcatcatgtcatacttgttcaggaagtggagctaagccaggtactagccctgtgacttgtcaaaagtgtcatggttcgggtgtgattaatgttgatacacaaacacctctaggaacaatgcgtcgccaagtgacttgtgatgtttgtcagggtagtggtcaagaaatcaaagagaaatgtccaacatgtcatggaactggtcatgagaagaagacgcataaagtatcagttaaaatacctgcaggagttgaaactgggcaacaaattcgtttaacaggacaaggtgaagctggcttcaatggtggtccttatggtgatctctttgttattattaacgttctcccaagccaacagtttgagcgtaatggatcaacaatttattatactttgaatattagctttgtccaagctgctttgggtgatacaattgatatacctactgtccatggagcggtagaaatgtcaattcctgctggtactcagacaggaaaaacgtttcgtcttcgcggaaaaggtgcccctaaacttcgagggggtggacaaggtgatcagcatgttactgttaacatcgtaactcctactaaattgaatgatgctcaaaaagaggcattgcacgcttttgcagaggcaagtggagataagatggtacatccgaagaagaaaggtttctttgataaagtcaaagatgctttagatgttgat

SEQ ID NO: 6880 - protein, 379 aa, Streptococcus agalactiae
MNNTEFYDRLGVSKDASQDEIKKAYRRMSKKYHPDINKETGAEEKYKEVQEAYETLSDTQKRAAYDQYGAAGANGGFGGFDGGGFGGFDGGGFGGFEDIFSSFFGGGGMRNPNAPRQGDDLQYRVNLSFEEAIFGAEKEVSYNRESSCHTCSGSGAKPGTSPVTCQKCHGSGVINVDTQTPLGTMRRQVTCDVCQGSGQEIKEKCPTCHGTGHEKKTHKVSVKIPAGVETGQQIRLTGQGEAGFNGGPYGDLFVIINVLPSQQFERNGSTIYYTLNISFVQAALGDTIDIPTVHGAVEMSIPAGTQTGKTFRLRGKGAPKLRGGGQGDQHVTVNIVTPTKLNDAQKEALHAFAEASGDKMVHPKKKGFFDKVKDALDVD

SEQ ID NO: 6881 - DNA, 1188 bp, Streptococcus pyogenes
ttgtcggatttcctatttttcattaagtcgttttacagcttggtatcttacattatgaacaatacagaatattacgatcgtctgggggtttctaaggacgcttctcaggacgatatcaaaaaagcttatcgaaaaatgtctaaaaaatatcatccagatatcaataaagaagctggagcggagcaaaagtataaggatgttcaagaagcttacgaaaccttaagtgattcacaaaagcgtgctgcttatgatcaatacggcgctgcaggtgctcaaggcggctttggtggcggagcaggcggctttggtggttttgacggaggtggctttggtggttttgaagatatcttctcaagcttctttggtggcggtggaagccgaaacccaaatgcccctcgtcaaggtgacgatttgcaatatcgtgttaatttatcttttgaagaggctgtatttggtgttgaaaaagaagttagctataatcgcgaagcaacctgcggcacttgtttaggctcaggtgcaaaacctggtaccgctccagtaacttgtcgtaagtgccatggttcaggtgtaatgacaattgacacccaaacaccacttggtatgatgcgtcgacaagtcacctgcgatatttgtcatggtagtggtaaggaaattaaagaaccctgtcaaacctgtcacggtactggtcatgaaaagcaagctcataaagtgtctgttaagattccagctggtgtagagactggtcagcaaatccgtttacaaggtcaaggagaagctggctttaatggcggaccttatggtgatttatttgttattttgaatgtcttaccaagtaagcaatttgaacgcaatggttccactatttactacaacttagatatttcttttactcaagcagccttaggagatactgttgaaattccaacggttcatggcgatgttgagatggctatccctgctgggacacaaacaggtaaaaccttccgcctcaaaggcaaaggagcaccaaaactccgtggtggaggtcaaggggatcaacatgttaccgttaatattgtgaccccaaccaaactcaatgacgctcaaagggaagccttgcaagcatttgcagaagcgagtggtgaaaaaatgttacatccaaagaaaaaaggtttttttgataaagtgaaagatgccttagaggatatt

SEQ ID NO: 6882 - protein, 396 aa, Streptococcus pyogenes
LSDFLFFIKSFYSLVSYIMNNTEYYDRLGVSKDASQDDIKKAYRKMSKKYHPDINKEAGAEQKYKDVQEAYETLSDSQKRAAYDQYGAAGAQGGFGGGAGGFGGFDGGGFGGFEDIFSSFFGGGGSRNPNAPRQGDDLQYRVNLSFEEAVFGVEKEVSYNREATCGTCLGSGAKPGTAPVTCRKCHGSGVMTIDTQTPLGMMRRQVTCDICHGSGKEIKEPCQTCHGTGHEKQAHKVSVKIPAGVETGQQIRLQGQGEAGFNGGPYGDLFVILNVLPSKQFERNGSTIYYNLDISFTQAALGDTVEIPTVHGDVEMAIPAGTQTGKTFRLKGKGAPKLRGGGQGDQHVTVNIVTPTKLNDAQREALQAFAEASGEKMLHPKKKGFFDKVKDALEDI

SEQ ID NO: 6883 - DNA, 1245 bp, Streptococcus agalactiae
atggtaaccaaagttgaagagattcgctcatatttgatagcttctatacaaaatggtaagttggctccaggagatcgcctaccatctataagacagttagctaatcaattttcctgtaacaaagatacagtccaacgagttttgatggaattgcgttttgataattatatctatgcaaagcctaggtcaggctattacgtctttgattctcatcaagaggaagttgaagaaggggttagtttaccaaactctgagattgcaaatatagcttatgatgattttagattgtgtttgaatgagacccttattggtagggaagattaccttttcaattattactatcgtcaagaaggtcttcttgatttaagtaaagcagtggctaaattaatggaagaaacaggggtctatgttccccttgatgatattgttattacggctggtactcaacaggcattatttattttgacacaggttacctttccaaatcgaaaatctcgagttttaatagaagaaccgacctatcctcgtatgattgaactaatcaaaacacaaaatttaccctatgaaactatttctcgaggtactcatggaattgattttcagcgtttagaggagattttccagacacaatcaattaagtttttttatgttatacctcgcatgcataatcctttgggaacatcctataatccggtagagatgaaaagattaatagagatggcagagaagtatgatgtttatattgtggaagatgactatatgtctgattttgcaagtcagtcaccattacattattatgatactcacgggcgtgttatttatctaaaatctttttcaaaggctattttccctgctttaagattagctgcgatttgtttaccacaagctttaaaatcaacatttatggcttacaagaagttgatggattatgatactaatctgattttacaaaaagcattagcgctttatattgaaaatggcctttatgctaagaatagtcaatatttgaaatatcgttatcagaaagaccttgcaaattcaaaatctattttagctgatcaccctaatctaccctcatatagtttacatcacgatagtgtattatttgattgttcgaaactcgataactttaaaatattacggcaatacggcgatactttggaaaattatttttgtcaaaaatcgcatcaatctctcttacaagtaaaaaatgattcctgcttaaagcagttcttgggatcgttg

SEQ ID NO: 6884 - protein, 415 aa, Streptococcus agalactiae
MVTKVEEIRSYLIASIQNGKLAPGDRLPSIRQLANQFSCNKDTVQRVLMELRFDNYIYAKPRSGYYVFDSHQEEVEEGVSLPNSEIANIAYDDFRLCLNETLIGREDYLFNYYYRQEGLLDLSKAVAKLMEETGVYVPLDDIVITAGTQQALFILTQVTFPNRKSRVLIEEPTYPRMIELIKTQNLPYETISRGTHGIDFQRLEEIFQTQSIKFFYVIPRMHNPLGTSYNPVEMKRLIEMAEKYDVYIVEDDYMSDFASQSPLHYYDTHGRVIYLKSFSKAIFPALRLAAICLPQALKSTFMAYKKLMDYDTNLILQKALALYIENGLYAKNSQYLKYRYQKDLANSKSILADHPNLPSYSLHHDSVLFDCSKLDNFKILRQYGDTLENYFCQKSHQSLLQVKNDSCLKQFLGSL

SEQ ID NO: 6885 - DNA, 1266 bp, Streptococcus pyogenes
atgacaacaaaatatcaaacaatcatttccaatatcgaacaagatatccagaaacagcgactaaaaaaaggggacaagctaccttcaattagggtactaagtaaggtttattattgtagcaaagatactgttcagcgggctcttttagaattaaaatatcgtcacttaatttatgctgttcctaaaagtggttattatgttttgggtaacgtaagcatgcccgataatgttcttaatctaagtcttgaagattataataatatggcttatgaagatttccgactctgcttaaatgaggccttaagtgctaaagacaaatacctctttcattattatcacaaaaccgaaggactagaagaactaagggaagctttgcttctttacttagctgaaaatagtgtttacagtaacaaagaccaactattaatcacctctgggacgcaacaagcgctttatattttatcacaaatgccttttcctaatacgggcaaaacaattctccttgaaaagcctacttatcatcggatggaagctattgttgctcagttaggattaccctatcaaactatctctagacactttaatggccttgatttagaactcttagaatctttatttcaaactggcgatattaaatttttttacacgatttcacgattttcacatcctctgggactttcttatagcactaaggaaaaggaagctattgttcgtctagcacaacgataccaggtttatattttagaagatgattatttaggagattttgtgaaacttaaagagccaccaattcattattatgacactcatcaccgaatcatctacctaaaatctttttcaatgagtgtttttcctgcactccgtatcggagctctagttttaccgtcaggtttaaaacctcattttttaacccaaaaatcattgattgatttagacacgaacttactaatgcaaaaagcattagctctttatttagaaaatgggatgtttcaaaaaaatcttcgctttattaagcgttatctaaaacagcgggaacgtcaattggctctctttttaaaacaaaattgccctgatattcactatcaactaacccctactcatttagtgattgattacacgacatcagactcttatagaaactttacattagataaatctgatagaataataataactggaaaaaaacgctatctctctattactatcaatcaacaaatacaaagcaaattaaactcactaatcaaaaatacttgtggaaagagcaac

SEQ ID NO: 6886 - protein, 422 aa, Streptococcus pyogenes
MTTKYQTIISNIEQDIQKQRLKKGDKLPSIRVLSKVYYCSKDTVQRALLELKYRHLIYAVPKSGYYVLGNVSMPDNVLNLSLEDYNNMAYEDFRLCLNEALSAKDKYLFHYYHKTEGLEELREALLLYLAENSVYSNKDQLLITSGTQQALYILSQMPFPNTGKTILLEKPTYHRMEAIVAQLGLPYQTISRHFNGLDLELLESLFQTGDIKFFYTISRFSHPLGLSYSTKEKEAIVRLAQRYQVYILEDDYLGDFVKLKEPPIHYYDTHHRIIYLKSFSMSVFPALRIGALVLPSGLKPHFLTQKSLIDLDTNLLMQKALALYLENGMFQKNLRFIKRYLKQRERQLALFLKQNCPDIHYQLTPTHLVIDYTTSDSYRNFTLDKSDRIIITGKKRYLSITINQQIQSKLNSLIKNTCGKSN

SEQ ID NO: 6887 - DNA, 774 bp, Streptococcus agalactiae
atgacaaggtataaggcacagatttcttatgatggttcagctttttcaggcttccaaagacaaccaaattgtaggacagttcaagaagaaattgagagaactcttaagcgcctaaatagcgggaacgatgtgataatccatggtgctggtcgcacagatgttggtgttcatgcttatggacaagttatccattttgatttaccacaggcgcgtgatgtagaaaaattacgctttggtttagatacacagtgtccagacgatattgatattgtcaaagtagagcaagtgtctgatgattttcattgtcgatatgataaacacattaaaacttatgagtttttagtggatatcggtaggccgaaaaatcctatgatgagaaactatgcaacacattacccttatcctgtcattattgagcttatgcaagaagctattaaagatttagtaggtacccatgactttacaggctttactgcttcaggtacgagtgtagaaaataaagtacgtactatttttgatgcgaaaattcagtttgaagcgtctaaaaatcttttaatttttacctttacaggaaatggttttttgtataaacaggtgcgtaatatggttggtaccctgctaaaaattggtaatggacgcatgcctattagccaaatcaaaacaattttacaggctaaaaatcgggatttagcaggtccaactgcggcaggaaatggtttatatttgaaggagattatttatgaagacgaggaatgttttagcaatttcaggaaa

SEQ ID NO: 6888 - protein, 258 aa, Streptococcus agalactiae
MTRYKAQISYDGSAFSGFQRQPNCRTVQEEIERTLKRLNSGNDVIIHGAGRTDVGVHAYGQVIHFDLPQARDVEKLRFGLDTQCPDDIDIVKVEQVSDDFHCRYDKHIKTYEFLVDIGRPKNPMMRNYATHYPYPVIIELMQEAIKDLVGTHDFTGFTASGTSVENKVRTIFDAKIQFEASKNLLIFTFTGNGFLYKQVRNMVGTLLKIGNGRMPISQIKTILQAKNRDLAGPTAAGNGLYLKEIIYEDEECFSNFRK

SEQ ID NO: 6889 - DNA, 747 bp, Streptococcus pyogenes
atggtaagatacaaagcaacgatttcctatgatgggactcttttttcgggttttcaaagacaaagacatttacgtacggttcaagaagagattgaaaaaacactctataaattaaataacggtacaaaaattataattcatggtgcaggacgtacggatgcaggagtacatgcttatggacaggtgatccattttgatttgcctcaagaacaagaagttgaaaaattgcgatttgctcttgatacacagactcctgaagatattgatgttgttaatatagaaaaagtggctgatgattttcattgtcgttatcagaagcatttaaaaacttatgaatttttagttgataatggtcgacctaaaaatccgatgatgcgacactataccactcattacccttatactcttaatattaaacttatgcaagaagctattaacggtctggtaggtacacacgattttactggttttacagcagcaggaacttcggtacaaaataaggtgcgaacgattaccaaagcaacggtatctcgggatgaaaaaactgattttttggtgtttactttttcaggaaatggttttctctataagcaggtgaggaatatggtgggaactttgctgaaaattggtaatggtcaaatgccagttgaacaagttaaagtgattttgagctccaaaaatcgtcagctagctggaccaacgatatctggaaatgggctttacttgaaggagatttgttatgaaaac

SEQ ID NO: 6890 - protein, 249 aa, Streptococcus pyogenes
MVRYKATISYDGTLFSGFQRQRHLRTVQEEIEKTLYKLNNGTKIIIHGAGRTDAGVHAYGQVIHFDLPQEQEVEKLRFALDTQTPEDIDVVNIEKVADDFHCRYQKHLKTYEFLVDNGRPKNPMMRHYTTHYPYTLNIKLMQEAINGLVGTHDFTGFTAAGTSVQNKVRTITKATVSRDEKTDFLVFTFSGNGFLYKQVRNMVGTLLKIGNGQMPVEQVKVILSSKNRQLAGPTISGNGLYLKEICYEN

SEQ ID NO: 6891 - DNA, 756 bp, Streptococcus agalactiae
atgaagacgaggaatgttttagcaatttcaggaaatgatattttctctggcggcggcttgcatgcagatttagcaacttacgttgttaataaattacatggttttgtggcagtaacatgcttaacagcaatgtcagataaagggtttgaagtcattcctatagaggcatctatactaaagcagcaactagaaagtttaaaagatgtagagtttgggtctattaaactaggattgcttcccaatgtagaaacagcacaagttgttttggaatttgtaaaatcaaaacaagaatgtccagtagtcttagacccagtcttagtttgtaaagaaaatcatgatttagaagttagccaattacgtgagcagctaattgcgtttttcccatatgctgatgtgattactcctaatttagtagaggctcaattattgacgggtctttcgattgaaaacttagatcaaatgaaaattgctgctgagaaactttacgatatgggagctaaacatgttgttatcaaagggggcaaccgtttaaatgctgaagaggctacagacctttactatgatggtgaacgttttgaaacctatgtttttcctgtagtagatgccaataatacaggtgctggatgtacatttgcgtcaagtattgccagccaattagctatgggtaaaaatgtagaagatgcagtcaaaatgtctaaaggtttcgtctatcaagctattaaagcatcggataagtacggagttgtccaacatttt

SEQ ID NO: 6892 - protein, 252 aa, Streptococcus agalactiae
MKTRNVLAISGNDIFSGGGLHADLATYVVNKLHGFVAVTCLTAMSDKGFEVIPIEASILKQQLESLKDVEFGSIKLGLLPNVETAQVVLEFVKSKQECPVVLDPVLVCKENHDLEVSQLREQLIAFFPYADVITPNLVEAQLLTGLSIENLDQMKIAAEKLYDMGAKHVVIKGGNRLNAEEATDLYYDGERFETYVFPVVDANNTGAGCTFASSIASQLAMGKNVEDAVKMSKGFVYQAIKASDKYGVVQHF

SEQ ID NO: 6893 - DNA, 462 bp, Streptococcus agalactiae
atgaggaaagagaaaactagtcaattggttcaattggcaattgtaacagctatatctattgtattggggatgtttataagtattccgacaccaacaggttttttgacattactagatgctggaatattctttgctgccttttactttggcaaaaaagaaggggctgtggtaggtgccttagctggttttttaattgatttattgaaaggttatcccaattggatgttctttagtttattgattcatgggacgcaagggtatttagcgggtttaccaggtagaagacgtcttttaggtcttattagtgcaactcttgttatggtattaggttatgctatagctagtggattgatgtatggttggggagctgttctaccagatattcctggcaatattatgcaaaatatggttggtatggttgttggttttgctcttaataagtctctagaaagagtgaagaaa

SEQ ID NO: 6894 - protein, 154 aa, Streptococcus agalactiae
MRKEKTSQLVQLAIVTAISIVLGMFISIPTPTGFLTLLDAGIFFAAFYFGKKEGAVVGALAGFLIDLLKGYPNWMFFSLLIHGTQGYLAGLPGRRRLLGLISATLVMVLGYAIASGLMYGWGAVLPDIPGNIMQNMVGMVVGFALNKSLERVKK

SEQ ID NO: 6895 - DNA, 468 bp, Streptococcus pyogenes
atgcaaaatagtaagatacgacaaatgagtttaacagggatattgacagcattggttgttgttttaggaagatttgtcatgctacctactccaacaggttttttaacgctgttggatgcaggaatttatgctgtcagcttttcctttggatcagctcaaggagctattgtgggagggttatcaggttttttaatcgatttagtggcaggataccctcagtggatgtttcatagtttgattgctcacagtgtccaagggtattttgcgggatggagagggcgcaagcgttggcttggtgttgtgataggttcttttatcatgattttttggtactttttaggctctcttatgcttggttatggcctttcgggatctttagccggtatttggggaaacgtcatgcaaaatacattagggctttttgttggttttattatctttaaggccatattaaggcaaaaaaagaga

SEQ ID NO: 6896 - protein, 156 aa, Streptococcus pyogenes
MQNSKIRQMSLTGILTALVVVLGRFVMLPTPTGFLTLLDAGIYAVSFSFGSAQGAIVGGLSGFLIDLVAGYPQWMFHSLIAHSVQGYFAGWRGRKRWLGVVIGSFIMIFWYFLGSLMLGYGLSGSLAGIWGNVMQNTLGLFVGFIIFKAILRQKKR

SEQ ID NO: 6897 - DNA, 567 bp, Streptococcus agalactiae
atgatactagattataataagttaaagcaggaaactaaagctattgtagttgatattattgaacgtagcgctcttaaaaaaggtcaaatttttgtactaggtctatcatctagtgaggtttctggtggtttaattggaaaaaattctagttctgaaattggtgaaattatcgttgaagttatcctcaaagagttacattcacgcggcatctatttagcagttcaaggttgtgaacatgttaatagggcgttggttgttgaagcagaattggctgaacgtcaacagttggaagtcgttaatgttgttcctaatctacatgctggcggtagtggtcaggttgcagcttttaagttgatgacatcaccagttgaggttgaagaaattgtggcacatgctggaattgatattggagatacttctattggaatgcatatcaagagagtacaagttcccttgattccaattagtcgtgagttgggaggagcacacgttacagcactagctagtcgtcctaaattaattggcggtgctagagcaggatatacgagcgatccaatccgtaaattt

SEQ ID NO: 6898 - protein, 189 aa, Streptococcus agalactiae
MILDYNKLKQETKAIVVDIIERSALKKGQIFVLGLSSSEVSGGLIGKNSSSEIGEIIVEVILKELHSRGIYLAVQGCEHVNRALVVEAELAERQQLEVVNVVPNLHAGGSGQVAAFKLMTSPVEVEEIVAHAGIDIGDTSIGMHIKRVQVPLIPISRELGGAHVTALASRPKLIGGARAGYTSDPIRKF

SEQ ID NO: 6899 - DNA, 558 bp, Streptococcus pyogenes
ttgttgaataatttagagaaacaaacaagggaaatcgtcattgatgttgtagaacgctctgctattcaaccaggtaatctttttgttctaggtctttcatctagcgaaattttgggtagtagaattggaaaacaatctagtctagaagtaggtcaaatagttgttgaagttgtgttagatgaattaaataagcgtggtgttcatttggctgtacaaggttgtgaacacgtcaatcgtgccttggtagtagagaggcatgtggcagaatctaagcagttagagattgtcaatgtggttccgaatcttcatgctggtggcagtgctcagatggctgcttttcaacttatgtcagaccctgtcgaagtagaagaagttattgcacacgctggacttgatataggtgatactgctataggaatgcatattaagcgtgttcagatccctctgattccttgtcaacgagagctaggaggtgctcatgtgacagctttggctagtcgaccaaaattaattggtggagctagggctgattacaatatggatattatccgtaaatcc

SEQ ID NO: 6900 - protein, 186 aa, Streptococcus pyogenes
LLNNLEKQTREIVIDVVERSAIQPGNLFVLGLSSSEILGSRIGKQSSLEVGQIVVEVVLDELNKRGVHLAVQGCEHVNRALVVERHVAESKQLEIVNVVPNLHAGGSAQMAAFQLMSDPVEVEEVIAHAGLDIGDTAIGMHIKRVQIPLIPCQRELGGAHVTALASRPKLIGGARADYNMDIIRKS

SEQ ID NO: 6901 - DNA, 840 bp, Streptococcus agalactiae
atgattactttagaaaaatttatagaccatcttaatgtagaggaagttttatttactttcttcaccaaactaatatcaatcttattattaatcattgcattcgttatcgttaggcaagtcatcaattatcttttcgaaaagactgttaatcgctcactcgccttttctagacaaaaagtagctcgtcaaaaaacattagctaaactttctcacaatgttttaaactataccctttatttctttctattctattggattttaagtatattgggcgttccaatttctagtttattagctggggctggtattgctggggttgctattggacttggtgctcaaggcttcttatcagatgttgtcaatggcttttttattctgctagaaaaccaatttgatgttggtgatattattaatgttggtactgtatcaggcactgttactaatgttgggatacgcaccacacaaattcatgatttcgatggaaccttgcacttcattcctaatcgtaatattacaattgtcagcaataagtctcgtagcaatatgcgtgctcaaattgatattcctttatttgttcatacaaaccttgatcagatttctgatattgtaacaaaaatcaatgaagagtatgtttcaaaacaccctgctatcgttggagagcctactgtttttggtcctacaaccaatgctaatggtcaatttgtttatcgtattaatatcttcacgcaaaacggtgctcagtttgacatctatgctgaattttacaaactttatcaaaaagctattcttgaagaaggtattgacttaccaacgtacaatttctccaataaccactctcgt

SEQ ID NO: 6902 - protein, 280 aa, Streptococcus agalactiae
MITLEKFIDHLNVEEVLFTFFTKLISILLLIIAFVIVRQVINYLFEKTVNRSLAFSRQKVARQKTLAKLSHNVLNYTLYFFLFYWILSILGVPISSLLAGAGIAGVAIGLGAQGFLSDVVNGFFILLENQFDVGDIINVGTVSGTVTNVGIRTTQIHDFDGTLHFIPNRNITIVSNKSRSNMRAQIDIPLFVHTNLDQISDIVTKINEEYVSKHPAIVGEPTVFGPTTNANGQFVYRINIFTQNGAQFDIYAEFYKLYQKAILEEGIDLPTYNFSNNHSR

SEQ ID NO: 6903 - DNA, 843 bp, Streptococcus pyogenes
atgacatttatattacattacctagagcagtctcatatcgaaaatattggcttaacgatttttaaaaagctagtgtctctcattattctattactcttttttgctattttaaaacgtgttactaactatctttttgaaaaaaccattaacaaatcgtttgcttattcaagacaaagtgaagctcgcaaaaaaacactctctaagctcactcacaacattttaaattacttattatattttcttctcatttattggatacttagcttatttggcatacctgtctctagtcttctagcaggagctggaattgctggagtagcaatcgggttaggtgcacaaggatttttatctgacgttgtcaatggcttttttatcttatttgagaatcaatttgaagtaggagataacgttactatctctgacatagaaggcagtgtctttggtgttggaattagaactactcaaattcgtggattcgatggaacactacatttcatcccaaaccgtagcatcaccgttgtcagcaacaaatctcgtggtaatatgcgtgccttaattgaaattcctctttattccactgttaatttgagccaagtcactcgaatcattgatgaagtgaatcaaaaggaattgccaaaccatcctcaaatcgttggcaaaccaaatattttagggcctcaaaataactctaatggacagttcacttttagaattgctattttcacagaaaatggagaacaatttaagatttaccatactttttatagactttatcaagaagctttactcaaagaaggcattcaattaccgactgcaatcagctattctatcacctcaaaatct

SEQ ID NO: 6904 - protein, 281 aa, Streptococcus pyogenes
MTFILHYLEQSHIENIGLTIFKKLVSLIILLLFFAILKRVTNYLFEKTINKSFAYSRQSEARKKTLSKLTHNILNYLLYFLLIYWILSLFGIPVSSLLAGAGIAGVAIGLGAQGFLSDVVNGFFILFENQFEVGDNVTISDIEGSVFGVGIRTTQIRGFDGTLHFIPNRSITVVSNKSRGNMRALIEIPLYSTVNLSQVTRIIDEVNQKELPNHPQIVGKPNILGPQNNSNGQFTFRIAIFTENGEQFKIYHTFYRLYQEALLKEGIQLPTAISYSITSKS

SEQ ID NO: 6905 - DNA, 1068 bp, Streptococcus agalactiae
  misc_feature (1)..(1068): n = a, c, g, or t
atgtctacatcatttgaaaataaagctacaaaccgtggtattatcacatttacaattagtcaagatgagatcaagccagctcttgatcaagcattcaacaaagtaaaaaaagatttgaacgttccaggattccgtaaaggacatatgcctcgtacagttttcaaccaaaaatttggtgaagaagcactctacgaaaatgcattgaatttagtgttgccaaaggcttacgaagcagctgttgcagaacttggtttagacgttgttgctcaaccaaaaattgatgttgtatcaatggaaaaaggtcaagattggaagttgacagctgaagttgttacaaaaccagaagttaaacttggagattacaaagacctttcagtagaagttgatgcttcaaaagaagtttcagatgaagaagttgatgctaaagttgaacgtgagcgtaacaaccttgcagaattgactgttaaagatggtgaagcagcacaaggtgatacagttgttattgactttgtaggttcagttgatggtgttgaatttgatggtggtaaaggagataacttctcacttgaacttggttcaggtcaatttatcccaggatttgaagaacaattagtaggttctaaagctggtcaaactgtagacgttaatgtaacattcccagaagattatcaagcagaagatcttgctggtaaagatgctaaatttgttacaacaattcacgaagtaaaaactaaagaagttccagcacttgatgatgaacttgcaaaagatattgatgatgaagttgaaacacttgatgagttgaaagcgaaatatcgcaaagagctagaatcagcaaaagaaattgcatttgatgatgcagttgaaggtgcagcaatcgaattagctgttgccaatgcagaaattgttgaattaccagaagaaatggtccatgatgaagtacatcgtgctatgaatgagttcatgggtaatatgcaacgtcaaggaatttcaccagaaatgtacttccaattaacaggtacaactgaagaagaccttcataagcaataccaagcagatgctnnnnnt

SEQ ID NO: 6906 - protein, 356 aa, Streptococcus agalactiae
  MISC_FEATURE (1)..(356): Xaa = Any Amino Acid
MSTSFENKATNRGIITFTISQDEIKPALDQAFNKVKKDLNVPGFRKGHMPRTVFNQKFGEEALYENALNLVLPKAYEAAVAELGLDVVAQPKIDVVSMEKGQDWKLTAEVVTKPEVKLGDYKDLSVEVDASKEVSDEEVDAKVERERNNLAELTVKDGEAAQGDTVVIDFVGSVDGVEFDGGKGDNFSLELGSGQFIPGFEEQLVGSKAGQTVDVNVTFPEDYQAEDLAGKDAKFVTTIHEVKTKEVPALDDELAKDIDDEVETLDELKAKYRKELESAKEIAFDDAVEGAAIELAVANAEIVELPEEMVHDEVHRAMNEFMGNMQRQGISPEMYFQLTGTTEEDLHKQYQADAXX

SEQ ID NO: 6907 - DNA, 1368 bp, Streptococcus pyogenes
ttgatttcacgcataaaaagctttaaaaacgctttaaattatgataaaatgaactgtatcgaaattattttaaggagaaatgacttaatgtctacatcatttgaaaacaaagctacaaatcgtggcgtgattacatttacaatcagtcaagataaaataaaaccagctcttgataaagcttttaataaaatcaaaaaagacttgaatgcaccaggtttccgtaaaggacacatgcctcgtccagtcttcaaccaaaaatttggtgaagaagttctttatgaagatgctttgaatattgtattgccagaagcttatgaagcagctgtgacggaacttggtcttgatgtggttgcacaaccaaaaatcgatgttgtgtcaatggaaaaagggaaagagtggacactttctgctgaagttgtgacaaaacctgaagtgaaacttggtgattacaaaaacctagttgtagaagttgatgcttcaaaagaagtttcagatgaagacgtggatgctaaaattgagcgcgaacgtcaaaaccttgcggaactcattattaaagacggtgaagcagctcaaggtgacactgttgtgattgactttgttggttcagttgatggtgttgagtttgatggcggtaaaggagataacttctctcttgaacttggttcaggacaatttatcccaggttttgaagatcaactagttggtgctaaagctggcgatgaagtagaagttaatgtcacattcccagaatcttaccaagcagaagatcttgcaggtaaagccgctaaatttatgacaactattcacgaagtcaaaacaaaagaagtaccagagcttgatgatgagcttgcaaaagatattgatgaagatgttgacacacttgaagacttaaaagtaaaatatcgtaaagaacttgaagcagctcaagaaactgcttatgatgatgctgttgaaggagctgcgattgaattagcagttgcaaatgctgaaattgttgatttacccgaagaaatgattcatgaagaagtcaaccgttcagtgaatgaatttatgggcaacatgcaacgtcaaggaatctcacctgaaatgtacttccaattgactggtacaactcaagaagatttacataaccaatattcagctgaagctgacaaacgtgttaaaacacaccttgttattgaagcaattgctaaagcagaaggttttgaagcaacagatagtgaaattgaacaagaaattaatgaccttgcaacagaatataacatgccagctgaccaagttcgttctcttctttcagcagatatgttgaaacatgatattgcaatgaaaaaagcagttgaagtgattacaagcacagcaagcgttaag

SEQ ID NO: 6908 - protein, 456 aa, Streptococcus pyogenes
LISRIKSFKNALNYDKMNCIEIILRRNDLMSTSFENKATNRGVITFTISQDKIKPALDKAFNKIKKDLNAPGFRKGHMPRPVFNQKFGEEVLYEDALNIVLPEAYEAAVTELGLDVVAQPKIDVVSMEKGKEWTLSAEVVTKPEVKLGDYKNLVVEVDASKEVSDEDVDAKIERERQNLAELIIKDGEAAQGDTVVIDFVGSVDGVEFDGGKGDNFSLELGSGQFIPGFEDQLVGAKAGDEVEVNVTFPESYQAEDLAGKAAKFMTTIHEVKTKEVPELDDELAKDIDEDVDTLEDLKVKYRKELEAAQETAYDDAVEGAAIELAVANAEIVDLPEEMIHEEVNRSVNEFMGNMQRQGISPEMYFQLTGTTQEDLHNQYSAEADKRVKTHLVIEAIAKAEGFEATDSEIEQEINDLATEYNMPADQVRSLLSADMLKHDIAMKKAVEVITSTASVK

SEQ ID NO: 6909 - DNA, 423 bp, Streptococcus agalactiae
atgacaattattattggggcggatgcgcatggtgttgaacttaaggaagtgattagacaacaccttacaagtttaggtaaggaaattattgatttaacggatactagcaaagatttcgttgataataccttagcaatcgttgctaaagtgaatcaaaaagaagataacttaggaataatggttgatgcttacggtgttggtccttttatggtagccactaaggttaaggggatgattgcagcagaagtttcagatgaacgctcagcttatatgactagagctcataataacgctaggatgattactttaggttcagagattgttggtccaggagttgctaaacatatagtagagggttttgttgatgggacttacgatgcaggtcgtcatcaaattcgggtcgatatgttgaataaaatgtgc

SEQ ID NO: 6910 - protein, 141 aa, Streptococcus agalactiae
MTIIIGADAHGVELKEVIRQHLTSLGKEIIDLTDTSKDFVDNTLAIVAKVNQKEDNLGIMVDAYGVGPFMVATKVKGMIAAEVSDERSAYMTRAHNNARMITLGSEIVGPGVAKHIVEGFVDGTYDAGRHQIRVDMLNKMC

SEQ ID NO: 6911 - DNA, 423 bp, Streptococcus pyogenes
atggctattattttaggtgcagatgcacacggaaatgcattaaaagaattgatcaaaagttttcttcaagaagaaggctatgacattattgacgtgactgatattaacagtgattttattgataacacattagcggtggcgaaagccgttaatgaagcagaaggtcgtttaggcattatggtggatgcttacggagcaggtccctttatggtagccacaaaattaaaaggaatggttgctgctgaagtgtcagatgaacgctctgcttacatgacgcgcggtcacaacaatgcccgcatgatcacaataggggcagagattgtaggtccagaattagcgaagaatatcgtcaaaggttttgtgactggtccctacgatggtggtcgtcatcaaattcgtgttgacatgctcaataaaatggcc

SEQ ID NO: 6912 - protein, 141 aa, Streptococcus pyogenes
MAIILGADAHGNALKELIKSFLQEEGYDIIDVTDINSDFIDNTLAVAKAVNEAEGRLGIMVDAYGAGPFMVATKLKGMVAAEVSDERSAYMTRGHNNARMITIGAEIVGPELAKNIVKGFVTGPYDGGRHQIRVDMLNKMA

SEQ ID NO: 6913 - DNA, 540 bp, Streptococcus agalactiae
gtgctaagcgtaagagaggtaaagcagatgaaaattgcggtcggttgtgatcatattgtaacttatgacaaaattgcagttgtggattatttaaaaacaaaagggtatgaggttattgattgtggaacttatgataatatccgtactcactatcctatttatggtaagaaagtaggagaagctgtcgctagtggaaaagccgacttaggtgtatgtatttgtggaactggagttggtattaataatgctgttaataaagttccaggaattcgctcagctctggtacgtgatttgacatcagctatctatgccaaagaagaattaaatgctaacgttatcggatttggtgggaaaattactggtgggctgttaatgacagatatcatcgaggcgtttataagagctaaatataaaccaacaaaagaaaacaaagtattaattgaaaagatagccgaggttgagactcataatgcccatcaagaagagaatgactttttcacagagttcttagataaatggaatcgtggtgaatatcacgac

SEQ ID NO: 6914 - protein, 180 aa, Streptococcus agalactiae
MLSVREVKQMKIAVGCDHIVTYDKIAVVDYLKTKGYEVIDCGTYDNIRTHYPIYGKKVGEAVASGKADLGVCICGTGVGINNAVNKVPGIRSALVRDLTSAIYAKEELNANVIGFGGKITGGLLMTDIIEAFIRAKYKPTKENKVLIEKIAEVETHNAHQEENDFFTEFLDKWNRGEYHD

SEQ ID NO: 6915 - DNA, 516 bp, Streptococcus pyogenes
gtgatgaaaattgcgattggttgtgaccatattgtcaccaacgaaaaaatggctgtttctgattttttgaaatctaaaggctatgacgttattgactgtggcacttatgaccatacaagaacccattaccctatttttggaaaaaaagtcggcgaagctgtggttaatggtcaagcagacttgggtgtttgtatttgtggaactggagttggcattaataatgccgtgaacaaggtaccaggtattcgttcagcccttgttcgagatatgacaacagcgctttatgccaaggaagaattgaatgccaatgtgattggctttggtggtaaaatcacgggtgaacttcttatgtgtgatattatagatgcttttatcaaggcagaatacaaagaaactgaagagaataagaagctaattgctaaaatagcccacttggaaagtcatcatgccaaccaagaagatcctgatttttttacagaatttttggaaaaatgggatcgtggtgagtatcacgat

SEQ ID NO: 6916 - protein, 172 aa, Streptococcus pyogenes
VMKIAIGCDHIVTNEKMAVSDFLKSKGYDVIDCGTYDHTRTHYPIFGKKVGEAVVNGQADLGVCICGTGVGINNAVNKVPGIRSALVRDMTTALYAKEELNANVIGFGGKITGELLMCDIIDAFIKAEYKETEENKKLIAKIAHLESHHANQEDPDFFTEFLEKWDRGEYHD

SEQ ID NO: 6917 - DNA, 960 bp, Streptococcus agalactiae
gtggtgaatatcacgactaaggagatatctatgattttaacagtaactttgaacccttctattgatatttcgtactgcttagaaaactttaacatggatactgtaaatcgagttaccgacgtctccaaaacacctgggggtaaggggttaaatgtgactcgtgttctttctcaacttggcgataatgtagtggcaactggtctattagggggggattttggagatttcatccgaagtggcttagatgcattggaaatcagacaccaatttttaagtattggtggagaaacacgtcattgtattgcagttttacatgagggtcagcagactgaaattctagaaaaaggtccacatattactaaagatgaagcagacgcctttttgaatcatctaaaacttatctttgatgctgcaactatcataacagtatcaggaagtttaccaaagggactcccctcagattattatgctaggttaatctccctagcgaatcactttaataagaaagttgttttagactgttcaggagaagcattacgttcggttttaaaatctagtgctaagccgaccgtcattaaacctaaccttgaagaattaacacaattaattggaaaaccaattagctatagtttagacgaattaaaatctaccttacagcaagatctttttagaggaattgattgggttattgtttctttaggtgctaggggagcttttgctaaacatgggaatcactactatcaagtgacgattccaaaaatagaagttattaatccagttggttcaggggatgcaacggttgcaggaatcgcgtctgctttggaacatcaactagatgatacaaatttgcttaagagagctaatgtcttgggtatgcttaatgcacaagaaacattaacagggcatatcaatctgacctactatcaagaattaatcagtcaaatccaagtgaaagaggta

SEQ ID NO: 6918 - protein, 320 aa, Streptococcus agalactiae
MVNITTKEISMILTVTLNPSIDISYCLENFNMDTVNRVTDVSKTPGGKGLNVTRVLSQLGDNVVATGLLGGDFGDFIRSGLDALEIRHQFLSIGGETRHCIAVLHEGQQTEILEKGPHITKDEADAFLNHLKLIFDAATIITVSGSLPKGLPSDYYARLISLANHFNKKVVLDCSGEALRSVLKSSAKPTVIKPNLEELTQLIGKPISYSLDELKSTLQQDLFRGIDWVIVSLGARGAFAKHGNHYYQVTIPKIEVINPVGSGDATVAGIASALEHQLDDTNLLKRANVLGMLNAQETLTGHINLTYYQELISQIQVKEV

SEQ ID NO: 6919 - DNA, 927 bp, Streptococcus pyogenes
gtgattttaacagttactttaaatccagctattgatgtctcctaccctttggatgagctaaaatgcgatactgtcaatcgagttgtagacgttacaaagacacccggtggtaaaggcttgaatgtttcccgagttcttaatgaattcggtgagacagtcaaagctacaggttgtgtaggtggagaaagcggtgattttatcattaatcatcttcctgattcgattttaagtcgcttctataaaatttcaggtgatactagaacttgtatagccattttacacgaaggtaatcaaacggagattttagaaaaaggaccgatgttaagtgtagatgaaattgatggatttactcatcattttaagtatttactgaatgatgttgacgtagtgacgctctcaggcagtttgcctgctggtatgccagatgattactatcagaagttaatcaagattgccaatcttaatggtaagaaaacggttctggattgttctggaaatgctctagaagcagtactaaaaggtgatagtaaaccaacagttatcaaacctaatcttgaagaactttctcaacttctaggtaaagaaatgacaaaagattttgatgccttaaaagaagtcttacaagatgaactatttgatggaattgaatggataatcgtttctcttggtgctgatggtgtatttgcaaagcacaaggatacgttttataacgttgacattcctaaaatcaaaattgtaagcgctgtaggttcaggggattctacagtggcaggtattgcttcaggtttagcgaatgatgaagatgatcgagctttattaacaaaagcaaatgtcttagggatgttaaatgcgcaagaaaaaacaactgggcatgttaacatggcaaattacgataagttatatcaatctattaaagtcaaagaggta

SEQ ID NO: 6920 - protein, 309 aa, Streptococcus pyogenes
VILTVTLNPAIDVSYPLDELKCDTVNRVVDVTKTPGGKGLNVSRVLNEFGETVKATGCVGGESGDFIINHLPDSILSRFYKISGDTRTCIAILHEGNQTEILEKGPMLSVDEIDGFTHHFKYLLNDVDVVTLSGSLPAGMPDDYYQKLIKIANLNGKKTVLDCSGNALEAVLKGDSKPTVIKPNLEELSQLLGKEMTKDFDALKEVLQDELFDGIEWIIVSLGADGVFAKHKDTFYNVDIPKIKIVSAVGSGDSTVAGIASGLANDEDDRALLTKANVLGMLNAQEKTTGHVNMANYDKLYQSIKVKEV

SEQ ID NO: 6921 - DNA, 975 bp, Streptococcus agalactiae
atgggattaacagaacaaaaacaaaaacatatggaacaattgagtgataaaaatggtattatttcggccttggcttttgaccaacgtggagcattgaagcgattaatggcaaaatatcaatctgaggagcccactgtttctcaaatagaagcacttaaagttttggtagctgaagaattaaccccttacgcttcatcaatgttgttagatccagaatatgggttgccagctacgaaagttttagatgacaatgccggtcttttacttgcgtacgaaaaaacgggttatgataccagtagtaccaagcgactcccagactgtttagacatttggtctgcgaaacgcattaaagaagagggagcagacgcagttaagttcttactttattatgatgttgatagttcggatgaagtaaacgaagaaaaagaagcttatattgaacggattggttctgaatgtgttgcagaagacattccttttttccttgaaattttgtcatatgatgaaaagattacggatagctcaggtattgagtatgccaaaattaagccacgtaaggttattgaagctatgaaagttttttcaaatcctcgatttaatattgatgtcttgaaggtggaagtgcctgtcaatatggactatgtagaaggttttgcgcaaggagagactgcttataataaagcgacagctgcggcatattttagagaacaagatcaggcgacactactcccctacatttttttgagtgcaggagttcctgctcagctttttcaagagactcttgtgtttgctaaagaagctggtgctaaatttaacggtgtcctttgtggtagagcaacttgggctggaagtgttaaagagtatgttgaaaaaggagaagctggtgcacgtcaatggttacgtacaataggttttcaaaatattgatgaactaaataaaattttgcaaaaaacagcaacttcttggaaggaaaga

SEQ ID NO: 6922 - protein, 325 aa, Streptococcus agalactiae
MGLTEQKQKHMEQLSDKNGIISALAFDQRGALKRLMAKYQSEEPTVSQIEALKVLVAEELTPYASSMLLDPEYGLPATKVLDDNAGLLLAYEKTGYDTSSTKRLPDCLDIWSAKRIKEEGADAVKFLLYYDVDSSDEVNEEKEAYIERIGSECVAEDIPFFLEILSYDEKITDSSGIEYAKIKPRKVIEAMKVFSNPRFNIDVLKVEVPVNMDYVEGFAQGETAYNKATAAAYFREQDQATLLPYIFLSAGVPAQLFQETLVFAKEAGAKFNGVLCGRATWAGSVKEYVEKGEAGARQWLRTIGFQNIDELNKILQKTATSWKER

SEQ ID NO: 6923 - DNA, 981 bp, Streptococcus pyogenes
atgacaattactttaactgaaaacaaacgcaaaagcatggaaaaactaagtgtagatggtgttatttctgccttagcttttgaccaacgtggagctctcaaacgtatgatggctcaacatcaaacaaaagagccaacagtagaacaaattgaagagcttaaaagtttagtttctgaagaactaacaccatttgcatcctcaattctacttgatcctgaatatggcttgccagcaagtcgtgttcgttcagaagaagcaggcttgttgttggcatatgagaaaacaggatacgatgcaacaacaactagtcgcttacctgattgtttagatgtttggtctgcaaaacgtattaaagaagctggagcagaagcagttaaattccttctttactatgatattgatggagatcaagatgttaacgagcagaaaaaagcttacattgaacgtattggttctgaatgccgtgcagaagatattccattctacttagaaattctaacttatgatgagaaaattgctgacaatgcaagccctgagtttgcaaaagttaaagctcataaagttaacgaagcaatgaaagttttctcaaaagagcgctttggagttgacgtgttgaaagttgaagttccagtaaatatgaaatttgtagaaggctttgcagatggtgaggttctctttacaaaagaagaagcagctcaagctttccgtgaccaagaagcttctactgatttaccatacatttatttgagtgctggtgtttctgccaaattgttccaagatactttggtgtttgcagcagaatcaggtgctaaattcaacggtgtcttatgtggacgtgctacctgggcaggatctgtaaaagtctatatcgaagaaggaccacaagcagctcgtgaatggttgcgtacagaaggttttaaaaatattgacgaattaaacaaagtactagataaaactgcaagtccttggactgaaaaaatg

SEQ ID NO: 6924 - protein, 327 aa, Streptococcus pyogenes
MTITLTENKRKSMEKLSVDGVISALAFDQRGALKRMMAQHQTKEPTVEQIEELKSLVSEELTPFASSILLDPEYGLPASRVRSEEAGLLLAYEKTGYDATTTSRLPDCLDVWSAKRIKEAGAEAVKFLLYYDIDGDQDVNEQKKAYIERIGSECRAEDIPFYLEILTYDEKIADNASPEFAKVKAHKVNEAMKVFSKERFGVDVLKVEVPVNMKFVEGFADGEVLFTKEEAAQAFRDQEASTDLPYIYLSAGVSAKLFQDTLVFAAESGAKFNGVLCGRATWAGSVKVYIEEGPQAAREWLRTEGFKNIDELNKVLDKTASPWTEKM

SEQ ID NO: 6925 - DNA, 963 bp, Streptococcus agalactiae
ttggaaggaaagataattgctagagaaaagctggtaaagcaattattgttctttatgaaaggaaaaataatggctattacgatacaaaatcatgagttgcaagtgacattaaaagcgttaggtgcaacaatgacttctattacagatagtcaaggcgttgagtacctttggcaaggggacgccacttattggggtgggcaagctcctattttatttcctatatgcggaagtgttcgaaatgattgcgtcatttacagaccagctcaagctccacattttacgggtatcataccaaggcatggctttgtacgtcacaaaacattcgactatgattacatatcggattcttctgttcgttttacaattaaaagtagtaaagaaatgttgataaattatccttatcgttttagtttagaaataacttacaccttaagaaataaaagcattgccattacatatattgtcaaaaacttagaatcagaaaaaaatatgccatatgctatcggagctcacccaggctttaattgccctttgtttgaaaaggaagtatttagtgattactatctagagtttgaacagtttgaaacttgcacaattcctgagtcgtttccggatacaggcttgttagatttacaagctagacatccttttttagaaaatcaaaaacaattatctcttaatcatgctttatttgaaaaagatgctattactttagaccaactacgatctaagacggtttacttaaaatctagaaatcatgcaaaaggaatccaacttgactttgatgattttgagaatcttattctttggacaagtaacaatggtggtccttttttggctttggaaccctggagttctttgtcaacttctattgaagagtctgatattttagaagataaacaaaatatcgtacggcttaatccaaagcagtcgaaacagcattctattcggatcactatttta

SEQ ID NO: 6926 - protein, 321 aa, Streptococcus agalactiae
MEGKIIAREKLVKQLLFFMKGKIMAITIQNHELQVTLKALGATMTSITDSQGVEYLWQGDATYWGGQAPILFPICGSVRNDCVIYRPAQAPHFTGIIPRHGFVRHKTFDYDYISDSSVRFTIKSSKEMLINYPYRFSLEITYTLRNKSIAITYIVKNLESEKNMPYAIGAHPGFNCPLFEKEVFSDYYLEFEQFETCTIPESFPDTGLLDLQARHPFLENQKQLSLNHALFEKDAITLDQLRSKTVYLKSRNHAKGIQLDFDDFENLILWTSNNGGPFLALEPWSSLSTSIEESDILEDKQNIVRLNPKQSKQHSIRITIL

SEQ ID NO: 6927 - DNA, 876 bp, Streptococcus agalactiae
atgaacaaaactgtagtggaggatgccatggattttaaggaactgtttccagaagttattactaaacaggaagttaaacagagtgaggattatatcatcgttgagcaagatggtcatgtcctccactttccaaaatcttcgctaactaagcgtgaactatacttattacaaatgacaccaagcctggaagatgcgagttcagtggattctcagaatccttggtaccgctatctagttgaaggtcgtggaaggttgccccaatctcattcggcagtccaatttatttttattgagcatcaatttaccttatcagaagaacttaaggatttcttgtcgcctttagtaataaacgtagaaacaattatgacaattaatcaaacccaaagtgtcatgattttaaatcaggataatttctttaatgctacggaattactaacagatattttaccaacgattgaaaatgactttaacacgcgtttaaggtgctattttggaaatagttggacgcatctacaagcagtggactggaaagaattatatgaagaagaatataaactttttacgctttttcttagtcacaaggccgaacaacattactgtcgatttccaaagatggctttatgggctttggcaaatcaatcgcccatgccttctattaaagcaaaatgtttacaacatatccttgatacgagtgatacttcggctataataaaagccctgtggcaagagcaaggaaatcttgctaaaacggctaaggcacttttcattcatcggaattcattgcaatataaattagataaatttacccaatcttcgggacttaatttaaaaatattagatgatttagcctatgcctatttgatttcgatggatacc

SEQ ID NO: 6928 - protein, 292 aa, Streptococcus agalactiae
MNKTVVEDAMDFKELFPEVITKQEVKQSEDYIIVEQDGHVLHFPKSSLTKRELYLLQMTPSLEDASSVDSQNPWYRYLVEGRGRLPQSHSAVQFIFIEHQFTLSEELKDFLSPLVINVETIMTINQTQSVMILNQDNFFNATELLTDILPTIENDFNTRLRCYFGNSWTHLQAVDWKELYEEEYKLFTLFLSHKAEQHYCRFPKMALWALANQSPMPSIKAKCLQHILDTSDTSAIIKALWQEQGNLAKTAKALFIHRNSLQYKLDKFTQSSGLNLKILDDLAYAYLISMDT

SEQ ID NO: 6929 - DNA, 888 bp, Streptococcus pyogenes
atgtgttataatggtttaaagaccgtcatgaaaggaatggctatggagctaaaagactattttccagagatgcaagtaggccctcatccgttaggagataaagattggatgagtatcaaagaaggggaccaatatgtgcattttcccaaatcatgtttatccgaaaaagagcgcttattacttgaggtggggctgggtcagtgtgaggtcttgcagccgctagggtcaccttggcagcggtatttgcttgatcatcagggcaatccccctcagctgtatgagacttctcagttcatttaccttaatcatcagcaggctttaccagatgacttagttgagttgctccaacaaatgattgcagggcttgaagtcattttgcctatcagtgcaacccaaacggcatttttatgccgacaagcaatctcaataaaggtcttgcgctggcttgaagatctcctgccaacgctagaaagtgattttggtttggccttaaccatgtttgttggaaatgcctggtatcaggtagctgcgggtacattgagagagtgttttgaggaggaatgtcagctgttaacggcctatttaaggcaacaatcaggcagaaaattattaacattttcaggactgatgctgtggtctttgctgtcgcaccacacttttttggcattgacgcgtcagtttcaccaattcctaagtcctcaaagtgatatggccgatgtggttcacgcgctatggtcagaacacggcaatctggtgcagacagcgcagcgcttgtatattcaccgtaactccttgcaatacaaacttgataaatttgctcagcaatcaggactccacttgaagcaattggatgatttagcctttgctcatctctttttgttgaaatat

SEQ ID NO: 6930 - protein, 296 aa, Streptococcus pyogenes
MCYNGLKTVMKGMAMELKDYFPEMQVGPHPLGDKDWMSIKEGDQYVHFPKSCLSEKERLLLEVGLGQCEVLQPLGSPWQRYLLDHQGNPPQLYETSQFIYLNHQQALPDDLVELLQQMIAGLEVILPISATQTAFLCRQAISIKVLRWLEDLLPTLESDFGLALTMFVGNAWYQVAAGTLRECFEEECQLLTAYLRQQSGRKLLTFSGLMLWSLLSHHTFLALTRQFHQFLSPQSDMADVVHALWSEHGNLVQTAQRLYIHRNSLQYKLDKFAQQSGLHLKQLDDLAFAHLFLLKY

SEQ ID NO: 6931 - DNA, 1131 bp, Streptococcus agalactiae
atggtagaattaaatttaaatcatatttacaaaaaatatccaagtgcatcgcattattctgttgaagactttgacttggatattaaagacaaagaatttattgtttttgttggaccatcaggttgtgggaaatcaacaacacttcgtatgatcgcaggtcttgaagatattagtgaaggtgagctcaagattgatggcgaagttgtcaatgacaaatcacctaaagatcgtgatattgctatggttttccaaaactatgctctttatccacatatgactgtttacgataatatggcttttgggctcaaattgcgtaaattctcaaaacaagaaattgataagcgcgttcgtgaagcagcagctaatattggccttactgaattcttagagcgcaaacctgcggatttgtcaggtggacaacgccaacgtgttgctatgggacgtgctattgtgcgtgatgccaaagtgttcttaatggatgagcctttatctaacttagatgctaaattacgtgtttcaatgcgtgctgaaattgcaaaaattcatcaacgtattggttcaacaactatttatgttacccacgaccaaacagaagcgatgactttggcagaccgtattgtcattatgtcagctactaagaaccctgatggtgatggtacaattggtaaaattgagcaagttggttcaccacaagaactctataatcttcctgccaataaatttgttgcgggattcattggtagcccatctatgaacttcttcaaagttaaagttgaaaatggtatgattattagtgaagatggtcttcgaatcgctatccctgaaggtcaagaaaaacttttagaatcacgaggctataaaggaaaagaattgatttttggtattcgtccagaagacatttcaagcaatcttcttgtccaagatacttatccaaatgccaatgttgaagcagaagttttagtttctgaattactcggtagcgaaactatgctttatgttaagttaggtcaaacagaatttgcttctcgtgttgaagcgcgtgacttccataatccaggagaaaaagttaacctaacgtttaatgttgctaaggggcatttctttgatgcagatactgaacaagctattcgt

SEQ ID NO: 6932 - protein, 377 aa, Streptococcus agalactiae
MVELNLNHIYKKYPSASHYSVEDFDLDIKDKEFIVFVGPSGCGKSTTLRMIAGLEDISEGELKIDGEVVNDKSPKDRDIAMVFQNYALYPHMTVYDNMAFGLKLRKFSKQEIDKRVREAAANIGLTEFLERKPADLSGGQRQRVAMGRAIVRDAKVFLMDEPLSNLDAKLRVSMRAEIAKIHQRIGSTTIYVTHDQTEAMTLADRIVIMSATKNPDGDGTIGKIEQVGSPQELYNLPANKFVAGFIGSPSMNFFKVKVENGMIISEDGLRIAIPEGQEKLLESRGYKGKELIFGIRPEDISSNLLVQDTYPNANVEAEVLVSELLGSETMLYVKLGQTEFASRVEARDFHNPGEKVNLTFNVAKGHFFDADTEQAIR

SEQ ID NO: 6933 - DNA, 1131 bp, Streptococcus pyogenes
atggttgaattaaatctaaatcacatctataaaaaatacccaaatactactcattatgccgttgaagattttgacttagacattaaagacaaagaatttatcgtctttgttggaccttcaggatgtggtaaatcgactactcttcgtatgattgcaggtcttgaggacatttctgaaggagagttaaaaatcggtggcgaagtggtgaatgacaagtctcctaaagaccgtgatattgccatggtctttcaaaactacgccctttacccacacatgactgtgtatgataacatggcctttggtttgaaattacgtaagtacaaaaaagatgatattgaccgtcgtgtcaaggaagctgcgcagattcttggtttgaccgaatttttagagcgtaaaccggctgacctgtctggtggtcaacgtcagcgtgttgccatggggcgtgctattgtccgtgatgctaaggtattcttgatggatgagcctttgtcaaacttggatgcgaagcttcgtgtgtctatgcgtgctgaaattgctaaaattcaccgtcgtatcggctcaacaactatttacgttacccatgaccaaaccgaagccatgactttggcagaccgtatcgttatcatgagtgccactaaaaaccctcaaggtaatggaacgattggtaaaattgagcaagtcggctcgccacaagaattgtacaaccttccagctaataaattcgttgccggttttatcggaagccctgccatgaacttttttgaagtggaagttaaagatggccgcattgtgagtgaagatggtcttgacattgctattccagaaggacaagcaaaaatgcttgaagctgctggttacaagggggaaaaagtcacttttggtattcgtccagaagacatttctagtagacaaatcgtgcatgatacttatccaagtgcaactgtcacagcagaagttttggtttctgagttactgggctctgagacgatgctctatgtcaagcttggacaaactgagtttgcttctcgtgtagatgcgcgtgatttccatagtccaggggagcaagttagcttgacctttaatgtggctaaggggcatttctttgacagagataccgaacaagctattcgt

SEQ ID NO: 6934 - protein, 377 aa, Streptococcus pyogenes
MVELNLNHIYKKYPNTTHYAVEDFDLDIKDKEFIVFVGPSGCGKSTTLRMIAGLEDISEGELKIGGEVVNDKSPKDRDIAMVFQNYALYPHMTVYDNMAFGLKLRKYKKDDIDRRVKEAAQILGLTEFLERKPADLSGGQRQRVAMGRAIVRDAKVFLMDEPLSNLDAKLRVSMRAEIAKIHRRIGSTTIYVTHDQTEAMTLADRIVIMSATKNPQGNGTIGKIEQVGSPQELYNLPANKFVAGFIGSPAMNFFEVEVKDGRIVSEDGLDIAIPEGQAKMLEAAGYKGEKVTFGIRPEDISSRQIVHDTYPSATVTAEVLVSELLGSETMLYVKLGQTEFASRVDARDFHSPGEQVSLTFNVAKGHFFDRDTEQAIR

SEQ ID NO: 6935 - DNA, 1605 bp, Streptococcus agalactiae
atgaagaaacactggtggcataaagctacgatttatcaaatttacccacgttcatttatggattcagatggtgatggtgtgggggacattaaagggattactagcaaactagactaccttgaaaaattagggattactgctatctggttatcacctgtttatcaaagtccaatggatgacaatggttatgatatttcagattatcaagccattgcagatatttttggtgatatgaatgatatggaccaactgttacaagaggcaaatcaacgcgggattaaaatcatcatggatttggtagtgaatcatacctctgatgaacatgcttggttcgtagaagcgcgagaaaaccctaatagtcctgaacgtgatttttatatttggcgagatgaacctaacgatttgacttctatttttagtggctcagcttgggaatatgataaagtatcaggtcaatattatttgcacctttttagcaaacgtcagccagatctcaactgggagaatgaagctttacgtcataaaatttatgatatgatgaatttctggattgataagggtattggtggtttccgtatggatgtcattgatttaattgggaaaattccagataagggcattactggtaatggaccaaaacttcatgattatcttaaagaaatgaacagagctagttttggaaagcatgacttattgacggtgggtgaaacttggggagcaacgccagacattgcaaaacaatactcaaatcccgataatgaagaattatctatggtctttcaatttgaacatgtaggtcttcaacataaacctgacgctcctaagtgggattacagtgacggattagatgttccagcattgaaagatatttttacaaaatggcaaacacaattggagcttggccaaggttggaattctttattctggaataatcatgaccttcctcgagtgctctcgatctggggaaatgatagtgataacagaaaacaatctgccaaggctctagcaatcctactacatttgatgcgtggaacgccttatatctatcaaggtgaagaaattggtatgactaattatccatttgagtgtttagcagatgtagatgatattgaatcccttaactatgctaaagaagccatggataatggggtatctgaagcaacaattttagatagtattcgtaaagtcggtcgtgataatgctcgtactccaatgcagtggagtcaagaacatcaagctggttttactaaaggtaccccatggctagcagtcaatcccaattatcaggaaattaatgtggaggcagcgttaaatgatacggaaagtattttttatacttatcaaaaattagttgctttacgtaaagaacacgactggttagttgatgctgattttaaacttttggaaacagcagataaggtatttgcttatgttcgtcaaacagataaagaacgttatttaatagttgcgaacttatccgatcaaaaccaatcttttgaatttccagaagctgttaaagaaactattatttcaaatacagaggttcaagaagtactatcaagtaacactctcaagccgtgggatgccttctgcatagagctattc

SEQ ID NO: 6936 - protein, 535 aa, Streptococcus agalactiae
MKKHWWHKATIYQIYPRSFMDSDGDGVGDIKGITSKLDYLEKLGITAIWLSPVYQSPMDDNGYDISDYQAIADIFGDMNDMDQLLQEANQRGIKIIMDLVVNHTSDEHAWFVEARENPNSPERDFYIWRDEPNDLTSIFSGSAWEYDKVSGQYYLHLFSKRQPDLNWENEALRHKIYDMMNFWIDKGIGGFRMDVIDLIGKIPDKGITGNGPKLHDYLKEMNRASFGKHDLLTVGETWGATPDIAKQYSNPDNEELSMVFQFEHVGLQHKPDAPKWDYSDGLDVPALKDIFTKWQTQLELGQGWNSLFWNNHDLPRVLSIWGNDSDNRKQSAKALAILLHLMRGTPYIYQGEEIGMTNYPFECLADVDDIESLNYAKEAMDNGVSEATILDSIRKVGRDNARTPMQWSQEHQAGFTKGTPWLAVNPNYQEINVEAALNDTESIFYTYQKLVALRKEHDWLVDADFKLLETADKVFAYVRQTDKERYLIVANLSDQNQSFEFPEAVKETIISNTEVQEVLSSNTLKPWDAFCIELF

SEQ ID NO: 6937 - DNA, 1611 bp, Streptococcus pyogenes
atgaacaaccactggtggcataaagctacgatttatcagatttacccaaggtcctttaaagacaccagcggcaatggtattggtgatttaaaaggcattaccagtcaactggactacttgcaaaaacttggcattacagccatttggttatctcctgtttaccaaagtccaatggatgacaatggttatgacatctctgactatgaagcgattgctgatgtttttggagacatggcagatatggatgagctcttagcagcagctaatgagcgaggcattaagattatcatggacttggtggtcaaccatacgtctgatgagcatgcttggtttgttgaagctagagaaaatcccaatagtcctgagcgtgattactatatttggcgtgacgagccaaacaacctcatgtctattttttcaggatctgcttgggaattggatgaggcatcaggacaatattacctgcatttgtttagcaagaaacagcctgatttgaactgggaaaatgctcagctgcgccaaaaaatttacgatatgatgaatttctggattgccaaaggcatcggtggttttcgtatggatgtgattgacctgattgggaaggttcctgacttggagatcacgggtaacgggccgcgcttacacgattacctcaaagaaatgaatcaagcaacctttggcaaccatgacgtgatgacagtcggtgagacttggggagcaacgcctgaaattgctcgccagtattctcgccctgaaaacaaagagttatccatggtcttccaatttgagcatgtgggtcttcaacataaacctgacgctcccaagtgggattatgccaaagaattagacgtgcctgctctgaaagctatttttagcaagtggcagacagaattaaagttaggagaaggctggaattcgcttttttggaataaccatgacttgccacgggtcttatccatttggggcaatgacagcacttaccgagaaaaatcagccaaggctttagctattttactgcatttgatgcgaggaaccccttacatttaccaaggagaagagattggcatgaccaattatccttttaaagacttaaccgaggttaatgatattgagtcccttaactatgctaaggaagctatgggaaatggagtgtcagctgcgcgtgtgatggatagcatccgtaaggtaggacgagacaatgctagaacgccgatgcagtggtctaaggacacacatgctggcttttctgaagcaaaagagacttggttgccggtcaaccccaactaccaagacatcaatgtggccgatgcccttgctgatccagactctattttttacacctaccaaaaattgattgccttgcgtaaggagcaagactggctagttgaagcggattatcacctcttgccaacagctgataaagtgtttgcttatcagcgtcagcttggagaagagacgtatgtgattgttgtcaatgtgtctgatgaggagcaagtctttgccacagacttagcaggtgcacaagtgatcatcgccaatacagatgtggacacggtattagagaccaagcacttacaaccttgggatgccttttgtctcaaactgaaggcc

SEQ ID NO: 6938 - protein, 537 aa, Streptococcus pyogenes
MNNHWWHKATIYQIYPRSFKDTSGNGIGDLKGITSQLDYLQKLGITAIWLSPVYQSPMDDNGYDISDYEAIADVFGDMADMDELLAAANERGIKIIMDLVVNHTSDEHAWFVEARENPNSPERDYYIWRDEPNNLMSIFSGSAWELDEASGQYYLHLFSKKQPDLNWENAQLRQKIYDMMNFWIAKGIGGFRMDVIDLIGKVPDLEITGNGPRLHDYLKEMNQATFGNHDVMTVGETWGATPEIARQYSRPENKELSMVFQFEHVGLQHKPDAPKWDYAKELDVPALKAIFSKWQTELKLGEGWNSLFWNNHDLPRVLSIWGNDSTYREKSAKALAILLHLMRGTPYIYQGEEIGMTNYPFKDLTEVNDIESLNYAKEAMGNGVSAARVMDSIRKVGRDNARTPMQWSKDTHAGFSEAKETWLPVNPNYQDINVADALADPDSIFYTYQKLIALRKEQDWLVEADYHLLPTADKVFAYQRQLGEETYVIVVNVSDEEQVFATDLAGAQVIIANTDVDTVLETKHLQPWDAFCLKLKA

SEQ ID NO: 6939 - DNA, 993 bp, Streptococcus agalactiae
atggcagttctgattttaggtggcgccggctacattggctcgcatatggttgatcagttaatcacacaaggaaaagagaaagttattgttgttgataacttggtaacaggtcatcgtcaagcggtgcattcagatgcgattttttatgaaggagatttatccgataaaacgtttatgcgtcaagtttttagggaaaatcctgatgtagatgctgttatccattttgcggcattttcactagttgctgagtcaatggaaaatcctttaaaatattttgataataacactgctggaatgataaaacttttagaagtaatgaatgaatgtgatatcaaaaatattgtcttttcatcaacagctgcaacatatggtattccagaacaagttcctattttagaaacagctcctcaaaatcctattaatccttatggcgaaagtaagcttatgatggaaacaattatgaaatgggctgatcaagcctacggtattaagtttgtcgctctacgttacttcaacgttgctggagataaaccggatggctcaattggggaagatcataaaccagaaacacatttgttaccaatcattcttcaagttgctcaaggagtacgtgacaaaataatgatttttggagatgattacaatactccagatggaactaatgttcgagattatgtgcatccatttgatttggcagatgctcatatattagcagttgattaccttcgccaagggaatgaatcaaacgtgtttaatctcggatcttcgacaggtttttctaaccttcagatgttagaggcagctcgtcgtattactgggaaagaaattcctgctcaaaaggcagctcgtcgtccaggagatccagatacgcttattgcttcctcagagaaagctcgtcaaatccttgggtgggagcctaaatttgataatattgataaaattatttcatcggcatgggcatggcattctagtcatccaaatggctacgaagat

SEQ ID NO: 6940 - protein, 331 aa, Streptococcus agalactiae
MAVLILGGAGYIGSHMVDQLITQGKEKVIVVDNLVTGHRQAVHSDAIFYEGDLSDKTFMRQVFRENPDVDAVIHFAAFSLVAESMENPLKYFDNNTAGMIKLLEVMNECDIKNIVFSSTAATYGIPEQVPILETAPQNPINPYGESKLMMETIMKWADQAYGIKFVALRYFNVAGDKPDGSIGEDHKPETHLLPIILQVAQGVRDKIMIFGDDYNTPDGTNVRDYVHPFDLADAHILAVDYLRQGNESNVFNLGSSTGFSNLQMLEAARRITGKEIPAQKAARRPGDPDTLIASSEKARQILGWEPKFDNIDKIISSAWAWHSSHPNGYED

SEQ ID NO: 6941 - DNA, 687 bp, Streptococcus agalactiae
atggacgtattaattatcgaagatgatcctatggtggaatttatccaccgcaattaccttgaaaaactcaattattttcaaaacatctattcaactgctagtcaaacacaagctattgcttatcttaatgacattaaaatccaacttgttcttttagatattcatattaaagaaggcaatggtctagaattattaaagttattacgcaatcaacaccaaaataccgaagtcattgttatttcagcagccaacgaggcgcacactgtcaaagaagcatttcatttaggtattgtagattacctgataaaaccatttacatttgaacgctttgagtctagtattgaaaaattcctaaatcattatcatacatttgaagctgataaaatctatcaagacaacatcgatcactttcaaaaaatagattctggatggctagagggagaggttaaacttgatgagaaagggctctctgaaattacctatcagcatattcttgatgccattcaagagttagagcagcctttcactatccaagagttagcaaaatgcagtcaattttctcatgtctctgttaggaaatatattgcctatatggaagaaaaaggccttctgacaagtcagcaaatttatactaaggtcggtcgtccttacaaagtttataagcttataaaaaaaaacttaggcctg

SEQ ID NO: 6942 - protein, 229 aa, Streptococcus agalactiae
MDVLIIEDDPMVEFIHRNYLEKLNYFQNIYSTASQTQAIAYLNDIKIQLVLLDIHIKEGNGLELLKLLRNQHQNTEVIVISAANEAHTVKEAFHLGIVDYLIKPFTFERFESSIEKFLNHYHTFEADKIYQDNIDHFQKIDSGWLEGEVKLDEKGLSEITYQHILDAIQELEQPFTIQELAKCSQFSHVSVRKYIAYMEEKGLLTSQQIYTKVGRPYKVYKLIKKNLGL

SEQ ID NO: 6943 - DNA, 663 bp, Streptococcus pyogenes
atgaacgttttaatcattgaagatgatcctatggtggattttatccatcgcaattacctcgaaaaactaaatctttttgatcgcattatatccagcgactctatgaaagctgttcaaagcatacttactgattacgcaattgacctcattttactggatattcatattacagatggcaatgggattcaatttttggagaaatggcgtactcagcatattccttgcgaagtcattattatttcagccgcaaatgatgggaatattatccgagatggttttcatttaggaattatcgactacctcatcaagccctttacctttgaacgctttcaagaaagcatccaacagtttgttacacatcgagaacatttggccaatcagcaactagagcaggcccaaattgaccaactgaaatgtttgactagcaaaaaagacactaaaaacaaacaattgttagaaaaaggcttatctgaatccactttccagtggattatggaaaatatcaaagtctttgatcaaccttttactatccaagaattagcttccgcttgtcacttatcccatgtctctgtccgtaaatacattgcttatttagaagaaaataagcaactgaacagccaacaaatttttacaaaggttggccgcccctatcgcgtgtactgg

SEQ ID NO: 6944 - protein, 221 aa, Streptococcus pyogenes
MNVLIIEDDPMVDFIHRNYLEKLNLFDRIISSDSMKAVQSILTDYAIDLILLDIHITDGNGIQFLEKWRTQHIPCEVIIISAANDGNIIRDGFHLGIIDYLIKPFTFERFQESIQQFVTHREHLANQQLEQAQIDQLKCLTSKKDTKNKQLLEKGLSESTFQWIMENIKVFDQPFTIQELASACHLSHVSVRKYIAYLEENKQLNSQQIFTKVGRPYRVYW

SEQ ID NO: 6945 - DNA, 1530 bp, Streptococcus agalactiae
gtgctgatgaaaaaaaaactatctctttgggcatttctatcattgattttagtcactatgaccatttgtatattttctattttttattatgtcactatacatcagtcctatcgtatggtaagggtacaggaagaaaaaatcttaaaaaatactggttatgctttatcgagaaatccacaagttatacaaacactcaaagataatcactatgatcaaagtctccaaaaacaaatgttattccttagcaaaaaatcaaatttagactatattgtccttataaatttaaaagggatccgttttacccaccctgactccactaagattggtaaaccatttcaagggggtgatgaacaagctgtttttaagggaaaagctattatgtctactgcagaaggttctttaggaaaatctttacgatacttaattccagtatatgatcaccaaaaacaggttggggcaattgcagttggcttaaaattaacgacacttggagacttatctcaaagtagcataaaagagtttagtaagcctctcttgattagtattttgattagcttagtcgtcacaagtataatttcttatggcttaaaaaaacaacttcacaacctccatccaagtgatatttttcaacatttagaagagcgcaatgcaacactggaccaaattcaagccgctgtatttgttattgaccagaggcatatcatcaaaagaaataatcctgcagctagtttattattcaaaaaagaggggcaacgagacctattttcaggtaaattattagaatctttaattcctcaactcaagcaggatcatttttcaaaaaaaactgaacaagtattacattttcaaggacaagactatttactatctatctcgccaattacggttaaaacacaaaatagaggctatgttgtcttcttaaggaatgttactgaaacacttttcactttggatcaattagcacacactacagcttatgcttctgcgctacaggcccaaacacatcaatttatgaatcaacttcatgttatttatggacttgcagacattgaatactacgacgagttgaaaatttatttaaaagaattattggagccacaaaatgaatttttagcacgcttatcaatgttagttagagagcctcgactggctagtttcattattggcgaaagagaaaaattcgcagaaaaacacatcaatctatccacagaaattttagtagaaatccctaccaagtcaactgttgaggatgttaataactatctcttgctccacagatatattaatacgaagatactcacgctattaaattcaacgactttagtttctttacgtttaaattatcaaaataacctcattgaaacagattatcaatgggagaatgagaagtggttactcaatgactaccatcagtatttcaacgacgcttattttcaacagttacttgtagattcaagagctacttataagatctctttaaaacaaaataaggttattataagaacaaatattatctactcagaagggcct

SEQ ID NO: 6946 - protein, 510 aa, Streptococcus agalactiae
MLMKKKLSLWAFLSLILVTMTICIFSIFYYVTIHQSYRMVRVQEEKILKNTGYALSRNPQVIQTLKDNHYDQSLQKQMLFLSKKSNLDYIVLINLKGIRFTHPDSTKIGKPFQGGDEQAVFKGKAIMSTAEGSLGKSLRYLIPVYDHQKQVGAIAVGLKLTTLGDLSQSSIKEFSKPLLISILISLVVTSIISYGLKKQLHNLHPSDIFQHLEERNATLDQIQAAVFVIDQRHIIKRNNPAASLLFKKEGQRDLFSGKLLESLIPQLKQDHFSKKTEQVLHFQGQDYLLSISPITVKTQNRGYVVFLRNVTETLFTLDQLAHTTAYASALQAQTHQFMNQLHVIYGLADIEYYDELKIYLKELLEPQNEFLARLSMLVREPRLASFIIGEREKFAEKHINLSTEILVEIPTKSTVEDVNNYLLLHRYINTKILTLLNSTTLVSLRLNYQNNLIETDYQWENEKWLLNDYHQYFNDAYFQQLLVDSRATYKISLKQNKVIIRTNIIYSEGP

SEQ ID NO: 6947 - DNA, 1539 bp, Streptococcus pyogenes
atgaaaaaaccactacgtttatgggccagtttatcgttgattttggtatctatgattgttgtcacaacctctctattttacgggattatgctacatgatacgcaccaatccatcaaaaatcaggaaacccatttgctaacgtcaactggaaaaatgttagcaagtcatcaagcgattaaagaattactcctaaacaaccaaccaaatgctaaaacaacagcctataccaactccattgcctccatctataaccttgattatgtggtcgtgatgaacatgaaagggattcgactcacccatcctaacccgaaaaatatcggaaaaccttttcaaggaggtgatgaggaggctgttctagcaggaaaaaaggttatctctaccgccaagggcactttaggaaagtcacttcgctatctagtacctgtgtttgacggtgacaaacagattggtgctattgcggttggcattaaactaactaccctaaatgatgtggctttaacgtcaaaacgcaattataccctgtctttactcctttgtcttcttattagtttactggtcaccagttttatttcttttcgactcaagcgtcaactgcaccagttagaaccaagtgaaatttatcagctctttgaagagcgtaatgccatgttggatcaaatcgaagccgccgtatttgtggtagataaagctggtatcttacagctctgcaatcaggctggacaaaaattaattgctcggaaatgccagttgggaaaacctactggcaacagtttcaattacctctttcctgattttccaaaacttagtttgcaagaggggcatgaacaactctttcggtatggtgaggaagactacttgttagccatttcacccatctgtgtcaaaaacgatcaccgaggccatattattttcatgcgagaagcagttaaggctattgataccttggatcagctagcctataccactgcctatgcttctgctctacaagcccaaactcataaattcatgaatcaattgcatgttatttatggcttagtggatattgcttattatgaccaattgaaaatttatttagacagtattttggaacccgaaaatgaaattctcactagcttatctgtccttgttaaggagcctcttctagctagttttctcattggagagcaagagaaataccaagaattaaatgtccatctcaagattgatgttttaagcgagattcctcattctgccaccaagaatcaacttaataatggtttgatgatttaccgctttatccatactaatcttctaaccacactgagacccaaatcactcgttttgagtattcaacatgaccagaatcatttaatcagccattacaccttgacagacaattggattgatttggagcgggtacagcctatttttgacttaccttattttcaacagctcttgaccgatacaaattcccaattccatcaacatcaaaccgtaaccgagttacagttctcagtgacaacaccttatgtaggagggcaacatgaacgttttaatcat

SEQ ID NO: 6948 - protein, 513 aa, Streptococcus pyogenes
MKKPLRLWASLSLILVSMIVVTTSLFYGIMLHDTHQSIKNQETHLLTSTGKMLASHQAIKELLLNNQPNAKTTAYTNSIASIYNLDYVVVMNMKGIRLTHPNPKNIGKPFQGGDEEAVLAGKKVISTAKGTLGKSLRYLVPVFDGDKQIGAIAVGIKLTTLNDVALTSKRNYTLSLLLCLLISLLVTSFISFRLKRQLHQLEPSEIYQLFEERNAMLDQIEAAVFVVDKAGILQLCNQAGQKLIARKCQLGKPTGNSFNYLFPDFPKLSLQEGHEQLFRYGEEDYLLAISPICVKNDHRGHIIFMREAVKAIDTLDQLAYTTAYASALQAQTHKFMNQLHVIYGLVDIAYYDQLKIYLDSILEPENEILTSLSVLVKEPLLASFLIGEQEKYQELNVHLKIDVLSEIPHSATKNQLNNGLMIYRFIHTNLLTTLRPKSLVLSIQHDQNHLISHYTLTDNWIDLERVQPIFDLPYFQQLLTDTNSQFHQHQTVTELQFSVTTPYVGGQHERFNH

SEQ ID NO: 6949 - DNA, 1335 bp, Streptococcus agalactiae
atggcagacgtgaaggtagtgaataatgaggattctagaggtcaaaagcaagacttaaaggctaaactatttcatattaagatagggtcagttcccctaccagtatatgtttgtttagcattattgattcttctagcaggctttttacaaaaattgccagtcaatatgctaggaggatttgcagttatcttaacaatggggtggttcttagggactatcggagctagcattcctggttttaaaaacttcggtggcccagctattttatctttattagtaccatctattttggtgtttttcaacctcattaataaaaatgttttagaatcaacaaatatgttgatgaagcaagctaactttctttatttttatattgcttgtttagtgtccggtagtattttagggatgaatcggaaaatgttgattcagggattgctaagaatgattttccccatgttattaggaatggtttgtgcgatgatggtagggacatttgtcggtgttattttaggcttagagtggcgacacactttgttttatatcgtaacacccgttttagctggtggtattggtgaaggtattttaccattatcgttaggctatagttcaattaccggtgtagctagtgaacaactagttgctcaactcatcccagccactattattggtaatttctttgccattttatgtactgcactattgaatcgtttgggagaaaagaaaccacacttgtctggtcaagggcaattagtaaggttaaataaaggagaggacatgtcagatattattgctgatcattctggcccaattgacgttaagaaaatgggtggaggtgttttaacagcatgtagtctctttatttttggacatttgttgcagcaattaactggatttcctggtcccgtattaatgattgttgcagcagctattttgaaatatattaatgttattcctagagaaacacaaaatggagctaagcaactttataaatttatttctggtaattttacatttcctctaatggcaggtctaggattgctttatatcccgttaaaagatgttgtggcaacgcttagcatacaatatttcatagttgttattagtgttgtatttacagttatttctgttggattctttgtatcgcgattccttaatatgaatcctgttgaagcaggtattatttcagcttgtcaaagtggtatgggaggaacaggagatgttgccattttaagtacagcagaccgaatgaacttgatgccatttgctcaagttgctacgcgtttaggaggagctattactgttatcacaatgacagccattttacgcatgttattc

SEQ ID NO: 6950 - protein, 445 aa, Streptococcus agalactiae
MADVKVVNNEDSRGQKQDLKAKLFHIKIGSVPLPVYVCLALLILLAGFLQKLPVNMLGGFAVILTMGWFLGTIGASIPGFKNFGGPAILSLLVPSILVFFNLINKNVLESTNMLMKQANFLYFYIACLVSGSILGMNRKMLIQGLLRMIFPMLLGMVCAMMVGTFVGVILGLEWRHTLFYIVTPVLAGGIGEGILPLSLGYSSITGVASEQLVAQLIPATIIGNFFAILCTALLNRLGEKKPHLSGQGQLVRLNKGEDMSDIIADHSGPIDVKKMGGGVLTACSLFIFGHLLQQLTGFPGPVLMIVAAAILKYINVIPRETQNGAKQLYKFISGNFTFPLMAGLGLLYIPLKDVVATLSIQYFIVVISVVFTVISVGFFVSRFLNMNPVEAGIISACQSGMGGTGDVAILSTADRMNLMPFAQVATRLGGAITVITMTAILRMLF

SEQ ID NO: 6951 - DNA, 1329 bp, Streptococcus pyogenes
atggaaacaataagcaagaaaatgcctcaaaaagacttgtctgagcattcaaaagcatggcaaaataggcgaataggctccgttcccttgcctgtttatctggttttagctaccttaattttagtcacaggctggctccaacaattgcctgttaatatgctgggtggctttgctgttattttaacccttggttggctactaggaaccattggagcgaccattccaggcctcaaacattttggtggcccagctattttatcactcttagtcccttcgattttggttttttttaatctcctcaatcccaatgtcttagaagcgacgaatgtcttgatgaagcaagccaattttctttatttttatattgcctgcctggtctgcggtagtattttaggcatgaatcgaaaaatcttgattcaaggtctttttcggatgattattcccatgttacttggaatggtttgtgcaatgggtgtagggactttggttggcgtcattttaggattagactggcaacataccctcttttatgttgtgacgccagtccttgctggaggaattggtgaaggtattttacccttatctcttggttacagtgccattacaggagtcggaagtgagcaattagtggctcaactgattccagccaccattattgggaatttctttgctatcttgtgcacggctttgctcaatcgttttggagagaagcacccaagttattctggtcaagggcaactggttaaaattggtcacagcgaagacatgtctgatgccctaaaagacaattctggagccctagatgttaaattaatgggggcaggcgttttaacagcttgttcactttttattgctggtggcttgttacagcatttaacagattttccaggaccggtgttgatgattattctggcagccttcttgaaatacctgaatgttattccccaagaaacccaaaatggtgccaagcaactttataaattcatttccagcaactttacttttccgttaatggcagggcttggtctactttatatccccttaaaagaggttgtggcaacccttagctggcaatattttattgtggtgattagtgtggtgttaacggttgtcagtgtcggtttttttgtctctcgtttccttaacatgagcccagtggaagcagctattatttcagcttgtcaaagtggtatgggtggaaccggtgatgtggctattttgagtacggctgaccgcatgaatctaatgccgtttgcccaagtcgctacccgtttaggtggggctattaccgttatcactatgacagctattttaagaattatttttagt

SEQ ID NO: 6952 - protein, 443 aa, Streptococcus pyogenes
METISKKMPQKDLSEHSKAWQNRRIGSVPLPVYLVLATLILVTGWLQQLPVNMLGGFAVILTLGWLLGTIGATIPGLKHFGGPAILSLLVPSILVFFNLLNPNVLEATNVLMKQANFLYFYIACLVCGSILGMNRKILIQGLFRMIIPMLLGMVCAMGVGTLVGVILGLDWQHTLFYVVTPVLAGGIGEGILPLSLGYSAITGVGSEQLVAQLIPATIIGNFFAILCTALLNRFGEKHPSYSGQGQLVKIGHSEDMSDALKDNSGALDVKLMGAGVLTACSLFIAGGLLQHLTDFPGPVLMIILAAFLKYLNVIPQETQNGAKQLYKFISSNFTFPLMAGLGLLYIPLKEVVATLSWQYFIVVISVVLTVVSVGFFVSRFLNMSPVEAAIISACQSGMGGTGDVAILSTADRMNLMPFAQVATRLGGAITVITMTAILRIIFS

SEQ ID NO: 6953 - DNA, 1161 bp, Streptococcus agalactiae
atgagtgaaaatttaggtcaattagctatcaaccaagctagagaaaatggtggaaaattagaagtaatttcaaaagttaaggtggaagataagagggatcttagtattgcctataccccaggggtggcgtcagtatcatcagctattgcagaggatgtggagcttgcatatgagttgacgactaaaaaaaatacagtagccgtagtgagtgatggttcagctgttcttggattaggagatattggtcctgaggcagcaatgccagtcatggaaggtaaagcagcactctttaaacgttttgcaaatgtagatgctgtgccaattgtgttgaaaacaaatgatacagaggaaattatttctatagtaaaagctatttcgccgacttttggagggattaatttagaggatatttcagcaccacgttgtttcgaaattgaacaacgcctaattgaagaatgtgatataccagttttccatgatgaccaacatggtacagcaatcgtagtattagcggctttgtttaacagtttgaagctagttaaaaaagacattgaagacatcagagtagttgttaatggtggaggttcagcgggcttatctataacaaggaagcttctatcagcaggagcaaaacatgtaacggtagttgatcgatttggcattattaacgataaagatcgggagtcattagcccctcatcacaaagcgattgcaaaattgactaatagagaattccaatctggatccttagaagatgctttggagaatgccgatgtttttataggtgtttctgctccggaagcattacatgcagaatggatttccaagatggctgataaacctattgtatttgcaatggcgaatcctattccagaaatttatccagatcaagccttaaaagccggagcttacatagttggaactggtcgtagtgattttccaaatcaaattaataatgttttagcatttccgggtattttcagaggagcattagatgctagagcaaaaacgataactgttgaaatgcaaattgcggcagcgagaggcatagctagtttaataccggaggaagaattaagcacaactcacatcattccaaatgcttttcaaaatgatgtggccgatgtagttgctaaaagcgtcagtaatgctgtacaaaaa

SEQ ID NO: 6954 - protein, 387 aa, Streptococcus agalactiae
MSENLGQLAINQARENGGKLEVISKVKVEDKRDLSIAYTPGVASVSSAIAEDVELAYELTTKKNTVAVVSDGSAVLGLGDIGPEAAMPVMEGKAALFKRFANVDAVPIVLKTNDTEEIISIVKAISPTFGGINLEDISAPRCFEIEQRLIEECDIPVFHDDQHGTAIVVLAALFNSLKLVKKDIEDIRVVVNGGGSAGLSITRKLLSAGAKHVTVVDRFGIINDKDRESLAPHHKAIAKLTNREFQSGSLEDALENADVFIGVSAPEALHAEWISKMADKPIVFAMANPIPEIYPDQALKAGAYIVGTGRSDFPNQINNVLAFPGIFRGALDARAKTITVEMQIAAARGIASLIPEEELSTTHIIPNAFQNDVADVVAKSVSNAVQK

SEQ ID NO: 6955 - DNA, 1164 bp, Streptococcus pyogenes
atgaaaaatcaattaggtcaacttgcccttgaacaagccaaaacgttcggcggtaaattggaagttcaaccaaaagttgacattaaaactaaacatgatttgagtattgcctacacaccaggtgtagcgagtgtgtcatctgccatcgcaaaagataaaacattagcatatgacttaaccaccaagaaaaatacagtagccgttatcagtgatggtactgcggttcttggtctgggggatattggccctgaagcagccatgccagttatggaaggaaaagcagccctttttaaagcatttgcgggtgttgatgctattccgattgtattagataccaaagatactgaagaaattattagtattgtcaaggcgcttgcaccaacctttggtggtattaatttagaggatattagtgcgccccgctgttttgaaattgagcagcgcttgattaaggaatgtcatattcctgttttccatgacgatcagcatggaacagctattgtggtgttagcagccatcttcaatagtttgaaacttcttaaaaaatcccttgatgaggtatccattgtggtgaatggtggtggatctgctggattatccattacccgtaaattattagcagcaggtgctacgaaagtgacagtagtggataaatttggcattatcaatgaacaagaagccgctcaattagcgccacatcatttggatatagcgaaagtcactaatcgtgagtttaaatcaggtaccttagaagatgctcttgaaggagcagatatcttcattggcgtatcagcaccaggagtcttaaaagcagagtggattagtaaaatggcagcgcgcccagtaatttttgccatggccaaccctattccagagatttaccctgatgaagcccttgaagcgggggcttacattgtaggtactggccgcagtgattttcctaaccagattaataatgtccttgcctttccaggtatttttaggggagcattagatgcacgggcaaaaaccattactgttgagatgcaaattgctgccgcaaaaggtattgccagtcttgtcccagatgacgctttgagcactactaatattattccagatgcctttaaagaaggagtcgctgagattgtcgctaaaagcgtcaggtcggtagtccttaaatca

SEQ ID NO: 6956 - protein, 388 aa, Streptococcus pyogenes
MKNQLGQLALEQAKTFGGKLEVQPKVDIKTKHDLSIAYTPGVASVSSAIAKDKTLAYDLTTKKNTVAVISDGTAVLGLGDIGPEAAMPVMEGKAALFKAFAGVDAIPIVLDTKDTEEIISIVKALAPTFGGINLEDISAPRCFEIEQRLIKECHIPVFHDDQHGTAIVVLAAIFNSLKLLKKSLDEVSIVVNGGGSAGLSITRKLLAAGATKVTVVDKFGIINEQEAAQLAPHHLDIAKVTNREFKSGTLEDALEGADIFIGVSAPGVLKAEWISKMAARPVIFAMANPIPEIYPDEALEAGAYIVGTGRSDFPNQINNVLAFPGIFRGALDARAKTITVEMQIAAAKGIASLVPDDALSTTNIIPDAFKEGVAEIVAKSVRSVVLKS

SEQ ID NO: 6957 - DNA, 342 bp, Streptococcus agalactiae
atgtattcttttgaagaacttttggcaaccatgactttgataacggctgccgaaattgaagataaaattgattcaaatcaagattttgtactgttcattggtcgtatttcttgtccattttgtcacctctttgttcctaaaattgtagaagtagctgatgaagatgaatttgaattattccatttagatagtgaagattttgatcattggactgcaaataaagaatttcgaaataaatatgacattcctacagtgccaggtttgatggttgttaaaaacggaactatcaaggtgaagtgcgattcaaaaatgacaaaagaagaaatccgtgaatttattggc

SEQ ID NO: 6958 - protein, 114 aa, Streptococcus agalactiae
MYSFEELLATMTLITAAEIEDKIDSNQDFVLFIGRISCPFCHLFVPKIVEVADEDEFELFHLDSEDFDHWTANKEFRNKYDIPTVPGLMVVKNGTIKVKCDSKMTKEEIREFIG

SEQ ID NO: 6959 - DNA, 372 bp, Streptococcus pyogenes
atgagaccaaaagagaaggagacatccatgacatttgaagaaatcgttgcgaattttataccgtcgagtgttgcagaagtcacatcagctatcgctagtggcaaagacatgattgtctttttaggacgttcgagctgtccttattgtcgccgctttgctcccaagttggcacaagtagcaacagataatcaaaaagaagtctattttgtggatagcgaaaacgctgctgatgctgctgagcttgctgcctttcgtgagaactaccaattagtgacagttccagctttgctggttagttacgatcagcaccaaagggctgtatgtgattcaagtttgacaccagatgacatcttagcttttttgactcgtgag

SEQ ID NO: 6960 - protein, 124 aa, Streptococcus pyogenes
MRPKEKETSMTFEEIVANFIPSSVAEVTSAIASGKDMIVFLGRSSCPYCRRFAPKLAQVATDNQKEVYFVDSENAADAAELAAFRENYQLVTVPALLVSYDQHQRAVCDSSLTPDDILAFLTRE

SEQ ID NO: 6961 - DNA, 297 bp, Streptococcus agalactiae
  misc_feature (1)..(297): n = a, c, g, or t
atgagcttacctattattatgcttgttgttatggttggtatgatgttcttcatgcaacgtcagcaaaagaaacaagcacaagaacgtcaaaaacaattgaatgctgttcaaaaaggtgatgaaattgtcacaattggtggtctttttggagtagttgatgaagttaatactgaagcacaacgaatggttttagatgttgatggtgtctatttgacgtttgagttggcagctatcaaatctgttgtctctaaggcagcaacaccaacagaaccagttgaagatgttaagattnnnnnt

SEQ ID NO: 6962 - protein, 99 aa, Streptococcus agalactiae
  MISC_FEATURE (1)..(99): Xaa = Any Amino Acid
MSLPIIMLVVMVGMMFFMQRQQKKQAQERQKQLNAVQKGDEIVTIGGLFGVVDEVNTEAQRMVLDVDGVYLTFELAAIKSVVSKAATPTEPVEDVKIXX

SEQ ID NO: 6963 - DNA, 363 bp, Streptococcus pyogenes
atgggatttccaccaattttaatgtttgtagtgatgcttggattgatttggtttatgcaacgtcaacaaaaaaaacaagcgcaagaacgccaaaatcagttaaacgctattgaaaaaggagacgaagtcgtaacgattggtggcatgtttgcgattgttgacgaagtcgatacaacagctaaaaagattgtgttagatgtggatggcgtctttttgacatttgagctattagctattaagcgtattgtaacaaaagctactacagaaacgacactggttgaaacagaagaaaccagtgttgttaatgagcctgctgttgagacagtagatagcactgacactgacagtgccattgaaagccat

SEQ ID NO: 6964 - protein, 121 aa, Streptococcus pyogenes
MGFPPILMFVVMLGLIWFMQRQQKKQAQERQNQLNAIEKGDEVVTIGGMFAIVDEVDTTAKKIVLDVDGVFLTFELLAIKRIVTKATTETTLVETEETSVVNEPAVETVDSTDTDSAIESH

SEQ ID NO: 6965 - DNA, 222 bp, Streptococcus agalactiae
gtggcgagaaaggaagggaagaaagcgaaaggagcgggcgctagggcgctggcaagtgtagcggtcacgctgcgcgtaaccaccacacccgccgcgcttaatgcgccgctacagggcgcgtccattcgccattcaggctgcgcaactgttgggaagggcgatcggtgcgggcctcttcgctattacgccagctggcgaaagggggatgtgctgcaaggcgat

SEQ ID NO: 6966 - protein, 74 aa, Streptococcus agalactiae
MARKEGKKAKGAGARALASVAVTLRVTTTPAALNAPLQGASIRHSGCATVGKGDRCGPLRYYASWRKGDVLQGD

SEQ ID NO: 6967 - DNA, 714 bp, Streptococcus agalactiae
ttgggcaacgcttggaaccggcgttatgccaacgaattagcccaagcactagaagcacgtggacaaaaattatattctgtagctaatagaacttacgacaaaggacttgaatttgctaccaaatatggtatccaaaaagtttatgatcacatagatcaagtatttgaagaccctgaagtggatatcatttatatctctactccccacaatactcacatctcatttttacgaaaggctttagcaaatggtaagcacgttctttgcgaaaaatctattactttaaacagcactgaacttaaagaagccatagatttagccgaaactaaccatgttgtcttagctgaagccatgactatttttcatatgccaatttatcgccaattaaaaacattagttgatagtggaaaattaggaccgttaaaaatgattcaaatgaatttcggaagttataaagaatatgatatgactaaccgttttttcagtcgtgacctagcaggcggtgctttgctggacattggtgtttatgcactttcttgtattcgctggtttatgtcagaagcacctcacaacattacctctcaagttacatttgcaccaacaggagttgatgaacaagttggtatcctactaaccaatcctgcaaatgagatggcgactgtcagccttagtttacatgcaaaacaacctaaacgaggccaaactattcgccttttt

SEQ ID NO: 6968 - protein, 238 aa, Streptococcus agalactiae
MGNAWNRRYANELAQALEARGQKLYSVANRTYDKGLEFATKYGIQKVYDHIDQVFEDPEVDIIYISTPHNTHISFLRKALANGKHVLCEKSITLNSTELKEAIDLAETNHVVLAEAMTIFHMPIYRQLKTLVDSGKLGPLKMIQMNFGSYKEYDMTNRFFSRDLAGGALLDIGVYALSCIRWFMSEAPHNITSQVTFAPTGVDEQVGILLTNPANEMATVSLSLHAKQPKRGQTIRLF

SEQ ID NO: 6969 - DNA, 774 bp, Streptococcus agalactiae
ttgtcgatccaacgtacagatgccgataagaatgatccagcaggtaaagatcagcaagtcaatgtaggtgagacaccgaaggcagaagattctattggtaacttaccagatcttccgaaaggtacaacagtagcctttgaaactccagttgatacggcaacaccgggagacaaaccagcaaaagttgttgtgacttacccagatggttcaaaagatactgtagatgtgactgttaaggttgtcgatccacgtacagatgccgataagaatgatccagcaggtaaagatcagcaagtcaatgtaggtgagacaccgaaggcagaagattctattggtaacttaccagatcttccgaaaggtacaacagtagcctttgaaactccagttgatacggcaacaccgggagacaaaccagcaaaagttgttgtgacttacccagatggttcaaaagatactgtagatgtgactgttaaggttgtcgatccacgtacagatgccgataagaatgatccagcaggtaaagatcagcaagtcaatgtaggtgagacaccgaaggcagaagattctattggtaacttaccagatcttccgaaaggtacaacagtagcctttgaaactccagttgatacggcaacaccgggagacaaaccagcaaaagttgttgtgacttacccagatggttcaaaagatactgtagatgtgactgttaaggttgtcgatccacgtacagatgccgataagaatgatccagcaggtaaagatcagcaagtcaag

SEQ ID NO: 6970 - protein, 258 aa, Streptococcus agalactiae
LSIQRTDADKNDPAGKDQQVNVGETPKAEDSIGNLPDLPKGTTVAFETPVDTATPGDKPAKVVVTYPDGSKDTVDVTVKVVDPRTDADKNDPAGKDQQVNVGETPKAEDSIGNLPDLPKGTTVAFETPVDTATPGDKPAKVVVTYPDGSKDTVDVTVKVVDPRTDADKNDPAGKDQQVNVGETPKAEDSIGNLPDLPKGTTVAFETPVDTATPGDKPAKVVVTYPDGSKDTVDVTVKVVDPRTDADKNDPAGKDQQVK

SEQ ID NO: 6971 - DNA, 702 bp, Streptococcus agalactiae
  misc_feature (1)..(702): n = a, c, g, or t
gtgacttacccagatggttcaaaagatactgtagatgtgactgttaaggttgtcgatccacgtacagatgccgataagaatgatccagcaggtaaagatcagcaagtcaatgtaggtgagacaccgaaggcagaagattctattggtaacttaccagatcttccgaaaggtacaacagtagcctttgaaactccagttgatacggcaacaccgggagacaaaccagcaaaagttgttgtgacttacccagatggttcaaaagatactgtagatgtgactgttaaggttgtcgatccacgtacagatgccgataagaatgatccagcaggtaaagatcagcaagtcaatgtaggtgagacaccgaaggcagaagattctattggtaacttaccagatcttccgaaaggtacaacagtagcctttgaaactccagttgatacggcaacaccgggagacaaaccagcaaaagttgttgtgacttacccagatggttcaaaagatactgtagatgtgactgttaaggttgtcgatccacgtacagatgccgataagaakkatccagcaggtaaagatcagcaagtcaatgtaggtgagacaccgaaggcagaagattctattggtaacttaccagatcttccgaaaggtacaacagtagcctttgaaactccagttgatacggcaacaccgggagacaaannnnnt

SEQ ID NO: 6972 - protein, 234 aa, Streptococcus agalactiae
  MISC_FEATURE (1)..(234): Xaa = Any Amino Acid
MTYPDGSKDTVDVTVKVVDPRTDADKNDPAGKDQQVNVGETPKAEDSIGNLPDLPKGTTVAFETPVDTATPGDKPAKVVVTYPDGSKDTVDVTVKVVDPRTDADKNDPAGKDQQVNVGETPKAEDSIGNLPDLPKGTTVAFETPVDTATPGDKPAKVVVTYPDGSKDTVDVTVKVVDPRTDADKXXPAGKDQQVNVGETPKAEDSIGNLPDLPKGTTVAFETPVDTATPGDKXX

SEQ ID NO: 6973 - DNA, 606 bp, Streptococcus agalactiae
atggagctaaacatgaccaaaaagatattcttatttatctgcgctactcttttagtaggaatagccttatatacaccaacaacttctatttttaatcataacaacgtttatgctgccaccaagaaagcaaaaattaaatttaataaaactcaaaaaaaaattgtcaaaaaagcaagagaatatgctaagtctggccatatgtctaaagatagtatcattgaaaaattaaaaaaggattctaagaaatatcgtcaagaagacatcaactttgtgattaataacctcaaggttgattacaaaaaaaatgccttgatttctgccaaaatttattcaaagaccatgaatttatctaaacaatctatctttgaacagctctattcggagtctccagataaggcaacccactctgataaatttacaaaagaagaatcccaatatgctatagaccatctcaaagtagatttcaaagaaaatgctcttgagactgctaaaagttatcaaagtagttcttctttatccaaagaagaaatctataaacaattgacatctacgctgggcgataaattcacaaatgatgaagcccaatatgctgtagatcatttgaaa

SEQ ID NO: 6974 - protein, 202 aa, Streptococcus agalactiae
MELNMTKKIFLFICATLLVGIALYTPTTSIFNHNNVYAATKKAKIKFNKTQKKIVKKAREYAKSGHMSKDSIIEKLKKDSKKYRQEDINFVINNLKVDYKKNALISAKIYSKTMNLSKQSIFEQLYSESPDKATHSDKFTKEESQYAIDHLKVDFKENALETAKSYQSSSSLSKEEIYKQLTSTLGDKFTNDEAQYAVDHLK

SEQ ID NO: 6975 - DNA, 288 bp, Streptococcus agalactiae
atgtctagaaaagtacgtcgtcacttcaccgatgattttaagcaacaaattgttgacctttacaatgttggtagaaagcgtagcagtctcatcaaggtatatgagctaaccccttccaccttcgataagtgggttagacaagccaaaacaactggttcattcaagtctattgataatctgacagatgaacagcgggagctaattgaactcagaaaacacaataaagaactcgaaatgcaattagatatcctaaagcaagcagcggtgattatggcacaaaaagggaaa

SEQ ID NO: 6976 - protein, 96 aa, Streptococcus agalactiae
MSRKVRRHFTDDFKQQIVDLYNVGRKRSSLIKVYELTPSTFDKWVRQAKTTGSFKSIDNLTDEQRELIELRKHNKELEMQLDILKQAAVIMAQKGK

SEQ ID NO: 6977 - DNA, 777 bp, Streptococcus agalactiae
atgtgtcgctggctgaatatgccacactcaagttattactatcaagccgtggagtcagtatctgaaacggagtttgaagaaactattaaaagaattttcctcgatagcgagtccagatacggatccagaaaaatcaaaatatgcttgaataacgaaggtatcacactttcacgtcgtcggattcgacgcattatgaagcgactcaatttggtttctgtttatcagaaagccaccttcaaaccacattctagaggcaagaatgaagcccctattcccaaccacttagacaggcaatttaagcaagaaagaccactacaggccttagtcactgacttaacctatgttcgwgtaggcaatcgttgggcttatgtttgcctcatcattgacctatacaaccgtgaaatcatcggcctgtctcttggttggcacaagaccgctgaactcgttaagcaagccatacaaagcatcccttacgccctgaccaaagtcaagatgttccattcagatcgtggcaaagagtttgataatcagttaattgatgaaatattggaagcctttggaatcacacgttcgcttagtcaggctggttgtccttatgacaatgccgtagctgaaagtacgtatcgtgctttcaaaattgaatttgtttatcaagaaacctttcaattgctggaagaactagctcttaagactaaagactatgttcattggtggaattaccaccgcattcatggtagtctcaactaccaaacaccaatgactaaaagattaattgcc

SEQ ID NO: 6978 - protein, 259 aa, Streptococcus agalactiae
MCRWLNMPHSSYYYQAVESVSETEFEETIKRIFLDSESRYGSRKIKICLNNEGITLSRRRIRRIMKRLNLVSVYQKATFKPHSRGKNEAPIPNHLDRQFKQERPLQALVTDLTYVRVGNRWAYVCLIIDLYNREIIGLSLGWHKTAELVKQAIQSIPYALTKVKMFHSDRGKEFDNQLIDEILEAFGITRSLSQAGCPYDNAVAESTYRAFKIEFVYQETFQLLEELALKTKDYVHWWNYHRIHGSLNYQTPMTKRLIA

SEQ ID NO: 6979 - DNA, 288 bp, Streptococcus agalactiae
atggttaaaaaagcatattcatgggaaactaagctggcttgcatcgatatgaagaaagcaggcaagtctaacagagttattatggagactttaggcatcaaaaataatagtcaaatctatacttggatgaaatggtacgaaaacgaggagctttatcgttttcatcaaggtgttggcaagcaatatacctacggtaaaggcttggaacatctgtctgaagtggaacaattacaattacaggttgacctcttaaaaaagtatcgaggcttgataaggaaatcgataaag

SEQ ID NO: 6980 - protein, 96 aa, Streptococcus agalactiae
MVKKAYSWETKLACIDMKKAGKSNRVIMETLGIKNNSQIYTWMKWYENEELYRFHQGVGKQYTYGKGLEHLSEVEQLQLQVDLLKKYRGLIRKSIK

SEQ ID NO: 6981 - DNA, 126 bp, Streptococcus agalactiae
gtggaagactataaaaacaactacccgatagttttcattctagactgttttaaggtcaagcggtcgacctattaccgttggaaaaaggagtatgagaagccgcaaaaaaagatgaccttattgaat

SEQ ID NO: 6982 - protein, 42 aa, Streptococcus agalactiae
MEDYKNNYPIVFILDCFKVKRSTYYRWKKEYEKPQKKMTLLN

SEQ ID NO: 6983 - DNA, 2466 bp, Streptococcus agalactiae
gtgaagaaaacatatggttatatcggctcagttgctgctattttactagctactcatattggaagttaccagcttggtaagcatcatatgggtctagcaacaaaggacaatcagattgcctatattgatgatagcaaaggtaaggtaaaagcccctaaaacaaacaaaacgatggatcaaatcagtgctgaagaaggcatctctgctgaacagatcgtagtcaaaattactgaccaaggttatgttacctcacacggtgaccattatcatttttacaatgggaaagttccttatgatgcgattattagtgaagagttgttgatgacggatcctaattaccattttaaacaatcagacgttatcaatgaaatcttagacggttacgttattaaagtcaatggcaactattatgtttacctcaagccaggtagtaagcgcaaaaacattcgaaccaaacaacaaattgctgagcaagtagccaaaggaactaaagaagctaaagaaaaaggtttagctcaagtggcccatctcagtaaagaagaagttgcggcagtcaatgaagcaaaaagacaaggacgctatactacagacgatggctatatttttagtccgacagatatcattgatgatttaggagatgcttatttagtacctcatggtaatcactatcattatattcctaaaaaagatttgtctccaagtgagctagctgctgcacaagcctactggagtcaaaaacaaggtcgaggtgctagaccgtctgattaccgcccgacaccagccccaggtcgtaggaaagccccaattcctgatgtgacgcctaaccctggacaaggtcatcagccagataacggtggttatcatccagcgcctcctaggccaaatgatgcgtcacaaaacaaacaccaaagagatgagtttaaaggaaaaacctttaaggaacttttagatcaactacaccgtcttgatttgaaataccgtcatgtggaagaagatgggttgatttttgaaccgactcaagtgatcaaatcaaacgcttttgggtatgtggtgcctcatggagatcattatcatattatcccaagaagtcagttatcacctcttgaaatggaattagcagatcgatacttagccggccaaactgatgacaacgactcaggttcagatcactcaaaaccatcagataaagaagtgacacatacctttcttggtcatcgcatcaaagcttacggaaaaggcttagatggtaaaccatatgatacgagtgatgcttatgtttttagtaaagaatccattcattcagtggataaatcaggagttacagctaaacacggagatcatttccattatataggatttggagaacttgaacaatatgagttggatgaggtcgctaactgggtgaaagcaaaaggtcaagctgatgagcttgttgctgctttggatcaggaacaaggcaaagaaaaaccactctttgacactaaaaaagtgagtcgcaaagtaacaaaagatggtaaagtgggctatattatgccaaaagatggcaaggactatttctatgctcgttatcaacttgatttgactcagattgcctttgccgaacaagaactaatgcttaaagataagaagcattaccgttatgacattgttgatacaggcattgagccacgacttgctgtagatttgtcaagtctgccgatgcatgctggtaatgctacttacgatactggaagttcgtttgttatcccacatattgatcatatccatgtcgttccgtattcatggttgacgcgcaatcagattgcaacaatcaagtatgtgatgcaacaccccgaagttcgtccggatgtatggtctaagccagggcatgaagagtcaggttcggtcattccaaatgttacgcctcttgataaacgtgctggtatgccaaactggcaaattatccattctgctgaagaagttcaaaaagccctagcagaaggtcgttttgcagcaccagacggctatattttcgatccacgagatgttttggcaaaagaaacttttgtatggaaagatggctcctttagcatcccaagagcagatggcagttcattgagaaccattaataaatctgatctatcccaagctgagtggcaacaagctcaagagttattggcaaagaaaaatgctggtgatgctactgatacggataaacctgaagaaaagcaacaggcagataagagcaatgaaaaccaacagccaagtgaagccagtaaagaagaaaaagaatcagatgactttatagacagtttaccagactatggtctagatagagcaaccctagaagatcatatcaatcaattagcacaaaaagctaatatcgatcctaagtatctcattttccaaccagaaggtgtccaattttataataaaaatggtgaattggtaacttatgatatcaagacacttcaacaaataaaccct

SEQ ID NO: 6984 - protein, 822 aa, Streptococcus agalactiae
MKKTYGYIGSVAAILLATHIGSYQLGKHHMGLATKDNQIAYIDDSKGKVKAPKTNKTMDQISAEEGISAEQIVVKITDQGYVTSHGDHYHFYNGKVPYDAIISEELLMTDPNYHFKQSDVINEILDGYVIKVNGNYYVYLKPGSKRKNIRTKQQIAEQVAKGTKEAKEKGLAQVAHLSKEEVAAVNEAKRQGRYTTDDGYIFSPTDIIDDLGDAYLVPHGNHYHYIPKKDLSPSELAAAQAYWSQKQGRGARPSDYRPTPAPGRRKAPIPDVTPNPGQGHQPDNGGYHPAPPRPNDASQNKHQRDEFKGKTFKELLDQLHRLDLKYRHVEEDGLIFEPTQVIKSNAFGYVVPHGDHYHIIPRSQLSPLEMELADRYLAGQTDDNDSGSDHSKPSDKEVTHTFLGHRIKAYGKGLDGKPYDTSDAYVFSKESIHSVDKSGVTAKHGDHFHYIGFGELEQYELDEVANWVKAKGQADELVAALDQEQGKEKPLFDTKKVSRKVTKDGKVGYIMPKDGKDYFYARYQLDLTQIAFAEQELMLKDKKHYRYDIVDTGIEPRLAVDLSSLPMHAGNATYDTGSSFVIPHIDHIHVVPYSWLTRNQIATIKYVMQHPEVRPDVWSKPGHEESGSVIPNVTPLDKRAGMPNWQIIHSAEEVQKALAEGRFAAPDGYIFDPRDVLAKETFVWKDGSFSIPRADGSSLRTINKSDLSQAEWQQAQELLAKKNAGDATDTDKPEEKQQADKSNENQQPSEASKEEKESDDFIDSLPDYGLDRATLEDHINQLAQKANIDPKYLIFQPEGVQFYNKNGELVTYDIKTLQQINP

SEQ ID NO: 6985 - DNA, 918 bp, Streptococcus agalactiae
atgaaaaaagttttttttctcatggctatggttgtgagtttagtaatgatagcagggtgtgataagtcagcaaaccccaaacagcctacgcaaggcatgtcagttgtaaccagcttttacccaatgtatgcgatgacaaaagaagtatctggagacctaaatgatgtgaggatgatccaatcaggtgcaggcattcattcctttgaaccgtctgtaaatgatgtggcagctatttatgacgcggatttgtttgtttaccattcacataccttagaagcttgggcaagggatctagaccctaatttaaaaaaatcaaaggttaatgtgtttgaagcgtcaaaacctctgacactagatagagtcaaagggctagaagatatggaagtcacacaaggcattgaccctgcgacactttatgacccacatacctggacggatcccgttttagctggtgaggaagctgttaatatcgctaaagagctaggacatttggatcctaaacacaaagacagttacactaaaaaggctaaggctttcaaaaaagaagcagagcaactaactgaagaatacactcaaaaatttaaaaaggtgcgctcaaaaacatttgtgacgcaacacacggcattttcttatctggctaaacgattcggcttgaaacaacttggtatctcgggtatttctccagagcaagagccctctcctcgccaattgaaagaaattcaagactttgttaaagaatacaacgtcaagactatttttgcagaagacaacgtcaaccccaaaattgctcatgctattgcgaaatcaacaggagctaaagtaaagacattaagtccacttgaagctgctccaagcggaaacaagacatatctagaaaatcttagagcaaatttggaagtgctctatcaacagttgaag

SEQ ID NO: 6986 - protein, 306 aa, Streptococcus agalactiae
MKKVFFLMAMVVSLVMIAGCDKSANPKQPTQGMSVVTSFYPMYAMTKEVSGDLNDVRMIQSGAGIHSFEPSVNDVAAIYDADLFVYHSHTLEAWARDLDPNLKKSKVNVFEASKPLTLDRVKGLEDMEVTQGIDPATLYDPHTWTDPVLAGEEAVNIAKELGHLDPKHKDSYTKKAKAFKKEAEQLTEEYTQKFKKVRSKTFVTQHTAFSYLAKRFGLKQLGISGISPEQEPSPRQLKEIQDFVKEYNVKTIFAEDNVNPKIAHAIAKSTGAKVKTLSPLEAAPSGNKTYLENLRANLEVLYQQLK

SEQ ID NO: 6987 - DNA, 963 bp, Streptococcus agalactiae
  misc_feature (1)..(963): n = a, c, g, or t
ttgaatctgtggaaacagctggcgcagaggtacaaaaaagggaatgccatcgaagaacgtaagattcacgcctttttccgtgatggtaatgtcactcgccctaatcaagaaatcaaaatgacttcgggtgcaggtggtgtctgtgttgccatcggtgaattagctgatggtcttgaaatcgatttggacaaggtgccacttaaataccaaggtcttaatggtactgaaattgctatctcagaatctcaagaaaggatgtcagttgttgttggtccaagtgatgtggatgccttcatcgcagcctgtaacaaggaaaatatcgatgcagttgttgttgcgacagttactgaaaaaccaaatcttgtcatgacttggaatggtgaaacaattgttgatttggaacgctgtttccttgataccaacggtgttcgtgtcgtagttgatgccaaagtcgttgacaaggacttaacagttccagaagcgcgcacaacatcagcagagacacttgaagcagatatgcttaaggtcttgtctgacctcaatcacgctagtcaaaaaggtcttcaaactatctttgactcatctgttggtcgttcaaccgttaaccacccaatcggtggtcgttaccaaatcacaccgacagaaagttctgttcaaaaattgccagttcaatatggtgtgacaacaacagcatctgttatggctcaaggttacaatccttatattgcagagtggtcaccttatcacggtgctgcctatgctgttattgaagcgacagctcgcttggtagcaacgggtgctgactggtctcgtgcacgtttctcttaccaagagtatttcgagcgtatggataaacaggcagagcgttttggtcagccagtatcagctcttcttggttctattgaggctcagattcaattttggtttgccatcaatcgggcggtaaggactctnnnnnttaat

SEQ ID NO: 6988 - protein, 321 aa, Streptococcus agalactiae
  MISC_FEATURE (1)..(321): Xaa = Any Amino Acid
MNLWKQLAQRYKKGNAIEERKIHAFFRDGNVTRPNQEIKMTSGAGGVCVAIGELADGLEIDLDKVPLKYQGLNGTEIAISESQERMSVVVGPSDVDAFIAACNKENIDAVVVATVTEKPNLVMTWNGETIVDLERCFLDTNGVRVVVDAKVVDKDLTVPEARTTSAETLEADMLKVLSDLNHASQKGLQTIFDSSVGRSTVNHPIGGRYQITPTESSVQKLPVQYGVTTTASVMAQGYNPYIAEWSPYHGAAYAVIEATARLVATGADWSRARFSYQEYFERMDKQAERFGQPVSALLGSIEAQIQFWFAINRAVRTLXXN

SEQ ID NO: 6989 - DNA, 279 bp, Streptococcus agalactiae
gtgcatggtaacgctcttgcatggtcatcagctggtgctcttggatttaaaggttctcgtaaatctactccatttgctgctcaaatggctgctgaagctgctgctaaatctgcacaagaacacggtcttaaaactgttgaagttactgtaaaaggtcctggttcaggtcgtgaatctgctatccgtgcccttgctgcagctggtcttgaagtaactgcaattcgtgatgtgactcctgtaccacataatggtgctcgtcctccaaaacgtcgtcgtgta

SEQ ID NO: 6990 - protein, 93 aa, Streptococcus agalactiae
MHGNALAWSSAGALGFKGSRKSTPFAAQMAAEAAAKSAQEHGLKTVEVTVKGPGSGRESAIRALAAAGLEVTAIRDVTPVPHNGARPPKRRRV

SEQ ID NO: 6991 - DNA, 381 bp, Streptococcus pyogenes
ttggctaaaccaacacgtaaacgtcgtgtgaaaaaggacatcgaatctggtgttgcacacattcacgctacatttaataacactattgttatgattacagatgtgcatggtaatgctcttgcatggtcatcagctggtgctcttggtttcaaaggttctcgtaaatctactccatttgctgctcaaatggctgcagaagctgctgcaaaatctgcacaagaacacggactaaaaactgttgaagtgactgtaaaaggtcctggttcaggtcgtgaatcagctattcgtgctctagcagctgcaggtcttgaagtaactgcaattcgtgatgtgacccctgtgccacataatggtgctcgtcctccaaaacgtcgtcgtgta

SEQ ID NO: 6992 - protein, 127 aa, Streptococcus pyogenes
LAKPTRKRRVKKDIESGVAHIHATFNNTIVMITDVHGNALAWSSAGALGFKGSRKSTPFAAQMAAEAAAKSAQEHGLKTVEVTVKGPGSGRESAIRALAAAGLEVTAIRDVTPVPHNGARPPKRRRV

SEQ ID NO: 6993 - DNA, 936 bp, Streptococcus agalactiae
atgattgagtttgaaaaaccaataataacaaaaattgatgaaaataaagattacggcagatttgtcatcgaaccactagaacgtggctacggtacaactctaggaaactctcttcgtcgtgtgcttctgtcttcacttccaggtgcagcagtcacatcaatcaaaattgatggagtattacacgaatttgatactatcccaggtgtacgtgaagatgtgatgcaaatcatccttaatgtaaaaggacttgctgtgaaatcttacgtcgaagacgaaaagattatcgaactagacgttgaaggtcctgcagaaattactgccggagatattttaacagatagtgatatcgaaattgtaaaccctgaccattatcttttcacaattgctgaaggtcacagtttgaaagcaacaatgacagttgctaaaaaccgaggttatgttccagcagaaggaaataaaaaagatgatgcaccagtgggaacattggctgtagattcaatctatacaccagtgaaaaaagttaattatcaagttgaacctgctcgtgtaggtagtaacgatggctttgataaattaactattgaaatcatgacaaatggcacaatcattcctgaggatgctcttggtctttcagctcgcgtcttaattgaacacttaaacttgtttactgatttaacagaggttgctaaagcaactgaagtaatgaaggaaacagagaaagtgaacgatgagaaagtgcttgaccggacaattgaggaacttgatttgtcagtgcgctcatataactgtttaaaacgtgctggaattaatacagtatttgatttaacagaaaaaactgagcctgaaatgatgaaagtccgaaacttaggacgtaagagtcttgaagaagttaaaatcaaacttgccgatctaggtcttggattaaaaaacgataaa

SEQ ID NO: 6994 - protein, 312 aa, Streptococcus agalactiae
MIEFEKPIITKIDENKDYGRFVIEPLERGYGTTLGNSLRRVLLSSLPGAAVTSIKIDGVLHEFDTIPGVREDVMQIILNVKGLAVKSYVEDEKIIELDVEGPAEITAGDILTDSDIEIVNPDHYLFTIAEGHSLKATMTVAKNRGYVPAEGNKKDDAPVGTLAVDSIYTPVKKVNYQVEPARVGSNDGFDKLTIEIMTNGTIIPEDALGLSARVLIEHLNLFTDLTEVAKATEVMKETEKVNDEKVLDRTIEELDLSVRSYNCLKRAGINTVFDLTEKTEPEMMKVRNLGRKSLEEVKIKLADLGLGLKNDK

SEQ ID NO: 6995 - DNA, 936 bp, Streptococcus pyogenes
atgattgagtttgaaaaaccaataataacaaaaattgatgaaaataaagattacggtagatttgtcatcgaaccacttgaacgtggctacggaacaactctaggtaattctcttcgtcgtgtactcttgtcttcacttccaggtgcagcagtaacatcaattaaaattgatggagtactacacgaatttgatacaatcccaggtgtacgtgaagatgtcatgcaaattatccttaatgttaagggacttgctgtgaaatcatacgtcgaagacgaaaagattatcgaacttgaagtagaaggaccagcagaggtaacagctggtgatattcttactgacagtgatatcgaacttgttaacccggatcattatctttttacaatcgctgaaggacattctctacgtgcaacaatgactgttgctaaaaaacgtggttatgtgccagcagaaggcaacaaaaaagatgatgcacctgtgggtacattggcagtagattcaatctatacgccagttaaaaaagttaattatcaagttgaacctgcccgtgtaggtagcaatgatggctttgataaattaacgattgaaatcatgacaaacggaacaattattcctgaagatgctttaggtctatctgctcgagttttgatcgaacacttaaacctgtttactgatttaacagaggttgcaaaagctaccgaagtaatgaaagaaactgaaaaagtgaacgatgaaaaggtacttgaccgcaccatcgaggagcttgatttatccgtacgctcatataactgtttaaaacgtgcaggcattaacactgtcttcgatttaacagaaaaatctgagcctgaaatgatgaaagtccgtaatcttggacgtaagagccttgaagaagttaaggttaaacttgctgacttaggtctcggactaaaaaacgataaa

SEQ ID NO: 6996 - protein, 312 aa, Streptococcus pyogenes
MIEFEKPIITKIDENKDYGRFVIEPLERGYGTTLGNSLRRVLLSSLPGAAVTSIKIDGVLHEFDTIPGVREDVMQIILNVKGLAVKSYVEDEKIIELEVEGPAEVTAGDILTDSDIELVNPDHYLFTIAEGHSLRATMTVAKKRGYVPAEGNKKDDAPVGTLAVDSIYTPVKKVNYQVEPARVGSNDGFDKLTIEIMTNGTIIPEDALGLSARVLIEHLNLFTDLTEVAKATEVMKETEKVNDEKVLDRTIEELDLSVRSYNCLKRAGINTVFDLTEKSEPEMMKVRNLGRKSLEEVKVKLADLGLGLKNDK

SEQ ID NO: 6997 - DNA, 384 bp, Streptococcus agalactiae
atggcttaccgtaaactaggacgcactagctcacaacgtaaggcaatgcttcgtgatttgacaaccgatcttcttatcaacgaatcaattgtaactactgaagcacgtgctaaagaaatccgtaaaacagttgaaaaaatgattactctaggtaaacgtggtgatttacatgctcgtcgtcaagctgctgcttatgtacgtaatgaaattgcatcagaaaactatgatgaagcttctgataaatatacatcaacaacagctcttcaaaaactttttgacgacatcgcacctcgttatgctgaacgtaacggaggatacactcgtattcttaaaacagaaccacgccgtggcgatgctgccccaatggcaattattgaattagta

SEQ ID NO: 6998 - protein, 128 aa, Streptococcus agalactiae
MAYRKLGRTSSQRKAMLRDLTTDLLINESIVTTEARAKEIRKTVEKMITLGKRGDLHARRQAAAYVRNEIASENYDEASDKYTSTTALQKLFDDIAPRYAERNGGYTRILKTEPRRGDAAPMAIIELV

SEQ ID NO: 6999 - DNA, 384 bp, Streptococcus pyogenes
atggcttaccgtaaactaggacgcactagctcacaacgtaaagcaatgcttcgtgatttgacgacagatcttttgatcaacgaatcaattgtaacgacagaagcacgtgcaaaagaaatccgtaaaacagttgaaaaaatgattactcttggtaaacgtggtgatcttcatgctcgtcgccaagcagctgcatacgttcgtaacgaaatcgcatcagaaaattatgatgaagctaccgataaatacacatcaacgacagctcttcaaaaacttttctcagaaattgcacctcgttatgcagaacgtaacggtggatacactcgtattcttaaaacagaaccacgccgtggagatgctgctccaatggcaattattgaattagtt

SEQ ID NO: 7000 - protein, 128 aa, Streptococcus pyogenes
MAYRKLGRTSSQRKAMLRDLTTDLLINESIVTTEARAKEIRKTVEKMITLGKRGDLHARRQAAAYVRNEIASENYDEATDKYTSTTALQKLFSEIAPRYAERNGGYTRILKTEPRRGDAAPMAIIELV

SEQ ID NO: 7001 - DNA, 126 bp, Streptococcus agalactiae
ttgcaacsggttggtttaacagaagaacaagcaaaagagaaagggtatgatgtgaagacatctgtattacctttagrtgctgttccaagagcaattgtaaaccgtgaacaaccggtgtatttaaac

SEQ ID NO: 7002 - protein, 42 aa, Streptococcus agalactiae
  MISC_FEATURE (1)..(42): Xaa = Any Amino Acid
MQXVGLTEEQAKEKGYDVKTSVLPLXAVPRAIVNREQPVYLN

SEQ ID NO: 7003 - DNA, 639 bp, Streptococcus agalactiae
ttgccccaaatttcaggacttgaaaaaatggactatttaactagtacaacacttcttgagttaaagaaaataccaaaacgattaactgtaattggttcaggatacattggaatggagcttggacaactatttcatcatttaggttcagaaataacgcttatgcaaagaagtgagcgacttttaaaggagtatgatcctgagatttcagagtcagttgaaaaagcgttaattgaacagggtataaaccttgtcaaaggggcaacttttgagcgtgttgaacaaagtggagagataaaaagggtttacgtaacagtaaatggcagtagagaagtcattgaatcagatcagttacttgttgccactggaagaaaaccaaatacggattctttaaatttaagtgcagcaggtgttgaaactggaaaaaataatgaaatcctgatcaatgattttggtcaaacaagtaatgaaaagatttatgcagcaggagatgtgactttaggaccacaatttgtatatgtagcagcctatgaaggtggaattattactgataatgctattggtggattaaacaaaaaaatagatttattcggtagttcctgctgttacgtttacgaatccgacggttgcaacsggttggtt

SEQ ID NO: 7004 - protein, 213 aa, Streptococcus agalactiae
  MISC_FEATURE (1)..(213): Xaa = Any Amino Acid
MPQISGLEKMDYLTSTTLLELKKIPKRLTVIGSGYIGMELGQLFHHLGSEITLMQRSERLLKEYDPEISESVEKALIEQGINLVKGATFERVEQSGEIKRVYVTVNGSREVIESDQLLVATGRKPNTDSLNLSAAGVETGKNNEILINDFGQTSNEKIYAAGDVTLGPQFVYVAAYEGGIITDNAIGGLNKKIDLFGSSCCYVYESDGCNXLV

SEQ ID NO: 7005 - DNA, 276 bp, Streptococcus agalactiae
ttggcgtgtcgttatcccacatggctcgcggggcgacggcggcaagcaattcggccatgtcggtggcggattctctcaggtctttttcaagcgtggcacgcagttgcgcctgctcttctttcaggcgcgtcgacagcccgacactcagacgctggcgggtactggcagacagggcgtcgaggctcgacgtcacttcgctactcgccagttcaagctccgaggacaggtgttgcgaatctatccccaggcgattggcaagatccgcctcaagcgccg

SEQ ID NO: 7006 - protein, 92 aa, Streptococcus agalactiae
MACRYPTWLAGRRRQAIRPCRWRILSGLFQAWHAVAPALLSGASTARHSDAGGYWQTGRRGSTSLRYSPVQAPRTGVANLSPGDWQDPPQAP

SEQ ID NO: 7007 - DNA, 174 bp, Streptococcus agalactiae
ttgccatggcagaatctgctccatgcgggacaagaaaatctcttttctggtctgacggcgcttactgctgaattcactgtcggcgaaggtaagttgatgactcatgatgaaccctgttctatggctccagatgacaaacatgatctcatatcagggacttgttcgcaccttccc

SEQ ID NO: 7008 - protein, 58 aa, Streptococcus agalactiae
MPWQNLLHAGQENLFSGLTALTAEFTVGEGKLMTHDEPCSMAPDDKHDLISGTCSHLP

SEQ ID NO: 7009 - DNA, 897 bp, Streptococcus agalactiae
atggagcagattctgccatggcaaaacatggtggaagtcatcgagccgttttaccccaaggctggtaatggccggcgaccttatccgctggaaaccatgctacgcattcactgcatgcagcattggtacaacctgagcgatggcgcgatggaagatgctctgtacgaaatcgcctccatgcgtctgtttgcccggttatccctggatagcgccttgccggaccgcaccaccatcatgaatttccgccacctgctggagcagcatcaactggcccgccaattgttcaagaccatcaatcgctggctggccgaagcaggcgtcatgatgactcaaggcaccttggtcgatgccaccatcattgaggcacccagctcgaccaagaacaaagagcagcaacgcgatccggagatgcatcagaccaagaaaggcaatcagtggcactttggcatgaaggcccacattggtgtcgatgccaagagtggcctgacccacagcctggtcaccaccgcggccaacgagcatgacctcaatcagctgrgtaatctgctgcatggagaggagcaatttgtctcagccgatgcckgctaccaaggggcgccacagcgcgaggagctggccgaggtggatgtggactggctgatcgccgagcgccccggcaaggtaagaaccttgaaacagcatccacgcaagaacaaaacggccatcaacatcgaatacatgaaagccagcatccgggccagggtggagcacccatttcgcatcatcaagcgacagttcggcttcgtgaaagccagatacaaggggttgctgaaaaacgataaccaactggcgatgttattcacgctggccaacctgtttcgggcggaccaaatgatacgtcagtgggagagatctcac

SEQ ID NO: 7010 - protein, 299 aa, Streptococcus agalactiae
  MISC_FEATURE (1)..(299): Xaa = Any Amino Acid
MEQILPWQNMVEVIEPFYPKAGNGRRPYPLETMLRIHCMQHWYNLSDGAMEDALYEIASMRLFARLSLDSALPDRTTIMNFRHLLEQHQLARQLFKTINRWLAEAGVMMTQGTLVDATIIEAPSSTKNKEQQRDPEMHQTKKGNQWHFGMKAHIGVDAKSGLTHSLVTTAANEHDLNQLXNLLHGEEQFVSADAXYQGAPQREELAEVDVDWLIAERPGKVRTLKQHPRKNKTAINIEYMKASIRARVEHPFRIIKRQFGFVKARYKGLLKNDNQLAMLFTLANLFRADQMIRQWERSH

SEQ ID NO: 7011 - DNA, 636 bp, Streptococcus agalactiae
  misc_feature (1)..(636): n = a, c, g, or t
atgaaattattctttgcactctgtgttgtaggaataattgtatttgcttataaaattttagtaagtcctacgactattcgtgttccagatgttagcaacaaaacagtagctcaagcaaaaatgacattggaaaattctggattgaaagtaggagctattcgtaatattgagagtgatagtgtttcagaaggacttgtcgtaaaaacagaccctgctgcaggacgttctcgcagagaaggggctaaagttaatctttatattgccactccaaacaagagtttcactctaggtaattataaggaacataattacaaagatatcctcaaagatcttcaaggcaaaggtgttaaaaaatctttaatcaaggttaagcgtaaaattaataatgattatactactggtacaatcttagcacagtcgcttccagaaggaacatcttttaatcctgatggtaataagaaattaacacttacggttgctgttaatgatccaatgattatgcctgatgtaacaggtatgactgttggagaagtaatagaaaccttgacagacctcggattagatgcagataatcttgtcttctatcaaatgcaaaatggcgtttatcaaacaggtagtaacannnnnttaattaat

SEQ ID NO: 7012 - protein, 212 aa, Streptococcus agalactiae
  MISC_FEATURE (1)..(212): Xaa = Any Amino Acid
MKLFFALCVVGIIVFAYKILVSPTTIRVPDVSNKTVAQAKMTLENSGLKVGAIRNIESDSVSEGLVVKTDPAAGRSRREGAKVNLYIATPNKSFTLGNYKEHNYKDILKDLQGKGVKKSLIKVKRKINNDYTTGTILAQSLPEGTSFNPDGNKKLTLTVAVNDPMIMPDVTGMTVGEVIETLTDLGLDADNLVFYQMQNGVYQTGSNXXLIN

SEQ ID NO: 7013 - DNA, 657 bp, Streptococcus agalactiae
ttggatattcatcaaggagaagtagtggttattattggcccttctggctctggtaagtcaacatttttaagaacaatgaatctcttggaagtaccaacaaagggaacagtgacttttgaagggattgatataacagacaaaaagaatgatatttttaaaatgcgcgaaaaaatgggcatggtttttcaacagttcaatctatttcccaatatgactgtactagaaaatattactttatcacctattaagacaaaggggctttctaatcttgatgctcagacaaaagcatatgagctacttgaaaaagttggactcaaagagaaggctaatacttatccagctagcttatctggaggacaacaacaacgaattgctattgcaagaggtcttgcaatgaatcctgatgtccttctttttgatgaacctacttcagctcttgatcctgaaatggtaggtgaagtcttgactgttatgcaagatttagctaaatctggtatgacgatggttattgtcactcatgaaatgggttttgcacgtgaagtagcggatcgtgtcatttttatggatgcaggaattattgttgagcaaggggcccctaaggaagtatttgagcagacaaaagaaatccgcacaagagatttcttaagtaaagtatta

SEQ ID NO: 7014 - protein, 219 aa, Streptococcus agalactiae
MDIHQGEVVVIIGPSGSGKSTFLRTMNLLEVPTKGTVTFEGIDITDKKNDIFKMREKMGMVFQQFNLFPNMTVLENITLSPIKTKGLSNLDAQTKAYELLEKVGLKEKANTYPASLSGGQQQRIAIARGLAMNPDVLLFDEPTSALDPEMVGEVLTVMQDLAKSGMTMVIVTHEMGFAREVADRVIFMDAGIIVEQGAPKEVFEQTKEIRTRDFLSKVL

SEQ ID NO: 7015 - DNA, 204 bp, Streptococcus agalactiae
ttgttgcaattaatgcaaggaaaaatagttgctgtcattcgtggaaatagccaagaagaagcttttcaagctgctcaagcatgcataaaaggtggtatttctgctatcgaaatcgcctatactaatagcaaagctagccaagtcattgaacaactagtcacacaatatactaaccaagaacaagttgtcgttatttccagatgc

SEQ ID NO: 7016 - protein, 68 aa, Streptococcus agalactiae
MLQLMQGKIVAVIRGNSQEEAFQAAQACIKGGISAIEIAYTNSKASQVIEQLVTQYTNQEQVVVISRC

SEQ ID NO: 7017 - DNA, 873 bp, Streptococcus agalactiae
  misc_feature (1)..(873): n = a, c, g, or t
gtgaattggatagtcgtcaatctggaaaattcgctacccctaatcaaccatcctattctgtcttkgttgtcagtagctggcattgaaacytggaaggagatggaagattttattgaaatgaatgaaccattgtttgcgacctacgttgatttgagtgaaggttgtccgtctcatgataccttagagcgtgtgattagtcttgttaattcagaccgtttaaaagagcttaaagttcaatttgagcaatcattgacaagcttagatgccgttcatcaactgatttcagtggacggtaaaacgattcgaggcaatcgaggtaaaaatcagaagcctgttcatattgtaacggcttatgatgggggtcatcatcttagtttgggacaggtagcggttgaggagaaaagtaatgaaattgttgccattcctcagttattgcggacaattgatatccgtaaaagcattgtaacgatagacgcaatgggcacgcagacggctatcgttgatacgattataaaaggtaaagcagactattgcttagccgtcaaaggaaatcaagaaacactttatgatgatattgctctttattttagtgatgtcaacttattggaagaactccaagaaaatgcgcagtattatcagactgttgaaaaatctaggggacagattgaagttagagaatactgggtgtcttccgatatcaaatggttgtgtcaaaaccatcccaaatggcataagttacgtggtattgggatgactcgtaacacgattgataaggatggtcagctgagtcaagagaatcgttattttatctttagctttaagccggatgtcctcacatttgccaatttgtacgaggtcannnnnttaattaat

SEQ ID NO: 7018 - protein, 291 aa, Streptococcus agalactiae
  MISC_FEATURE (1)..(291): Xaa = Any Amino Acid
MNWIVVNLENSLPLINHPILSXLSVAGIETWKEMEDFIEMNEPLFATYVDLSEGCPSHDTLERVISLVNSDRLKELKVQFEQSLTSLDAVHQLISVDGKTIRGNRGKNQKPVHIVTAYDGGHHLSLGQVAVEEKSNEIVAIPQLLRTIDIRKSIVTIDAMGTQTAIVDTIIKGKADYCLAVKGNQETLYDDIALYFSDVNLLEELQENAQYYQTVEKSRGQIEVREYWVSSDIKWLCQNHPKWHKLRGIGMTRNTIDKDGQLSQENRYFIFSFKPDVLTFANLYEVXXLIN

SEQ ID NO: 7019 - DNA, 615 bp, Streptococcus agalactiae
ttgaactttattgcctgtatttttattatttacgctataatggccattttttcaagagattttaacctttaccactttttacctgctttaccatttggtcttttgctaacgagtaataaaattactattctttaccaaaaagtgattgacagacgttcacatagacgtcagtatttctctggtaaatctcttatcgtagacctttttgtaaagaaaacatattatttgcccctcttactagtttccttatcgatagggttactagtttataatacttatcaaaatgttactcttagtaaagaaaggcgtgacatttcacattatttgactacaaaaattgatagagatggtaagatttatgtttgggacaaagttgctagcatttatagccagactcggttaaaatctgcttctcaatttgttttgccacatattaatacagcgcaaaaaaataatgagaaaattttgaaggacgagctgcttcagcatggggctaaatactttatcttaaataaaaatgagaagttaccaaatgaactgaaatctgatattaagaagcactaccaagaagttcctctatcaaatatcactcattttgttctatatcgtttcaaa

SEQ ID NO: 7020 - protein, 205 aa, Streptococcus agalactiae
MNFIACIFIIYAIMAIFSRDFNLYHFLPALPFGLLLTSNKITILYQKVIDRRSHRRQYFSGKSLIVDLFVKKTYYLPLLLVSLSIGLLVYNTYQNVTLSKERRDISHYLTTKIDRDGKIYVWDKVASIYSQTRLKSASQFVLPHINTAQKNNEKILKDELLQHGAKYFILNKNEKLPNELKSDIKKHYQEVPLSNITHFVLYRFK

SEQ ID NO: 7021 - DNA, 501 bp, Streptococcus agalactiae
atgccgggcaacagcccgcattatgggcgttggcctcaacacgattttacgtcacttaaaaaactcaggccgcagtcggtaacctcgcgcatacagccgggcagtgacgtcatcgtctgcgcggaaatggacgaacagtggggctatgtcggggctaaatcgcgccagcgctggctgttttacgcgtatgacagtctccggaagacggttgttgcgcacgtattcggtgaacgcactatggcgacgctggggcgtcttatgagcctgctgtcaccctttgacgtggtgatatggatgacggatggctggccgctgtatgaatcccgcctgaagggaaagctgcacgtaatcagcaagcgatatacgcagcgaattgagcggcataacctgaatctgaggcagcacctggcacggctgggacggaagtcgctgtcgttctcaaaatcggtggagctgcatgacaaagtcatcgggcattatctgaacataaaacactatcaa

SEQ ID NO: 7022 - protein, 167 aa, Streptococcus agalactiae
MPGNSPHYGRWPQHDFTSLKKLRPQSVTSRIQPGSDVIVCAEMDEQWGYVGAKSRQRWLFYAYDSLRKTVVAHVFGERTMATLGRLMSLLSPFDVVIWMTDGWPLYESRLKGKLHVISKRYTQRIERHNLNLRQHLARLGRKSLSFSKSVELHDKVIGHYLNIKHYQ

SEQ ID NO: 7023 - DNA, 108 bp, Streptococcus agalactiae
gtgcttttgccgttacgcaccaccccgtcagtagctgaacaggagggacagctgatagaaacagaagccactggagcacctcaaaaacaccatcatacactaaatcag

SEQ ID NO: 7024 - protein, 36 aa, Streptococcus agalactiae
MLLPLRTTPSVAEQEGQLIETEATGAPQKHHHTLNQ

SEQ ID NO: 7025 - DNA, 258 bp, Streptococcus agalactiae
  misc_feature (1)..(258): n = a, c, g, or t
ttggcagcatcacctatcgctggtaactggaaaatgaataaaaatccagaagaagcaaaagcattcatcgaagcagtagcttctaaattaccatcatcagaacttgttgaagcagggattgctgctccagcgcttactttatcaacagttcttgaagcagctaaaggttcagaattgaaaatcgctgctcaaaatagctattttgagaattcaggtgcattcactggtgaaaacagccctaaagtattnnnnnttaat

SEQ ID NO: 7026 - protein, 86 aa, Streptococcus agalactiae
  MISC_FEATURE (1)..(86): Xaa = Any Amino Acid
MAASPIAGNWKMNKNPEEAKAFIEAVASKLPSSELVEAGIAAPALTLSTVLEAAKGSELKIAAQNSYFENSGAFTGENSPKVXXXN

SEQ ID NO: 7027 - DNA, 354 bp, Streptococcus agalactiae
gtgtcaatttcatttgataactctttcttagagactgtctctgatgattcagcctttcaggcagatgtttaccttcaaatgaaacggattgcggctggtcaggtggagaatacctatctccatacagtgaatggctatgtcattagctcaaatacagttgtaacacatacacctcaacctgaagaaccaagtccaaatcaacccactccacctcaaccaccaattgagactattgaaccgcctgttccagcaagtattttgccaaatacaggggaacaggaatcccttttgggcttgattggagctggtattctacttggtacggcttatggactgaagaaaaaggaggagaag

SEQ ID NO: 7028 - protein, 118 aa, Streptococcus agalactiae
MSISFDNSFLETVSDDSAFQADVYLQMKRIAAGQVENTYLHTVNGYVISSNTVVTHTPQPEEPSPNQPTPPQPPIETIEPPVPASILPNTGEQESLLGLIGAGILLGTAYGLKKKEEK

SEQ ID NO: 7029 - DNA, 705 bp, Streptococcus agalactiae
  misc_feature (1)..(705): n = a, c, g, or t
ttgaaatttgaaggtcttgttgatcctgttattttaggtaaggctgacgaagttcacgattctttggcaagacttggttttgttgatcaagattatagcattattgaccctgaacaatacgaaaaatttgaagagatgaaagaagcttttgttgagattcgtaaaggcaaagctactatggaagatgcagatcgtcttttgaaggatgttaactattttggggttatgttagtaaaacttggtttggcagatggtatggtatcaggggccattcattcaacagctgatactgtacgtcctgctcttcaaattattaaaacaaaaccaggaatttcacgcacttcaggtgtattyttgatgaaccgtgaaaatacacaggaacgttatatttttgctgactgtgctattaacattgatcctaatgcacaagagctagcagaaattgcagtaaatactgcggatacagctaaaatatttgatattgatcccaagattgctatgcttagtttttcaacaaaaggaagtgcaaaagcgcctcaagctgaaaaagttcaagaagcagctaaaattgccaaagatttatctcccgaattagctgttgatggagaattacaatttgatgcagcttttgttccggaaactgcagaaattaaagctcctaatagtgatgttgctggaaagcaaatgtttttattnnnnnttaat

SEQ ID NO: 7030 - protein, 235 aa, Streptococcus agalactiae
  MISC_FEATURE (1)..(235): Xaa = Any Amino Acid
MKFEGLVDPVILGKADEVHDSLARLGFVDQDYSIIDPEQYEKFEEMKEAFVEIRKGKATMEDADRLLKDVNYFGVMLVKLGLADGMVSGAIHSTADTVRPALQIIKTKPGISRTSGVFLMNRENTQERYIFADCAINIDPNAQELAEIAVNTADTAKIFDIDPKIAMLSFSTKGSAKAPQAEKVQEAAKIAKDLSPELAVDGELQFDAAFVPETAEIKAPNSDVAGKQMFLXXXN

SEQ ID NO: 7031 - DNA, 993 bp, Streptococcus pyogenes
atgagtattcgtagtttattcggtggtttaagagaaaaaattcttggtaaaaacatgaagattgttttcccagaaggtaatgatgagcgcgtcgtccgtgcagctgctcgtttgaaatttgaaggactcttagaaccgattatccttggacagtcagaagaggtacgcaaccttttgacaaaattaggtttcgctgatcaagactatactatcattaatccaaatgaatatgcggattttgacaaaatgaaagaagcttttgttgaggtccgtaaaggaaaagcaacgcttgaagatgcagataaaatgcttcgtgatgttaattactttggtgttatgttggttaaaatgggattagcagatggaatggtatcaggggctattcattcaacagctgacactgttcgtccagctcttcaaatcatcaaaactaaaccaggtatctcaagaacttcaggtgtcttcttgatgaaccgcgaaaatacgagcgagcgttacgtgtttgctgattgtgctatcaatattgacccaacagcacaagaattggcagaaatcgctgttaacacagctgaaacagctaaaatctttgatattgatcctaaaattgctatgttaagcttctcaacaaaaggttctggtaaagcgcctcaagttgataaggtaagagaagcaacagaaattgctacagggttgaaccctgatttggcacttgatggcgagttgcaatttgatgcagcctttgttcctgaaacagcggctatcaaagcaccagattcagcggttgctggtcaagctaatactttcgttttccctgacttgcagtctggaaatattggttacaaaattgcacaacgtttaggaatgtttgatgctattggaccaatcttacaaggattgaacaaacctgttaatgatttatctcgtggctcaagcgctgaagatatttacaaactagccattattacagcagcacaagctattgaaagccaaggg

SEQ ID NO: 7032 - protein, 331 aa, Streptococcus pyogenes
MSIRSLFGGLREKILGKNMKIVFPEGNDERVVRAAARLKFEGLLEPIILGQSEEVRNLLTKLGFADQDYTIINPNEYADFDKMKEAFVEVRKGKATLEDADKMLRDVNYFGVMLVKMGLADGMVSGAIHSTADTVRPALQIIKTKPGISRTSGVFLMNRENTSERYVFADCAINIDPTAQELAEIAVNTAETAKIFDIDPKIAMLSFSTKGSGKAPQVDKVREATEIATGLNPDLALDGELQFDAAFVPETAAIKAPDSAVAGQANTFVFPDLQSGNIGYKIAQRLGMFDAIGPILQGLNKPVNDLSRGSSAEDIYKLAIITAAQAIESQG

SEQ ID NO: 7033 - DNA, 483 bp, Streptococcus agalactiae
atgaaagttttactgtatttagaggctgaagaatacttgaaaaagtcaggtatcggtcgtgctatcaaacatcaagagaaagctcttcaaattgctgggatagattataccactaatcctacagatgactttgaccttgttcatatgaatacctatggtattagaagttggcttttgatgagtaaagctaaaaaaactgggaaaaaagtaattatgcatggccattccactgaagaggactttagaaattcttttattggctcaaatttagtatccccgctttttaaatggtacctttgccgtttttatcaaaaagcagatgccattataaccccaactgattattctaaacaactaataaaagcatatggcatcaagaaaccaatttttgttttatctaacgggattgatctaagtcgctatcagargtcagaaaagaaagaatctgcatttcgtcactattttcacttaagtaaggatgat

SEQ ID NO: 7034 - protein, 161 aa, Streptococcus agalactiae
  MISC_FEATURE (1)..(161): Xaa = Any Amino Acid
MKVLLYLEAEEYLKKSGIGRAIKHQEKALQIAGIDYTTNPTDDFDLVHMNTYGIRSWLLMSKAKKTGKKVIMHGHSTEEDFRNSFIGSNLVSPLFKWYLCRFYQKADAIITPTDYSKQLIKAYGIKKPIFVLSNGIDLSRYQXSEKKESAFRHYFHLSKDD

SEQ ID NO: 7035 - DNA, 153 bp, Streptococcus agalactiae
atggaagtaggggaaatttatgcaggcaaaacgtttgttgattatttaggtaattgtgaacaagaggttgttataggagatgatggttggggtgattttttagttgaatctgcgtctatctcggcttgggttcctaaaatagaggaagctaac

SEQ ID NO: 7036 - protein, 51 aa, Streptococcus agalactiae
MEVGEIYAGKTFVDYLGNCEQEVVIGDDGWGDFLVESASISAWVPKIEEAN

SEQ ID NO: 7037 - DNA, 105 bp, Streptococcus agalactiae
atggaagctgaccaagtacgcggtctactttcagcagatatgcttaaacatgatattgcaatgaaaaaagcggttgacgttatcactagctcagctactgtaaaa

SEQ ID NO: 7038 - protein, 35 aa, Streptococcus agalactiae
MEADQVRGLLSADMLKHDIAMKKAVDVITSSATVK

SEQ ID NO: 7039 - DNA, 573 bp, Streptococcus agalactiae
ttggaattagaagtatttgctgggcaagaaaaaagtgaactttcgatgattgaagttgctcgcgctattttagagcaacgtggtcgtgataacgaaatgtacttcagcgatttggtaaatgatattcaaacctaccttggaaaatctgactcagcaatccgtgagtcattgccatttttctattcagatttgaatacagacggaagttttattccacttggcgaaaacaaatggggacttcgttcatggtatgctatcgatgaaattgacgaggaaatcatcactcttgaagaagatgaagatggcgctccaaaacgtaagaagaaacgtgtcaatgctttcatggatggtgatgaagatgctattgattacaatgatgatgatccagaagatgaagatttcacagaagaaacaccaagtttagaatatgatgaagaaaaccctgacgatgaaaaatcagaggtagaatcgtatgattctgagattaatgaaatcattcctgatgaagatttagatgaggatgtagaaatcaacgaagaagacgatgaagaggaagaagaggaagaagaggtt

SEQ ID NO: 7040 - protein, 191 aa, Streptococcus agalactiae
MELEVFAGQEKSELSMIEVARAILEQRGRDNEMYFSDLVNDIQTYLGKSDSAIRESLPFFYSDLNTDGSFIPLGENKWGLRSWYAIDEIDEEIITLEEDEDGAPKRKKKRVNAFMDGDEDAIDYNDDDPEDEDFTEETPSLEYDEENPDDEKSEVESYDSEINEIIPDEDLDEDVEINEEDDEEEEEEEEV

SEQ ID NO: 7041 - DNA, 606 bp, Streptococcus pyogenes
atggtagagaatgataaaataaggagaactgccttgaaattagacgtatttgcaggacaagaaaaaagcgagctttccatgattgaagtggcgcgtgccattttggaagaacgcggtcgcgacaatgagatgtactttagcgatttagtcaatgagattcaaaattacttaggaaaatctgatgcaggtattcgtcatgcattaccatttttctatactgacttaaatacggatggctcatttattcctctaggtgaaaacaaatggggacttcgttcgtggtatgctattgatgaaattgatgaagaaattattactctagaagaagatgaagatggcgcacaaaaacgtaagaaaaaacgcgttaatgctttcatggatggagatgaagacgctattgattatagagatgatgatccagaagatgaagatttcacagaagaatcagctgaggttgaatatgatgaagaagatccagatgatgaaaaatcagaagtggagtcatatgattcagaattgaatgaaattatccctgaagatgattttgaagaagttgatatcaatgaagaagacgaagaagatgaagaagatgaagaaccagttctc

SEQ ID NO: 7042 - protein, 202 aa, Streptococcus pyogenes
MVENDKIRRTALKLDVFAGQEKSELSMIEVARAILEERGRDNEMYFSDLVNEIQNYLGKSDAGIRHALPFFYTDLNTDGSFIPLGENKWGLRSWYAIDEIDEEIITLEEDEDGAQKRKKKRVNAFMDGDEDAIDYRDDDPEDEDFTEESAEVEYDEEDPDDEKSEVESYDSELNEIIPEDDFEEVDINEEDEEDEEDEEPVL

SEQ ID NO: 7043 - DNA, 1602 bp, Streptococcus agalactiae
atgacaaagtatatttttgttacaggtggtgtggtctcttctattggtaaggggattgttgcagcaagtcttgggcgcttactaaaaaaccgtgggctaaaggtgacaattcaaaaatttgatccatatattaatattgatccagggacaatgagcccttatcaacatggagaagtttatgttacagatgatggtgcagaaactgaccttgaccttggacactacgagcgttttattgatattaacttaaacaaatattcaaatgttacaacgggtaagatttatagtgaagttcttaaaaaagaacgccgtggagaataccttggtgcaactgttcaagttatcccacacgttacagatgctttgaaagaaaaaatcaaacgtgctgcgacaactacagattcagatgttattattactgaagttggcggtactgttggagatattgagagccttccgtttttagaagcacttcgtcaaatgaaggcagatgttggttctgataatgttatgtacattcatacaacgttattaccatacctaaaggctgccggcgaaatgaaaacaaaaccgactcaacattctgttaaagagttacgtggcctaggtatccaacctaatatgcttgttatccgtacagagcaaccagcaggtcaaagtattaagaataaattggcacaattttgtgatgttgcaccagaggctgttatagagtcccttgacgttgaccatatttatcaaattccacttaacatgcaagctcaaaatatggatcaaattgtttgtgatcacttgaagcttgagacacctgctgctgatatgacagaatggtcagcaatggttgataaagtaatgaaccttgagaaaaaagttaaaattgcattggttggtaaatatgttgaattacctgatgcctacctttcagttgtggaagcccttaagcactcagggtacgtcaacgatgttgctattgatctaaaatgggtaaatgctgctgaagtgacagaagataatattaaagaacttgtcggagatgcagatggtatcatcgttcctggtggatttggccaaagaggtagtgagggtaaaattgaagcaattcgctatgcacgtgaaaatgatgttccaatgcttggtgtttgtctcggaatgcagctaacttgtgtcgaatttgcgcgtaatgttttaaaccttcatggagctaattcagcagagcttgaccctaaaacaccgttcccaatcattgatatcatgcgtgatcaaatcgatattgaagatatgggtggtacacttcgccttggtctatatccatgtaaattgaaatcaggttcaagagctgcggcagcttataataatcaagaagttgtccaacgtcgtcaccgtcaccgttatgaatttaatacaaaattccgtgagcaatttgaggctgctggatttgtcttctcaggggtatcaccggataatcgtttgatggaagttgttgagttaccagagaaaaaattctttgttgcagcacaataccatccagaattacaatcacgtcctaaccatgctgaagagctttacacagcttttgtaaccgcagcagttgaaaatatgaaa

SEQ ID NO: 7044 - protein, 534 aa, Streptococcus agalactiae
MTKYIFVTGGVVSSIGKGIVAASLGRLLKNRGLKVTIQKFDPYINIDPGTMSPYQHGEVYVTDDGAETDLDLGHYERFIDINLNKYSNVTTGKIYSEVLKKERRGEYLGATVQVIPHVTDALKEKIKRAATTTDSDVIITEVGGTVGDIESLPFLEALRQMKADVGSDNVMYIHTTLLPYLKAAGEMKTKPTQHSVKELRGLGIQPNMLVIRTEQPAGQSIKNKLAQFCDVAPEAVIESLDVDHIYQIPLNMQAQNMDQIVCDHLKLETPAADMTEWSAMVDKVMNLEKKVKIALVGKYVELPDAYLSVVEALKHSGYVNDVAIDLKWVNAAEVTEDNIKELVGDADGIIVPGGFGQRGSEGKIEAIRYARENDVPMLGVCLGMQLTCVEFARNVLNLHGANSAELDPKTPFPIIDIMRDQIDIEDMGGTLRLGLYPCKLKSGSRAAAAYNNQEVVQRRHRHRYEFNTKFREQFEAAGFVFSGVSPDNRLMEVVELPEKKFFVAAQYHPELQSRPNHAEELYTAFVTAAVENMK

SEQ ID NO: 7045 - DNA, 1602 bp, Streptococcus pyogenes
atgacgaaatacatttttgtaactggtggtgttgtatcatcaattggcaaaggaattgttgcggcaagtcttggccgattgttaaaaaatcgtggacttaaggtgacgattcaaaaatttgatccttatattaatattgatccagggacgatgagcccctatcagcatggagaagtatatgtgacagatgacggtgctgaaaccgacttggatttgggtcactatgaacgttttattgatatcaatcttaataaatattccaatgttacaacaggtaaaatttatagtgaagtccttcgtaaagaacgtaaaggcgagtaccttggagcgactgttcaggtgattcctcatatcacagatgcccttaaagaaaaaatcaaacgcgcagcttcaacaacggactctgatgtaattattactgaggtcggggggactgttggcgatattgaaagtttaccgttcttagaagctcttcgtcagatgaaagctgatgttggttctgaaaatgtgatgtatattcacaccaccttgttgccatatttaaaggcagcgggtgaaatgaaaactaagccaacgcaacattccgttaaagaattgcgtggtttagggattcaaccgaatatgttggttattcgtacggaagagccagttgagcaggggattaaaaataaattggctcagttctgtgatgtgaattcagaagctgttatcgagtcacgtgatgtagaacacttgtatcaaattccattgaacttgcaagctcaatcaatggatcagattgtttgtgatcatttgaaattgaatgcgccacaagctgatatgaccgagtggtcagctatggttgacaaggtgatgaatttaagaaaaacaacaaaaattgccttggttggtaaatatgtggaattgccagatgcctacttatctgttgtggaagccttgaaacattctggttatgccaatgataccgcaattgacctaaaatgggtcaatgctaacgatgtgacggtggataatgcagctgacttgttgggagatgcggatgggattattgtaccaggtggttttggtcaacgtggtacagaaggcaagatccaagcgattcgctatgcccgcgaaaatgatgtgccaatgcttggtatttgtcttggcatgcagttgacttgtgttgaatttgcccgccatgtcctcaatatggaaggtgcaaactcttttgaattagagccaagtactaaataccccatcattgatatcatgcgtgatcaaattgatattgaagatatgggaggtacgcttcgtctgggattgtacccatgtaaattgaaaccaggttcaaaagcagcaatggcttacaataatcaagaggtggtgcaacgtcgtcatcgtcaccgttatgagttcaacaacaaattccgtccagaatttgaagcagctggttttgttttctcaggggtatcacctgacaaccgcttagttgaaattgtagaattgaaagagaaaaaattctttgtagcagctcaataccacccagaattgcaaagccgtccaaatcgtcctgaggagctatacaccgcttttgttacagctgctattaaaaatagcaat

SEQ ID NO: 7046 - protein, 534 aa, Streptococcus pyogenes
MTKYIFVTGGVVSSIGKGIVAASLGRLLKNRGLKVTIQKFDPYINIDPGTMSPYQHGEVYVTDDGAETDLDLGHYERFIDINLNKYSNVTTGKIYSEVLRKERKGEYLGATVQVIPHITDALKEKIKRAASTTDSDVIITEVGGTVGDIESLPFLEALRQMKADVGSENVMYIHTTLLPYLKAAGEMKTKPTQHSVKELRGLGIQPNMLVIRTEEPVEQGIKNKLAQFCDVNSEAVIESRDVEHLYQIPLNLQAQSMDQIVCDHLKLNAPQADMTEWSAMVDKVMNLRKTTKIALVGKYVELPDAYLSVVEALKHSGYANDTAIDLKWVNANDVTVDNAADLLGDADGIIVPGGFGQRGTEGKIQAIRYARENDVPMLGICLGMQLTCVEFARHVLNMEGANSFELEPSTKYPIIDIMRDQIDIEDMGGTLRLGLYPCKLKPGSKAAMAYNNQEVVQRRHRHRYEFNNKFRPEFEAAGFVFSGVSPDNRLVEIVELKEKKFFVAAQYHPELQSRPNRPEELYTAFVTAAIKNSN

SEQ ID NO: 7047 - DNA, 897 bp, Streptococcus agalactiae
  misc_feature (1)..(897): n = a, c, g, or t
atgaaaaagattcgattatcaaagtttattaaaatgattgttgttattttgtttttaattagtgtagcagctagtttttattttttccacgttgcccaagttcgagatgataaatcctttatttcaaatggtcaacgtaagcctggaaactctttatatgcttatgataaatcctttgataagctattaaagcaaaaaatagaaatgacaaaccaaaatataaagcaagttgcttggtatgttcctgctgttaagaaaactcataagacagctgttgtcgttcatggttttgcgaatagcaaagagaatatgaaggcatatggttggctgtttcataagttaggatacaatgttcttatgcctgacaatattgcacatggtgaaagtcatgggcagttgataggctatggctggaacgaccgcgagaacattatcaaatggacagaaatgatagttgataagaatccatcaagccaaattactttatttggtgtttcaatgggtggagcaacagtcatgatggctagtggtgaaaaattacctagtcaggttgttaatatcattgaagattgcggttattctagtgtttgggatgaattaaaatttcaggctaaagagatgtatggtttaccagccttcccactcttatatgaagtttcaacaatttctaaaatcagagcaggtttttcgtatggacaagcaagtagtgtcgaacaattgaaaaagaataatttaccagccctctttattcatggtgataaggataattttgttccaacaagtatggtttatgacaactataaagctacagcaggtaagaaagagctttatattgtaaaaggggcaaaacatgcgaaatcttttgaaacagagccagaaaaatnnnnnttaattaat

SEQ ID NO: 7048 - protein, 299 aa, Streptococcus agalactiae
  MISC_FEATURE (1)..(299): Xaa = Any Amino Acid
MKKIRLSKFIKMIVVILFLISVAASFYFFHVAQVRDDKSFISNGQRKPGNSLYAYDKSFDKLLKQKIEMTNQNIKQVAWYVPAVKKTHKTAVVVHGFANSKENMKAYGWLFHKLGYNVLMPDNIAHGESHGQLIGYGWNDRENIIKWTEMIVDKNPSSQITLFGVSMGGATVMMASGEKLPSQVVNIIEDCGYSSVWDELKFQAKEMYGLPAFPLLYEVSTISKIRAGFSYGQASSVEQLKKNNLPALFIHGDKDNFVPTSMVYDNYKATAGKKELYIVKGAKHAKSFETEPEKXXLIN

SEQ ID NO: 7049 - DNA, 924 bp, Streptococcus pyogenes
atgaaaactattcgaatagcaaagtatttaggaattctattccttttgataactcttattagcgtaggtgctagtttttatttctttcatgttgcacaaataagagaagagaaatcgtttattaataataagaaacggagtacaaataatccattatacccagctgaacagtcttttgacgctttaccttacgaaaaacgtcaactaacaaatcgtgggttaaaacaagtggggtggtacttaccagctgctcaaaaaacaaaaaagacagctattgttgttcatggttttacgaatgacaaagaagatatgaagccatatgccatgctttttcatgatttgggctataatgtcttaatgccagacaatgaggcccatggggaaagtgaagggaacttgattggttatggctggaatgaccgccttaatgtcatggcttggacagaccaactgattaaggaaaaccctgaaagccaaatcacactctttggcttatctatgggtgctgcaacagtaatgatggcaagtggtgagcgattgcctgcgcaagtcacctccctcatcgaagattgcggttatgccagtgtttgggacgaattgaagtttcaggccaaggctatgtacaacttgcctgcctttcctttactctatgaagtctctgccttatctaagattcgagcaggttttagttacggagaagcgagctcagtgaaacagctggctaaaaataaacgtccaactttatttatccacggtgataaggatgattttgttcctacaaaaatggtttatgacaattataaggccacgaaaggtcctaaggaaatcttgattgttaaaggggcaaaacacgccaaatcctttgaaacaaacccagaacaataccagaaaaaaattgccgcttttttgaaaaaagttgagaaa

SEQ ID NO: 7050 - protein, 308 aa, Streptococcus pyogenes
MKTIRIAKYLGILFLLITLISVGASFYFFHVAQIREEKSFINNKKRSTNNPLYPAEQSFDALPYEKRQLTNRGLKQVGWYLPAAQKTKKTAIVVHGFTNDKEDMKPYAMLFHDLGYNVLMPDNEAHGESEGNLIGYGWNDRLNVMAWTDQLIKENPESQITLFGLSMGAATVMMASGERLPAQVTSLIEDCGYASVWDELKFQAKAMYNLPAFPLLYEVSALSKIRAGFSYGEASSVKQLAKNKRPTLFIHGDKDDFVPTKMVYDNYKATKGPKEILIVKGAKHAKSFETNPEQYQKKIAAFLKKVEK

SEQ ID NO: 7051 - DNA, 912 bp, Streptococcus agalactiae
  misc_feature (1)..(912): n = a, c, g, or t
ttgattgataagttagaaatcgtcgaagtgcaaggacctattcttagtcaggtcggggatggtatgcaagataatttatctggtattgaacatcctgtatcggtgaaagtccttaatatacctgaagctgaatttgaagtcgttcactcattggctaaatggaaacgccatactttggcaagatttgggtttaatgagggagaaggtctttttgttcatatgaaagctcttcgtccagatgaagattctcttgatccaacacactcagtttacgtagatcagtgggactgggagaaggtcattcctgatggtagacgtaatttggactatctaaaagaaactgtggaaaaaatctacaaagctatccgcctaacagagcttgccgtggaagctcgttttgatattgaatccattttaccaaagcgtattacctttattcatacagaagaattggtagaaaaatacccagacttaagccctaaagagcgtgaaaatgccatcgctaaggagtatggcgcagtctttttgattggtattggtggagagttagcagatggtaaaccacatgatggtcgtgcaccggactatgatgactggacaacaccatcagaaaatggttttaaaggtctcaatggtgatattttagtgtggaacgaacagcttggaactgcctttgaactatcatcaatgggaattcgagttgatgaagatgctcttaaacgtcaagttgttctcaccggtgatgaagatcgtttagagtttgagtggcataagacgctattacgtggtttcttccctctgactattggtgggggaattggtcaatcacgattagctatgttcttgcttcgtaaaaamcatattggagaagtacagtcaagtgtctggccaaaagaagtcagagataccntt

SEQ ID NO: 7052 - protein, 304 aa, Streptococcus agalactiae
  MISC_FEATURE (1)..(304): Xaa = Any Amino Acid
MIDKLEIVEVQGPILSQVGDGMQDNLSGIEHPVSVKVLNIPEAEFEVVHSLAKWKRHTLARFGFNEGEGLFVHMKALRPDEDSLDPTHSVYVDQWDWEKVIPDGRRNLDYLKETVEKIYKAIRLTELAVEARFDIESILPKRITFIHTEELVEKYPDLSPKERENAIAKEYGAVFLIGIGGELADGKPHDGRAPDYDDWTTPSENGFKGLNGDILVWNEQLGTAFELSSMGIRVDEDALKRQVVLTGDEDRLEFEWHKTLLRGFFPLTIGGGIGQSRLAMFLLRKXHIGEVQSSVWPKEVRDTX

SEQ ID NO: 7053 - DNA, 990 bp, Streptococcus pyogenes
atgaagaaaagttttattcatcaacaagaggagatttcctttgttaagaatacgttcactcagtatttgattgctaagttagatgttgttgaagtgcaaggacccattttaagtcgggtcggggacggtatgcaagataatttgtccggtactgaaaatccagtatctgtcaatgtcttgaaaattcctaatgcaacctttgaagttgtgcattcattagcaaaatggaaacgtcacaccttagcccgttttgggtttaatgaaggtgaaggccttgttgttaatatgaaggctctccgacctgatgaggattcacttgaccaaacccattctgtctatgttgaccaatgggactgggaaaaagtcatccctgatggcaaacgtaatctcgcttacctcaaagaaaccgttgaaaccatttacaaggtcattcggttaactgaattagctgtagaagctcgttatgatattgaggctgttttacctaagaaaataaccttcattcataccgaagaattggtagctaaataccctgatttgacgcccaaagaacgtgaaaatgccattactaaagaatttggagcagtctttttaattggtattggcggggttttacctgacggtaaaccacacgatggccgcgctcctgactatgatgactggacaacagaaactgaaaatggctatcatgggcttaatggtgatattttggtttggaatgaccaacttggttcagcctttgaattatcctcaatggggatccgtgtggatgaagaggccctaaaacgtcaggtggaaatgactggtgaccaagaccgcttaggctttgattggcacaaatctttgttgaatggacttttccctctaacgattggtggaggaatcggtcaatcacgtatggtcatgtttttgttgcgtaaacaacatattggagaagttcagacctccgtttggccccaagaagttcgtgatagctacgataatatttta

SEQ ID NO: 7054 - protein, 330 aa, Streptococcus pyogenes
MKKSFIHQQEEISFVKNTFTQYLIAKLDVVEVQGPILSRVGDGMQDNLSGTENPVSVNVLKIPNATFEVVHSLAKWKRHTLARFGFNEGEGLVVNMKALRPDEDSLDQTHSVYVDQWDWEKVIPDGKRNLAYLKETVETIYKVIRLTELAVEARYDIEAVLPKKITFIHTEELVAKYPDLTPKERENAITKEFGAVFLIGIGGVLPDGKPHDGRAPDYDDWTTETENGYHGLNGDILVWNDQLGSAFELSSMGIRVDEEALKRQVEMTGDQDRLGFDWHKSLLNGLFPLTIGGGIGQSRMVMFLLRKQHIGEVQTSVWPQEVRDSYDNIL

SEQ ID NO: 7055 - DNA, 99 bp, Streptococcus agalactiae
ttgaaaatatattataaaaaatcagccaagcagttttgtttggctgattttaacaataagtttatttttggcttaagaaagtttggatttgttgaggtg

SEQ ID NO: 7056 - protein, 33 aa, Streptococcus agalactiae
MKIYYKKSAKQFCLADFNNKFIFGLRKFGFVEV

SEQ ID NO: 7057 - DNA, 447 bp, Streptococcus agalactiae
atgattaaaaaactattattaactttaatagccatattatgccttacaacgctaaaatcaaacttaagtagcgctgacaccatgactatttctcaacaacaataccaacacatgataacaaatagtgacttaatcgccatcacagataaggcgttagtaagcaaaagtcaacaatctgaagcgactatttttataggacgtccaacttgccaatattgtagagctttcttaccaaaattattaaaatctcaagccacacttcattcaaaaatttactaccttgatagtcaaaaatacaaagggaaacgattgaagagttttttcaaaaagcatcatattaccactgttccaaatttagcacattatcaacaaggaaaaatgactaaatatcttgttcaaggaagccaagctacacctcaacaaatccaaactttcttaagccaaaaa

SEQ ID NO: 7058 - protein, 149 aa, Streptococcus agalactiae
MIKKLLLTLIAILCLTTLKSNLSSADTMTISQQQYQHMITNSDLIAITDKALVSKSQQSEATIFIGRPTCQYCRAFLPKLLKSQATLHSKIYYLDSQKYKGKRLKSFFKKHHITTVPNLAHYQQGKMTKYLVQGSQATPQQIQTFLSQK

SEQ ID NO: 7059 - DNA, 633 bp, Streptococcus agalactiae
gtggttatgagagtagtagcaggaacatttggagggcgtcctttaaaaacgcttgatggaaaaacaactcgtccaacaactgataaggttaaaggcgctatttttaatatgattggtcctttttttgaaggtggtcgtgttttagaccttttttctggcagtggtagcttagctattgaggcgatctcaaggggaatggaccaagctgtcctagttgaaaaagataggcgtgcgcaggtcgttattcaagaaaatattgcaatgactaagagtccggagcaatttcaattattaaaaatggaagccaaccgtgctttagaacaattaacgggacaatttgatttggtcttgttggacccgccatatgctaaggaagaaattgtaaagcaaatccaaatcatggatagcaagggtttattaggcgatgatatcatgattgcttgtgaaacggacaaatcagttgatttacctgaagaaattgcttcttttgggatatggaaacagaaaatttatggcatttctaaagtaacgggtctacgttcgttaggagggctttggtatggattacaagttagtgatgattattctcatcttagtcatattgatttattttgttgttgcgccttcactatt

SEQ ID NO: 7060 - protein, 211 aa, Streptococcus agalactiae
MVMRVVAGTFGGRPLKTLDGKTTRPTTDKVKGAIFNMIGPFFEGGRVLDLFSGSGSLAIEAISRGMDQAVLVEKDRRAQVVIQENIAMTKSPEQFQLLKMEANRALEQLTGQFDLVLLDPPYAKEEIVKQIQIMDSKGLLGDDIMIACETDKSVDLPEEIASFGIWKQKIYGISKVTGLRSLGGLWYGLQVSDDYSHLSHIDLFCCCAFTI

SEQ ID NO: 7061 - DNA, 765 bp, Streptococcus agalactiae
atgctaaggcgtcatatttatagcatgctagaagaacatwatcatttgcagccagaaatcaaataccatcaaaaaacgaacttacgaaagaatcgtgtgtatactgtttttattgaagaaaaagttgatgttattcttgctgatttgaagttggctgatgctttttttggtattgaaactggtattgaacactctatattggacaatgatgaaaatggaagagcttatctcaggggagcattcttatcaacgggtactgttagagaacctgattctgggaaatatcaactagaaattttttctgtttatctagaccatgcacaagacttagctaatcttatgaaaaaatttatgttagatgcaaaggttattgaacataaacatggagcagtaacttatttgcaaaaagcagaagatattatggatttcttgatagtcattgatgccatggaagctagagatgcttttgaagagattaaaatgatacgtgagacacgtaatgatattaatcgtgctaacaacgttgaaacagctaatattgctagaacaatcacagctagtatgaagactatcaataatattatcaagattatggatactattggttttgatgcactgcctagtgatttaagacaagtagctcaggtgcgtgtggctcatccagattactctattcaacaaatagcagacagtttagaaacgcctctgagtaagagtggcgttaaccatcgcttacggaaaataaataaaattgcagatgaatta

SEQ ID NO: 7062 - protein, 255 aa, Streptococcus agalactiae
  MISC_FEATURE (1)..(255): Xaa = Any Amino Acid
MLRRHIYSMLEEHXHLQPEIKYHQKTNLRKNRVYTVFIEEKVDVILADLKLADAFFGIETGIEHSILDNDENGRAYLRGAFLSTGTVREPDSGKYQLEIFSVYLDHAQDLANLMKKFMLDAKVIEHKHGAVTYLQKAEDIMDFLIVIDAMEARDAFEEIKMIRETRNDINRANNVETANIARTITASMKTINNIIKIMDTIGFDALPSDLRQVAQVRVAHPDYSIQQIADSLETPLSKSGVNHRLRKINKIADEL

SEQ ID NO: 7063 - DNA, 93 bp, Streptococcus agalactiae
gtgttagggccctttccggggcttagtgccgcagctaacgcattaagcactccgcctggggagtacgaccgcawggttgaaactcaaaggaat

SEQ ID NO: 7064 - protein, 31 aa, Streptococcus agalactiae
  MISC_FEATURE (1)..(31): Xaa = Any Amino Acid
MLGPFPGLSAAANALSTPPGEYDRXVETQRN

SEQ ID NO: 7065 - DNA, 618 bp, Streptococcus agalactiae
  misc_feature (1)..(618): n = a, c, g, or t
gtgaggataaaaatggataaaataaaaattgtacttgttgatgaccatgagatggttcgtctcggtttaaaaagttttttaaacttacaagctgatgttgaagtaataggtgaggcctcaaatggtttagaaggcataaaaaaagcactggagttacgtccagacgttgttgttatggacttagtaatgcctgaaatggacggtgtagaagcaaccttagcattattgaaggattggccagaagctgccattttagtcttaacatcttacttggataatgaaaaaatttaccctgttattgaagcaggtgccaaaggctatatgttaaagacctcaagcgcagcagagattcttaatgccattcgtaaagtttcaaggggagaacaagctattgaaaatgaagtagataagaaaattaaggctcatgataaatgtccagctttacatgagggcttaacagcaagggaacgtgatatccttaatttattagccaaaggttatgacaatcaaaggattgctgatgaattatttatctcgttaaagactgttaaaactcatgtttctaatattttgggaaaactaaatggtagcagatcgaactcaagcagnnnnnttaat

SEQ ID NO: 7066 - protein, 206 aa, Streptococcus agalactiae
  MISC_FEATURE (1)..(206): Xaa = Any Amino Acid
MRIKMDKIKIVLVDDHEMVRLGLKSFLNLQADVEVIGEASNGLEGIKKALELRPDVVVMDLVMPEMDGVEATLALLKDWPEAAILVLTSYLDNEKIYPVIEAGAKGYMLKTSSAAEILNAIRKVSRGEQAIENEVDKKIKAHDKCPALHEGLTARERDILNLLAKGYDNQRIADELFISLKTVKTHVSNILGKLNGSRSNSSXXXN

SEQ ID NO: 7067 - DNA, 183 bp, Streptococcus agalactiae
atgattgataatggtattggatttgatatggattctgtctatgatttaagttatgggttaaaaaatattgaagatcgagtagaagatttagcaggaaatttacagcttctcagtcagcctggtaaaggagttgctatggatataagattacctttagtaaatcagagtgaggataaaaatgga

SEQ ID NO: 7068 - protein, 61 aa, Streptococcus agalactiae
MIDNGIGFDMDSVYDLSYGLKNIEDRVEDLAGNLQLLSQPGKGVAMDIRLPLVNQSEDKNG

SEQ ID NO: 7069 - DNA, 531 bp, Streptococcus agalactiae
  misc_feature (1)..(531): n = a, c, g, or t
ttgggacaggtagcggttgaggagaaaagtaatgaaattgttgccattcctcagttattgcggacaattgatatccgtaaaagcattgtaacgatagacgcaatgggcacgcagacggctatcgttgatacgattataaaaggtaaagcagactattgcttagccgtcaaaggaaatcaagaaacactttatgatgatattgctctttattttagtgatgtcaacttattggaagaactccaagaaaatgcgcagtattatcagactgttgaaaaatctaggggacagattgaagttagagaatactgggtgtcttccgatatcaaatggttgtgtcaaaatcatcccaaatggcataagttacgtggtattgggatgactcgtaacacgattgataaggatggtcagctgagtcaagagaatcgttattttatctttagctttaagccggatgtcctcacatttgccaattgtgtacgaggtcattggcagatagagagtatgcactggttactttccagnnnnnttaat

SEQ ID NO: 7070 - protein, 177 aa, Streptococcus agalactiae
  MISC_FEATURE (1)..(177): Xaa = Any Amino Acid
MGQVAVEEKSNEIVAIPQLLRTIDIRKSIVTIDAMGTQTAIVDTIIKGKADYCLAVKGNQETLYDDIALYFSDVNLLEELQENAQYYQTVEKSRGQIEVREYWVSSDIKWLCQNHPKWHKLRGIGMTRNTIDKDGQLSQENRYFIFSFKPDVLTFANCVRGHWQIESMHWLLSXXXN

SEQ ID NO: 7071 - DNA, 1140 bp, Streptococcus pyogenes
gtgactacgatgattgattttattatttctattgatgattgcgcagttgaattggatagtcgtcaatcttggaaaattcgctcccccttatcaaccattctatttcttgtcttcgtttgtcagttagctggcattgaaacctggaaggagatggaagattttattgaaatgaatgaaccattgtttgcgacctacgttgatttgagtgaaggttgctcgtctcatgataccttagagcgtgtgattagtcttgttaattcagaccgtttaaaagagcttaaagttcaatttgagcaatcattgacaagcttagatgccgttcatcaactgatttcagtggacggtaaaacgattcgaggcaatcgaggtaaaaatcagaagcctgttcatattgtaacggcttatgatgggggtcatcatcttagtttgggacaggtagcggttgaggagaaaagtaatgaaattgttgccatccctcagctattgcggacaattgatatccgtaaaagcattgtaacgatagacgcaatgggcacgcagacggctatcgttgatacgattataaaaggtaaagcagactattgcttagccgtcaaaggaaatcaagaaacactttatgatgatattgctctttattttagtgatgtcaacttattggaagaactccaagaaaatgcgcagtattatcagactgttgaaaaatctaggggacagattgaagttagagaatactgggtgtcttccgatatcaaatggttgtgtcaaaaccatcccaaatggcataagttacgtggtattgggatgactcgtaacacgattgataaggatggtcagctgagtcaagagaatcgttattttatctttagctttaagccggatgtcctcacatttgccaattgtgtacgaggtcattggcagatagagagtatgcactggttattggacgttgtttatcatgaagatcatcatcagacattggataaaagagccgcatttaacctaaatcttatccgaaaaatgtgcttatattttctcaaagtgatggtatttcctaaaaaagacctcagttatcgtcgcaaacaacggtatatttctgtccatttggaagattatttagtccaattatttggagaaagaggt

SEQ ID NO: 7072 - protein, 380 aa, Streptococcus pyogenes
VTTMIDFIISIDDCAVELDSRQSWKIRSPLSTILFLVFVCQLAGIETWKEMEDFIEMNEPLFATYVDLSEGCSSHDTLERVISLVNSDRLKELKVQFEQSLTSLDAVHQLISVDGKTIRGNRGKNQKPVHIVTAYDGGHHLSLGQVAVEEKSNEIVAIPQLLRTIDIRKSIVTIDAMGTQTAIVDTIIKGKADYCLAVKGNQETLYDDIALYFSDVNLLEELQENAQYYQTVEKSRGQIEVREYWVSSDIKWLCQNHPKWHKLRGIGMTRNTIDKDGQLSQENRYFIFSFKPDVLTFANCVRGHWQIESMHWLLDVVYHEDHHQTLDKRAAFNLNLIRKMCLYFLKVMVFPKKDLSYRRKQRYISVHLEDYLVQLFGERG

SEQ ID NO: 7073 - DNA, 528 bp, Streptococcus agalactiae
gtgaagatcatagctaaaaaagatctattcattaacgatgaaattcgcgttcgtgaagttcgtctggttggtctcgagggtgaacaattaggtattaaaccattgtctgaagctcaagcaattgcagatgatgctaatgttgatttagttttaattcagccacaagctacaccacctgttgcgaaaattatggactatggtaagttcaaatttgagtatcaaaagaaacaaaaagaacaacgtaaaaaacaaagcgttgttactgttaaggaagttcgtcttagcccagttattgataaaggggattttgaaacaaaacttcgtaacggtcgtaagttccttgaaaaaggtaacaaagttaaagtttctatccgattcaaaggacgtatgattactcataaagaaattggagcaaaggtattggcggaatttgctgaagcgacacaagatatcgctattattgagcaaagagctaagatggatggtcgccaaatgtttatgcagcttgcaccaattccagacaagaaa

SEQ ID NO: 7074 - protein, 176 aa, Streptococcus agalactiae
MKIIAKKDLFINDEIRVREVRLVGLEGEQLGIKPLSEAQAIADDANVDLVLIQPQATPPVAKIMDYGKFKFEYQKKQKEQRKKQSVVTVKEVRLSPVIDKGDFETKLRNGRKFLEKGNKVKVSIRFKGRMITHKEIGAKVLAEFAEATQDIAIIEQRAKMDGRQMFMQLAPIPDKK

SEQ ID NO: 7075 - DNA, 528 bp, Streptococcus pyogenes
gtgaagatcatagctaaaaaggatctattcattaatgatgaaattcgcgttcgcgaagttcgtctcgttggtcttgaaggtgaacaattaggtattaaaccattgtctgaagcgcaatcattggctgatgcttcaaatgttgatttggttttaatccagccacaagctgttcctcctgttgccaaacttatggactatggaaagttcaaatttgagtatcaaaagaaacagaaagaacaacgtaaaaaacaaagcgttgtgactgtgaaagaagttcgtctcagtccagttatcgataaaggtgactttgaaacaaaacttcgtaacggtcgtaaattccttgaaaaaggaaataaagttaaggtttctattcgtttcaaaggacgtatgattactcataaagagattggtgccaaggtactagctgactttgctgaagcgactcaagatattgctatcattgagcaacgagcaaaaatggatggacgccaaatgtttatgcaacttgcaccaatttcagacaagaag

SEQ ID NO: 7076 - protein, 176 aa, Streptococcus pyogenes
VKIIAKKDLFINDEIRVREVRLVGLEGEQLGIKPLSEAQSLADASNVDLVLIQPQAVPPVAKLMDYGKFKFEYQKKQKEQRKKQSVVTVKEVRLSPVIDKGDFETKLRNGRKFLEKGNKVKVSIRFKGRMITHKEIGAKVLADFAEATQDIAIIEQRAKMDGRQMFMQLAPISDKK

SEQ ID NO: 7077 - DNA, 894 bp, Streptococcus agalactiae
  misc_feature (1)..(894): n = a, c, g, or t
atggctgctaaagttgttaaagcgggcgttgaggaagtamctatccgatcagtatttacatgtaacactcgccatggtgtttgtcgtcactgttacggtattaacttggcaacaggtgatgctgttgaggttggtgaagcagttggtactattgcagctcaatctatcggtgaaccagggacacagcttacaatgcgtaccttccataccggtggtgttgcttcaaatactgatattacacaaggtctcccacgtatccaagaaatctttgaagcacgtaaccctaaaggtgaggcagttattactgaagttaagggtgaagtcgttgcaattgaagaagactcttcaacacgtactaagaaagtattcgttaaaggtcagacaggtgagggagaatacgttgttccatttacagcacgtatgaaagttgaagttggtgatgaagtagctcgtggtgcggccttaactgaaggatctatccaaccaaaacgtctccttgaagttcgtgatactttatctgttgaaacgtacctacttgctgaagtacaaaaagtttaccgtagccaaggggtagaaatcggagataaacacgttgaggtaatggttcgtcaaatgctccgtaaagttcgtgtcatggatccaggagatacagatcttcttccaggtacacttatggatatttcagactttacagatgctaacaaagatattgttatttctggtggaatccctgcgacaagccgtcctgtccttatgggtattactaaggcttcccttgaaactaattcattcttatcagctgcatccttccaagaaacaacacgtgtccttacagatgctgctatccgtggtaagaaaagaatcacttttttcccagcaannnnnttaattaat

SEQ ID NO: 7078 - protein, 298 aa, Streptococcus agalactiae
  MISC_FEATURE (1)..(298): Xaa = Any Amino Acid
MAAKVVKAGVEEVXIRSVFTCNTRHGVCRHCYGINLATGDAVEVGEAVGTIAAQSIGEPGTQLTMRTFHTGGVASNTDITQGLPRIQEIFEARNPKGEAVITEVKGEVVAIEEDSSTRTKKVFVKGQTGEGEYVVPFTARMKVEVGDEVARGAALTEGSIQPKRLLEVRDTLSVETYLLAEVQKVYRSQGVEIGDKHVEVMVRQMLRKVRVMDPGDTDLLPGTLMDISDFTDANKDIVISGGIPATSRPVLMGITKASLETNSFLSAASFQETTRVLTDAAIRGKKRITFFPAXXLIN

SEQ ID NO: 7079 - DNA, 93 bp, Streptococcus agalactiae
gtgacggtaactaaccagaaagggacggctaactacgtgccagcagccgcggtaatacgtaggtcccgagcgttgtccggatttattggggcg

SEQ ID NO: 7080 - protein, 31 aa, Streptococcus agalactiae
MTVTNQKGTANYVPAAAVIRRSRALSGFIGA

SEQ ID NO: 7081 - DNA, 252 bp, Streptococcus agalactiae
  misc_feature (1)..(252): n = a, c, g, or t
atgttagaagagtttggtgctaagcgcgttcgcgacacaccaatctcagaggctgcgattgcaggttcagctatcggtgctgcacaaacaggtttgcgtcctatcgttgatttgacattcatggattttgtaacaatcgcaatggatgctatcgttgatgattgtatcagagctaatgctgatttccactttaaaacgggactgaaaccaactatagaacgtatatcaacaggtaagtgctgnnnnnttaat

SEQ ID NO: 7082 - protein, 84 aa, Streptococcus agalactiae
  MISC_FEATURE (1)..(84): Xaa = Any Amino Acid
MLEEFGAKRVRDTPISEAAIAGSAIGAAQTGLRPIVDLTFMDFVTIAMDAIVDDCIRANADFHFKTGLKPTIERISTGKCXXXN

SEQ ID NO: 7083 - DNA, 417 bp, Streptococcus agalactiae
  misc_feature (1)..(417): n = a, c, g, or t
atggcagaatcaattaaagcaggaacgttatttaaaccagaactagtaacagaaattatgagtaaagtgaaaggtcactctacgcttgcgaaattatctggtcaaacaccaatcccgttcaacggagtagaacaatttgttttcaacttggatggtaatgctcagattgttggtgaaggtgagcaaaaattagggaataccgcaaaggtcacttctaaaattattaaaccgctgaagtttgtttatcaggcacgtatgactgacgaatttaagtacgcctcagaagaaaaacgattgaatttcttaaaacattatgctgacggttttgctaaaaaaatggcggaggcttttgatattgcagctattcatggccttgaacctcgcacaatgacagatgcctcatnnnnnttaattaat

SEQ ID NO: 7084 - protein, 139 aa, Streptococcus agalactiae
  MISC_FEATURE (1)..(139): Xaa = Any Amino Acid
MAESIKAGTLFKPELVTEIMSKVKGHSTLAKLSGQTPIPFNGVEQFVFNLDGNAQIVGEGEQKLGNTAKVTSKIIKPLKFVYQARMTDEFKYASEEKRLNFLKHYADGFAKKMAEAFDIAAIHGLEPRTMTDASXXLIN

SEQ ID NO: 7085 - DNA, 117 bp, Streptococcus agalactiae
gtgacttacccagatggttcaaaagatactgtagatgtgactgttaaggttgtcgatccacgtacagatgccgataagaatgatccagcaggtaaagatcagcaagtcaatggtagg

SEQ ID NO: 7086 - protein, 39 aa, Streptococcus agalactiae
MTYPDGSKDTVDVTVKVVDPRTDADKNDPAGKDQQVNGR

SEQ ID NO: 7087 - DNA, 486 bp, Streptococcus agalactiae
atggaagggatacgctatggttgcgaacaaggattatatggttggaatgtgacggattgtaaaatctgttttaagtatggcttatactatagccctgttagtaccccagcagattttcggatgcttgctcctattgtattggaacaagtcttaaaaaaagctggaacagaattgttagagccatatcttagttttaaaatttatgcgccacaggaatatctttcacgagcatacaacgatgctcctaaatattgtgcgaacatcgtagacactcaattgaaaaataatgaggtcattcttagtggagaaatccctgctcggtgtattcaagaatatcgtagtgatttaactttctttacaaatggacgtagtgtttgtttaacagagttaaaagggtaccatgttactaccggtgaacctgtttgccagccccgtcgtccaaatagtcggatagataaagtacgatatatgttcaataaaataact

SEQ ID NO: 7088 - protein, 162 aa, Streptococcus agalactiae
MEGIRYGCEQGLYGWNVTDCKICFKYGLYYSPVSTPADFRMLAPIVLEQVLKKAGTELLEPYLSFKIYAPQEYLSRAYNDAPKYCANIVDTQLKNNEVILSGEIPARCIQEYRSDLTFFTNGRSVCLTELKGYHVTTGEPVCQPRRPNSRIDKVRYMFNKIT

SEQ ID NO: 7089 - DNA, 702 bp, Streptococcus agalactiae
  misc_feature (1)..(702): n = a, c, g, or t
gtgacactagataaaaattctagtcaagctcagaaaaaagctggtttaatattgcaggaaaagattgaagataggctcgctatcagaaatcactcagaaatgacttacggagaacttaaaaaggaatatctaaagcaatggataccgaccgtcaaagactccacaaaacgtggttatttagtatctgacagtcatatagcaaccgtgttaccagatgatacaattatcaacaagttgactaaacgtgatattagactaatcattgataaactattaaaacacaattcgtatcatgttacgcataaatgtagaaagagattgcatgccatattttcttatgcgatacaaatggactatatgacaagtaatccgacggagaacgtcttagttcccaaaccaaaggatgattacaagcctgaaaaggtgctttatttaacatctaacgaggtttacgacctgtgcaatagaatgatagacaatgacgaacaaacgctcgcagacatcgttttattcatgtttttgacgggtgtacggtatggagaattatcttgtctgacttacgacaaaatagattttgaaaataaagaaattctgattaatgcaacttacgattttaacacacgaraaatcactacgaccaagaccaaaaaatcaacacgcaaaatatctgtatcagataatattttagatatcgtcnnnnnt

SEQ ID NO: 7090 - protein, 234 aa, Streptococcus agalactiae
  MISC_FEATURE (1)..(234): Xaa = Any Amino Acid
MTLDKNSSQAQKKAGLILQEKIEDRLAIRNHSEMTYGELKKEYLKQWIPTVKDSTKRGYLVSDSHIATVLPDDTIINKLTKRDIRLIIDKLLKHNSYHVTHKCRKRLHAIFSYAIQMDYMTSNPTENVLVPKPKDDYKPEKVLYLTSNEVYDLCNRMIDNDEQTLADIVLFMFLTGVRYGELSCLTYDKIDFENKEILINATYDFNTRXITTTKTKKSTRKISVSDNILDIVXX

SEQ ID NO: 7091 - DNA, 450 bp, Streptococcus agalactiae
ttgcccaagtatagtctgttcgaattagaaaatgggcgtcgtcgattacttgctagtgctggtgaattacaaaaaggtaatgagctagccttaccaacacaatttatgaagttcttataccttgcaagtcgttataatgagtcaaaaggtaaaccagaggagattgagaagaaacaagaatttgtaaatcaacatgtctcttattttgatgacatccttcaattaattaatgatttttcaaaacgagttattctagcagatgctaatttagagaaaatcaataagctttaccaagataataaggaaaatatatcagtagatgaacttgctaataatattatcaatctatttacttttaccagtctaggagctccagcagcttttaaattttttgataaaatagttgatagaaaacgctatacatccacgcaactttgtttattattcatg

SEQ ID NO: 7092 - protein, 150 aa, Streptococcus agalactiae
MPKYSLFELENGRRRLLASAGELQKGNELALPTQFMKFLYLASRYNESKGKPEEIEKKQEFVNQHVSYFDDILQLINDFSKRVILADANLEKINKLYQDNKENISVDELANNIINLFTFTSLGAPAAFKFFDKIVDRKRYTSTQLCLLFM

SEQ ID NO: 7093 - DNA, 771 bp, Streptococcus agalactiae
  misc_feature (1)..(771): n = a, c, g, or t
atggcgaggttgggggctgatttttattcaaagctagtcacggatttacaaaaagatggttttgaaacaaaattttatcagcaaactggtgttttcttattaaaaaaggacgagagtcagttagagtcattgtttgcactagcagataaacgtcgactagaatctcctctaataggtgatttacaaatactaaataaaagtgaagcaaatactcactttcctgagttagatggctatgaacagttactttatgcgagcggaggagcacgagtagaaggggcggacttaacacgaatattgttagaagcaagtggtgttaatgtcatcaaggatgaagttcactttacgataactgataatggctttcgtgttcaaggaattgattttgataaacttgttttagcgagtggagcctggctagctaagatattagatgagcacaactatcaggtagatgttcgccctcaaaaagggcaattgcgagactattattttagcaatattaatacaggaaaatatcctgttgtaatgccagaaggtgagctagatattatcccatttgataatggtaaagtctctgtaggtgcaagtcacgaaaatgatatggcttttgatttaaacattgattttaaagtcttagacaagtttgaagagcaagctattggctattttccgcaattaaaaaagcagatacgacttctgaaacgtgtggaattcgtgcctatacaagtgatttttctccattttttggccctgtccctnnnnnttaat

SEQ ID NO: 7094 - protein, 257 aa, Streptococcus agalactiae
  MISC_FEATURE (1)..(257): Xaa = Any Amino Acid
MARLGADFYSKLVTDLQKDGFETKFYQQTGVFLLKKDESQLESLFALADKRRLESPLIGDLQILNKSEANTHFPELDGYEQLLYASGGARVEGADLTRILLEASGVNVIKDEVHFTITDNGFRVQGIDFDKLVLASGAWLAKILDEHNYQVDVRPQKGQLRDYYFSNINTGKYPVVMPEGELDIIPFDNGKVSVGASHENDMAFDLNIDFKVLDKFEEQAIGYFPQLKKQIRLLKRVEFVPIQVIFLHFLALSLXXN

SEQ ID NO: 7095 - DNA, 783 bp, Streptococcus agalactiae
  misc_feature (1)..(783): n = a, c, g, or t
atgattatttttcaacaaattcttgataaaatcaaagagtacgacaccatcattatccatcgacatatgagaccagaccctgatgctcttggtagccaaatcggcttaagggatatcatcaggcataattttccaaagaaaaaagtacttgctactggttttgacgaacccactctcgcttggattgctaaaatggatcaagtgaccgaccaagactatcaaggcgctcttgttgttgttacagatacagcaaataccccacgcattgatgatgaacgttataaaaaaggtgactttttaattaaaattgaccatcatccaaacgatgaagtctatggagatctctcttatgtagatactaacgcctctagtgcaagtgaaattgtgacagactttgctctttcttgtgatttgttgttatcaacaagtgcagcaagagttctatataatggtattgtaggagatacaggacgctttttatatcctgctaccacaagtaaaacactgaagattgctagcaaacttcgtgaatttgactttgatttttctgcaatggcacgtcaaatggattcctttcctttcaaaattgcaaaattacaaggctttatttttgagcaacttaaaattgacaagaacggcgctgcatgcgttactttaacacaagaagacctaaaacgcttcgatgtaacagatgcagagactgctgcaatcgttggtgtacctggaaaaattgatattgtagaaagttgggcaattttcgttaaacaaagcgatgggnnnnnt

SEQ ID NO: 7096 - protein, 261 aa, Streptococcus agalactiae
  MISC_FEATURE (1)..(261): Xaa = Any Amino Acid
MIIFQQILDKIKEYDTIIIHRHMRPDPDALGSQIGLRDIIRHNFPKKKVLATGFDEPTLAWIAKMDQVTDQDYQGALVVVTDTANTPRIDDERYKKGDFLIKIDHHPNDEVYGDLSYVDTNASSASEIVTDFALSCDLLLSTSAARVLYNGIVGDTGRFLYPATTSKTLKIASKLREFDFDFSAMARQMDSFPFKIAKLQGFIFEQLKIDKNGAACVTLTQEDLKRFDVTDAETAAIVGVPGKIDIVESWAIFVKQSDGXX

SEQ ID NO: 7097 - DNA, 939 bp, Streptococcus pyogenes
atgataacaacttttgaaacaattttagataaaataaaagctcaccaaactattattatccatcgccatcaaaatcctgaccctgatgctcttggtagtcaggccggcttgaaagaaattattgcacaaaatttcccagacaaaaaggttttgatgactggttttgatgagcctagtttagcttggattagccaaatggatcaggtgactgacaaagactataaagaggctttggtcatcattacagatacagcgaatcgaccaaggattgatgatgagcgctacacactggggaagtgcttaattaagattgatcaccatcccaacgatgatgtgtatggtgacttctattatgtggacacaagcgcttctagcgcaagtgaaatcattgcagactttgcctttagtcagaatcttactctctctgacaaggctgctaagctcttatacaccggtatcgttggtgatacagggcgatttctttatgcctcaaccactagtaaaaccctttccattgctagccaactcagacatttcgagttcgactttgctgcgatttcaaggcaaatggattcgtttcctttgaaaatagcaaagctgcaaagctacgtctttgagcatttaacaattgatgagagtggggctgcttatgtccttgtcagccaagaaaccttaaaacattttgacgtgaccctagcagaaagctctgccattgtctgtgctcctggtaaaattgataacgttcaagcttgggctatttttgttgagttaactgacggcaactaccgtgtgcgtatgcgcagtaaagaaaagattattaatggcattgctaagcgtcacggtggaggggggcatccccttgctagcggagccaactcagctaatttagaagaaaatcaagctattttccgagaactcatcgctgtttgccaagagatt

SEQ ID NO: 7098 - protein, 313 aa, Streptococcus pyogenes
MITTFETILDKIKAHQTIIIHRHQNPDPDALGSQAGLKEIIAQNFPDKKVLMTGFDEPSLAWISQMDQVTDKDYKEALVIITDTANRPRIDDERYTLGKCLIKIDHHPNDDVYGDFYYVDTSASSASEIIADFAFSQNLTLSDKAAKLLYTGIVGDTGRFLYASTTSKTLSIASQLRHFEFDFAAISRQMDSFPLKIAKLQSYVFEHLTIDESGAAYVLVSQETLKHFDVTLAESSAIVCAPGKIDNVQAWAIFVELTDGNYRVRMRSKEKIINGIAKRHGGGGHPLASGANSANLEENQAIFRELIAVCQEI

SEQ ID NO: 7099 - DNA, 1020 bp, Streptococcus agalactiae
atgacacaagcagtattaaaagaattggctaaggcggagttgcattgtcatctagatggctcactttctttaccagctattagaaaattggctaatatggctgatataatactgccgagtagtgataaagaattaagaaaatatgttatagctccagctcaaacagaaagcttggtagattaccttaaaacgtttgagtttatcagaccgcttcttcaaacgaaggaagcattacgttttgctgcttatgatgttgctagacaggcagctttagaaaatgttatttatattgagattcgttttgcgccagaactctctatggataaaggtttaactgcaagtgatacagtccttgcagtcttagaaggtttagcagacgctcagaaagaatttaatatcgttgcacgcgcccttgtttgcggtatgcgccaatcgtctcataaaacgaccaaggacattattaaacacattgttgatttggctcccaaaggcctggtaggttttgattttgcaggtgatgaattttcctatccaacagatagtttagtagatcttattcaggaagtaaaacgctcaggttacccgatgactttacatgcaggtgagtgtggttgtgctaagcatattgcggatagtttaaatttagggattaagcgtatgggacatgtgacagctttaacaggacagagggatttaataaagcgatttgtcgaagaagatgctgtagcagagatgtgtttaactagcaatttacaaacaaaagcagcctcaagtattcaaagttttccttatcaagaactttatgatgctggaggtaagattacaattaatacagataatcgtactgtttccgatacaaatttgacgaaagaatatagtcttttcgtaacttattttggaacgaaaatagaagactttcttgttttcaatcaaaacgctgtgaaggcctcctttacaagtgattcagagaaagatactttactacataagctacaagaaaactatgacagctatctaaaa

SEQ ID NO: 7100 - protein, 340 aa, Streptococcus agalactiae
MTQAVLKELAKAELHCHLDGSLSLPAIRKLANMADIILPSSDKELRKYVIAPAQTESLVDYLKTFEFIRPLLQTKEALRFAAYDVARQAALENVIYIEIRFAPELSMDKGLTASDTVLAVLEGLADAQKEFNIVARALVCGMRQSSHKTTKDIIKHIVDLAPKGLVGFDFAGDEFSYPTDSLVDLIQEVKRSGYPMTLHAGECGCAKHIADSLNLGIKRMGHVTALTGQRDLIKRFVEEDAVAEMCLTSNLQTKAASSIQSFPYQELYDAGGKITINTDNRTVSDTNLTKEYSLFVTYFGTKIEDFLVFNQNAVKASFTSDSEKDTLLHKLQENYDSYLK

SEQ ID NO: 7101 - DNA, 453 bp, Streptococcus agalactiae
gtggaggaagatatggctttagcaaagattgtttatgctagcatgaccggaaatactgaagaaattgctgacattgttgctgataaattacgtgacttgggtctagatgttgaagtagaagagtgtacgatggttgatgctgcagattttgaagatgctgacattgcaattgttgccacttatacatatggtgatggagatttaccagatgaaatcgtggacttttatgaagatttagcagaggttgatttatctggtaaagtttacggcgtagtgggttcaggtgatactttctatgattacttctgcaaatctgttgatgagttcgaggctcaattcgcattaacaggagcacaaaaaggtgctgattgtgttaaagttgatttagcggcagaagacgaagacattgaaaacttagaagcttttgctgaagaaattgcttctaaacttaac

SEQ ID NO: 7102 - protein, 151 aa, Streptococcus agalactiae
MEEDMALAKIVYASMTGNTEEIADIVADKLRDLGLDVEVEECTMVDAADFEDADIAIVATYTYGDGDLPDEIVDFYEDLAEVDLSGKVYGVVGSGDTFYDYFCKSVDEFEAQFALTGAQKGADCVKVDLAAEDEDIENLEAFAEEIASKLN

SEQ ID NO: 7103 - DNA, 447 bp, Streptococcus pyogenes
atggcattagcaaaaatcgtttatgccagcatgacgggaaatactgaagaaatcgctgatatcgttgcaaataaattgcaagaattgggccatgatgttgacattgatgagtgcacaacagttgacgcttcagagtttgagaatgctgatatcgctgtcgttgcgacttatacttatggtgatggtgacttaccagatgaaatcgttgatttttacgaagatttacaagatttagatttagaaggtaaaatctatggcgttgtcggctctggtgacactttttatgactatttttgcaaatctgttgatgacttttcagagcaatttgcgcttactggtgccatcaaaggtgcagagcctgtcaaagtagacttggcagcagaagatgaagacatcgatcgtttagaggcctttgcagagcaactctcacaggctgttaataatcta

SEQ ID NO: 7104 - protein, 149 aa, Streptococcus pyogenes
MALAKIVYASMTGNTEEIADIVANKLQELGHDVDIDECTTVDASEFENADIAVVATYTYGDGDLPDEIVDFYEDLQDLDLEGKIYGVVGSGDTFYDYFCKSVDDFSEQFALTGAIKGAEPVKVDLAAEDEDIDRLEAFAEQLSQAVNNL

SEQ ID NO: 7105 - DNA, 339 bp, Streptococcus agalactiae
atggaattagaagagattcgtcaagaaatagatgaaatagatcagcaattagtaagccttttagaaactagaatgggtctaattttagaggtcatagcatttaaaaagaaacatcgacttccagttttagataataatcgtgaaaacgaagtgcttaacaatgtattgaagaaagtccaaaaccatcaatttgacgatgtgatacgagcaactttcaaagacattatgacagaatctcgtgtttatcaaaaggagaatatcttgctcaactactcgtgctgtcaaaatcagcggtggctcgtatccgtcgtcctgtatccgcacaacatcaccaagttc

SEQ ID NO: 7106 - protein, 113 aa, Streptococcus agalactiae
MELEEIRQEIDEIDQQLVSLLETRMGLILEVIAFKKKHRLPVLDNNRENEVLNNVLKKVQNHQFDDVIRATFKDIMTESRVYQKENILLNYSCCQNQRWLVSVVLYPHNITKF

SEQ ID NO: 7107 - DNA, 321 bp, Streptococcus agalactiae
atggaagtcgagactgatagtcaagaagtcttgatgtcaacaggtctaaaagacttaaaagcacacgcatatccagcaattacatacgaagttgatggctatgttgacttagaacttggtgatgttgtgcggatacaggacgacggatacgagccaccgctgattttgacagcacgagtagttgagcaagatattctccttttgataaacacgagattctgtcataatgtctttgaaagttgctcgtatcacatcgtcaaattgatggttttggactttcttcaatacattgttaagcacttcgttttcacgattattatc

SEQ ID NO: 7108 - protein, 107 aa, Streptococcus agalactiae
MEVETDSQEVLMSTGLKDLKAHAYPAITYEVDGYVDLELGDVVRIQDDGYEPPLILTARVVEQDILLLINTRFCHNVFESCSYHIVKLMVLDFLQYIVKHFVFTIII

SEQ ID NO: 7109 - DNA, 237 bp, Streptococcus agalactiae
atgaagacgaggaatgttttagcaatttcaggaaatgatattttctctggcggcggcttgcatgcagatttagcaacttacgttgttaataaattacatggttttgtggcagtaacatgcttaacagcaatgtcagataaagggtttgaagtcattcctatagaggcatctatactaaagcagcaactagaaagtttaaaagatgtagagtttgggtctattaaactaggccttctt

SEQ ID NO: 7110 - protein, 79 aa, Streptococcus agalactiae
MKTRNVLAISGNDIFSGGGLHADLATYVVNKLHGFVAVTCLTAMSDKGFEVIPIEASILKQQLESLKDVEFGSIKLGLL

SEQ ID NO: 7111 - DNA, 480 bp, Streptococcus agalactiae
  misc_feature (1)..(480): n = a, c, g, or t
ttgccacatattaatacagcgcaaaaaaataatgagaaaattttgaaggacgagctgcttcagcatggggctaaatacttaatattaacaataatttcaggctctggagttatcgaaactgttcgttttacagctgataaattgatttggtttcttatttttgctgttggatggcaggtacaaagcgcatctgttgaaatattgtgtcgtggatggttacttccggtgagtgccacaaagtatagtaagatagtttctgtcagtatcagttcaatctttttcggtcttctgcatagcgctaataatcatgtaagccttatctcgattttcaatctgtgtctctttggactatttctatcgctctatgttattttaaaaggtaacatctggggggcgtgtggtattcatggcgcctggaactgtgtacaagggagtgtctttggaatcgaagttagtggagagccaatgttnnnnnttaat

SEQ ID NO: 7112 - protein, 160 aa, Streptococcus agalactiae
  MISC_FEATURE (1)..(160): Xaa = Any Amino Acid
MPHINTAQKNNEKILKDELLQHGAKYLILTIISGSGVIETVRFTADKLIWFLIFAVGWQVQSASVEILCRGWLLPVSATKYSKIVSVSISSIFFGLLHSANNHVSLISIFNLCLFGLFLSLYVILKGNIWGACGIHGAWNCVQGSVFGIEVSGEPMXXXN

SEQ ID NO: 7113 - DNA, 240 bp, Streptococcus agalactiae
  misc_feature (1)..(240): n = a, c, g, or t
atggaaatatctcttttaacagatattgggcaacgtcgttccaataatcaagattttattaatcaatttgaaaataaagccggcgtcccactaatcatcttagcagatggtatgggaggacatcgtgcaggaaatattgctagcgagatgactgtaactgatctaggaagtgattgggcggagacagatttttctgagttatcagaaattcgtgattggatgctctttccaagcnnnnnt

SEQ ID NO: 7114 - protein, 80 aa, Streptococcus agalactiae
  MISC_FEATURE (1)..(80): Xaa = Any Amino Acid
MEISLLTDIGQRRSNNQDFINQFENKAGVPLIILADGMGGHRAGNIASEMTVTDLGSDWAETDFSELSEIRDWMLFPSXX

SEQ ID NO: 7115 - DNA, 246 bp, Streptococcus agalactiae
ttgtctatcctatctagcgtttgtcaaacgctacgtaaaggtggtataataacctatagcacttgtaccatttttgaggaagaaaattttcaagttattgaaaaattcttagaaaaccaccccaattttgagcaagtagaactgagtcatacacaagaggatattgtaaagagaggctgtattagtataagccctgaacaatatcatacagatggcttttttattggacaagtcaaacgtatcttg

SEQ ID NO: 7116 - protein, 82 aa, Streptococcus agalactiae
MSILSSVCQTLRKGGIITYSTCTIFEEENFQVIEKFLENHPNFEQVELSHTQEDIVKRGCISISPEQYHTDGFFIGQVKRIL

SEQ ID NO: 7117 - DNA, 498 bp, Streptococcus agalactiae
  misc_feature (1)..(498): n = a, c, g, or t
ttgaatactagtaataaagctagcaatgccttaatcataccagcgcctgataaagcaggtaaaatcggttggaaagtcccagaaacaaaatcaataattcgactaactgctttggcttttttggtttgttctattttagtcgttgagttagtttcaatgagggagttaatttcttctatttctttcattggtattttagtaggtagtgggcctgttaatagttttgtccatcatattcctcaaaacctgatgaatggtttgagtgcggcgggaggcctccttccagctgttggttttgccatgctgatgaaattattatggacaaataaattagctgttttttacttgcttggttttgttttaacagcttatttaaaattaccagcggttgcagttgctgccctaggagcagttatttgcgtcattagttcacaacgtgatatagaattagacgcaattactagaggtgcgatcagtaaacagacaacctttnnnnnt

SEQ ID NO: 7118 - protein, 166 aa, Streptococcus agalactiae
  MISC_FEATURE (1)..(166): Xaa = Any Amino Acid
MNTSNKASNALIIPAPDKAGKIGWKVPETKSIIRLTALAFLVCSILVVELVSMRELISSISFIGILVGSGPVNSFVHHIPQNLMNGLSAAGGLLPAVGFAMLMKLLWTNKLAVFYLLGFVLTAYLKLPAVAVAALGAVICVISSQRDIELDAITRGAISKQTTFXX

SEQ ID NO: 7119 - DNA, 618 bp, Streptococcus agalactiae
  misc_feature (1)..(618): n = a, c, g, or t
atgattaaggcattgctagctttattactagtattcaaaatcttgacaccgtcatctcaaacatatatattactaaatctttttgcagatggtgttttctattttttacctatcttaatcgccatcacagctgctcaaaaattgaaagctaatcctattttagctttgggaactgttgtcatgctccttcaccctaattgggctaatttagtagcttctggtaaaccagtatccttattccatacgatcccattcacacttactaactatgcatcaagtgtcattcccattattctaattatttgtgttcaggcttatatagaaaaatatttaaagcaaattattcctaaatcactgcgtttagtgcttgttcctatgttaatatttctcagcatgggaattttgtcgttctctatattgggaccaatgggtactatcgctggccaatatttagctgttatttttacttttttatccaaatacgccagttgggcacctgcttttctagtaggagcatttgctcctatcctaatcatgtttggtgttcatagtggaattgctgcattaggaatcacacaactagcgaaattaggggttgattctannnnnttaattaat

SEQ ID NO: 7120 - protein, 206 aa, Streptococcus agalactiae
  MISC_FEATURE (1)..(206): Xaa = Any Amino Acid
MIKALLALLLVFKILTPSSQTYILLNLFADGVFYFLPILIAITAAQKLKANPILALGTVVMLLHPNWANLVASGKPVSLFHTIPFTLTNYASSVIPIILIICVQAYIEKYLKQIIPKSLRLVLVPMLIFLSMGILSFSILGPMGTIAGQYLAVIFTFLSKYASWAPAFLVGAFAPILIMFGVHSGIAALGITQLAKLGVDSXXLIN

SEQ ID NO: 7121 - DNA, 177 bp, Streptococcus agalactiae
gtggttattggtggcggtgtctcagcagcaggtgaatttttacgtagtcgcgttgagaaatactttgtcacatttgctttcccacaagttaaaaagtcaactaaaattaagattgctgaactaggtaatgatgctggtattattggtgcagcaagcttagccaatcaacaagcaagt

SEQ ID NO: 7122 - protein, 59 aa, Streptococcus agalactiae
MVIGGGVSAAGEFLRSRVEKYFVTFAFPQVKKSTKIKIAELGNDAGIIGAASLANQQAS

SEQ ID NO: 7123 - DNA, 324 bp, Streptococcus agalactiae
atggatatgtctgttattttaattattgttattcttctggcttttgttgcttgggcatcttggaattattggagggttcgtagggcagctaaatttttagataacgagtcttttcaaaaagaaatgtcacgaggacagttaattgatatccgagaagctggtgcttttcatagaaagcatattctcggagcacgtaacattccagcaagtcaatttaaagttgccttatcggctttgcgcaaagataaacctgtcctcttatatgacgcaagccgtggtcaatctattccaaggattgttttgttactcagaaaagaaaggttt

SEQ ID NO: 7124 - protein, 108 aa, Streptococcus agalactiae
MDMSVILIIVILLAFVAWASWNYWRVRRAAKFLDNESFQKEMSRGQLIDIREAGAFHRKHILGARNIPASQFKVALSALRKDKPVLLYDASRGQSIPRIVLLLRKERF

SEQ ID NO: 7125 - DNA, 531 bp, Streptococcus agalactiae
  misc_feature (1)..(531): n = a, c, g, or t
gtgacttacccagatggttcaaaagatactgtagatgtgactgttaaggttgtcgatccacgtacagatgccgataagaatgatccagcaggtaaagatcagcaagtcaatgtaggtgagacaccgaaggcagaagattctattggtaacttaccagatcttccgaaaggtacaacagtagcctttgaaactccagttgatacggcaacaccgggagacaaaccagcaaaagttgttgtgacttacccagatggttcaaaagatactgtagatgtgactgttaaggttgtcgatccacgtacagatgccgataagaatgatccagcaggtaaagatcagcaagtcaatgtaggtgagacaccgaaggcagaagattctattggtaacttaccagatcttccgaaaggtacaacagtagcctttgaaactccagttgatacggcaacaccgggagacaaaccagcaaaagttgttgtgacttacccagatggttcaaaagatactgtagatgtgactgttaaggttnnnnnt

SEQ ID NO: 7126 - protein, 177 aa, Streptococcus agalactiae
  MISC_FEATURE (1)..(177): Xaa = Any Amino Acid
MTYPDGSKDTVDVTVKVVDPRTDADKNDPAGKDQQVNVGETPKAEDSIGNLPDLPKGTTVAFETPVDTATPGDKPAKVVVTYPDGSKDTVDVTVKVVDPRTDADKNDPAGKDQQVNVGETPKAEDSIGNLPDLPKGTTVAFETPVDTATPGDKPAKVVVTYPDGSKDTVDVTVKVXX

SEQ ID NO: 7127 - DNA, 114 bp, Streptococcus agalactiae
  misc_feature (1)..(114): n = a, c, g, or t
gtggatacttatgatacccttcgtgtaggtgtgcctaatatgacgtctgaatcgcttgaccatccgcgttataaaaggtttgtgcaaaacagaacccaaannnnnttaattaat

SEQ ID NO: 7128 - protein, 38 aa, Streptococcus agalactiae
  MISC_FEATURE (1)..(38): Xaa = Any Amino Acid
MDTYDTLRVGVPNMTSESLDHPRYKRFVQNRTQXXLIN

SEQ ID NO: 7129 - DNA, 261 bp, Streptococcus agalactiae
  misc_feature (1)..(261): n = a, c, g, or t
atgacaaattttgcgacaacagatgacgtcattttattatggcgtcaattatccgttgacgaaatcaagcgtgctgaggctttgttagagactgtctctgacacgttgaggttagaagcaagtaaagtgggtaagaatctagatgaaatgattttggaaactccttactttgctactgtattgaaatcggtaactgtagatattgtagcgagaacgctgatgactgctacacaaggtgaaccgatgtcgcaagaannnnnt

SEQ ID NO: 7130 - protein, 87 aa, Streptococcus agalactiae
  MISC_FEATURE (1)..(87): Xaa = Any Amino Acid
MTNFATTDDVILLWRQLSVDEIKRAEALLETVSDTLRLEASKVGKNLDEMILETPYFATVLKSVTVDIVARTLMTATQGEPMSQEXX

SEQ ID NO: 7131 - DNA, 714 bp, Streptococcus agalactiae
atggaagatatcttcgttggtgagacagtaactccgacagatgctattgaaccactaccagttttacgtattgacgagccaacacttcaaatgactttcttggtgaataattcaccatttgcaggtcgcgaaggtaaatggattacgtcacgtaaggttgaagaacgtcttttagcagaattacaaacagacgtttctttacgtgttgacccaacagattcgccagataaatggacggtttcagggcgtggagaattacatttatctatccttattgaaacaatgcgtcgtgagggatatgaacttcaagtatcacgtccagaagttatcatcaaagaaattgatggtgttcaatgcgagccgtttgagcgtgttcaaattgatactccagaagaatatcagggtgctattatccaaagtttgtcagagcgtaaaggtgatatgcttgatatgcagatggttggtaatggtcaaacgcgtttgattttcttgattcctgcacgtggtttgattggttattcaacagagtttctttcaatgacacgtggatatggtatcatgaatcatacttttgaccagtatctaccggttgttcaaggagaaattggtggtcgtcatcgtggtgccttggtttctattgaaaatggtaaagcaactacatattcaattatgcgtattgaagaacgtgggaacctatcctttgtaaatcccagg

SEQ ID NO: 7132 - protein, 238 aa, Streptococcus agalactiae
MEDIFVGETVTPTDAIEPLPVLRIDEPTLQMTFLVNNSPFAGREGKWITSRKVEERLLAELQTDVSLRVDPTDSPDKWTVSGRGELHLSILIETMRREGYELQVSRPEVIIKEIDGVQCEPFERVQIDTPEEYQGAIIQSLSERKGDMLDMQMVGNGQTRLIFLIPARGLIGYSTEFLSMTRGYGIMNHTFDQYLPVVQGEIGGRHRGALVSIENGKATTYSIMRIEERGNLSFVNPR

SEQ ID NO: 7133 - DNA, 336 bp, Streptococcus agalactiae
  misc_feature (1)..(336): n = a, c, g, or t
ttgttgccacaagtcaaagaacggatatatcctgttggtcgcttggattgggatacaactggacttttaattttgactaatgatggtgattttactgataaaatgattcatcctcgtaatgaaattgataaagtttatttagcacgtgttaaaggaatagctactaaagaaaaccttcgaccattaacgcgtggcgttgttatcgatggtaagaaaacaaaacctgctcgctatactatcataaaagtggatcatgaaaaaaatcgttcagtagttgaattaactattcatgaaggtcgtaatcatcaagttaagaaaatgtttgaacaannnnnt

SEQ ID NO: 7134 - protein, 112 aa, Streptococcus agalactiae
  MISC_FEATURE (1)..(112): Xaa = Any Amino Acid
MLPQVKERIYPVGRLDWDTTGLLILTNDGDFTDKMIHPRNEIDKVYLARVKGIATKENLRPLTRGVVIDGKKTKPARYTIIKVDHEKNRSVVELTIHEGRNHQVKKMFEQXX

SEQ ID NO: 7135 - DNA, 348 bp, Streptococcus agalactiae
  misc_feature (1)..(348): n = a, c, g, or t
ntgcaagaaatgcgtgaacgtgtgtgtgaagctaataaatcactaccagttcatagtttagttaaatttacttggggtaacgtttctgaagttgaccgcgaagcaggattgattgttatcaaaccttcaggagttgactatgaccaattgacacctgaaaatatggttgtcacagacttagagggaaatatagtggagggggatttgaatccatcatctgatcttccaactcatgttcaactttataaagcatggccagaagtcggtggtattgttcatactcattcaacagaagcagttggttgggcacaagattacctgatatcgttattactgttggaaaactca

SEQ ID NO: 7136 - protein, 116 aa, Streptococcus agalactiae
  MISC_FEATURE (1)..(116): Xaa = Any Amino Acid
XQEMRERVCEANKSLPVHSLVKFTWGNVSEVDREAGLIVIKPSGVDYDQLTPENMVVTDLEGNIVEGDLNPSSDLPTHVQLYKAWPEVGGIVHTHSTEAVGWAQDYLISLLLLENS

SEQ ID NO: 7137 - DNA, 681 bp, Streptococcus agalactiae
atgactcaaccaaccggctctaacccactctcgctgggcaccgattacgaaaccctggccaaccgcttccggccgatcttccgtgagatcagcgcgggcaacgtcgaacgtgaaaaagctcgtgccctgccctacgagcctattgaatggctgaagaaagccggtttcggcgctgtgcgggtaccgagcgaatatggcggtgccggtgcctcgatcggccagctttttcagctgttgatagaattggccgaggccgactcgaacatcccgcaggctttgcgggcgcattttgcttttgtcgaagaccgcctgaatgcgccaccgggcgtggaccgtgacacatggtttgcacgctttgtcgccggggatctggtcggcaatggctggaccgaagtcggcacggtgaaaatcggtgatgtgatcaccaaggtcagtgctcagggcgacggttttgtgctcaacggcaccaagttctacagcaccggcagcatcttcgccgactggatcgacgtctacgcccagcgtgcagacaatggcgccgacgtgattgccgtggtcaatgcccggcacgctggcgtgcgtcacagcgacgactgggacggtttcgggcagcgcaccaccggcaagcggcacgtcggtgtacgacaacgtgccattgccggcgaaccatgtgattccctt

SEQ ID NO: 7138 - protein, 227 aa, Streptococcus agalactiae
MTQPTGSNPLSLGTDYETLANRFRPIFREISAGNVEREKARALPYEPIEWLKKAGFGAVRVPSEYGGAGASIGQLFQLLIELAEADSNIPQALRAHFAFVEDRLNAPPGVDRDTWFARFVAGDLVGNGWTEVGTVKIGDVITKVSAQGDGFVLNGTKFYSTGSIFADWIDVYAQRADNGADVIAVVNARHAGVRHSDDWDGFGQRTTGKRHVGVRQRAIAGEPCDSL

SEQ ID NO: 7139 - DNA, 105 bp, Streptococcus agalactiae
gtgccagcagccgcggtaatacgtaggtcccgagcgttgtccggatttattgggcgtaaagcgagcgcaggcggttctttaagtctgaagttaaaggcagtggct

SEQ ID NO: 7140 - protein, 35 aa, Streptococcus agalactiae
MPAAAVIRRSRALSGFIGRKASAGGSLSLKLKAVA

SEQ ID NO: 7141 - DNA, 141 bp, Streptococcus agalactiae
ttgagttttagctatgaagcagaatcaactagtcgtttagaagttagactttacctctcgctgggagacaaaccacctccttgttcgagcataaaaaaagcacttgcaacactagctaagcgcttattaaatgatttcaat

SEQ ID NO: 7142 - protein, 47 aa, Streptococcus agalactiae
MSFSYEAESTSRLEVRLYLSLGDKPPPCSSIKKALATLAKRLLNDFN

SEQ ID NO: 7143 - DNA, 210 bp, Streptococcus agalactiae
gtggataccgatgttttataccaaaagtataaacagactggtgaagtaatcaagaatagaaggggacggactcataaggaacttattgatttaccagaagatatttcgataggtattgatatttactcaggaaatttagtaaatggcctgactattcattacggaaagaccggatcgcacattgttccaacttatcatgaaaggagagag

SEQ ID NO: 7144 - protein, 70 aa, Streptococcus agalactiae
MDTDVLYQKYKQTGEVIKNRRGRTHKELIDLPEDISIGIDIYSGNLVNGLTIHYGKTGSHIVPTYHERRE

SEQ ID NO: 7145 - DNA, 747 bp, Streptococcus agalactiae
atggagcttggacaactatttcatcatttaggttcagaaataacgcttatgcaaagaagtgagcgacttttaaaggagtatgatcctgagatttcagagtcagttgaaaaagcgttaattgaacagggtataaaccttgtcaaaggggcaacttttgagcgtgttgaacaaagtggagagataaaaagggtttacgtaacagtaaatggcagtagagaagtcattgaatcagatcagttacttgttgccactggaagaaaaccaaatacggattctttaaatttaagtgcagcaggtgttgaaactggaaaaaataatgaaatcctgatcaatgattttggtcaaacaagtaatgaaaagatttatgcagcaggagatgtgactttaggaccacaatttgtatatgtagcagcctatgaaggtggaattattactgataatgctattggtggattaaacaaaaaaatagatttatcggtagttcctgctgttacgtttacgaatccgacggttgcaacggttggtttaacagaagaacaagcaaaagagaaagggtatgatgtgaagacatctgtattacctttaggtgctgttccaagagcaattgtaaaccgtgaaacaaccggtgtatttaaactagtagcagatgcagaaacactaaaagtattaggggttcatattgtatctgaaaatgcaggagatgtcatctatgcagcatcattagctgttaaatttgggcttaacgaa

SEQ ID NO: 7146 - protein, 249 aa, Streptococcus agalactiae
MELGQLFHHLGSEITLMQRSERLLKEYDPEISESVEKALIEQGINLVKGATFERVEQSGEIKRVYVTVNGSREVIESDQLLVATGRKPNTDSLNLSAAGVETGKNNEILINDFGQTSNEKIYAAGDVTLGPQFVYVAAYEGGIITDNAIGGLNKKIDLSVVPAVTFTNPTVATVGLTEEQAKEKGYDVKTSVLPLGAVPRAIVNRETTGVFKLVADAETLKVLGVHIVSENAGDVIYAASLAVKFGLNE

SEQ ID NO: 7147 - DNA, 102 bp, Streptococcus agalactiae
atgggttcaaaagatactgtagatgtgactgttaaggttggtcgatccacggtacagatgccgataagaatgatccagcaggtaaagatcagcaagtcaatg

SEQ ID NO: 7148 - protein, 34 aa, Streptococcus agalactiae
MGSKDTVDVTVKVGRSTVQMPIRMIQQVKISKSM

SEQ ID NO: 7149 - DNA, 282 bp, Streptococcus agalactiae
gtgacttacccagatggttcaaaagatactgtagatgtgactgttaaggttgtcgatcgacgtacagatgccgataagaatgatccagcaggtaaagatcagcaagtcaatgtaggtgagacaccgaaggcagaagattctattggtaacttaccagatcttccgaaaggtacaacagtagcctttgaaactccagttgatacggcaacaccgggagacaaaccagcaaaagttgttgtgacttacccagatgggttcaaaagatactgtagatgtgactgt

SEQ ID NO: 7150 - protein, 94 aa, Streptococcus agalactiae
MTYPDGSKDTVDVTVKVVDRRTDADKNDPAGKDQQVNVGETPKAEDSIGNLPDLPKGTTVAFETPVDTATPGDKPAKVVVTYPDGFKRYCRCDC

SEQ ID NO: 7151 - DNA, 816 bp, Streptococcus agalactiae
atggagttatccaaagcagctcaaaagagtattgctatacatcttggtatagagttgaatgaaggtttacttgattatctatatttagtgttttgtattagtgatggtcctctatttagcaatcgagatgatatcaatatcaacgaagaatttatttttgcttcttataagatatcaaagtctaaagcctttaagaatttttgtggtcgattattgggtagagaatttattgactcgcagcattttaaagatattaatgcctattttttgagacattttatttgttattgttattattttattcctgatttttattttttaaatacatcaaggctgagctattctaaggatttatatcacctattagataaaggtctggctgatatttttaaccttaaaggagggaatttaactttttcaaaacatgagacagtgctactaacaatgcaattatctaacttaatagagactttcttagctcctctttctgtatatgtaatttcatctagtaatattagattacaaacctatcaagtaatgttaaaccaatattttacatctaagatagcggaattcttttttgtaaactatcaaacgactcagatagatgaaaaattactaaaaaaagcagatatcattattgctgagagacgctatatatcttctttaaaaaatgactcaggtgtggctatacaagatatattagaaattgggatgaataataagcagtaccatgaactacttttacaagctattatcgaaaaaagggaccaaaaagtttttgaatatatttcaaaaatgaaacataaaatactt

SEQ ID NO: 7152 - protein, 272 aa, Streptococcus agalactiae
MELSKAAQKSIAIHLGIELNEGLLDYLYLVFCISDGPLFSNRDDININEEFIFASYKISKSKAFKNFCGRLLGREFIDSQHFKDINAYFLRHFICYCYYFIPDFYFLNTSRLSYSKDLYHLLDKGLADIFNLKGGNLTFSKHETVLLTMQLSNLIETFLAPLSVYVISSSNIRLQTYQVMLNQYFTSKIAEFFFVNYQTTQIDEKLLKKADIIIAERRYISSLKNDSGVAIQDILEIGMNNKQYHELLLQAIIEKRDQKVFEYISKMKHKIL

SEQ ID NO: 7153 - DNA, 654 bp, Streptococcus pyogenes
ttgaaagcatccctgcgtccactactaggcaataatatcctaaactcccttcctttcaaacggattttggtttccttctcacgtctatttatcagtaatcttcaagttttgttacctgacatacacttgttccattacctcagaagacagcaaaaacgaaacaagagcttctacaatactctaaaaaccatcgttgaggaatggatgagcgcagaaggcatcgtggggaaactgccgtcttatcatttattgctcttcacgatacagttagaggaactcctaaaaacatatttgccaccgatacctgtctatcttttgaccaataacactgctgcgctggatttgatgaccaatgcactctcaatttacttcccgccagctattgcaacggttatgcctgtcaatgtcgaaatcattcctttcaaagatattgttaaggaaaagcagagtgtcattatcgcagataggcaatacctgaacctgatacagcatttgtaccagaatcaagggcatttgttcttgtatttcttgtttagttttagagacgtttctgaggcttacattcataaggcatttctagacttccgccaaaaacggtacgatgagtttatcgtgaccttgttggacacttaccacaagaacctgtcttctcct

SEQ ID NO: 7154 - protein, 218 aa, Streptococcus pyogenes
LKASLRPLLGNNILNSLPFKRILVSFSRLFISNLQVLLPDIHLFHYLRRQQKRNKSFYNTLKTIVEEWMSAEGIVGKLPSYHLLLFTIQLEELLKTYLPPIPVYLLTNNTAALDLMTNALSIYFPPAIATVMPVNVEIIPFKDIVKEKQSVIIADRQYLNLIQHLYQNQGHLFLYFLFSFRDVSEAYIHKAFLDFRQKRYDEFIVTLLDTYHKNLSSP

SEQ ID NO: 7155 - DNA, 132 bp, Streptococcus agalactiae
ttgccggtggctgcgccgcgattgctgcgttctgttcggcggcgtttttcagcggcagcaccaccggttccggtgacatgttgctgtcggtggtggccattgccttcctcggtgtggtgttctcgcgacgcc

SEQ ID NO: 7156 - protein, 44 aa, Streptococcus agalactiae
MPVAAPRLLRSVRRRFSAAAPPVPVTCCCRWWPLPSSVWCSRDA

SEQ ID NO: 7157 - DNA, 447 bp, Streptococcus agalactiae
  misc_feature (1)..(447): n = a, c, g, or t
ttgcacgccgttgacccagaagttggaaatgttcagcaactgaaagccattgatcaaaaaacccagcaacaggttcgccaacaacgtgccggggatgttcgcggtcaggcgtcgcgagaacaccacaccgaggaaggcaatggccaccaccgacagcaacatgtcaccggaaccggtggtgctgccgctgaaaaacgccgccgaacagaacgcagcaatcgcggcgcagccaccggcaatcaggtagctggcgaacacatagcgttgcacactcaacccggcagccttcgcggcctgcgggtattcgccgatggcgtacaggcgcaggccgaacgcgctgtgctgaatcagcagccacaagcctgccgctacactcaacagcacccacgccagcgccggaacgcccagccagacgccggaagcaaggctgtccagcannnnnttaat

SEQ ID NO: 7158 - protein, 149 aa, Streptococcus agalactiae
  MISC_FEATURE (1)..(149): Xaa = Any Amino Acid
MHAVDPEVGNVQQLKAIDQKTQQQVRQQRAGDVRGQASREHHTEEGNGHHRQQHVTGTGGAAAEKRRRTERSNRGAATGNQVAGEHIALHTQPGSLRGLRVFADGVQAQAERAVLNQQPQACRYTQQHPRQRRNAQPDAGSKAVQXXXN

SEQ ID NO: 7159 - DNA, 213 bp, Streptococcus agalactiae
ttgccccagctcagaaaacctggcgcattaatggcgaagaacagcagaatgatcagcaccagcaacggcaggaccgcaggtaacaggcgcggcaggacttttatcagcgtcgacgaggtattcagcgtcacggtactcattgttcaccttcctgacggccaagcgcccctgaaaacgccaccaccagcagaatcaacacaccttgcacgccgt

SEQ ID NO: 7160 - protein, 71 aa, Streptococcus agalactiae
MPQLRKPGALMAKNSRMISTSNGRTAGNRRGRTFISVDEVFSVTVLIVHLPDGQAPLKTPPPAESTHLARR

SEQ ID NO: 7161 - DNA, 483 bp, Streptococcus agalactiae
atgaccacttattttgataactttttaaaaaccaatcaagcctatgctgacttacatggaacagctcatctacctatcaagccaaagacaaaggttgctattgtaacctgtatggattctcgtttacacgttgctcaagctctagggctagctttaggagatgctcatattttacgtaatgctggtggacgagttacagacgatgttctacgttctttagttatttcgcaacaacaattaggaacacgagaaatcgttgttctacaccatacagattgtggagcacagacgtttactaacgaagcttttgctgctcaattacagagagatttgggtgttgatatgcatggacatgattttcttccttttaatgatattgaagaaagcgttcgtgaagatgtggcaaaattacatgcttctccattcttacgagaagaaagtcgtctctgcccaccgtacgccagacctcatgttcaagcatgc

SEQ ID NO: 7162 - protein, 161 aa, Streptococcus agalactiae
MTTYFDNFLKTNQAYADLHGTAHLPIKPKTKVAIVTCMDSRLHVAQALGLALGDAHILRNAGGRVTDDVLRSLVISQQQLGTREIVVLHHTDCGAQTFTNEAFAAQLQRDLGVDMHGHDFLPFNDIEESVREDVAKLHASPFLREESRLCPPYARPHVQAC

SEQ ID NO: 7163 - DNA, 96 bp, Streptococcus agalactiae
  misc_feature (1)..(96): n = a, c, g, or t
atgttcaagcatgctgaggaggcgcgtggtcgtggtatcaagattatcatcgctggagcaggtggagcagcccacttgcctttccagcacnnnnnt

SEQ ID NO: 7164 - protein, 32 aa, Streptococcus agalactiae
  MISC_FEATURE (1)..(32): Xaa = Any Amino Acid
MFKHAEEARGRGIKIIIAGAGGAAHLPFQHXX

SEQ ID NO: 7165 - DNA, 810 bp, Streptococcus agalactiae
ttgtctagcatttttgctagtgtaatgatttattatgcacgtattttacacgagcatacaccagatatttcagaaccttttgtgattacttatcttgctgatatcagttacggtatgtacctttttcattggccattttatattatttttagtcgtttatccccaaactggatagctgttattttgacagtagtattatcagcagtcttctcaacattatcattttatatcattgaaccttttattttaggtagaaaacctaaattccttgattatgaatttgacttgttgccttacaaaaagtggttatttagtatcggaggggtactaactcttattactgtagtgacaatgttgacagctccaagtataggtagttttgagacagaattattgcagaattcgttacaacaagytagaacaaatactaaccgaacacatacactagccgcaggggatgcaggtgctcttagtgatgtgacagtaatcggagattcagttgccttaaggtcaagtgctgcttttaataaattgttaccagaagtacaattagatgctgcggtgagtcgtaattttagtaaatcatttgatatttttgaaaaccgtattcaaaataaagccttgtccaaaattgttgttttggcagttggtgtgaattcattagataactacaagacagacttgagccaatttattaaatctttgcctaagggacaccgtttgattatagtaacaccttataatgctaaaaatatgagtcaagttacgacagtgcgtgattatgaactctcgctaatgaaaaaaaaaaat

SEQ ID NO: 7166 - protein, 270 aa, Streptococcus agalactiae
  MISC_FEATURE (1)..(270): Xaa = Any Amino Acid
MSSIFASVMIYYARILHEHTPDISEPFVITYLADISYGMYLFHWPFYIIFSRLSPNWIAVILTVVLSAVFSTLSFYIIEPFILGRKPKFLDYEFDLLPYKKWLFSIGGVLTLITVVTMLTAPSIGSFETELLQNSLQQXRTNTNRTHTLAAGDAGALSDVTVIGDSVALRSSAAFNKLLPEVQLDAAVSRNFSKSFDIFENRIQNKALSKIVVLAVGVNSLDNYKTDLSQFIKSLPKGHRLIIVTPYNAKNMSQVTTVRDYELSLMKKKN

SEQ ID NO: 7167 - DNA, 297 bp, Streptococcus agalactiae
  misc_feature (1)..(297): n = a, c, g, or t
ttgcaatcaattgatttgttggttaataatgcaggtttagcacttggattggataaatcatatgaagctgattttggagattggatgactatgattaatactaacgttgtaggattaatttacttgacacgatgcattttacctaaaatggtagaagttaatagagggttaattatcaatttgggatcamctgcaggaacaattccttatccaggagctaatgtctatggcgcatcaaaagcttttgtaaaacaattttctctcaacttgcgtgccgatttagctggaactnnnnnt

SEQ ID NO: 7168 - protein, 99 aa, Streptococcus agalactiae
  MISC_FEATURE (1)..(99): Xaa = Any Amino Acid
MQSIDLLVNNAGLALGLDKSYEADFGDWMTMINTNVVGLIYLTRCILPKMVEVNRGLIINLGSXAGTIPYPGANVYGASKAFVKQFSLNLRADLAGTXX

SEQ ID NO: 7169 - DNA, 633 bp, Streptococcus pyogenes
ttgaaggtgaggaaatgtatgggaaatattgccttagtaacaggggcttcagccggttttggcagagccattgtcgaacacttaattgcagatgggataaaggttattggtgcttctcgtcgtcttgagaaactcaaggccttagaaacgagctttgggtcggacaacttttaccctttgcagatggatgtcacagataccaaagcgattgatgatgctttgacaagtctaccaaatcagtggcaagatattactattttagtgaataatgcaggcttggcattaggacttgataaggcttatgaagccgattttgagaattggatgacgatgattaataccaatattgttgggttgatttatctcacacgtcaattattaccacatatggtctccaaagatgatggtattattattaatttagggtcaaccgcagggacaattccctatccgggagctaatatttatggggctagcaaggcttttgttaagcagttctcactcaatttacgagctgatttagcaggtagccatatacgtgtgaccaatattgaacccggtctatgtgaagggacagaattttcaaagggacagaattttcaaaggtccgctttaatggtgatgaggaacggg

SEQ ID NO: 7170 - protein, 211 aa, Streptococcus pyogenes
LKVRKCMGNIALVTGASAGFGRAIVEHLIADGIKVIGASRRLEKLKALETSFGSDNFYPLQMDVTDTKAIDDALTSLPNQWQDITILVNNAGLALGLDKAYEADFENWMTMINTNIVGLIYLTRQLLPHMVSKDDGIIINLGSTAGTIPYPGANIYGASKAFVKQFSLNLRADLAGSHIRVTNIEPGLCEGTEFSKGQNFQRSALMVMRNG

SEQ ID NO: 7171 - DNA, 360 bp, Streptococcus agalactiae
  misc_feature (1)..(360): n = a, c, g, or t
atgaataaatttaaggtaaacatttcaggaatgacttgtacgggttgtgaaaaacacgtagaatcagcacttgaaaagataggtgctaaaaatattgagtctagttatcgtcgtggtgaagcagtatttgaactgcccgatgatattgaggttgaaagtgcaataaaggcgattgatgaagcaaattaccaagccggagaaattgaagaagtatcatcactagaaaacgtggcgttaattaatgaagacaattatgaccttcttattattggttctggtgctgctgccttttcttcggcaattaaagctatagctgcatctttgaccaatttcaatttacgagcaatggcnnnnnttaat

SEQ ID NO: 7172 - protein, 120 aa, Streptococcus agalactiae
  MISC_FEATURE (1)..(120): Xaa = Any Amino Acid
MNKFKVNISGMTCTGCEKHVESALEKIGAKNIESSYRRGEAVFELPDDIEVESAIKAIDEANYQAGEIEEVSSLENVALINEDNYDLLIIGSGAAAFSSAIKAIAASLTNFNLRAMAXXN

SEQ ID NO: 7173 - DNA, 297 bp, Streptococcus agalactiae
ttggtaaatcaggccaatggtaaaaagcaagaaattgctaagttagaaaatttatctaacgatgaaatgttgagatataatactgcaattgataatgtagtgaaacagtataatgaaggtaagctcaatattactgctgcaatgaatgctttaaatagtattaagcaagcagcacaggaagttgcccagaaaaacttacaaaataaggattattgtcaaacaaagctaccagagcttgatcaacatcgttttccagtaaatcagagaaatcaaaagaaatatctagcaggcttccct

SEQ ID NO: 7174 - protein, 99 aa, Streptococcus agalactiae
MVNQANGKKQEIAKLENLSNDEMLRYNTAIDNVVKQYNEGKLNITAAMNALNSIKQAAQEVAQKNLQNKDYCQTKLPELDQHRFPVNQRNQKKYLAGFP

SEQ ID NO: 7175 - DNA, 528 bp, Streptococcus agalactiae
ttgaaatctacaatccctgccaatttaggtgactatgaaaaatttgaaattactgataaatttgcagatggcttgacttataaatctgttggaaaaatcaagattggttcgaaaacactgaatagagatgagcactacactattgatgaaccaacagttgataaccaaaatacattaaaaattacgtttaaaccagagaaatttaaagaaattgctgagctacttaaaggaatgacccttgttaaaaatcaagatgctcttgataaagctactgcaaatacagatgatgcggcatttttggaaattccagttgcatcaactattaatgaaaaagcagttttaggaaaagcaattgaaaatacttttgaacttcaatatgaccatactcctgataaagctgacaatccaaaaccatctaatcctccaagaaaaccagaagttcatactggtgggaaacgatttgtaaagaaagactcaacagaaacacaaacactagggtggtggctgagtttggatttgttggctttc

SEQ ID NO: 7176 - protein, 176 aa, Streptococcus agalactiae
MKSTIPANLGDYEKFEITDKFADGLTYKSVGKIKIGSKTLNRDEHYTIDEPTVDNQNTLKITFKPEKFKEIAELLKGMTLVKNQDALDKATANTDDAAFLEIPVASTINEKAVLGKAIENTFELQYDHTPDKADNPKPSNPPRKPEVHTGGKRFVKKDSTETQTLGWWLSLDLLAF

SEQ ID NO: 7177 - DNA, 468 bp, Streptococcus agalactiae
gtggctaaaagttatgcgctggtaaagcactatatggctttaaacgaagaggctcctgatcttattgatgtttcaagaattcgctgtgcagctcttattgatttttcagaatccttaaccaataagagcatctctgacaagcagcaaatgtacaatagtattctccattatgtggacaaccacctctactccaaactcaaagtatctgatattgccaactacctatatatctcagattcccacttacgctcagtttttaaaaaatactctgacatttccttgcaaagttatattctaaaggcaaaaattaaggagggacaattactactgcaaagaggggtaccgattggggaagtagcgaaattattacatttttacgacaccacacattttcttaaaacctttaaaaaatacgtgggaatatcttcaaacgaatatcttactaaatatcgtgagacctcatgccag

SEQ ID NO: 7178 - protein, 156 aa, Streptococcus agalactiae
MAKSYALVKHYMALNEEAPDLIDVSRIRCAALIDFSESLTNKSISDKQQMYNSILHYVDNHLYSKLKVSDIANYLYISDSHLRSVFKKYSDISLQSYILKAKIKEGQLLLQRGVPIGEVAKLLHFYDTTHFLKTFKKYVGISSNEYLTKYRETSCQ

SEQ ID NO: 7179 - DNA, 744 bp, Streptococcus agalactiae
  misc_feature (1)..(744): n = a, c, g, or t
atgccttttaaatattaccggtatttcgatcctgtcaaacataatttaatttttgaacgttttttaaatgaagagcgttattcgatgccagatattgatattgatcttccggatatttatcgtggagaattcttgcgctatgtacgtaatcgatatggttcaatgcattctgcacagattgtaaccttctcaacttttggtgcgaaacaggctattcgagatgtttttaaacgctttggtgcatcagagtatgagttaacaaacataactaaaaaaattcatttcagagataatttgaccagtgtttataaccgcaacttagctttcagacaaataatagatagtaaaattgaataccaaaaagcctatgatattgctaagcgtattgaaggaaatcctagacagacttctattcatgccgctggggtagtaatgagtgacgatttgttaacagatcatattcctttaaaaaacggtgaggatatgatgataacgcaatatgatgctagttctgttgaggataatggtcttctaaaaatggactttctaggtcttcgaaatttgacatttgttcagaaaatgaaggagaaagtcgataaggactacggtatctctatacaattagaaactattgatttagaagataaagagactctaaaactatttgcagctggtcaaacaaaggggatttttcaatttgagcaaagtggagctattaatttgttgcgacgtattaggnnnnnt

SEQ ID NO: 7180 - protein, 248 aa, Streptococcus agalactiae
  MISC_FEATURE (1)..(248): Xaa = Any Amino Acid
MPFKYYRYFDPVKHNLIFERFLNEERYSMPDIDIDLPDIYRGEFLRYVRNRYGSMHSAQIVTFSTFGAKQAIRDVFKRFGASEYELTNITKKIHFRDNLTSVYNRNLAFRQIIDSKIEYQKAYDIAKRIEGNPRQTSIHAAGVVMSDDLLTDHIPLKNGEDMMITQYDASSVEDNGLLKMDFLGLRNLTFVQKMKEKVDKDYGISIQLETIDLEDKETLKLFAAGQTKGIFQFEQSGAINLLRRIRXX

SEQ ID NO: 7181 - DNA, 765 bp, Streptococcus agalactiae
  misc_feature (1)..(765): n = a, c, g, or t
ttggacacttatcctctggggtcattggtttcctataagggacaggactttgaggtcatgtcggtcagcgatgctcgattgaacggtttgattcggattgagttagtcaatgacttttcggatatcattgaacaaaatccagttctttatgtgaggacctgggaagaagtcagtcaggcacttcatcagccaaaggcagaaccacaaacagagttagaagaagcggaccaagaattaaacctattctcatttctggaagaggagccagttcagagtattggactattggaaccagatgattcagaaaatggtcataacgatactgatcttgaagaaacagataatcaaattcctgaagaggaagtcgtcgaaacaattccagagattccagtaacggacttttattttccagaagatttgacggacttttatcctaagactgctagagataaggttgagacaaacattgtggccattcgtttggtaaaaaatctagaagtagagcaccgcaatgcttcaccaagtgaacaagaactccttgccaagtatgtaggctggggtggactagccaatgaattttttgatgactataatccaaaattttctaaggaacgagaagaactgaagagcctagtcacagataaagagtattcggatatgaaacagtcctccctgacagcctattacacagacccatccctgatccgtcagatgtgggggatagtggaaagagatggctttacagggtggcaaatcctannnnnt

SEQ ID NO: 7182 - protein, 255 aa, Streptococcus agalactiae
  MISC_FEATURE (1)..(255): Xaa = Any Amino Acid
MDTYPLGSLVSYKGQDFEVMSVSDARLNGLIRIELVNDFSDIIEQNPVLYVRTWEEVSQALHQPKAEPQTELEEADQELNLFSFLEEEPVQSIGLLEPDDSENGHNDTDLEETDNQIPEEEVVETIPEIPVTDFYFPEDLTDFYPKTARDKVETNIVAIRLVKNLEVEHRNASPSEQELLAKYVGWGGLANEFFDDYNPKFSKEREELKSLVTDKEYSDMKQSSLTAYYTDPSLIRQMWGIVERDGFTGWQILXX

SEQ ID NO: 7183 - DNA, 111 bp, Streptococcus agalactiae
  misc_feature (1)..(111): n = a, c, g, or t
gtgttagcctatgaggttgtttatgtcttttttagtgatcaagatgacacatggtatcatcataaaaataagatgctagttgatattatggaagcacgccannnnnttaat

SEQ ID NO: 7184 - protein, 37 aa, Streptococcus agalactiae
  MISC_FEATURE (1)..(37): Xaa = Any Amino Acid
MLAYEVVYVFFSDQDDTWYHHKNKMLVDIMEARXXXN

SEQ ID NO: 7185 - DNA, 174 bp, Streptococcus agalactiae
atggtgaagtttaaaaaacctgaaacaatcaactaccgcacattgaaaccagaacgtgaaggactttttgatgaagttatttttggtccaacaaaagattgggaatgtgcgtgtggaaaatacaaacgtattcgttacaaaggaatcatttgtgaccgttgtggcgttgaaagg

SEQ ID NO: 7186 - protein, 58 aa, Streptococcus agalactiae
MVKFKKPETINYRTLKPEREGLFDEVIFGPTKDWECACGKYKRIRYKGIICDRCGVER

SEQ ID NO: 7187 - DNA, 663 bp, Streptococcus agalactiae
atgacttatctcccccaacatattccgtgcacttattatcctgttggttcgggaaatgattttgccagagctttgaaaattcctaacctcaaagaaacccttaccgctattcagacagaaagattaaaggaaattaattgctttatttatgataaagggctgattttgaatagtttagatttaggttttgcagcctatgtcgtttggaaagcatctaactctaaaataaaaaatattttgaatagatatcgtctaggaaaaataacttacattgttatagctatcaaatcattattacattcttctaaagtacaagtattagtggaaggagagacaggacagcagataaaactaaatgacctttattttttcgcattagcaaataacacttattttggaggtggcattactatttggcctaaagcaagtgctttaactgcagagttagatatggtttacgctaaagggcatacttttctaaaacgattaagtattttattatctttggtttttaaaaggcatactacctctaaaagtataaaacaccagactttcaaagctatgaccgtatattttcctaaaaatagtttgattgaaatagatggcgaaatagttgagttagatcagattagtttaaaatgtcaaaaaaggtatttatatatg

SEQ ID NO: 7188 - protein, 221 aa, Streptococcus agalactiae
MTYLPQHIPCTYYPVGSGNDFARALKIPNLKETLTAIQTERLKEINCFIYDKGLILNSLDLGFAAYVVWKASNSKIKNILNRYRLGKITYIVIAIKSLLHSSKVQVLVEGETGQQIKLNDLYFFALANNTYFGGGITIWPKASALTAELDMVYAKGHTFLKRLSILLSLVFKRHTTSKSIKHQTFKAMTVYFPKNSLIEIDGEIVELDQISLKCQKRYLYM

SEQ ID NO: 7189 - DNA, 690 bp, Streptococcus agalactiae
gtgtcccagaccgagcgtgcggttttgctgcagttcggcaaggtggttcagactgacgtcaagccgggtctgcacgtgaaggtcccttacgtgaaccaggtgcgcaagttcgacggacgtctgctgacgctcgatgcgcctacccagcgttttctgacgctggaaaagaaagccgtcatggttgatgcctatgccaaatggcgcgtgaaggatgcggagcgtttctatactgcgacttccggcctcaagcagattgccgacgagcgcctgtcgcgtcgtctggaatccggcctgcgagaccagttcggcaagcgcaccctgcatgaagtcgtgtcgggtgagcgggatgcactgatggctgacatcacgggttcgctgaaccgcatggctgagaaagagctgggtatcgaagtactcgatgtccgggtcaaggccatcgacctgcccaaggaagtgaatcgcagcgttttcgagcggatgagtaccgagcgtgaacgtgaagcgcgcgagcaccgtgccaagggtaacgagctgggtgaaggcatccgtgccgacgccgatcgtcaacgccgtgtattgctggcagaagcctatcgcgagtctgaaaggcgcgtggtgatggtgatgcccaggctgcggcgatctattccaggcctacggtcaggatcaggagttctacgcgttttatcg

SEQ ID NO: 7190 - protein, 230 aa, Streptococcus agalactiae
MSQTERAVLLQFGKVVQTDVKPGLHVKVPYVNQVRKFDGRLLTLDAPTQRFLTLEKKAVMVDAYAKWRVKDAERFYTATSGLKQIADERLSRRLESGLRDQFGKRTLHEVVSGERDALMADITGSLNRMAEKELGIEVLDVRVKAIDLPKEVNRSVFERMSTEREREAREHRAKGNELGEGIRADADRQRRVLLAEAYRESERRVVMVMPRLRRSIPGLRSGSGVLRVLS

SEQ ID NO: 7191 - DNA, 141 bp, Streptococcus agalactiae
gtgacagtaactaaccagaaagggacggctaagtacgtgcccgcatccgcggtaatatgtaggtcccgagcgttgtccggatttattgtgcgtaaagcgagcgcaggcggttctttaagtctgaagttaaaggcagtggct

SEQ ID NO: 7192 - protein, 47 aa, Streptococcus agalactiae
MTVTNQKGTAKYVPASAVICRSRALSGFIVRKASAGGSLSLKLKAVA

SEQ ID NO: 7193 - DNA, 702 bp, Streptococcus agalactiae
gtgacttttgggcagacaaaaagtaatcaagttattggttatttgcctgacgttccgaagttttatgactatatgacggcacaagaatacttacaactttgcgctggcttagctcaaaacaaaaccagtttaccaattgctgatctgctagaacaggtcggcttagccgataatcagcaacgcattagcacctattctcgaggtatgaaacaacgcttaggtctagcccaagcactgattcacaaksskaaaattctgatttgtgatgaaccaacatcagccttagaccctcaaggacgacaagaaatcctctccattatttctcaactacgtggtcaaaagacagtcattttctcgacacacatcttatcagatgtggaaaaagtctgtgatcaagttctaattctaacaaaatcaggtatccataatctagaagatctaagagacaaagcgtcagccagtgtgaatcaactgaaccttttaataaaagtctcagacaatgaagcacaaaaattagctctgcgatttcctttaaatcaaaaagatcaatattataaggtacatttggaattgagtgaggcaaacaatcgtgaacaagcattagcaagtttttacaggtatttagttgagcaagaaatcacgccatacttcattgaattactggaagatagcctggaagacttctatttggaggtgattaaa

SEQ ID NO: 7194 - protein, 234 aa, Streptococcus agalactiae
  MISC_FEATURE (1)..(234): Xaa = Any Amino Acid
MTFGQTKSNQVIGYLPDVPKFYDYMTAQEYLQLCAGLAQNKTSLPIADLLEQVGLADNQQRISTYSRGMKQRLGLAQALIHXXKILICDEPTSALDPQGRQEILSIISQLRGQKTVIFSTHILSDVEKVCDQVLILTKSGIHNLEDLRDKASASVNQLNLLIKVSDNEAQKLALRFPLNQKDQYYKVHLELSEANNREQALASFYRYLVEQEITPYFIELLEDSLEDFYLEVIK

SEQ ID NO: 7195 - DNA, 168 bp, Streptococcus agalactiae
  misc_feature (1)..(168): n = a, c, g, or t
gtggggggggggggggggggggggggggggggggggggggggggggggggggggggggcggggggggkgggggggggggggggggggggggggggggggccggggggggggggggggggggcggggggggggggggggggggggggggtgggggnnnnnttaattaat

SEQ ID NO: 7196 - protein, 56 aa, Streptococcus agalactiae
  MISC_FEATURE (1)..(56): Xaa = Any Amino Acid
MGGGGGGGGGGGGGGGGGGAGGXGGGGGGGGGGPGGGGGGAGGGGGGGGVGXXLIN

SEQ ID NO: 7197 - DNA, 111 bp, Streptococcus agalactiae
  misc_feature (1)..(111): n = a, c, g, or t
ttgtcacctctgacaaagttaccaattttcccggcaagacatgcgtctgactatctacaacggttgctacaaaacggaaaccttgttgtgcacttgctgccnnnnnttaat

SEQ ID NO: 7198 - protein, 37 aa, Streptococcus agalactiae
  MISC_FEATURE (1)..(37): Xaa = Any Amino Acid
MSPLTKLPIFPARHASDYLQRLLQNGNLVVHLLPXXN

SEQ ID NO: 7199 - DNA, 522 bp, Streptococcus agalactiae
  misc_feature (1)..(522): n = a, c, g, or t
ttggtaactttgtcagaggtgacaagtggtcagcctaaaattattgcaagtgtgaaaacgaatgatgccggacaagctatttttaataatctccctataaaacgtaaccttagtgtgtctgttgatggacaagtaaaaggatatactattcgaactgacgtagcaggttctagtaaagcagctagttttasagcaacaggagtagggacaaatgagccaacgtattcaaaaaaaaccatagacatcacagtgagagaccagaatgctgaacctgtttcaggcaggacagttaccttaaaaacacaagctggtcgtgagattgctagcttggtttctggtgacaatggattaactcgctttactgatcgtttactagatggaacattctaccaatattttgttgatgggaaaaaaattggtgatattgtacctggagaatcaagaagtgcatatgttaatgttgcacctaaaaaagattattttacctttacagtcactgctttagataaagatggannnnnt

SEQ ID NO: 7200 - protein, 174 aa, Streptococcus agalactiae
  MISC_FEATURE (1)..(174): Xaa = Any Amino Acid
MVTLSEVTSGQPKIIASVKTNDAGQAIFNNLPIKRNLSVSVDGQVKGYTIRTDVAGSSKAASFXATGVGTNEPTYSKKTIDITVRDQNAEPVSGRTVTLKTQAGREIASLVSGDNGLTRFTDRLLDGTFYQYFVDGKKIGDIVPGESRSAYVNVAPKKDYFTFTVTALDKDGXX

SEQ ID NO: 7201 - DNA, 726 bp, Streptococcus agalactiae
  misc_feature (1)..(726): n = a, c, g, or t
gtgacttacccagatggttcaraagatactgtagatgtgactgttaaggttgtcgatccacgtacagatgccgataagaatgatccagcaggtaaagatcagcaagtcaatgtaggtgagacaccgaaggcagaagattctattggtaacttaccagatcttccgaaaggtacaacagtagcctttgaaactccagttgatacggcaacaccgggagacaaaccagcaaaagttgttgtgacttacccagatggttcaaaagatactgtagatgtgactgttaaggttgtcgatccacgtacagatgccgataagaatgatccagcaggtaaagatcagcaagtcaatgtatgtgagacaccgaaggcagaagattctattggtaacttaccagatcttccgaaaggtacaacagtagcctttgaaactccagttgatacggcaacaccgggagacaaaccagcaaaagttgttgtgacttacccagatggttcaaaagatactgtagatgtgactgttaaggttgtcgatccacgtacagatgccgataagaatgatccagcaggtaaagatcagcaagtcaatgtaggtgagacaccgaaggcagaagattctattggtaacttaccagatcttccgaaaggtacaacagtagcctttgaaactccagttgatacggcaacaccgggagacaaaccagcaaaagttgttgtgacnnnnnttaat

SEQ ID NO: 7202 - protein, 242 aa, Streptococcus agalactiae
  MISC_FEATURE (1)..(242): Xaa = Any Amino Acid
MTYPDGSXDTVDVTVKVVDPRTDADKNDPAGKDQQVNVGETPKAEDSIGNLPDLPKGTTVAFETPVDTATPGDKPAKVVVTYPDGSKDTVDVTVKVVDPRTDADKNDPAGKDQQVNVCETPKAEDSIGNLPDLPKGTTVAFETPVDTATPGDKPAKVVVTYPDGSKDTVDVTVKVVDPRTDADKNDPAGKDQQVNVGETPKAEDSIGNLPDLPKGTTVAFETPVDTATPGDKPAKVVVTXXN

SEQ ID NO: 7203 - DNA, 591 bp, Streptococcus agalactiae
  misc_feature (1)..(591): n = a, c, g, or t
gtgacttacccagatggttcaaaagatactgtagatgtgactgttaaggttgtcgatccacgtacagatgccgataagaatgatccagcaggtaaagatcagcaagtcaatgtaggtgagacaccgaaggcagaagattctattggtaacttaccagatcttccgaaaggtacaacagtagcctttgaaactccagttgatacggcaacaccgggagacaaaccagcaaaagttgttgtgacttacccagatggttcaaaagatactgtagatgtgactgttaaggttgtcgatccacgtacagatgccgataagaatgatccagcaggtaaagatcagcaagtcaatgtaggtgagacaccgaaggcagaagattctattggtaacttaccagatcttccgaaaggtacaacagtagcctttgaaactccagttgatacggcaacaccgggagacaaaccagcaaaagttgttgtgacttacccagatggttcaaaagatactgtagatgtgactgttaaggttgtcgatccacgtacagatgccgataagaatgatccagcaggtaaagatcagcnnnnnttaattaat

SEQ ID NO: 7204 - protein, 197 aa, Streptococcus agalactiae
  MISC_FEATURE (1)..(197): Xaa = Any Amino Acid
MTYPDGSKDTVDVTVKVVDPRTDADKNDPAGKDQQVNVGETPKAEDSIGNLPDLPKGTTVAFETPVDTATPGDKPAKVVVTYPDGSKDTVDVTVKVVDPRTDADKNDPAGKDQQVNVGETPKAEDSIGNLPDLPKGTTVAFETPVDTATPGDKPAKVVVTYPDGSKDTVDVTVKVVDPRTDADKNDPAGKDQXXLIN

SEQ ID NO: 7205 - DNA, 537 bp, Streptococcus agalactiae
  misc_feature (1)..(537): n = a, c, g, or t
gtgacttacccagatggttcaaaagatactgtagatgtgactgttaaggttgtcgatccacgtacagatgccgataagaatgatccagcaggtaaagatcagcaagtcaatgtaggtgagacaccgaaggcagaagattctattggtaacttaccagatcttccgaaaggtacaacagtagcctttgaaactccagttgatacggcaacaccgggagacaaaccagcaaaagttgttgtgacttacccagatggttcaaaagatactgtagatgtgactgttaaggttgtcgatccacgtacagatgccgataagaatgatccagcaggtaaagatcagcaagtcaatgtaggtaagacaccgaaggcagaagattctattggtaacttaccagatcttccgaaaggtacaacagtagcctttgaaactccagttgatacggcaacaccgggagacaaaccagcaaaagttgttgtgacttacccagatggttcaaaagatactgtaaatgtgactgttaaggttgtcgatnnnnnt

SEQ ID NO: 7206 - protein, 179 aa, Streptococcus agalactiae
  MISC_FEATURE (1)..(179): Xaa = Any Amino Acid
MTYPDGSKDTVDVTVKVVDPRTDADKNDPAGKDQQVNVGETPKAEDSIGNLPDLPKGTTVAFETPVDTATPGDKPAKVVVTYPDGSKDTVDVTVKVVDPRTDADKNDPAGKDQQVNVGKTPKAEDSIGNLPDLPKGTTVAFETPVDTATPGDKPAKVVVTYPDGSKDTVNVTVKVVDXX

SEQ ID NO: 7207 - DNA, 90 bp, Streptococcus agalactiae
  misc_feature (1)..(90): n = a, c, g, or t
ttgtatcccagcaataaaagtatttttaccgaaatcaaagtaagaaccaaaaggagatgggggtactctgtcttagttttnnnnnttaat

SEQ ID NO: 7208 - protein, 30 aa, Streptococcus agalactiae
  MISC_FEATURE (1)..(30): Xaa = Any Amino Acid
MYPSNKSIFTEIKVRTKRRWGYSVLVXXXN

SEQ ID NO: 7209 - DNA, 498 bp, Streptococcus agalactiae
  misc_feature (1)..(498): n = a, c, g, or t
gtgacttacccagatggttcaaaagatactgtagatgtgactgttaaggttgtcgatccacgtacagatgccgataagaatgatccagcaggtaaagatcagcaagtcaatgtaggtgagacaccgaaggcagaagattctattggtaacttaccagatcttccgaaaggtacaacagtagcctttgaaactccagttgatacggcaacaccgggagacaaaccagcaaaagttgttgtgacttacccagatggttcaaaagatactgtagatgtgactgttaaggttgtcgatccacgtacagatgccgataagaatgatccagcaggtaaagatcagcaagtcaatgtaggtgagacaccgaaggcagaagattctattggtaacttaccagatcttccgaaaggtacaacagtagcctttgaaactccagttgatacggcaacaccgggagacaaaccagcaaaagttgttgtgacttaccnnnnnttaattaat

SEQ ID NO: 7210 - protein, 166 aa, Streptococcus agalactiae
  MISC_FEATURE (1)..(166): Xaa = Any Amino Acid
MTYPDGSKDTVDVTVKVVDPRTDADKNDPAGKDQQVNVGETPKAEDSIGNLPDLPKGTTVAFETPVDTATPGDKPAKVVVTYPDGSKDTVDVTVKVVDPRTDADKNDPAGKDQQVNVGETPKAEDSIGNLPDLPKGTTVAFETPVDTATPGDKPAKVVVTYXXLIN

SEQ ID NO: 7211 - DNA, 219 bp, Streptococcus agalactiae
ttggatatgagcacagcagtaaaaatgtttttgattcaatctgttaaaactcaaagtattccttttgaaataaaaaataaatcatctgtttctgatgaagaatttcaaaatttggtagaaacaaaattaaagggaatacgagttaaggctagtgatccagaaagtgtaaatgcgttttttggagatgaagatttttcagaatatgaggaatattttaaa

SEQ ID NO: 7212 - protein, 73 aa, Streptococcus agalactiae
MDMSTAVKMFLIQSVKTQSIPFEIKNKSSVSDEEFQNLVETKLKGIRVKASDPESVNAFFGDEDFSEYEEYFK

SEQ ID NO: 7213 - DNA, 222 bp, Streptococcus agalactiae
ttggtagcacgttttgattctatcttatctgacaacggtgcaactgttgttgaatcaaaagattgggaaaaacgtcgtcttgcatacgaaatccaagatttcactgaaggactttaccatatcgttaacgttgaagctgaagatgcagtagctcttaatgagtttgatcgtctttcaaaaatcaacggtgacattcttcgtcacatgatcgttaaagtagac

SEQ ID NO: 7214 - protein, 74 aa, Streptococcus agalactiae
MVARFDSILSDNGATVVESKDWEKRRLAYEIQDFTEGLYHIVNVEAEDAVALNEFDRLSKINGDILRHMIVKVD

SEQ ID NO: 7215 - DNA, 288 bp, Streptococcus pyogenes
atggctaaatacgaaattctttatatcattcgtccaaacattgaagaagaagctaaaaacgctttggtagcacgctttgactctatcttgactgacaacggtgcaactgttgttgaatcaaaagattgggaaaaacgtcgtcttgcatacgaaatcaacgatttccgtgaaggactttaccacatcgttaaccttgaagcgactgacgcagcagctcttaacgagtttgaccgtctttcaaaaatcaatggtgacattcttcgtcacatgatcgttaaacttgacgct

SEQ ID NO: 7216 - protein, 96 aa, Streptococcus pyogenes
MAKYEILYIIRPNIEEEAKNALVARFDSILTDNGATVVESKDWEKRRLAYEINDFREGLYHIVNLEATDAAALNEFDRLSKINGDILRHMIVKLDA

SEQ ID NO: 7217 - DNA, 342 bp, Streptococcus agalactiae
  misc_feature (1)..(342): n = a, c, g, or t
atgattaataatgtagtacttgtaggtcgcatgacccgtgatgcagaacttcgttatacaccaagtaatcaagcggtagccactttttcacttgcagttaatcgtaattttaaaaatcaatctggcgaacgtgaggctgattttattaactgtgttatttggcgccaacaagctgaaaacttggctaactgggcaaaaaaaggtgctttggttggaattacaggtcgtatccaaacgcgtaattatgaaaaccaacaaggtcaacgtgtctatgtaacagaagtttgttgcggaaagtttccaattattggaaagtcgtgctacacgannnnnttaattaat

SEQ ID NO: 7218 - protein, 114 aa, Streptococcus agalactiae
  MISC_FEATURE (1)..(114): Xaa = Any Amino Acid
MINNVVLVGRMTRDAELRYTPSNQAVATFSLAVNRNFKNQSGEREADFINCVIWRQQAENLANWAKKGALVGITGRIQTRNYENQQGQRVYVTEVCCGKFPIIGKSCYTXXLIN

SEQ ID NO: 7219 - DNA, 657 bp, Streptococcus agalactiae
  misc_feature (1)..(657): n = a, c, g, or t
gtgactgttaaggttgtcgatccacgtacagatgccgataagaatgatccagcaggtaaagatcagcaagtcaatgtaggtgagacaccgaaggcagaagattctattggtaacttaccagatcttccgaaaggtacaacagtagcctttgaaactccagttgatacggcaacaccgggagacaaaccagcaaaagttgttgtgacttacccagatggttcaaaagatactgtagatgtgactgttaaggttgtcgatccacgtacagatgccgataagaatgatccagcaggtaaagatcagcaagtcaatgtaggtgagacaccgaaggcagaagattctattggtaacttaccagatcttccgaaaggtacaacagtagcctttgaaactccagttgatacggcaacaccgggagacaaaccagcaaaagttgttgtgacttacccagatggttcaaaagatactgtagatgtgactgttaaggttgtcgatccacgtacagatgccgataagaatgatccagcaggtaaagatcagcaagtcaatgtaggtgagacaccgaaggcagaagaatctattggtaacttaccagatcttccgaaaggtacaacagtagcctttgaaactccagttgatacggnnnnnttaattaat

SEQ ID NO: 7220 - protein, 219 aa, Streptococcus agalactiae
  MISC_FEATURE (1)..(219): Xaa = Any Amino Acid
MTVKVVDPRTDADKNDPAGKDQQVNVGETPKAEDSIGNLPDLPKGTTVAFETPVDTATPGDKPAKVVVTYPDGSKDTVDVTVKVVDPRTDADKNDPAGKDQQVNVGETPKAEDSIGNLPDLPKGTTVAFETPVDTATPGDKPAKVVVTYPDGSKDTVDVTVKVVDPRTDADKNDPAGKDQQVNVGETPKAEESIGNLPDLPKGTTVAFETPVDTXXLIN

SEQ ID NO: 7221 - DNA, 105 bp, Streptococcus pyogenes
gtggaaaataaattaacactgttaatttgggttctccacaacctgtggaaaagccattttaaggggacaccgctattgttttcaactatttttcatgtggaaaac

SEQ ID NO: 7222 - protein, 35 aa, Streptococcus pyogenes
VENKLTLLIWVLHNLWKSHFKGTPLLFSTIFHVEN

SEQ ID NO: 7223 - DNA, 117 bp, Streptococcus pyogenes
atgaataagaagaaaatttcagatttgcttatcattatgccactctttcaccttcatttaaattatcaaagtttggtgtattattctcattttgatatagtttgccgagaaactaag

SEQ ID NO: 7224 - protein, 39 aa, Streptococcus pyogenes
MNKKKISDLLIIMPLFHLHLNYQSLVYYSHFDIVCRETK

SEQ ID NO: 7225 - DNA, 123 bp, Streptococcus pyogenes
atgatgatggacaatattgtaaaaaaaatagaagcatttcttgctttttctgataaaaaattagcagagctgcaacaggaaaatcaaaaagttaaagaagaaagtcagtatattcaaaaaaac

SEQ ID NO: 7226 - protein, 41 aa, Streptococcus pyogenes
MMMDNIVKKIEAFLAFSDKKLAELQQENQKVKEESQYIQKN

SEQ ID NO: 7227 - DNA, 153 bp, Streptococcus pyogenes
ttgttatttagcagtaatataattgaaaaacagaaacattttgtaaaaaaagagttgacaatgacagtaaagatatcgtatactaataaagctgtcagagaggttcctgtaacacacttattgaaaaaagatgaaaaagtagttgacaggcta

SEQ ID NO: 7228 - protein, 51 aa, Streptococcus pyogenes
LLFSSNIIEKQKHFVKKELTMTVKISYTNKAVREVPVTHLLKKDEKVVDRL

SEQ ID NO: 7229 - DNA, 111 bp, Streptococcus pyogenes
ttggtagagcaattgacttttaatcaatgggtcactggttcgagcccagtacgggtcataaaagcgggtttggcggaattggcagacgcaccagatttaggatctggcgct

SEQ ID NO: 7230 - protein, 37 aa, Streptococcus pyogenes
LVEQLTFNQWVTGSSPVRVIKAGLAELADAPDLGSGA

SEQ ID NO: 7231 - DNA, 1641 bp, Streptococcus pyogenes
atggcaaatattcaaataaatagaataaaaagtaaattgacagaactgtttagtagtattatctatatgggtaatatcaaagttgatgaggactctgaagagtataaaaaaatgtggtatagtagggcttactcagcttattcaacttttctacttggagcagaaaatgtagatgaagcaactaagtcagttacggatggatttgctgataatggcatagatgccatctataacgataaaaataaaaaaattttatattttattcaaactaaatttagcaatgaagcaaacggaagcatttctgaaggtgatacattaaaatttattaaaggggttaaaaaaatcaccacttcagatttttcaaattttaatgatctcatagtagcaaagcaaaaagaaatagaaaaagctttatcagattttaattatcgaatagaaattatagtttgtacttcctctaatcaaaatatatcttcaaatagtcaagaagtaatagatgattttttgcagggtgtaaattctgatggtagtgatgatgtagtaacatacagacatataaaacttaatgatgtttatgatcatatggctaatcaaggagtggctcctaaaatagatttcgaggacgttgtcgttcataattggggcagacctacattatacaatgacagttataaagtctattatggatggttatctgctactgatatagttaactggaaagagcaatatggagatcgaatatttgaaaagaatattcggaactttaagcaaaatacggatgttaataacggaataaaaataatttctgaaaaagttgaaaaaaatctaaaaggtgtttcaacaacggattatatcaatttaaaattgattggagcaagtataattaatggagcgcaaacaacgggttctttatttgaagcataccattctgaagatattgatttgacaaatgtttcagtccaagttcaaataatagtattaggagaagatattgataatatcggacctaaaataactaagttatcgaatactcaaaatagaatagaaaataaagattttgctgctcaggataaagaacaagaaagattgatgaaagatcttgcaattgatggtaaacagtatgtgtatcgtcaaggtgtcgagctacctaattctgatgaaggttgtgatctggatagtgcaacagtggctctaggttgctatttagatgatgttgcaatttctacacagatgaagagagcatatggtagcatttttgacaatactaataaacctccatataagctaatctttaattccggaacttctgcatataaattatggaattgcgttgaagtgtatcgcgaattacaaaacatagaaggggagtatcaacaagatccaaataatcaatctaaaaagttgatgtctattcatggaaatagatttattcttcatttgattttccaaaagttaaaaaataacccaagtttagatttcgagaatggatatattacaacttttccaaatttaactgaagagtattgtttaataatggaagaattgataagagcgaaggaagagttatacccagaagcttatccagctaatatatttaaaaatggtaaacgtactaaagaattaaaagaaaaaatgtctttt

SEQ ID NO: 7232 - protein, 547 aa, Streptococcus pyogenes
MANIQINRIKSKLTELFSSIIYMGNIKVDEDSEEYKKMWYSRAYSAYSTFLLGAENVDEATKSVTDGFADNGIDAIYNDKNKKILYFIQTKFSNEANGSISEGDTLKFIKGVKKITTSDFSNFNDLIVAKQKEIEKALSDFNYRIEIIVCTSSNQNISSNSQEVIDDFLQGVNSDGSDDVVTYRHIKLNDVYDHMANQGVAPKIDFEDVVVHNWGRPTLYNDSYKVYYGWLSATDIVNWKEQYGDRIFEKNIRNFKQNTDVNNGIKIISEKVEKNLKGVSTTDYINLKLIGASIINGAQTTGSLFEAYHSEDIDLTNVSVQVQIIVLGEDIDNIGPKITKLSNTQNRIENKDFAAQDKEQERLMKDLAIDGKQYVYRQGVELPNSDEGCDLDSATVALGCYLDDVAISTQMKRAYGSIFDNTNKPPYKLIFNSGTSAYKLWNCVEVYRELQNIEGEYQQDPNNQSKKLMSIHGNRFILHLIFQKLKNNPSLDFENGYITTFPNLTEEYCLIMEELIRAKEELYPEAYPANIFKNGKRTKELKEKMSF

SEQ ID NO: 7233 - DNA, 435 bp, Streptococcus pyogenes
atgaaaaaagtatgttttgtctgtctgggtaatatttgtcgaagccccatggctgagtttgtaatgaagtcaatagtatcaagtgatgttatgatgatagaaagtcgtgctacttctgattgggagcatggaaaccctattcactcaggtacacagtccatattaaaaacttaccaaattaattatgatataactaaatgctccaagcagataactataactgattttaacacctttgactatattattggtatggatagcgataatgtgaaaaatctcaaagagatgtcgcaacatcaatgggactctaaaatctacctgtttagagaagggggtgttcctgatccttggtacactaacgattttgaagaaacctaccaattagttagaaaaggatgccaggattggctttctcgtttaatgagtaaagagtat

SEQ ID NO: 7234 - protein, 145 aa, Streptococcus pyogenes
MKKVCFVCLGNICRSPMAEFVMKSIVSSDVMMIESRATSDWEHGNPIHSGTQSILKTYQINYDITKCSKQITITDFNTFDYIIGMDSDNVKNLKEMSQHQWDSKIYLFREGGVPDPWYTNDFEETYQLVRKGCQDWLSRLMSKEY

SEQ ID NO: 7235 - DNA, 105 bp, Streptococcus pyogenes
atgatatatttagaaaataaaatgatttcttatgactttaatcataagaaatcatttcctggtatcaacattaaaaatcacttacgtcgtcctggacgttcagca

SEQ ID NO: 7236 - protein, 35 aa, Streptococcus pyogenes
MIYLENKMISYDFNHKKSFPGINIKNHLRRPGRSA

SEQ ID NO: 7237 - DNA, 390 bp, Streptococcus pyogenes
gtgttcaagttccatcaaacactaactgtacttgcaaaatctcaccgattaaagtttgatttctacgttgacaccacttggaagatcaagtttcatcaaagcatcaacagttttttgtgttggattgatgatgtctaccaaacgtttgtgtgtacgcatttcaaattgttcgcgagaatctttgtatttgtgagtcgcacgaataattgtgtaaagactgcgttcagttggaagtggaactggtccagcaactgtagcacctgtacgtgttgcagtttcaacgattttttctgccgctgtatcaagtgtacggtgttcgtacgctttcaaacggatacggatttttttgtttgccatcttttctcctctcgtctatttacgataataggc

SEQ ID NO: 7238 - protein, 130 aa, Streptococcus pyogenes
VFKFHQTLTVLAKSHRLKFDFYVDTTWKIKFHQSINSFLCWIDDVYQTFVCTHFKLFARIFVFVSRTNNCVKTAFSWKWNWSSNCSTCTCCSFNDFFCRCIKCTVFVRFQTDTDFFVCHLFSSRLFTIIG

SEQ ID NO: 7239 - DNA, 321 bp, Streptococcus pyogenes
ttgttgattggtgaagctgaacctttcgcacgtggacggaaacgtttcattgttggtccttcgttagcgaatgtttcagatactaccaagtttgctttttccaaaccaaagttgttttctgcgttagcaattgctgagttaagagttttctcaataacacgagctgctttgtttggagtgaattttaagattgcgattgcgtcagcaactttcttaccacggataagatcaagtactaaacgtgttttacgaggtgaaacacgcactgtacgagccattgctttagctgaagtaatttctgccattgtgtcctcctcctat

SEQ ID NO: 7240 - protein, 107 aa, Streptococcus pyogenes
LLIGEAEPFARGRKRFIVGPSLANVSDTTKFAFSKPKLFSALAIAELRVFSITRAALFGVNFKIAIASATFLPRIRSSTKRVLRGETRTVRAIALAEVISAIVSSSY

SEQ ID NO: 7241 - DNA, 450 bp, Streptococcus pyogenes
gtgagggattgttgtaccaaccattggtacttcgatcatgtttttcttagcagcttcaactgctttacggatagcttctggaacttcttgagctttaccagtaccaaatccaacacgaccatttccatcaccaacaactacaagagctgcaaagcgaagacgacgtccacctttaacaacttttgtaacgcggttaatcgcaacaacgcgttcttcaagttcaactgcattatctttaaatgccattattttgtgtcctccctattagaatttcaatccgttttcacgagctgcatcagccaaggctttaacacgtccgtgatagagatatccaccgcggtcaaacaccacttcagaaatacctttagccactgcacgttcagcaacaagtttgccgactacaacggcttgttctgtttttgttcctttagaaacgtctttatcaagagt

SEQ ID NO: 7242 - protein, 150 aa, Streptococcus pyogenes
VRDCCTNHWYFDHVFLSSFNCFTDSFWNFLSFTSTKSNTTISITNNYKSCKAKTTSTFNNFCNAVNRNNAFFKFNCIIFKCHYFVSSLLEFQSVFTSCISQGFNTSVIEISTAVKHHFRNTFSHCTFSNKFADYNGLFCFCSFRNVFIKS

SEQ ID NO: 7243 - DNA, 114 bp, Streptococcus pyogenes
atgaaggtaagaccatcggttaaaccaatttgcgaatactgtaaagttattcgccgtaatggtcgtgttatggtaatttgtccgacaaatccaaaacacaaacaacgtcaagga

SEQ ID NO: 7244 - protein, 38 aa, Streptococcus pyogenes
MKVRPSVKPICEYCKVIRRNGRVMVICPTNPKHKQRQG

SEQ ID NO: 7245 - DNA, 363 bp, Streptococcus pyogenes
atggctcgtattgctggagttgatattccaaatgataaacgcgtagtaatttcacttacttatgtttacggaattggtcttgcaacatctaaaaaaatcttagcagctgcaggtatttctgaagatatccgtgttaaagatttaacatcagatcaagaagatgctatccgtcgtgaagtggatgcaatcaaagttgaaggtgaccttcgacgtgaagtaaacatgaacattaaacgtttgatggaaatcggttcataccgtggaatccgtcatcgtcgtggacttcctgtccgtggacaaaatactaaaaacaatgctcgcactcgtaaagggaaagctgttgcgattgcaggtaagaaaaaa

SEQ ID NO: 7246 - protein, 121 aa, Streptococcus pyogenes
MARIAGVDIPNDKRVVISLTYVYGIGLATSKKILAAAGISEDIRVKDLTSDQEDAIRREVDAIKVEGDLRREVNMNIKRLMEIGSYRGIRHRRGLPVRGQNTKNNARTRKGKAVAIAGKKK

SEQ ID NO: 7247 - DNA, 102 bp, Streptococcus pyogenes
gtgtctcgccgtactcaggatactgctagggctcaaaagaattttaaatacgaggcttttactctctttggcttaccttcccaggtaattcttctatccttt

SEQ ID NO: 7248 - protein, 34 aa, Streptococcus pyogenes
VSRRTQDTARAQKNFKYEAFTLFGLPSQVILLSF

SEQ ID NO: 7249 - DNA, 378 bp, Streptococcus pyogenes
ttgactgcgagagctacaactcgagcagggacgaaagtcgggcttagtgatcccggtggtaccgaatggaagggccatcgctcaacggataaaagctaccctggggataacaggcttatctcccccaagagttcacatcgacggggaggtttggcacctcgatgtcggctcgtcgcatcctggggctgtagtcggtcccaagggttgggctgttcgcccattaaagcggcacgcgagctgggttcagaacgtcgtgagacagttcggtccctatccgtcgcgggcgtaggaaatttgagaggatctgctcctagtacgagaggaccagagtggacttaccgctggtgtaccagttgtcttgccaaaggcatcgctggg

SEQ ID NO: 7250 - protein, 126 aa, Streptococcus pyogenes
LTARATTRAGTKVGLSDPGGTEWKGHRSTDKSYPGDNRLISPKSSHRRGGLAPRCRLVASWGCSRSQGLGCSPIKAARELGSERRETVRSLSVAGVGNLRGSAPSTRGPEWTYRWCTSCLAKGIAG

SEQ ID NO: 7251 - DNA, 183 bp, Streptococcus pyogenes
ttgagttttgagatatttacactgataatcgggtggaaactggtcgggtatcgggtaatggagtgtggttcttcgtttaagcaaggagattatcgtttggtggttcatatttgcttgttaaatgttagggatgagatgctgagtcagcaaggccatgaagataaagctgactggctagagcct

SEQ ID NO: 7252 - protein, 61 aa, Streptococcus pyogenes
LSFEIFTLIIGWKLVGYRVMECGSSFKQGDYRLVVHICLLNVRDEMLSQQGHEDKADWLEP

SEQ ID NO: 7253 - DNA, 93 bp, Streptococcus pyogenes
ttggtggaagtcctttttggtgagatggcacagcatatagtaatattagatcctgaggaagaattgggactttcattaggcttgactggggta

SEQ ID NO: 7254 - protein, 31 aa, Streptococcus pyogenes
LVEVLFGEMAQHIVILDPEEELGLSLGLTGV

SEQ ID NO: 7255 - DNA, 150 bp, Streptococcus pyogenes
atgattttacaattaatatctagaaaaaatgttcaagtcgagataccaaaatctggtttaaccaaaaccacccaagacgataacagccccaaaatgcgacaaaccacttcacctttaccagtgacttgggcacaacctgaaagcaagcaa

SEQ ID NO: 7256 - protein, 50 aa, Streptococcus pyogenes
MILQLISRKNVQVEIPKSGLTKTTQDDNSPKMRQTTSPLPVTWAQPESKQ

SEQ ID NO: 7257 - DNA, 324 bp, Streptococcus pyogenes
atgattaatcaatggaacaacttacgacacaagaagctaaaaggatttactcttctagaaatgttattggtgattcttgtcatcagtgttttgatgctattatttgtgcctaatttaagcaagcaaaaagacagggttacagaaacaggtaatgccgctgttgttaaattagtggagaatcaagcagaactatatgaattatctcaaggctcaaaaccaagtttgagccagttaaaggcagatggtagtatcactgagaaacaagaaaaagcttatcaagactattatgacaaacataaaaatgaaaaagcccgtcttagcaat

SEQ ID NO: 7258 - protein, 108 aa, Streptococcus pyogenes
MINQWNNLRHKKLKGFTLLEMLLVILVISVLMLLFVPNLSKQKDRVTETGNAAVVKLVENQAELYELSQGSKPSLSQLKADGSITEKQEKAYQDYYDKHKNEKARLSN

SEQ ID NO: 7259 - DNA, 426 bp, Streptococcus pyogenes
atgaaaaagcccgtcttagcaattaaagcttttactttgcttgaaactttactaagtttgtcagtgatgagtttcattatattgggattgtctgtaccagtgacaaaaagctatcaaaaagtagaagagcatctgttttttagccattttgaacatttgtatcgacatcagcaaaagttagccatattacagcaaaaacagcgcgtcttggatatttcttcaacaaaaattgttacagaaggtaatagcctaacagttcctaaatcaataacagtgaatcatccttatcggttagttattgatcagatgggaggcaaccattccttagctaaaattatttttgacatgactgatcgacgctttaaataccaattttatctagggagtgggaattatcaaaaaacaagtcaaagcttacatagccct

SEQ ID NO: 7260 - protein, 142 aa, Streptococcus pyogenes
MKKPVLAIKAFTLLETLLSLSVMSFIILGLSVPVTKSYQKVEEHLFFSHFEHLYRHQQKLAILQQKQRVLDISSTKIVTEGNSLTVPKSITVNHPYRLVIDQMGGNHSLAKIIFDMTDRRFKYQFYLGSGNYQKTSQSLHSP

SEQ ID NO: 7261 - DNA, 234 bp, Streptococcus pyogenes
atgatcgcaacaggcatcctctttagtattgtcattctcgtcttaagcagtttacagcagagtcaggctgctctaacgtactatcgaaagcagcaagaaaagcttaatctagccttgatggcagtacaaactagaactaaagagatgacattgaatggttgtcatattactattttacgtacggatagatacattagtattcacgatgacgaaggagaagtgatgaagattgag

SEQ ID NO: 7262 - protein, 78 aa, Streptococcus pyogenes
MIATGILFSIVILVLSSLQQSQAALTYYRKQQEKLNLALMAVQTRTKEMTLNGCHITILRTDRYISIHDDEGEVMKIE

SEQ ID NO: 7263 - DNA, 324 bp, Streptococcus pyogenes
atgcctttcaagactaatctcaaagcaggcatccttttgtatgctatgtttatggctagtatttttttgctggttttacaggtttacctttctcaagtgacagctctacacaaggaataccaagctcaaactgactatgttaaagcccgactgatagcagaaatagtttatcaagatcatagatataaagcttctaatcctgtcttttttaaaggtggtcaagtcatttgtcgagagcgaaaagagagatggatgttaattgttaagttagatcagcaacgacagtatcagtttgaataccttaaacccaaacaatatagtcaa

SEQ ID NO: 7264 - protein, 108 aa, Streptococcus pyogenes
MPFKTNLKAGILLYAMFMASIFLLVLQVYLSQVTALHKEYQAQTDYVKARLIAEIVYQDHRYKASNPVFFKGGQVICRERKERWMLIVKLDQQRQYQFEYLKPKQYSQ

SEQ ID NO: 7265 - DNA, 306 bp, Streptococcus pyogenes
ttgtatgtgtttatagagcccaatgatctaaaagactatttgataacggtttatgatgagcgtaatcgtgcgattcgaaaacagacacaagtttactgcttttacctgatgattgttctatttgttgccttattctttttcttcccttgcttaaccattcgagatcttgtttcttataagctacctttgatttttgcttacctttacttgattatcagaagtctggtggctaagaaaatggaggcactagggaaaataacaactaatagtcaaaaacctccgtttgatacgagtcaggttctttgt

SEQ ID NO: 7266 - protein, 102 aa, Streptococcus pyogenes
LYVFIEPNDLKDYLITVYDERNRAIRKQTQVYCFYLMIVLFVALFFFFPCLTIRDLVSYKLPLIFAYLYLIIRSLVAKKMEALGKITTNSQKPPFDTSQVLC

SEQ ID NO: 7267 - DNA, 162 bp, Streptococcus pyogenes
atgactccattatccttacttttcgctagtgaagagtcttttcgcatcctaagcgccctactattcttattaaccagcttgtgctttatcattttaatgatttccttgctgcctaaaaaaacaggttatcgccaaaagacaaacacttcttccagagatctc

SEQ ID NO: 7268 - protein, 54 aa, Streptococcus pyogenes
MTPLSLLFASEESFRILSALLFLLTSLCFIILMISLLPKKTGYRQKTNTSSRDL

SEQ ID NO: 7269 - DNA, 2286 bp, Streptococcus pyogenes
ttgagaggagagaaaatgaaaaaaacaaggtttccaaataagcttaatactcttaatactcaaagggtattaagtaaaaactcaaaacgatttactgtcactttagtgggagtctttttaatgatcttcgctttggtaacttccatggttggtgctaagactgtttttggtttagtagaatcctcgacgccaaacgcaataaatccagattcaagttcggaatacagatggtatggatatgaatcttatgtaagagggcatccatattataaacagtttagagtagcacacgatttaagggttaacttagaaggaagtagaagttatcaagtttattgctttaatttaaagaaagcatttcctctcggatcagatagtagtgttaaaaagtggtataaaaaacatgatggaatctctacaaaatttgaagattatgcgatgagccctagaattacgggagatgagctaaatcagaagttacgagctgttatgtataatggacatccacaaaatgccaatggtattatggaaggcttggaacccttgaatgctatcagagttacacaagaggcggtatggtactattctgataatgctcctatttctaatccagatgaaagttttaaaagggagtcagaaagtaacttggttagtacttctcaattatctttgatgcgtcaagctttgaagcaactgattgatccgaatttggcaactaaaatgccaaaacaagttccggatgattttcagctaagtatttttgagtctgaggacaagggagataaatataataaaggataccaaaatcttttgagtggtggtttagttcctactaaaccaccaactccaggagacccaccaatgcctccaaatcaacctcaaacgacttcagtacttattagaaagtatgctataggtgattactctaaattgcttgaaggtgcaacattacagttgacaggggataacgtgaatagttttcaagcgagagtgtttagcagtaatgatattggagaaagaattgaactatcagatggaacttatactttaactgaattgaattctccagctggttatagtatcgcagagccaatcacttttaaggttgaagctggcaaagtgtatactattattgatggaaaacagattgaaaatcccaataaagagatagtagagccttactcagtagaagcatataatgattttgaagaatttagcgttttaactacacaaaactatgcaaaattttattatgcaaaaaataaaaatggaagttcacaggttgtctattgctttaatgcagatctaaaatctccaccagactctgaagatggtgggaaaacaatgactccagactttacaacaggagaagtaaaatacactcatattgcaggtcgtgacctctttaaatatactgtgaaaccaagagataccgatcctgacactttcttaaaacatatcaaaaaagtaattgagaagggttacagggaaaaaggacaagctattgagtatagtggtctaactgagacacaattgcgtgcggctactcagttagcaatatattatttcactgatagtgctgaattagataaggataaactaaaagactatcatggttttggagacatgaatgatagtactttagcagttgctaaaatccttgtagaatacgctcaagatagtaatcctccacagctaactgaccttgatttctttattccgaataacaataaatatcaatctcttattggaactcagtggcatccagaagatttagttgatattattcgtatggaagataaaaaagaagttatacctgtaactcataatttaacattgagaaaaacggtgactggtttagctggtgacagaactaaagatttccattttgaaattgaattaaaaaataataagcaagaattgctttctcaaactgttaaaacagataaaacaaacctcgaatttaaagatggtaaagcaaccattaatttaaaacatggggaaagtttaacacttcaaggtttaccagaaggttattcttaccttgtcaaagaaacagattctgaaggctataaggttaaagttaatagccaagaagtagcaaatgctacagtttcaaaaacaggaataacaagtgatgagacacttgcttttgaaaataataaagagcctgttgttcctacaggagttgatcaaaagatcaatggctatctagctttgatagttatcgctggtatcagtttggggatctggggaattcacacgataaggataagaaaacatgac

SEQ ID NO: 7270 - protein, 762 aa, Streptococcus pyogenes
LRGEKMKKTRFPNKLNTLNTQRVLSKNSKRFTVTLVGVFLMIFALVTSMVGAKTVFGLVESSTPNAINPDSSSEYRWYGYESYVRGHPYYKQFRVAHDLRVNLEGSRSYQVYCFNLKKAFPLGSDSSVKKWYKKHDGISTKFEDYAMSPRITGDELNQKLRAVMYNGHPQNANGIMEGLEPLNAIRVTQEAVWYYSDNAPISNPDESFKRESESNLVSTSQLSLMRQALKQLIDPNLATKMPKQVPDDFQLSIFESEDKGDKYNKGYQNLLSGGLVPTKPPTPGDPPMPPNQPQTTSVLIRKYAIGDYSKLLEGATLQLTGDNVNSFQARVFSSNDIGERIELSDGTYTLTELNSPAGYSIAEPITFKVEAGKVYTIIDGKQIENPNKEIVEPYSVEAYNDFEEFSVLTTQNYAKFYYAKNKNGSSQVVYCFNADLKSPPDSEDGGKTMTPDFTTGEVKYTHIAGRDLFKYTVKPRDTDPDTFLKHIKKVIEKGYREKGQAIEYSGLTETQLRAATQLAIYYFTDSAELDKDKLKDYHGFGDMNDSTLAVAKILVEYAQDSNPPQLTDLDFFIPNNNKYQSLIGTQWHPEDLVDIIRMEDKKEVIPVTHNLTLRKTVTGLAGDRTKDFHFEIELKNNKQELLSQTVKTDKTNLEFKDGKATINLKHGESLTLQGLPEGYSYLVKETDSEGYKVKVNSQEVANATVSKTGITSDETLAFENNKEPVVPTGVDQKINGYLALIVIAGISLGIWGIHTIRIRKHD

SEQ ID NO: 7271 - DNA, 159 bp, Streptococcus pyogenes
atgagtaagggctttattgcttctttatctgaaaatgatagtttgttaagttctccagatgaattagaagttctgaaatcagctctagtcatgttttcttatccttatcgtgtgaattccccagatccccaaactgataccagcgataactatcaaagc

SEQ ID NO: 7272 - protein, 53 aa, Streptococcus pyogenes
MSKGFIASLSENDSLLSSPDELEVLKSALVMFSYPYRVNSPDPQTDTSDNYQS

SEQ ID NO: 7273 - DNA, 393 bp, Streptococcus pyogenes
atgattatcaaaagaaacgatatggctcctagtgtaaaagcaggagatgctattttattttatcgcttatctcagacttataaagtagaagaagcagttgtttatgaggactctaaaacatctataacgaaagtcggtcggattattgctcaagcaggtgatgaagtggacctgacagaacaaggtgaattaaaaattaatggccatattcaaaatgaaggactaacttttataaaatcaagagaagctaattatccgtatcgaattgctgataatagttatttgatactcaatgattactatagccaagagagtgagaattacctacaagatgcaattgctaaagatgctataaaaggcacgattaatacacttattcgattaagaaaccat

SEQ ID NO: 7274 - protein, 131 aa, Streptococcus pyogenes
MIIKRNDMAPSVKAGDAILFYRLSQTYKVEEAVVYEDSKTSITKVGRIIAQAGDEVDLTEQGELKINGHIQNEGLTFIKSREANYPYRIADNSYLILNDYYSQESENYLQDAIAKDAIKGTINTLIRLRNH

SEQ ID NO: 7275 - DNA, 1020 bp, Streptococcus pyogenes
atgaaattacgtcacttactattaacgggagcagccctaactagttttgctgctacaacagttcacggggagactgttgtaaacggagccaaactaacagttacaaaaaaccttgatttagttaatagcaatgcattaattccaaatacagattttacatttaaaatcgaacctgatactactgtcaacgaagacggaaataagtttaaaggtgtagctttgaacacaccgatgactaaagtcacttacaccaattcagataaaggtggatcaaatacgaaaactgcagaatttgatttttcagaagttacttttgaaaaaccaggtgtttattattacaaagtaactgaggagaagatagataaagttcctggtgtttcttatgatacaacatcttacactgttcaagttcatgtcttgtggaatgaagagcaacaaaaaccagtagctacttatattgttggttataaagaaggtagtaaggtgccaattcagttcaaaaatagcttagattctactacattaacggtgaagaaaaaagtttcaggtaccggtggagatcgctctaaagattttaattttggtctgactttaaaagcaaatcagtattataaggcgtcagaaaaagtcatgattgagaagacaactaaaggtggtcaagctcctgttcaaacagaggctagtatagatcaactctatcattttaccttgaaagatggtgaatcaatcaaagtcacaaatcttccagtaggtgtggattatgttgtcactgaagacgattacaaatcagaaaaatatacaaccaacgtggaagttagtcctcaagatggagctgtaaaaaatatcgcaggtaattcaactgaacaagagacatctactgataaagatatgaccattacttttacaaataaaaaagactttgaagtgccaacaggagtagcaatgactgtggcaccatatattgctttaggaattgtagcagttggtggagctctttactttgttaaaaagaaaaatgct

SEQ ID NO: 7276 - protein, 340 aa, Streptococcus pyogenes
MKLRHLLLTGAALTSFAATTVHGETVVNGAKLTVTKNLDLVNSNALIPNTDFTFKIEPDTTVNEDGNKFKGVALNTPMTKVTYTNSDKGGSNTKTAEFDFSEVTFEKPGVYYYKVTEEKIDKVPGVSYDTTSYTVQVHVLWNEEQQKPVATYIVGYKEGSKVPIQFKNSLDSTTLTVKKKVSGTGGDRSKDFNFGLTLKANQYYKASEKVMIEKTTKGGQAPVQTEASIDQLYHFTLKDGESIKVTNLPVGVDYVVTEDDYKSEKYTTNVEVSPQDGAVKNIAGNSTEQETSTDKDMTITFTNKKDFEVPTGVAMTVAPYIALGIVAVGGALYFVKKKNA

SEQ ID NO: 7277 - DNA, 711 bp, Streptococcus pyogenes
atgatagtaagactgattaagctccttgacaagttgataaacgtcattgttctttgtttcttctttctttgtttattgattgcggcacttggaatctacgatgctttaacagtttatcaaggagctaatgctactaactatcaacaatataagaaaaagggtgttcagtttgacgatttattagctattaattctgatgttatggcatggctgactgttaaaggaacgcatattgattatccaattgtacagggagagaataatttagaatatatcaacaaatcagtagaaggagagtactccttatcaggaagtgtttttctagattatcgtaataaagtaacttttgaagataaatactcattaatctatgcacatcatatggctggaaatgttatgtttggcgaattacctaactttaggaaaaaatcattttttaataaacacaaagaatttagtattgaaaccaaaacaaagcaaaaactgaaaatcaatatttttgcatgtatccaaacagatgcttttgacagtttactgtttaatccaattgatgttgatatttctagtaaaaatgaatttttaaaccatatcaagcaaaaatcggtacagtatcgtgaaatattgacaacaaatgaaagtcgttttgttgccttatcaacctgtgaggatatgacaacagatggtaggattatcgttattggacaaattgaa

SEQ ID NO: 7278 - protein, 237 aa, Streptococcus pyogenes
MIVRLIKLLDKLINVIVLCFFFLCLLIAALGIYDALTVYQGANATNYQQYKKKGVQFDDLLAINSDVMAWLTVKGTHIDYPIVQGENNLEYINKSVEGEYSLSGSVFLDYRNKVTFEDKYSLIYAHHMAGNVMFGELPNFRKKSFFNKHKEFSIETKTKQKLKINIFACIQTDAFDSLLFNPIDVDISSKNEFLNHIKQKSVQYREILTTNESRFVALSTCEDMTTDGRIIVIGQIE

SEQ ID NO: 7279 - DNA, 645 bp, Streptococcus pyogenes
atgaaaaaatctatattaagaattttagctattggttatttacttatgagtttttgtttgttagactccgtagaggcagagaacctcactgcaagcattaatattgaagttattaatcaagttgatgttgctaccaacaaacaatcctctgacatagatgaaacgtttatgtttgtaattgaagcgttagataaagaaagtcctttacctaattcggtaactacttctgttaagggaaatgggaaaacatcatttgaacagttgactttttcagaagttggacaatatcattataaaattcatcaactgttaggtaagaatagtcaatatcattatgatgaaacagtatatgaagttgttatttacgtattgtataatgagcaaagtggtgctttagaaactaacctagtttctaacaaacttggagaaaccgaaaaatcggagcttatttttaaacaagaatatagtgaaaaaacaccggaacctcatcaaccagatacaactgagaaggaaaaacctcagaaaaaacgtaatggtattttgccatcaactggtgaaatggtgagttacgtatctgctttaggaattgtcttagtggctaccattactttgtattctatttataaaaagctaaagacaagcaaa

SEQ ID NO: 7280 - protein, 215 aa, Streptococcus pyogenes
MKKSILRILAIGYLLMSFCLLDSVEAENLTASINIEVINQVDVATNKQSSDIDETFMFVIEALDKESPLPNSVTTSVKGNGKTSFEQLTFSEVGQYHYKIHQLLGKNSQYHYDETVYEVVIYVLYNEQSGALETNLVSNKLGETEKSELIFKQEYSEKTPEPHQPDTTEKEKPQKKRNGILPSTGEMVSYVSALGIVLVATITLYSIYKKLKTSK

SEQ ID NO: 7281 - DNA, 1170 bp, Streptococcus pyogenes
ttgacagaaattggctcggtggttcaacgtcaagaattagtctttatcccagcacaattgaaacgtataaatcatgtgcaacacgcttataagtgccaaacttgtagcgataatagcctcagtgacaagatcatcaaagcgcctgttcctaaggcaccattagctcatagccttggttcggcttctattattgcccataccgttcatcaaaaattcacccttaaagttcctaactacagacaggaagaggattggaataaattaggactgtccattagtcgcaaggaaatcgctaactggcatatcaagtctagccagtattattttgagcctctttatgacttgcttcgtgacatcttattaagtcaagaggtcattcatgcggatgagacatcttatagagttcttgaaagtgacactcagttgacctattactggacttttttgtctggtaagcatgagaaaaaagggattaccctttaccatcatgataaaaggcgtagcggcctcgttactcaagaggttctcggcgattactcaggttatgtgcattgtgatatgcatggggcttatcgtcaattagagcatgccaagcttgttggttgttgggcacatgtgaggcggaagttctttgaggccaccccgaagcaagctgataagacttctctagggcgtaaaggacttgtttactgtgacaagttgttcgccttagaagctgaatggtgtgagttaccccctcaagagcgtctggttaaacgcaaagaaatcttgacgccattaatgaccaccttctttgattggtgtcgcgagcaagttgtcctttcaggatcgaagctgggtctcgctatcgcttatagtctcaagcatgaaagaacctttagaactgttttagaggatggccatattgttctgtctaacaatatggcagagagagctatcaaatccttagtgatgggccgaaaaaattggttgttttctcaaagttttgaaggagccaaagcggcagctatcatcatgagtttgcttgaaacggctaagcgacatggactgaactccgaaaaatatattagctaccttctagaccgccttcctaatgaagaaactctcgctaaaagagaagtgctagaagcttatttgccatgggctaaaaaagtacaaacaaattgtcaa

SEQ ID NO: 7282 - protein, 390 aa, Streptococcus pyogenes
LTEIGSVVQRQELVFIPAQLKRINHVQHAYKCQTCSDNSLSDKIIKAPVPKAPLAHSLGSASIIAHTVHQKFTLKVPNYRQEEDWNKLGLSISRKEIANWHIKSSQYYFEPLYDLLRDILLSQEVIHADETSYRVLESDTQLTYYWTFLSGKHEKKGITLYHHDKRRSGLVTQEVLGDYSGYVHCDMHGAYRQLEHAKLVGCWAHVRRKFFEATPKQADKTSLGRKGLVYCDKLFALEAEWCELPPQERLVKRKEILTPLMTTFFDWCREQVVLSGSKLGLAIAYSLKHERTFRTVLEDGHIVLSNNMAERAIKSLVMGRKNWLFSQSFEGAKAAAIIMSLLETAKRHGLNSEKYISYLLDRLPNEETLAKREVLEAYLPWAKKVQTNCQ

SEQ ID NO: 7283 - DNA, 279 bp, Streptococcus pyogenes
ttgaactcatggcttttcttcaggtataatgaagaaaatatcaggaggaagaccatgagttcacaagataaagtcattaaaacacaagccaaaaccattgaaacaatggctaatgagctagccctcctgcgtgaacaagtggcttatttaactcaaaagctttatgggaaatcttctgaaaaagctatgcctatgaccggtcaactcagtctctttgaccaggaccaattaccagaagaagcggatgacttgcccagtagaaacagaagacattactta

SEQ ID NO: 7284 - protein, 93 aa, Streptococcus pyogenes
LNSWLFFRYNEENIRRKTMSSQDKVIKTQAKTIETMANELALLREQVAYLTQKLYGKSSEKAMPMTGQLSLFDQDQLPEEADDLPSRNRRHYL

SEQ ID NO: 7285 - DNA, 348 bp, Streptococcus pyogenes
atgaccattcggctaaatgacctaggacaagtttatctggtttgtggaaaaacagatatgcgacaaggcattgattccctagcctatcttgtcaaatcccaacatgagttagatctcttttcaggtgctgtttatctcttctgtggtgggcgacgtgatcggttcaaagcgctttactgggatggtcaaggtttctggttactttataaacgctttgaaaatgggaaactagcctggccaagaaatagggatgaggtcaaatgcttgacagctgtacaggtggactggcttatgaagggatttttcattagtcctaacataaaaatttcaaaaagtcatgatttctat

SEQ ID NO: 7286 - protein, 116 aa, Streptococcus pyogenes
MTIRLNDLGQVYLVCGKTDMRQGIDSLAYLVKSQHELDLFSGAVYLFCGGRRDRFKALYWDGQGFWLLYKRFENGKLAWPRNRDEVKCLTAVQVDWLMKGFFISPNIKISKSHDFY

SEQ ID NO: 7287 - DNA, 111 bp, Streptococcus pyogenes
ttgcttaaagttcgccttggaaaactggaacttagtttatttcaagcactcaatcaggacttgttggaaagcattttggataaggtactgaacgatgaccattcggctaaa

SEQ ID NO: 7288 - protein, 37 aa, Streptococcus pyogenes
LLKVRLGKLELSLFQALNQDLLESILDKVLNDDHSAK

SEQ ID NO: 7289 - DNA, 663 bp, Streptococcus pyogenes
atgaaacgatgtaataaatatctcttcacttcactactagcagcttcgatgctgtttagttcgtataaatcagtacatgcccatgataacattgatgagaaaggtaaagtgcacctttactggcagggaaattactatgttgataactatgtcgactatactaaaaaattggtcgatagcgataaaaatattgaatggactgtaacctttaattcagctaaagaacaatgggtttaccctgatttctcagtttttcttcctaagggtgtaaaagctcctacagagataacttatgagcatcattattgggacggtacagttcgttctgaaacacgcaataatacacaatggcattatgattggaaaagccaacaaacaaattttaatcaagaatttgataaattccctggttatactggttggagtccttctctagataaattttacaaactaaaaaacgacggaaaattttctcacgttttagtagatacctatggccgtcaatcacacacttatttttctcataaaatggtttggaagtttaaaactgagcttgaagataattacaaaaataaatgggataaattaccgtttatagcaggtattaaacaaaacaacccattagcagcatcattcccaagttataaaggggaattcggtgag

SEQ ID NO: 7290 - protein, 221 aa, Streptococcus pyogenes
MKRCNKYLFTSLLAASMLFSSYKSVHAHDNIDEKGKVHLYWQGNYYVDNYVDYTKKLVDSDKNIEWTVTFNSAKEQWVYPDFSVFLPKGVKAPTEITYEHHYWDGTVRSETRNNTQWHYDWKSQQTNFNQEFDKFPGYTGWSPSLDKFYKLKNDGKFSHVLVDTYGRQSHTYFSHKMVWKFKTELEDNYKNKWDKLPFIAGIKQNNPLAASFPSYKGEFGE

SEQ ID NO: 7291 - DNA, 1437 bp, Streptococcus pyogenes
gtgcttttggacaatgtgaaaggaattgacaacatgaataacatcaaaaccaaaaaaaggtttatggatcgctatattgatggctttatgaaatggatgccagaatcgctttttatctgttttattttaacctttttagtcgttactatgtctgtgttgatgacggatagtccctttattggtacggaaaagacgggcgggattatctatggctgggtaaatggtttttgggggctgttgtcctttgccatgcagatgactattttacttgcgacagggaatgctgtagcgagttctccacctgctcataagatgtttaagtcccttgccaaactgcctcaaaccaggactcagatttttatcttttccattgtagtaggctctatctttggctttttacactggggtcttggtatgatggttgctattgtgtttgggaaagagttgcttgttcaggctaggcaaaaagggattaaggtgcatacgcctttgtttgttgctactttattttttacctttttaccagctacttctggtctatctggtgctgcggtgctttattcggctactccagattatttgcgaaatagtgtcgcagatgcttataaacaggttgttcctgaaagtgttcctctgacagaatcagttttgaatcttccatttatcagtcttttagtggtgtgtatgctggtaccgctttgctttgctttattggcgcacccaaaagatgaaactaaaatcatggaacttgatgatgagatctatcaccatagtcttgataccgcttcacatgttgttattgcaagaaacacacctgctgaaaagatgaacgcatctcgcttagtgatgtatcttgttggtggggccattgttagctatagcctttatcatttttcggtggtgggcttgtctggtctagatctcaattgttttaactttttatttttaggcttaggcttgcttctttgtggtcaacaaggaccagaatattatggttccttattcaaagatggggtcatgtcatcttggggcttggtgcttcagtttccattttacgctggtatttttggaatcattcaaagtacaggtttaggattagagatttcccatttctttgtcgctatttcaaatgggacaacatggccggtctttgcttatctttactcggctttgctgaatattgcggtaccatcaggaggctcaaaatttgtgattgaagctccctatatcgtccctgcaactatcgaagttggtaatgacttaggtaagattttgcaggcttatcaattaggagatgccacaacaaacttgatagttcctttttgggccttatcttacctctcaaacttcaaactaaaattcaatcaaattgtggcttatactattccttgtgtcttggtggtcacaggtattgccatcatttacctatttgtattt

SEQ ID NO: 7292 - protein, 479 aa, Streptococcus pyogenes
VLLDNVKGIDNMNNIKTKKRFMDRYIDGFMKWMPESLFICFILTFLVVTMSVLMTDSPFIGTEKTGGIIYGWVNGFWGLLSFAMQMTILLATGNAVASSPPAHKMFKSLAKLPQTRTQIFIFSIVVGSIFGFLHWGLGMMVAIVFGKELLVQARQKGIKVHTPLFVATLFFTFLPATSGLSGAAVLYSATPDYLRNSVADAYKQVVPESVPLTESVLNLPFISLLVVCMLVPLCFALLAHPKDETKIMELDDEIYHHSLDTASHVVIARNTPAEKMNASRLVMYLVGGAIVSYSLYHFSVVGLSGLDLNCFNFLFLGLGLLLCGQQGPEYYGSLFKDGVMSSWGLVLQFPFYAGIFGIIQSTGLGLEISHFFVAISNGTTWPVFAYLYSALLNIAVPSGGSKFVIEAPYIVPATIEVGNDLGKILQAYQLGDATTNLIVPFWALSYLSNFKLKFNQIVAYTIPCVLVVTGIAIIYLFVF

SEQ ID NO: 7293 - DNA, 393 bp, Streptococcus pyogenes
atgagtcacaaaacctttcaagagacgtttgatagtaatcctaacatctctatcaaagcattacatcgtcaaaacttagtaacttttgataaaacctttatgattaatcatcagcttaccaccttatttgaagaagcaaatagtcttcctgtagtcaaatgttattctgcctcgtgggattttttattaaattgcacgcgctattcctcttacctaacaatcctaccaagacctattactcattttgctcatatggacggtttagtggaggtccaactgaccgaacatccaaaatgggaagttgttctagcctctctcaagcacaacaaaacaagccatttaaaacattatatcaagcacaccatcttagattatttcatgaaccagcgcttc

SEQ ID NO: 7294 - protein, 131 aa, Streptococcus pyogenes
MSHKTFQETFDSNPNISIKALHRQNLVTFDKTFMINHQLTTLFEEANSLPVVKCYSASWDFLLNCTRYSSYLTILPRPITHFAHMDGLVEVQLTEHPKWEVVLASLKHNKTSHLKHYIKHTILDYFMNQRF

SEQ ID NO: 7295 - DNA, 714 bp, Streptococcus pyogenes
ttgtattggtggtggccaaggtcaaagtatcatcgtaacaagatagaaggtaaccgtatgaaagagaataaaagaatagcaatagcagaagctatcagtcatattaaagatggtgacacgattatggtcggtggttttatggctaatggaacaccagaagcgttaattgatgcactggttgacaaaggcacaaaagacttaaccttgatctgtaatgatgctggttttgttgatcgcggtgttggaaaaatggtggctaatcatcaattcaaaaccatttatgcaacacatattggattaaataaagaagctgggcgccaaatgactgccggtgaaacgacgattgagctcattcctcaaggaaccttcgccgaaaaaattcgcatcggagcttatggcattggtggcttttacacgccaacaggggtaggaaccttagtggcagaaggcaaggaaacaaaaaccatcaagggaaaaacctatctcttagaatacccatttgaggcagatgtcgccttgatatttgctaatcaagctgatgaaatgggaaatttacagtatagtggttctgaaaataattttaatcaattgatggcagcttgtgcaaaaacaacaattgttcaggcgcgagaaatagtaccagtcggcaccatacaaccagaatgcgttcatacaccacatatttttgtagattacattgttaaagaaggagta

SEQ ID NO: 7296 - protein, 238 aa, Streptococcus pyogenes
LYWWWPRSKYHRNKIEGNRMKENKRIAIAEAISHIKDGDTIMVGGFMANGTPEALIDALVDKGTKDLTLICNDAGFVDRGVGKMVANHQFKTIYATHIGLNKEAGRQMTAGETTIELIPQGTFAEKIRIGAYGIGGFYTPTGVGTLVAEGKETKTIKGKTYLLEYPFEADVALIFANQADEMGNLQYSGSENNFNQLMAACAKTTIVQAREIVPVGTIQPECVHTPHIFVDYIVKEGV

SEQ ID NO: 7297 - DNA, 645 bp, Streptococcus pyogenes
atggcggttgcattaagtaaagaagagattcaaaatcgtattgcaaagcgtgtggccaaagaattagaagatggtactttggtaaatttaggtattggtctaccaaccaaagtagcaaattttgtgcctgaagaaatgacagtgtattttcaatctgaaaatgggtttattggactaggtcctaagtcagatgatccgaattcgactatcgttaatgcaggaggacagcctgtgacggtttatccaggagccgctttctttaatagtgcagattcttttggcattatacgtggtggtcatgttgatttgaccgtcttgggtgctttagaaattgcagaaaatggagatatcgccaattacctgattccaggcaaaatggttcctggtatgggaggagcgatggatttattagttggtgctaaaaaagtcatcgtagctatggagcataccaataaaggaaagcataagctcctaaaagaatgtaccttacctttaacagcaaaaggtgtggttgaccttattatcacagaaatgggtgtgtttaaagtaacgccagatggtatccaagtaattgaaatcagtgaagggtttacttttgatgaggttcaagctgcgacaggtgtacctctaagcatagctgaaggt

SEQ ID NO: 7298 - protein, 215 aa, Streptococcus pyogenes
MAVALSKEEIQNRIAKRVAKELEDGTLVNLGIGLPTKVANFVPEEMTVYFQSENGFIGLGPKSDDPNSTIVNAGGQPVTVYPGAAFFNSADSFGIIRGGHVDLTVLGALEIAENGDIANYLIPGKMVPGMGGAMDLLVGAKKVIVAMEHTNKGKHKLLKECTLPLTAKGVVDLIITEMGVFKVTPDGIQVIEISEGFTFDEVQAATGVPLSIAEG

SEQ ID NO: 7299 - DNA, 363 bp, Streptococcus pyogenes
atgaagagctacccagaaccaatgggcccttattcaacttatacgattgaaggacattttctatacaccgcaggccaattaccccttaatccagtgacaggtcaattgtcagatggttttgaggcacagtgtcgccaggtttttgttaatttacaatctattttggcagagcaaaagttggacttgaatcatatctataagctaaatgtgtatttaacagatgtgaccaatgtggaaatattaaatcatgtcatgactgatttgtttgaagagccctaccctgttcggacagcggttcaagtgtcggcgcttcctttgcaagctttgattgaagtcgaagctgtcgccagagtgaagcagtta

SEQ ID NO: 7300 - protein, 121 aa, Streptococcus pyogenes
MKSYPEPMGPYSTYTIEGHFLYTAGQLPLNPVTGQLSDGFEAQCRQVFVNLQSILAEQKLDLNHIYKLNVYLTDVTNVEILNHVMTDLFEEPYPVRTAVQVSALPLQALIEVEAVARVKQL

SEQ ID NO: 7301 - DNA, 321 bp, Streptococcus pyogenes
gtgatgaataccctattgtcactaatgaatagtatcgaacaagaggctagaacaatttatgacagttacgatgctaagaaaaaagctctagctgacaaaaaagaagaagagttaaagcagctgttccttgagtacgaacaagaaactcagctactattagaagctaaacgtgaggtgttttttgaagctaatcgtcaagaacaaaaagcttcaaaaaagagattagcgacgcaacagctagcccttcatgccattttagaagagcataagctaaccgttgttagggagttagtggataaggtggtggagacatatggccat

SEQ ID NO: 7302 - protein, 107 aa, Streptococcus pyogenes
VMNTLLSLMNSIEQEARTIYDSYDAKKKALADKKEEELKQLFLEYEQETQLLLEAKREVFFEANRQEQKASKKRLATQQLALHAILEEHKLTVVRELVDKVVETYGH

SEQ ID NO: 7303 - DNA, 1998 bp, Streptococcus pyogenes
atggccattagtcaaatgaaaaagctggcaatggtttttgaaaaagattatcttgatcttgttttaaaaacacttcaacaatctcaattagttgaagttcgtgacatgaagcaactaaaacattggcaagatgcttttaacaaaggcaacgtcaagttgccacaaatcgtccaatacgatctgacgcatcaaaaacctctactagatgatgaagctttacaataccttttacaaagccaacaagagttagaaaacggccttgctagcttatcagcgtttttaccaccaataggaaagttaacagccttgagacaaaaaacgccatctctttcgtttaaacagttcgaagaacgccatcgacaacaagcagctcaaacggctttgaaaatgatgtcacaaaagatagagcgactagagcagctgcaaagcaaaatagaccagctaacagaatactgtcaggagttagaaaagtggcgttccttgactgttttgcctcaggacttagcgcaatttcattttttgtcggcaagagttggaacgattcctagtacagcaaataatcatttttatcatcagctaaagcagcacaaaggtctttttattgaggaagtataccatacagaatttgagtacggccttgtcttattttggcaagcacaagatacgattcatttacagaaatatcagtttaaacccttattatataaagaacagttactgccatcagaacaacttcgtataaacaaagagttactaacgaattggctagctgaaaaagatagtctactaaaagagcttaggcagtctcaaaagatactggcacagttacaggttgaaatagactatgtccttagtcagtatcaacggcagcaaactaaaaagcaattactcggtacaagacatctaatagccttagaagggtggatagaagctgattcggttaaccaattaaaagggctaatgactaagacactaggtgatatgttttatctggatagttacgatgtcacgccagacgattgggaagatgttcccattaagctacgtaatcaccgctacattgcaccgtttgaattggttacagaaatgtacgctttgccaaaatatcaagaaaaagatccgacaccttttttagctcctttataccttactttttttggcatgatggtagctgatttgggctatggtttgttgctatatgctgtgacactagctgcattggtcttttttaatctccaaaaaaccagtaaacggttagtgaccttctttaatattttagctatttcagtagccatatgggggcttatttacggttctttctttggttttgacttacctgtggcattattatcaactaaaacggatgtgattactattttggttgtttctttgctatttgggtttgttacacttatatttgggcttttgttaggagcatggcaacaagtaaggatgaaagcatatgctacggcctatacgtcaagtctagcttggacttttattttattaggtctgctgttatttattcttggtaagaatgtatctggccttgcttacttatcggttattggtaagtggcttgcattgggcaatgcctttgggattttggttgtttctttactaaaaagcaaaagccttttaggtctaggtagtggattatataatttatatggcattagctcttacttaagtgatttggttagctttactcgtctaatggcattagggctttctggagctagtattggagcggcttttaacatgattgttgggatttttccaccagtcacgcgctttacagtaggtatctttatttttattcttttgcatgcgatcaatattttcttatcaatgctttcaggatatgtgcatggtgctcgtcttattttcgtagagttttttggaaaattttatgaaggtggaggaaaagctttcaatcctttaaagttagctgataattatgtcaatgtcaatgaagaaacagatttggaggacaat

SEQ ID NO: 7304 - protein, 666 aa, Streptococcus pyogenes
MAISQMKKLAMVFEKDYLDLVLKTLQQSQLVEVRDMKQLKHWQDAFNKGNVKLPQIVQYDLTHQKPLLDDEALQYLLQSQQELENGLASLSAFLPPIGKLTALRQKTPSLSFKQFEERHRQQAAQTALKMMSQKIERLEQLQSKIDQLTEYCQELEKWRSLTVLPQDLAQFHFLSARVGTIPSTANNHFYHQLKQHKGLFIEEVYHTEFEYGLVLFWQAQDTIHLQKYQFKPLLYKEQLLPSEQLRINKELLTNWLAEKDSLLKELRQSQKILAQLQVEIDYVLSQYQRQQTKKQLLGTRHLIALEGWIEADSVNQLKGLMTKTLGDMFYLDSYDVTPDDWEDVPIKLRNHRYIAPFELVTEMYALPKYQEKDPTPFLAPLYLTFFGMMVADLGYGLLLYAVTLAALVFFNLQKTSKRLVTFFNILAISVAIWGLIYGSFFGFDLPVALLSTKTDVITILVVSLLFGFVTLIFGLLLGAWQQVRMKAYATAYTSSLAWTFILLGLLLFILGKNVSGLAYLSVIGKWLALGNAFGILVVSLLKSKSLLGLGSGLYNLYGISSYLSDLVSFTRLMALGLSGASIGAAFNMIVGIFPPVTRFTVGIFIFILLHAINIFLSMLSGYVHGARLIFVEFFGKFYEGGGKAFNPLKLADNYVNVNEETDLEDN

SEQ ID NO: 7305 - DNA, 519 bp, Streptococcus pyogenes
atgtcaatgtcaatgaagaaacagatttggaggacaattaacatggaacatttagcacattattttacagcacatggtggcgttttcttcgcagccttaggaattgttttagccgtagctcttagtggcatgggctcagcttatggtgtcggtaaaggtggtcaagcggcagctgcgctcttaaaagaagaacccgaaaaatttacgtctgcgcttatcttgcaactgttacccggtagtcaaggaatctacggctttgctattggtattttaatttggatgaaactgacaccagaactttcagttaaccaaggattagcttactttttggtatctcttccaattgctattgttggttatttttcggccaagcaccaaggcaatgtttctgtagctggtatgcaaatcttggctaagcgccctaaagactttatgaaaggtgtcattttagcagctatggttgaaacctatgctattcttgcctttgtcgtctcctttattctcttaaataaaattgga

SEQ ID NO: 7306 - protein, 173 aa, Streptococcus pyogenes
MSMSMKKQIWRTINMEHLAHYFTAHGGVFFAALGIVLAVALSGMGSAYGVGKGGQAAAALLKEEPEKFTSALILQLLPGSQGIYGFAIGILIWMKLTPELSVNQGLAYFLVSLPIAIVGYFSAKHQGNVSVAGMQILAKRPKDFMKGVILAAMVETYAILAFVVSFILLNKIG

SEQ ID NO: 7307 - DNA, 582 bp, Streptococcus pyogenes
gtgaatgatataacacagttaagacaaaacgttcttgaaaaagcacatcaagaaggtcaacagtgcctaaagatagcgacagatagtcttgatactgactttaaagagcgtcaacagcaaggactacacgatttaaaagcaaagcgtcaaaaagagttaaaagctcttgaacagcaatttcaggttgcgcagcagcaactcaaaaatcaagaaagacaagctctactagcattaaaacaagacagtataaaggagctatttgaagcttctttggagaagatgacgaacttttctaaggaagaagaattggcttttttgaagcaagtcttgtctaaatatccagaacagccattgcaagttacttttggcgaaaaaacagggcaaaagttcagttcttatgattgtgctgagctgagattagcatttcctcaattaagctataatcaagagctaattcctcaggaagcaggatttttagtcagtttagaccaagtcgatgacaattatttataccgttaccttttagaatcagttcttaaagaagaaagctcccgcatcattgatatgcttttttcagagata

SEQ ID NO: 7308 - protein, 194 aa, Streptococcus pyogenes
VNDITQLRQNVLEKAHQEGQQCLKIATDSLDTDFKERQQQGLHDLKAKRQKELKALEQQFQVAQQQLKNQERQALLALKQDSIKELFEASLEKMTNFSKEEELAFLKQVLSKYPEQPLQVTFGEKTGQKFSSYDCAELRLAFPQLSYNQELIPQEAGFLVSLDQVDDNYLYRYLLESVLKEESSRIIDMLFSEI

SEQ ID NO: 7309 - DNA, 996 bp, Streptococcus pyogenes
atgccaacatttctagaattaaacactactatcagtgtcaaagaaaaagagttattgactaaagagcaatttgataagctattgcaggctcccaatacaacaaccttagctcgactgttgcaccagtcagtctatcacctaactgttgacgatctcaacgatttggatcggctagaatctatcttaatggctgagctaaccaagacctatcgctgggcttttgcagaaacccctcaacctgacatagtacaattatttaccttgcgttacacctatcataatgtcaaagtgttgttaaaagctaaagctagtcaagcagatctgagtcacttattactaccaattggtgacaagcctttggtggctttggaacatttgattaggacgatgacttctgatgagtttccaaaagaggtggtaacagaaatccagtccatttgggccgaatatcaagattatcaagacatacgcgtcttagaaattggtactgacttagcttattttaaggcgttgaaacaaatagcacaaagattagaggaccctgttttccaacaagctgttcttattgtgattgatttgtataatctgattaccgtcagacgggccaaatcgcaaaataaaccaataagtttcatgatgcagttattatctgatgaagcaagtagaccaagtaaaacatttatcacacttgaagatgataaggatctgatgacgtggtttgaaaatgtaacacctgatagctatatgacagccctaaaaccttattcagagaaacttcgccaaggcactcttcaaacgactgagttagaataccttgttgatgaatgcctttaccatttatttgcgaaggccaaatatcaagtcgatgggccttatgtgcttgctcgctttttgctcgctaaatcgtttgaagtaaaaaacctacggcttttagcggctgctttagctaatgatttacccaaagaacgtgtcatagaaaggatgagaccaatagca

SEQ ID NO: 7310 - protein, 332 aa, Streptococcus pyogenes
MPTFLELNTTISVKEKELLTKEQFDKLLQAPNTTTLARLLHQSVYHLTVDDLNDLDRLESILMAELTKTYRWAFAETPQPDIVQLFTLRYTYHNVKVLLKAKASQADLSHLLLPIGDKPLVALEHLIRTMTSDEFPKEVVTEIQSIWAEYQDYQDIRVLEIGTDLAYFKALKQIAQRLEDPVFQQAVLIVIDLYNLITVRRAKSQNKPISFMMQLLSDEASRPSKTFITLEDDKDLMTWFENVTPDSYMTALKPYSEKLRQGTLQTTELEYLVDECLYHLFAKAKYQVDGPYVLARFLLAKSFEVKNLRLLAAALANDLPKERVIERMRPIA

SEQ ID NO: 7311 - DNA, 318 bp, Streptococcus pyogenes
atgaccaaaacattgtataaagtcggggtaattggtaacagagatgttattctaccttttcagatgattgggtttcaaacttttccagtaataaaaccacaagacgctattaaccagttgcgtcaactagcaatggaagactttggtattatttatatcacagaagatattgctgcagctattccagaagccctcactcactatgacaatcaagttctaccagcagtcataccattaccaactcatcaaggagcgcaagggataggcctgtcacgcatacaagccatggttgaaaaggctgtcggtcaaaatatttta

SEQ ID NO: 7312 - protein, 106 aa, Streptococcus pyogenes
MTKTLYKVGVIGNRDVILPFQMIGFQTFPVIKPQDAINQLRQLAMEDFGIIYITEDIAAAIPEALTHYDNQVLPAVIPLPTHQGAQGIGLSRIQAMVEKAVGQNIL

SEQ ID NO: 7313 - DNA, 111 bp, Streptococcus pyogenes
atgcgttcagctgctaacttcaccaattttcctgtccttgcatttcatcagttagctactcataagcctcaaacagagtataagtcctctttgcctaacgtcttagtgtta

SEQ ID NO: 7314 - protein, 37 aa, Streptococcus pyogenes
MRSAANFTNFPVLAFHQLATHKPQTEYKSSLPNVLVL

SEQ ID NO: 7315 - DNA, 645 bp, Streptococcus pyogenes
ttgacgaaaggagttatatcaatggcacgattaaatgttaaaccaacacgcatggaacttagtaacttgaaaaatcgcttgaagacagctacaagaggtcataaattattaaaggacaagcgggatgagttgatgcgccgcttcgttgatttaattcgtgaaaacaatgagcttcggcaaactatcgaaaaagaacttgctgccaatatgaaggagtttgtcttggcaaaagcatccgaaaatagtctaatggtagaagaactctttgctgttccagtccatgaagtgaccttatggattgatattgaaaatatcatgagtgtcaatgtgcctaaattccatgtccagtctaatacggcaagagagcaagaacaaggtgagtttgcttatagttacctcagctcaaatagtgagatggacaatactatccaaaagacaaaagaactattagaaaagctcttacggttagctgaagttgaaaaaacttgtcaactaatggctgatgacattgaaaagactagacgtcgcgtcaatggcttagagtattctattatcccgcaactgaaagagacgattcactacattgagttgaaattagaagaggccgagcgtgcgagccttgttcgtattatgaaaataacatca

SEQ ID NO: 7316 - protein, 215 aa, Streptococcus pyogenes
LTKGVISMARLNVKPTRMELSNLKNRLKTATRGHKLLKDKRDELMRRFVDLIRENNELRQTIEKELAANMKEFVLAKASENSLMVEELFAVPVHEVTLWIDIENIMSVNVPKFHVQSNTAREQEQGEFAYSYLSSNSEMDNTIQKTKELLEKLLRLAEVEKTCQLMADDIEKTRRRVNGLEYSIIPQLKETIHYIELKLEEAERASLVRIMKITS

SEQ ID NO: 7317 - DNA, 93 bp, Streptococcus pyogenes
atgactaactatacaatccaacaaacggtaaaaagagctggaaacgctatccaactctttgtcatactagacaccttagatagatgcccagac

SEQ ID NO: 7318 - protein, 31 aa, Streptococcus pyogenes
MTNYTIQQTVKRAGNAIQLFVILDTLDRCPD

SEQ ID NO: 7319 - DNA, 1350 bp, Streptococcus pyogenes
gtggtttacatgagaaacaaaaaagtaacattagctcatattgtcgcaaagacaagtgttgctattgctttggctggagcaatgggtagcagtttattagctaatagcacaacgtacgctgttagtggcaaagaaaataaaaaaagcgatgtcaaatatgaaacgaccaaagttatggaagctaacgcaacttcctctaaagaagacaatcatgtcatgcacacattagacggctcaatgagtactgtctgggaggaaaattcacctggtggtggtgttggtgaagtactttcctacaagtttgcgtccccgatgcatattgggagaattttaattgttaatggagatacatctagcaaggagaattactacaagaaaaatagaattgcaaaggctgatgttaaatactataacaggaataaattggtcctctttcaaaaaattgaattaggcgacacctacactaaaaaaccgcatcacattgagattgataaaaaattagatgttgatcgtattgatattgaggtaacagaggtccatcagggacaaaacaaggatattttagccttgtcagaggtcacttttggcaatatagaacgcgatatttttgaaaaaaagtttaaagaaattaaagataaatgggtaacagataaacaagcagatgagtttattgaaactgccgacaagtatgctgataaagctgttcagatgtctgctgttgcgtcacgtgctgagtattatcggatgtacgttagccgcaaataccactacaaaaaagagtttgttgaaaaactaaaacaagtctacaaagaaagcggagcttcccacgttacaagcaaaaaagatgtgatgttagcttttgacgatgctaaaaaaaagtcaacgattggtcgacaagaaaacggtctttttgtgacaagttttgctgaggatatggctttgctctttactgatcaaggtaagttaaaatcagctgaccaaattgaaaatataaaagatgtcgatagcggaaaatatagcgatggggtttatcaatatgagtacgattctgaactaacaaaaaacattgataagctaggctatatccgaacagctagcggagatactcctggagcaaattcgctcaacgttcctggttgccaaacgtggtcaggaaaacacattgaaaattcagaaagtgaattaattttcccatcgattagtgttaaagatctaaaatctaaagctgtcttagcagagattgatgccaaaggctattttgaaattattgatcctaccatcattgctccaaatggtgaccataaaaaagtaactggtcgcttcaaaattaagaaaatgcaagataggaag

SEQ ID NO: 7320 - protein, 450 aa, Streptococcus pyogenes
VVYMRNKKVTLAHIVAKTSVAIALAGAMGSSLLANSTTYAVSGKENKKSDVKYETTKVMEANATSSKEDNHVMHTLDGSMSTVWEENSPGGGVGEVLSYKFASPMHIGRILIVNGDTSSKENYYKKNRIAKADVKYYNRNKLVLFQKIELGDTYTKKPHHIEIDKKLDVDRIDIEVTEVHQGQNKDILALSEVTFGNIERDIFEKKFKEIKDKWVTDKQADEFIETADKYADKAVQMSAVASRAEYYRMYVSRKYHYKKEFVEKLKQVYKESGASHVTSKKDVMLAFDDAKKKSTIGRQENGLFVTSFAEDMALLFTDQGKLKSADQIENIKDVDSGKYSDGVYQYEYDSELTKNIDKLGYIRTASGDTPGANSLNVPGCQTWSGKHIENSESELIFPSISVKDLKSKAVLAEIDAKGYFEIIDPTIIAPNGDHKKVTGRFKIKKMQDRK

SEQ ID NO: 7321 - DNA, 402 bp, Streptococcus pyogenes
ttgataggtagtgacaaagagtatcgtatcactagaagagactcttatatggaagatatttctgatccagaagttattttagagtatggggtttaccctgctttcataaaaggctatacccaattgaaagctaacatcgaagaagcattattagaaatgtcaaatagcggtcaagcattagacatttaccaagcagttcaaaccctaaacgctgaaaacatgttattaaattattacgaaagcttgccattttatttaaaccgtcaaagcatactagctaatatgaccaaagcgttaaaagatgcgcatattagagaggctatggcacattacaaattaggagaatttgctcactatcaagatactatgcttgatatggtcgaaagaacaataaaaacattt

SEQ ID NO: 7322 - protein, 134 aa, Streptococcus pyogenes
LIGSDKEYRITRRDSYMEDISDPEVILEYGVYPAFIKGYTQLKANIEEALLEMSNSGQALDIYQAVQTLNAENMLLNYYESLPFYLNRQSILANMTKALKDAHIREAMAHYKLGEFAHYQDTMLDMVERTIKTF

SEQ ID NO: 7323 - DNA, 1722 bp, Streptococcus pyogenes
atgaaggacatgtctaataaaaaaacatttaaaaaatacagtcgcgtcgctgggctactgacggcagctcttatcattggtaaccttgttactgctaatgctgaatcgaacaaacaaaacactgctagtacagaaaccacaacgacaaatgagcaaccaaagccagaaagtagtgagctaactactgaaaaagcaggtcagaaaacggatgatatgcttaactctaacgatatgattaagcttgctcccaaagaaatgccactagaatctgcagaaaaagaagaaaaaaagtcagaagacaaaaaaaagagcgaagaagatcacactgaagaaatcaatgacaagatttattcactaaattataatgagcttgaagtacttgctaaaaatggtgaaaccattgaaaattttgttcctaaagaaggcgttaagaaagctgataaatttattgtcattgaaagaaagaaaaaaaatatcaacactacaccagtcgatatttccattattgactctgtcactgataggacctatccagcagcccttcagctggctaataaaggttttaccgaaaacaaaccagacgcggtagtcaccaagcgaaacccacaaaaaatccatattgatttaccaggtatgggagacaaagcaacggttgaggtcaatgaccctacctatgccaatgtttcaacagctattgataatcttgttaaccaatggcatgataattattctggtggtaatacgcttcctgccagaacacaatatactgaatcaatggtatattctaagtcacagattgaagcagctctaaatgttaatagcaaaatcttagatggtactttaggcattgatttcaagtcgatttcaaaaggtgaaaagaaggtgatgattgcagcatacaagcaaattttttacaccgtatcagcaaaccttcctaataatcctgcggatgtgtttgataaatcggtgacctttaaagagttgcaacgaaaaggtgtcagcaatgaagctccgccactctttgtgagtaacgtagcctatggtcgaactgtttttgtcaaactagaaacaagttctaaaagtaatgatgttgaagcggcctttagtgcagctctaaaaggaacagatgttaaaactaatggaaaatattctgatatcttagaaaatagctcatttacagctgtcgttttaggaggagatgctgcagagcacaataaggtagtcacaaaagactttgatgttattagaaacgttatcaaagacaatgctaccttcagtagaaaaaacccagcttatcctatttcatacaccagtgttttccttaaaaataataaaattgcgggtgtcaataacagaactgaatacgttgaaacaacatctaccgagtacactagtggaaaaattaacctgtctcatcaaggcgcgtatgttgctcaatatgaaatcctttgggatgaaatcaattatgatgacaaaggaaaagaagtgattacaaaacgacgttgggacaacaactggtatagtaagacatcaccatttagcacagttatcccactaggagctaattcacgaaatatccgtatcatggctagagagtgcactggcttagcttgggaatggtggcgaaaagtgatcgacgaaagagatgtgaaactgtctaaagaaatcaatgtcaatatctcaggatcaaccttgagcccatatggttcgattacttataag

SEQ ID NO: 7324 - protein, 574 aa, Streptococcus pyogenes
MKDMSNKKTFKKYSRVAGLLTAALIIGNLVTANAESNKQNTASTETTTTNEQPKPESSELTTEKAGQKTDDMLNSNDMIKLAPKEMPLESAEKEEKKSEDKKKSEEDHTEEINDKIYSLNYNELEVLAKNGETIENFVPKEGVKKADKFIVIERKKKNINTTPVDISIIDSVTDRTYPAALQLANKGFTENKPDAVVTKRNPQKIHIDLPGMGDKATVEVNDPTYANVSTAIDNLVNQWHDNYSGGNTLPARTQYTESMVYSKSQIEAALNVNSKILDGTLGIDFKSISKGEKKVMIAAYKQIFYTVSANLPNNPADVFDKSVTFKELQRKGVSNEAPPLFVSNVAYGRTVFVKLETSSKSNDVEAAFSAALKGTDVKTNGKYSDILENSSFTAVVLGGDAAEHNKVVTKDFDVIRNVIKDNATFSRKNPAYPISYTSVFLKNNKIAGVNNRTEYVETTSTEYTSGKINLSHQGAYVAQYEILWDEINYDDKGKEVITKRRWDNNWYSKTSPFSTVIPLGANSRNIRIMARECTGLAWEWWRKVIDERDVKLSKEINVNISGSTLSPYGSITYK

SEQ ID NO: 7325 - DNA, 426 bp, Streptococcus pyogenes
atgaaacaacaatcttaccagcctctacgcttcgtctacctcttggtggctctatttgctgctctgttgcttatagcaagacctgttatggcagatgagggaacaaatagtgctgatgcggcgtattataaagggcaaagtgctggaaaaaaagcagggaaaaaagctggaaaagaagctacttggactgatttgaccccaactgtcccaactaatccagaaacacctagtgacatcggagagactactaataaacagctctataaagaagggtataaagatgggtacaaagagggttataatgaaggctggaaatctcagtatcccgttttgactccggtcaaggttatatgggatttgatctcttattggctacagcgattattccccaataatcagtcaagtaccgcagcacaaagcatgtca

SEQ ID NO: 7326 - protein, 142 aa, Streptococcus pyogenes
MKQQSYQPLRFVYLLVALFAALLLIARPVMADEGTNSADAAYYKGQSAGKKAGKKAGKEATWTDLTPTVPTNPETPSDIGETTNKQLYKEGYKDGYKEGYNEGWKSQYPVLTPVKVIWDLISYWLQRLFPNNQSSTAAQSMS

SEQ ID NO: 7327 - DNA, 198 bp, Streptococcus pyogenes
atgaaaaagaaattatctttatttatgatcgcaactgctgctgtcgtaagccttagccttgcaacaccagaaaaccaaactgtttcagcatacgaagtgaccgcaactagagatgccagcgtgtgttggacttgttgccctctaacctgcttaaagtataatgtagaagactggtacaaagcagtaacaagtttcttc

SEQ ID NO: 7328 - protein, 66 aa, Streptococcus pyogenes
MKKKLSLFMIATAAVVSLSLATPENQTVSAYEVTATRDASVCWTCCPLTCLKYNVEDWYKAVTSFF

SEQ ID NO: 7329 - DNA, 165 bp, Streptococcus pyogenes
atgaaaaagaaattatctttatttatgatcgcaactgctgctgttgcaggccttagccttgcaacactaggagaccaccaaactgtttcagcaaatgatgctagctatagtaacggtttctacggacacactggtcctgacagctggttactttacactgtatgg

SEQ ID NO: 7330 - protein, 55 aa, Streptococcus pyogenes
MKKKLSLFMIATAAVAGLSLATLGDHQTVSANDASYSNGFYGHTGPDSWLLYTVW

SEQ ID NO: 7331 - DNA, 1389 bp, Streptococcus pyogenes
gtgttggcagcttggtcaaagatgataaaagggcttgcaaacttagctaaaggttgtataataaacgtaatcgatctaaaaatgatattgttggaaaaattcattatccatttaaaaggtgcccactacttttcttataggttagcagatcacgcttttttgaagagctttttggtttgtgcaaccattggggtgggaccattgtctaaaagagagttcattggagttaacgctattgcggaggtgtacgaaatgagagaaaatacgaccttattacatggctatacggttattgatgagtttacaggagcagcttcagttcccatctatcagacttcgacgttccacaattcagaactgtattgtcctagtcaaaaacatttgtacacacgcttttcaaacccaacgactgaagctttagaagacgggttagcctgtttagaaaaagcgacttatgcggtggcttatgcatctggtatggctgctatttcaactgttttgatgctcttaaaagctggagatcatgtgattttcccattggaggtctatggagggacttgccaatttgcgacagctattttacccaattatcagattgaaacaagctttgtagatatggctgatttagcaacagtaaaagcaagtatcaggcctaatacgcgtatgatttatctagagacaccgtcaaatccgctcttgaaaatttgtgatatttcagagcttgtgcaactcgccaaagcttatggtgtgctaactgtggctgataatacctttatgacaagtttgtatcaagaacccttagctatgggtgtggatattgtggtagaaagtgtgaccaaatttatcaatggtcatagtgatgtggtagctggtttagctgctaccaataatgaggctatctacaaccagctcaagctttttcaaaaaaactttggagcaattgttggggtcgaagacgcttggctgattcttcgtggcatgaaaactatggggatccgtatggaacaagcggtaaaaaatgctcagcagctcgctaactatttagcgaagcaccccaaagttcttaaggtacattaccctggcttagacagtcatcctaatcacgacacccacctgcaacaagctaagaatggtggtgctgttttatcctttgagttggcttctaaggaggagctgatgacctttacccatcgtattcagttgccgattttagccgttagtctaggtggagtagagtccattttgtcacatccagcaacgatgtctcatgcttgtttatcaccacaagcgcggttggaacaaggggttgttgatggtttgctgcgcttgtcttgtggtgttgaaaatatcgaagacttattagccgattttgagcaagcacttgctttt

SEQ ID NO: 7332 - protein, 463 aa, Streptococcus pyogenes
VLAAWSKMIKGLANLAKGCIINVIDLKMILLEKFIIHLKGAHYFSYRLADHAFLKSFLVCATIGVGPLSKREFIGVNAIAEVYEMRENTTLLHGYTVIDEFTGAASVPIYQTSTFHNSELYCPSQKHLYTRFSNPTTEALEDGLACLEKATYAVAYASGMAAISTVLMLLKAGDHVIFPLEVYGGTCQFATAILPNYQIETSFVDMADLATVKASIRPNTRMIYLETPSNPLLKICDISELVQLAKAYGVLTVADNTFMTSLYQEPLAMGVDIVVESVTKFINGHSDVVAGLAATNNEAIYNQLKLFQKNFGAIVGVEDAWLILRGMKTMGIRMEQAVKNAQQLANYLAKHPKVLKVHYPGLDSHPNHDTHLQQAKNGGAVLSFELASKEELMTFTHRIQLPILAVSLGGVESILSHPATMSHACLSPQARLEQGVVDGLLRLSCGVENIEDLLADFEQALAF

SEQ ID NO: 7333 - DNA, 144 bp, Streptococcus pyogenes
ttgttaatcattgtttgggcaagtccttttgacttgtccttttcgatgaactgtttaaacgccaatgagcacaaactggatgaaccgtatgttgtggagttcttagagaccagatataaggtgttggtgttggatcagttgagg

SEQ ID NO: 7334 - protein, 48 aa, Streptococcus pyogenes
LLIIVWASPFDLSFSMNCLNANEHKLDEPYVVEFLETRYKVLVLDQLR

SEQ ID NO: 7335 - DNA, 99 bp, Streptococcus pyogenes
atggcctttgccaacctttaccttgttaggattgctctttatttacaatcaagggttatggaagcagctaatgaatacctttactctggtgttagtagc

SEQ ID NO: 7336 - protein, 33 aa, Streptococcus pyogenes
MAFANLYLVRIALYLQSRVMEAANEYLYSGVSS

SEQ ID NO: 7337 - DNA, 297 bp, Streptococcus pyogenes
ttgttcctcacctgggaaaatctctttcttacaaatcaatcgcgtcgtcgcttgaaactattagtggttgagagaagttataacaatgttggcaacttcttaaaagagtattttggaggattttttgagattgtcaactttgatgacttgaggctgaccatggttgatatggtgtcactgtcttcagagtatgacgtaattgtgacagatatgattcttgagcaaacaacggactccgaaattttatttttcaatcagatggcccctagtgtggtggcgaatagattgacagacatg

SEQ ID NO: 7338 - protein, 99 aa, Streptococcus pyogenes
LFLTWENLFLTNQSRRRLKLLVVERSYNNVGNFLKEYFGGFFEIVNFDDLRLTMVDMVSLSSEYDVIVTDMILEQTTDSEILFFNQMAPSVVANRLTDM

SEQ ID NO: 7339 - DNA, 1332 bp, Streptococcus pyogenes
gtgaaaaagtatttaaatcaaaatgtttatgatgcattgatagaaagattacattttttgtttaatgattttcctattgtctatatttccttctcaggtggaaaagatagtgggttacttcttaatattttactggattttagagataaatattatccggatagagaaataggtgtgtttcatcaagattttgaagcacagtacagtttaacaacaaaatatgttcaagaaacattcacttctttagaaggtagaaaaaaagtttctttgtattgggtgtgcttaccgatggctactagaactgcacttagtagttatgaaatgttttggtatccgtgggatgacaaaacagaagatatctgggtaagaccaatgccatctcaagattatgttattaatttggaaaataattcaattactacttatcgttataaaatgaatcaggaggatttagcgaaacaatttggtaggtggtataaacaaattcacggaaatcaaaaaacagtttgtatattaggaaaccgtgcttcagaatccttacacagatatagtggttttatcaataaaaagtatggttatcaaaaggaatgctggattaccaaacaattcaaagatgtctggacagcatctcccttatatgattggtcagtggaagacatatggcatgcttactataagttttcttattcttataacgaactttatgatctattttataaagcgggtttaaaaccatcacaaatgagagttgcatctccttttcaagactatgctgttgatagcctaaatctttatagaataatagatcaagaaacttgggtaaagcttttgggacgtgttcaaggagttaacttttcgaatatttatggacgtactaaagcaatgggatataaatcaattgctttaccaaagggtcattcgtggaagtcgtatactcagtttcttttatcaacgctaccagtgaggttaagaaataattatgttagaaaatttaataaatcaatagacttttggcataaaacaggcggaggacttgcggaggaaacaattaatgaactaattgaaaaaggatatcgtattgctagaaatggtatttcaaattatacctcttttaaacattcaagggttatttttttagatcaaattcctgatgatacagacgatattgtaacaacaaaggatataccaagctggaaacgaatgtgtttctgtattttaaaaaacgatcatatttgtcgaactatggggtttggtttgacaagagagcaacaaaaaatagtagcctttttaaaagagaaatataagacgagtttaaaggagttagaaagtgag

SEQ ID NO: 7340 - protein, 444 aa, Streptococcus pyogenes
VKKYLNQNVYDALIERLHFLFNDFPIVYISFSGGKDSGLLLNILLDFRDKYYPDREIGVFHQDFEAQYSLTTKYVQETFTSLEGRKKVSLYWVCLPMATRTALSSYEMFWYPWDDKTEDIWVRPMPSQDYVINLENNSITTYRYKMNQEDLAKQFGRWYKQIHGNQKTVCILGNRASESLHRYSGFINKKYGYQKECWITKQFKDVWTASPLYDWSVEDIWHAYYKFSYSYNELYDLFYKAGLKPSQMRVASPFQDYAVDSLNLYRIIDQETWVKLLGRVQGVNFSNIYGRTKAMGYKSIALPKGHSWKSYTQFLLSTLPVRLRNNYVRKFNKSIDFWHKTGGGLAEETINELIEKGYRIARNGISNYTSFKHSRVIFLDQIPDDTDDIVTTKDIPSWKRMCFCILKNDHICRTMGFGLTREQQKIVAFLKEKYKTSLKELESE

SEQ ID NO: 7341 - DNA, 528 bp, Streptococcus pyogenes
gtgagtaattttattagtccagtctatgagattaaatcaattccaattgaaaagatttctccaaatgattataatccgaattcagttgctccgcctgaaatgaaattattgtatgatagtataaaatctgatggttatactatgccgattgtttgctattacgataaggaagaggatcggtatagtattgttgatggttttcatagatatcgtataatgctagattattcagatatttatgaaagggaaagtgggagattacctgtttctgttattgataagtcattagactatcgaatggcttctaccattcgacataatagagctagaggaagtcatgatgttgatttgatgagtcagattgtaaaggatcttcatgagtgtgggcgaagtgataactggattgcaaaacatttaggaatggataaagatgaaattttaagactgaaacaaataacaggattggcttctctttttaaggaccatgagtttaatcaatcttgggaaccagaagagctattaaatgag

SEQ ID NO: 7342 - protein, 176 aa, Streptococcus pyogenes
VSNFISPVYEIKSIPIEKISPNDYNPNSVAPPEMKLLYDSIKSDGYTMPIVCYYDKEEDRYSIVDGFHRYRIMLDYSDIYERESGRLPVSVIDKSLDYRMASTIRHNRARGSHDVDLMSQIVKDLHECGRSDNWIAKHLGMDKDEILRLKQITGLASLFKDHEFNQSWEPEELLNE

SEQ ID NO: 7343 - DNA, 108 bp, Streptococcus pyogenes
atgcaagacaagttggtaacagaagctttcaatcaagcttataatagagaaaagcctaaagaaggggtaatcgtccatacagatcagggttctcaatataccggagca

SEQ ID NO: 7344 - protein, 36 aa, Streptococcus pyogenes
MQDKLVTEAFNQAYNREKPKEGVIVHTDQGSQYTGA

SEQ ID NO: 7345 - DNA, 291 bp, Streptococcus pyogenes
atgccaagaaaaacctttgataaagccttcaaactctctgctgtaaaactcatccttgaggaagagcagtctgtaaaaatggttagttcaactttagaaattcatcccaatagtctttatcaatggattcaagaatatgaaaaatatggagaaagtgcgttcccaggacatgggagcgcacttcgtcatgctcaatttgagacaaaaaaacttgaaaaagagcacaaactgctacaggaggaattagctcttctaaaaaagttccaggtctttttgaagccaaaccggaaa

SEQ ID NO: 7346 - protein, 97 aa, Streptococcus pyogenes
MPRKTFDKAFKLSAVKLILEEEQSVKMVSSTLEIHPNSLYQWIQEYEKYGESAFPGHGSALRHAQFETKKLEKEHKLLQEELALLKKFQVFLKPNRK

SEQ ID NO: 7347 - DNA, 1308 bp, Streptococcus pyogenes
atgattcatttaataataattagcgccattgctctagccattggaattggttaccgcaccaaaatcaatattggcctgctggctattgctttttcttacctcatcgcaaccactctcatgggattaagccccaaagaacttcttcatttttggccaacctcactcttttttaccatttttagcgtctctctcttttataacgttgcaacaactaacggcactcttgatgttttggctcaacacattctctaccgcacacgcacccaccctaacgccctctacatgattttatacctgatagcaacccttttgtctgctttaggtgctggatttttcactactatggccgtttgctgtcctctagcgattaccctctgtcaaaaagcggacaaacaccctttgattggagctcaagccgtcaattggggagcttcaggaggggctaatttgataaccagtggctcaggcattgtctttcaaggcctgtttaagcaaatgggatgggaagagcaagctttttcacttggcaatcatatctttatcgtcagcattatctacccactcatcgtcttgcttttattatcttgttacatccgctacagtaagggaagaacaaactcatccttgactattgaccaaccaccagtcctcagcaaggtccaaagacaaaccaccttgctcatgatcagcagcatggttttggtttggctttttcccttgttgcttctcattttcccaaacatcgcatggatagctacttatcgacaaacatttgatattggctttgtctcaatactcatggtctgcctcgccttaaggctcaaattagggaagcaagaagccattttggctaaggttccctgggctataattatcatgctctgcggtatgagcttactaatgtctctagcggtcaagtcaggtttagttacactgatagggcacctcataacaacaaccattcctcatttctggttacctctgttcttttgtgtgatagccggagtgatgtcactctttagttccaccctatccgtcgtagccccaactctctttcccatcattgctaccatcagtgctcaaagtcctcacattgatattcgcttactcacaacagccactattattggcgctctatctactaatatctctcctttttcatcagctggttccctcattcaactctcccttccccatatagaggaacgcagtcttgctttcaaaaaacaaattcttctgggtgtgcccatcagcttaagtttggcactcttgaccatctggattctcatgctgctagcttccttaagt

SEQ ID NO: 7348 - protein, 436 aa, Streptococcus pyogenes
MIHLIIISAIALAIGIGYRTKINIGLLAIAFSYLIATTLMGLSPKELLHFWPTSLFFTIFSVSLFYNVATTNGTLDVLAQHILYRTRTHPNALYMILYLIATLLSALGAGFFTTMAVCCPLAITLCQKADKHPLIGAQAVNWGASGGANLITSGSGIVFQGLFKQMGWEEQAFSLGNHIFIVSIIYPLIVLLLLSCYIRYSKGRTNSSLTIDQPPVLSKVQRQTTLLMISSMVLVWLFPLLLLIFPNIAWIATYRQTFDIGFVSILMVCLALRLKLGKQEAILAKVPWAIIIMLCGMSLLMSLAVKSGLVTLIGHLITTTIPHFWLPLFFCVIAGVMSLFSSTLSVVAPTLFPIIATISAQSPHIDIRLLTTATIIGALSTNISPFSSAGSLIQLSLPHIEERSLAFKKQILLGVPISLSLALLTIWILMLLASLS

SEQ ID NO: 7349 - DNA, 897 bp, Streptococcus pyogenes
gtgatattaaaaatagaggacttagtgatgtcaatcatttcaactgatttaaccccttttcaaatagatgatacattgaaagcagccttgcgagaagatgttcattccgaagattacagtaccaatgccatttttgatcatcatggccaagccaaggtgtcgctttttgccaaggaagctggtgttttagcggggctaaccgtttttcaaagggtttttaccctatttgatactgaggtgaccttccagaatcctcatcaatttaaggatggggatcgtttgactagtggcgatttggttttagaaatcataggctcggtgagaagcctcttaacatgtgaacgcgttgccttgaattttttacaacatttatcagggattgcttcgatgacagctgcttatgtagaagccttaggcgatgatcgcattaaggtatttgatactcgaaaaaccactcctaatttacgtctttttgagaaatatgccgtgagagttggcggtggctataatcatcgctttaatttatcagatgctatcatgctaaaagacaatcacattgcggcagtaggtagtgttcaaaaggcgattgctcaagcgcgtgcctatgccccttttgtgaaaatggtcgaggtggaagtggaaagccttgctgctgccgaagaagctgcggcggcgggtgttgatattatcatgttggataatatgtcattggaacagattgaacaggccattactctaattgcaggacgttctcggattgaatgttctggaaatattgatatgaccactattagccgttttcgtggtttagcgattgattacgtctccagtggtagtttaacccatagtgctaagagtctcgatttttccatgaagggtttaacctaccttgatgtc

SEQ ID NO: 7350 - protein, 299 aa, Streptococcus pyogenes
VILKIEDLVMSIISTDLTPFQIDDTLKAALREDVHSEDYSTNAIFDHHGQAKVSLFAKEAGVLAGLTVFQRVFTLFDTEVTFQNPHQFKDGDRLTSGDLVLEIIGSVRSLLTCERVALNFLQHLSGIASMTAAYVEALGDDRIKVFDTRKTTPNLRLFEKYAVRVGGGYNHRFNLSDAIMLKDNHIAAVGSVQKAIAQARAYAPFVKMVEVEVESLAAAEEAAAAGVDIIMLDNMSLEQIEQAITLIAGRSRIECSGNIDMTTISRFRGLAIDYVSSGSLTHSAKSLDFSMKGLTYLDV

SEQ ID NO: 7351 - DNA, 126 bp, Streptococcus pyogenes
ttgattaaatttcataaaaaaatagcaccccaatcgttagattttgtgtctaacttttggggtgcagttcaagggctatttttatggatggaggatttatttagtctttttgatcgtcatacatca

SEQ ID NO: 7352 - protein, 42 aa, Streptococcus pyogenes
LIKFHKKIAPQSLDFVSNFWGAVQGLFLWMEDLFSLFDRHTS

SEQ ID NO: 7353 - DNA, 156 bp, Streptococcus pyogenes
atgagacagctaaccattattttgactatacttttttgggaaagcatgacaaattatggattttttgataaaatgataggcgctagaacaacatgtcatcttgaagcccttcattatgatggaaactcaggcagatcaaaaaagctcaagactgtt

SEQ ID NO: 7354 - protein, 52 aa, Streptococcus pyogenes
MRQLTIILTILFWESMTNYGFFDKMIGARTTCHLEALHYDGNSGRSKKLKTV

SEQ ID NO: 7355 - DNA, 120 bp, Streptococcus pyogenes
ttggaattgaccttgaccaagagtatcggtgcctacattatcataccccgcttgatattgttgggctcaaatgtgcttcttgtcagacttattatgcttgttaccattgccatgaccagt

SEQ ID NO: 7356 - protein, 40 aa, Streptococcus pyogenes
LELTLTKSIGAYIIIPRLILLGSNVLLVRLIMLVTIAMTS

SEQ ID NO: 7357 - DNA, 105 bp, Streptococcus pyogenes
atggggagagggaaagattttcaaaaagcaaaatcgtgtttggaaagggtcatgatttttctaggtattcagtccatcttgtcccaaaatgaagctatgctcact

SEQ ID NO: 7358 - protein, 35 aa, Streptococcus pyogenes
MGRGKDFQKAKSCLERVMIFLGIQSILSQNEAMLT

SEQ ID NO: 7359 - DNA, 702 bp, Streptococcus pyogenes
atgaaaacaaacattttgacaattatcatattatcatgtgtttttagctatggaagtcaattagcttatgcagatgaaaatttaaaagatttaaaaagaagtttaagatttgcctataatattaccccatgcgattatgaaaatgtagaaattgcatttgttactacaaatagcatacatattaatactaaacaaaaaagatcggaatgtattctttatgttgattctattgtatctttaggcattactgatcagtttataaaaggggataaggtcgatgtttttggtctcccttataatttttccccaccttatgtagataatatttatggtggtattgtaaaacattcgaatcaaggaaataaatcattacagtttgtaggaattttaaatcaagatgggaaagaaacttatttgccctctgaggctgttcgcataaaaaagaaacagtttactttacaggaatttgattttaaaataagaaaatttctaatggaaaaatacaatatctatgattcggaatcgcgttatacatcggggagccttttccttgctactaaagatagtaaacattatgaagttgatttatttaataaggatgataagcttttaagtcgagacagtttctttaaaaggtataaagataataagatttttaatagtgaagaaattagtcattttgatatctacttaaaaacgcac

SEQ ID NO: 7360 - protein, 234 aa, Streptococcus pyogenes
MKTNILTIIILSCVFSYGSQLAYADENLKDLKRSLRFAYNITPCDYENVEIAFVTTNSIHINTKQKRSECILYVDSIVSLGITDQFIKGDKVDVFGLPYNFSPPYVDNIYGGIVKHSNQGNKSLQFVGILNQDGKETYLPSEAVRIKKKQFTLQEFDFKIRKFLMEKYNIYDSESRYTSGSLFLATKDSKHYEVDLFNKDDKLLSRDSFFKRYKDNKIFNSEEISHFDIYLKTH

SEQ ID NO: 7361 - DNA, 117 bp, Streptococcus pyogenes
atgatatttttaggaaatatgaaatcctattttctcttaaaaaaccactatgatgagaatatgcttgcattgacacatgttttatgtctgaaaaaacgaaaaccttttcaaaaaacc

SEQ ID NO: 7362 - protein, 39 aa, Streptococcus pyogenes
MIFLGNMKSYFLLKNHYDENMLALTHVLCLKKRKPFQKT

SEQ ID NO: 7363 - DNA, 90 bp, Streptococcus pyogenes
gtggctagtttcttgtcagccttgaacctttttcctaatttatggtatgataagaagatgatgaaaaaagagattctcaaagaactcttc

SEQ ID NO: 7364 - protein, 30 aa, Streptococcus pyogenes
VASFLSALNLFPNLWYDKKMMKKEILKELF

SEQ ID NO: 7365 - DNA, 105 bp, Streptococcus pyogenes
atggatgtagacttaaaacgtcaaaatgatcaagctttattagtggatgttgttagcaatcaagcttatcagcgggccaatacgattgccaaatcaaacgattta

SEQ ID NO: 7366 - protein, 35 aa, Streptococcus pyogenes
MDVDLKRQNDQALLVDVVSNQAYQRANTIAKSNDL

SEQ ID NO: 7367 - DNA, 117 bp, Streptococcus pyogenes
atgttttttctcttgcttgctattataccatatcagaaaagaaagcttgactgctttattgttcaccaaaaaactccgctaagacgcggagctgatgccatctattcaaagacaaat

SEQ ID NO: 7368 - protein, 39 aa, Streptococcus pyogenes
MFFLLLAIIPYQKRKLDCFIVHQKTPLRRGADAIYSKTN

SEQ ID NO: 7369 - DNA, 744 bp, Streptococcus pyogenes
ttgtatcaagttattcatacaaacaaggagagtaagatggtcgacaatagaatgagatttacgattgatcaaaacatgcaatttccactagttgagattgatctggaacatgggggatcagtttacttacaacaaggaagtatggtttatcatactgagaatgtaaccttgaataccaaattgaatggtaagggatctggtttaggaaaattagttggagccatcggccgttccatggtttctggtgaatcaatgttcattacacaagctatgtcaaatggagatggtaaattagcattagcacccaatacaccaggacagattgttgctttagaactaggtgaaaaacaatatcgtctaaatgatggtgcctttctagccctagatggttcagcacagtacaaaatggaacgtcaaaatattggaaaagcactttttggtggtcaaggcggactttttgtcatgacaactgaaggccttggtaccttacttgctaactcgtttggatctatcaagaaaatcacacttgatggtggcacaatgactattgataatgcccatgttgtagcatggagcagagaacttgattatgatattcatttagaaaatggctttatgcagtcaattggtacaggtgaaggagttgttaatacctttagaggtcatggtgagatttatatccaaagtcttaaccttgagcaatttgctgggactcttaaacgttatctaccaactagttcaaat

SEQ ID NO: 7370 - protein, 248 aa, Streptococcus pyogenes
LYQVIHTNKESKMVDNRMRFTIDQNMQFPLVEIDLEHGGSVYLQQGSMVYHTENVTLNTKLNGKGSGLGKLVGAIGRSMVSGESMFITQAMSNGDGKLALAPNTPGQIVALELGEKQYRLNDGAFLALDGSAQYKMERQNIGKALFGGQGGLFVMTTEGLGTLLANSFGSIKKITLDGGTMTIDNAHVVAWSRELDYDIHLENGFMQSIGTGEGVVNTFRGHGEIYIQSLNLEQFAGTLKRYLPTSSN

SEQ ID NO: 7371 - DNA, 123 bp, Streptococcus pyogenes
ttgctgtcattatcacgtaagcatctcaccacctctctttcaaatccaatctccaaaatagaaataaactatactattttttactttaccaaggtagcaagctcagataacgataaaaaagac

SEQ ID NO: 7372 - protein, 41 aa, Streptococcus pyogenes
LLSLSRKHLTTSLSNPISKIEINYTIFYFTKVASSDNDKKD

SEQ ID NO: 7373 - DNA, 1344 bp, Streptococcus pyogenes
atggctaatagcgaatatatgtttttattattatcaattattgtctattatatgacaaaaatttatattttttcctttctatctgatatcacattaccagtttggaaacaactaacgattttggctttagccctatttttcaatcagttcccgtatttgtcgccattgctaattgatcctctattatttttagttgttttaaggcaagaaaccaagcaattattttctttgaaagctctttttttggctgttgcacctagtgttttggtggatttgctatctcgatttatgggtacaatcgttatcccctatctttttttgtcgagtggtatttatctgggtcatattatctttgacttgcttgcttatctgctgatttttccaagttttgctattattaattatatgattggaaaagattacaagatgatatgccaatccggatattcgaaacgatcgcataatttctatcaaacattgctgatgtttgttttggtttattatgtggacatttttgtcattttaggatttacggacccctttttacattttcatcattctctttttgttcccacaccttataagttattgtttttgatgtttatacttcttttagtttatcttctatcttattttaatcatagttctaaagaataccttaaaaatgagttgagaagagaacaacaagcttatatgactaacttagagatttatgggaaacatcttgagaaactctatcgagatgtaagagcttttcaaagtgattacctgagccgtatagagcgtttaggtcaagccattaagagtgaatccattactcagattcaagatatttatgcccaaacggttcatgaagctaacgactactgggatgataaacactataatatctcgaagcttaggaaaattaatatctcatcgattaagagcttattgtcagctaaaattatcagtgcggaaaaatcaggtattgatttgaatgtggaagtgccagataatataaaagaaacttacattcctgagttggacttactattgttgatgtctattttttgtgataacgccattgaggcagctcttgaagcacaacaacctcatatgtcaattgcttactttttgttaggtgactatcagatgtttgttgtgacaaatacgactaaaaaaaaggtagacattaacaagatctttgaagaaggctattcttcaaaaggttcagaacgtggtatcggcctttctaatgcgcagcgtattctcaaaaagtatccttatttatccttgcggactaaaagttttgataaggaatttagccaaaccttgaccatgccaaaggaggaggtggataga

SEQ ID NO: 7374 - protein, 448 aa, Streptococcus pyogenes
MANSEYMFLLLSIIVYYMTKIYIFSFLSDITLPVWKQLTILALALFFNQFPYLSPLLIDPLLFLVVLRQETKQLFSLKALFLAVAPSVLVDLLSRFMGTIVIPYLFLSSGIYLGHIIFDLLAYLLIFPSFAIINYMIGKDYKMICQSGYSKRSHNFYQTLLMFVLVYYVDIFVILGFTDPFLHFHHSLFVPTPYKLLFLMFILLLVYLLSYFNHSSKEYLKNELRREQQAYMTNLEIYGKHLEKLYRDVRAFQSDYLSRIERLGQAIKSESITQIQDIYAQTVHEANDYWDDKHYNISKLRKINISSIKSLLSAKIISAEKSGIDLNVEVPDNIKETYIPELDLLLLMSIFCDNAIEAALEAQQPHMSIAYFLLGDYQMFVVTNTTKKKVDINKIFEEGYSSKGSERGIGLSNAQRILKKYPYLSLRTKSFDKEFSQTLTMPKEEVDR

SEQ ID NO: 7375 - DNA, 102 bp, Streptococcus pyogenes
ttgcacagttaccaaaaaatgggcgaaaaagtagtaagaaaacatggcagtattcatccaaaatacccactttttcatcttatcttcactgataaaccttat

SEQ ID NO: 7376 - protein, 34 aa, Streptococcus pyogenes
LHSYQKMGEKVVRKHGSIHPKYPLFHLIFTDKPY

SEQ ID NO: 7377 - DNA, 1281 bp, Streptococcus pyogenes
atgatggttatatacagtatggctttattctatgctaccatctttattaacagctgggtcatttttgcaaaggtttctgctattaaactaagctggaaacgggttagcattataggcattagttttgtaattgctaatatgatatttgacaaagtcattttgattgaccaactgttctttattattgttagtttgttaagtgctccgaaaaagaaattatttgagcatatgtttaatggtttctttactatcttgattgtcgaattactgtttcgcgtcatcggatctttctttttaccagctgtcttaggatttagcattggtcaaattaataataaccttaagcttttagagttatgttatctttttgtattaccaatattttatctgtttagctacattttcagtattgacttaagcttaataaggtttatcagtgaagataagatgaaaaagtgggtattttggatgaatactgccatgttttcttactactttttcgcccattttttggtaactgtgcaaagcggatttcttgcactatatttccagtaccggtctattttagtatttatttatttagctatttttatttgggttattgtgaaattagatcgatttgctaaagatcagctgtcacaaaaattaacacaagcacaaaatgaacgtattgcgtatcttgaaaattacaatcaatcgattgagcaactttaccgagaaatcagaacagttaaacatgattctgaaaatattttaattagtctaaaagatagtatcgatagtggtgatatagatctgattactagagtttatgacacggttattcagcaatcggcaacttctatgatgcgcacaaattatgaaatatcttctttagacaatatcaaagaggctgtgattcgcagtatcatgaattccaaattgcttgaagctcagtatttgggtattgaactttatattgagattccagatgttatcgatcatttacctattaagttaatcgacttaattgtactttttactggactagtggacaatgctattgagacagccaaaggcagtagacgtccttttttatctattgcatactttaaacaagataacaagcaattatttattattgaaaatagcacaaaaaccaatcgtgtggatatagccaaacgctttgatgctcagcagcagaactcagcccactttttgactgttttagatagttacccccaaataacgctttcgactaaaagtgaccattatcgattaagacaattgttagaaatgaga

SEQ ID NO: 7378 - protein, 427 aa, Streptococcus pyogenes
MMVIYSMALFYATIFINSWVIFAKVSAIKLSWKRVSIIGISFVIANMIFDKVILIDQLFFIIVSLLSAPKKKLFEHMFNGFFTILIVELLFRVIGSFFLPAVLGFSIGQINNNLKLLELCYLFVLPIFYLFSYIFSIDLSLIRFISEDKMKKWVFWMNTAMFSYYFFAHFLVTVQSGFLALYFQYRSILVFIYLAIFIWVIVKLDRFAKDQLSQKLTQAQNERIAYLENYNQSIEQLYREIRTVKHDSENILISLKDSIDSGDIDLITRVYDTVIQQSATSMMRTNYEISSLDNIKEAVIRSIMNSKLLEAQYLGIELYIEIPDVIDHLPIKLIDLIVLFTGLVDNAIETAKGSRRPFLSIAYFKQDNKQLFIIENSTKTNRVDIAKRFDAQQQNSAHFLTVLDSYPQITLSTKSDHYRLRQLLEMR

SEQ ID NO: 7379 - DNA, 120 bp, Streptococcus pyogenes
ttgattattgttgctattgataaggtttcaacggtaaggcaaaggaacagtgtcaaagaagagacactttatgaaatgagcggcctcttaaatgagagagaaactgttgaaaaacgaaaa

SEQ ID NO: 7380 - protein, 40 aa, Streptococcus pyogenes
LIIVAIDKVSTVRQRNSVKEETLYEMSGLLNERETVEKRK

SEQ ID NO: 7381 - DNA, 90 bp, Streptococcus pyogenes
ttgcgttgctgttttatttttggtggttatactctttttgtacgcttatcctcaggccgtcaaaagagacctttccctatctacgctgtt

SEQ ID NO: 7382 - protein, 30 aa, Streptococcus pyogenes
LRCCFIFGGYTLFVRLSSGRQKRPFPIYAV

SEQ ID NO: 7383 - DNA, 108 bp, Streptococcus pyogenes
atgttcaaagctggtgaatctgatttttcaattttagatttacgtggtttacgtaccaactggttaattgtaggcatctacattctcctgtgtttttttatttttggt

SEQ ID NO: 7384 - protein, 36 aa, Streptococcus pyogenes
MFKAGESDFSILDLRGLRTNWLIVGIYILLCFFIFG

SEQ ID NO: 7385 - DNA, 468 bp, Streptococcus pyogenes
atgagtcgtaaaaatcaagcgcctaaacgcgaagtattaccagatccattatataactcaaaaatcgtaacacgtcttatcaaccgtgttatgcttgacggtaaacgtggtacagctgctactatcgtttacgatgctttcaacgctatcaaagaagcaacaggaaatgacgctcttgaagtatttgaaacagctatggacaacatcatgcctgtacttgaagtacgcgcacgccgtgtcggtggttctaactaccaagtcccagttgaagttcgtccagaacgtcgtacaacacttggacttcgttggttggtaaacgcatcacgtgctcgtggtgaacacactatgaaagatcgtcttgctaaagaaatcatggatgctgcaaacaacacaggtgcatcagttaagaaacgtgaagacactcacaaaatggctgaagctaaccgtgcctttgctcacttccgttgg

SEQ ID NO: 7386 - protein, 156 aa, Streptococcus pyogenes
MSRKNQAPKREVLPDPLYNSKIVTRLINRVMLDGKRGTAATIVYDAFNAIKEATGNDALEVFETAMDNIMPVLEVRARRVGGSNYQVPVEVRPERRTTLGLRWLVNASRARGEHTMKDRLAKEIMDAANNTGASVKKREDTHKMAEANRAFAHFRW

SEQ ID NO: 7387 - DNA, 1035 bp, Streptococcus pyogenes
ttgattttcataaggaggaaatcactaatggtagttaaagttggtattaacggtttcggtcgtatcggacgtcttgcattccgccgtattcaaaacatcgaaggtgttgaagtaactcgtatcaatgaccttacagatccaaatatgcttgcacacttgttgaaatacgatacaactcaaggtcgttttgatggaacagttgaagttaaagaaggtggatttgaagtaaacggaaacttcatcaaagtttctgctgaacgtgatccagaaaacatcgactgggcaactgatggggttgaaatcgttcttgaagcaactggtttctttgctaaaaaagaagcagctgaaaaacacttacatgctaacggtgctaaaaaagttgttatcacagctcctggtggaaacgatgttaaaacagttgttttcaacactaaccacgacattcttgacggtactgaaacagttatctcaggtgcttcatgtactacaaactgtttagctcctatggctaaagctcttcacgatgcattcggtattcaaaaaggtcttatgactacaatccacgcttacactggtgaccaaatgatccttgacggaccacaccgtggtggtgaccttcgtcgtgcacgcgctggtgctgcaaatatcgttcctaactcaactggtgctgctaaagctatcggtcttgttatcccagaacttaacggtaaacttgacggtgctgcacaacgtgttcctgttccaactggatcagtaactgagttggttgtaactcttgacaaaaacgtttctgttgacgaaatcaacgctgctatgaaagctgcttcaaacgatagcttcggttacactgaagatccaatcgtttcttcagatatcgtaggcgtatcatacggttcattgtttgacgcaactcaaactaaagtaatggaagttgacggatcacaattggttaaagttgtatcatggtatgacaacgaaatgtcttacactgctcaacttgtacgtactcttgagtacttcgcaaaaattgctaaa

SEQ ID NO: 7388 - protein, 345 aa, Streptococcus pyogenes
LIFIRRKSLMVVKVGINGFGRIGRLAFRRIQNIEGVEVTRINDLTDPNMLAHLLKYDTTQGRFDGTVEVKEGGFEVNGNFIKVSAERDPENIDWATDGVEIVLEATGFFAKKEAAEKHLHANGAKKVVITAPGGNDVKTVVFNTNHDILDGTETVISGASCTTNCLAPMAKALHDAFGIQKGLMTTIHAYTGDQMILDGPHRGGDLRRARAGAANIVPNSTGAAKAIGLVIPELNGKLDGAAQRVPVPTGSVTELVVTLDKNVSVDEINAAMKAASNDSFGYTEDPIVSSDIVGVSYGSLFDATQTKVMEVDGSQLVKVVSWYDNEMSYTAQLVRTLEYFAKIAK

SEQ ID NO: 7389 - DNA, 114 bp, Streptococcus pyogenes
atggcagaaaaaactgacttatcgtcagcttacagaagactgaaaagtcccaatattaaaaccagaaaacgtgctctgaagattattcacgagtacaaacgttacggtaaaaaa

SEQ ID NO: 7390 - protein, 38 aa, Streptococcus pyogenes
MAEKTDLSSAYRRLKSPNIKTRKRALKIIHEYKRYGKK

SEQ ID NO: 7391 - DNA, 123 bp, Streptococcus pyogenes
atggaaagaaaagaaggatttgaaacactaaaaaagccgagtaaggctttttttgctataatagatgcagtgaccattataaaaaaagcagtgcaaatgacactgtcttttcttgagatggta

SEQ ID NO: 7392 - protein, 41 aa, Streptococcus pyogenes
MERKEGFETLKKPSKAFFAIIDAVTIIKKAVQMTLSFLEMV

SEQ ID NO: 7393 - DNA, 90 bp, Streptococcus pyogenes
ttgaaaaatatcaaaaagaattgtaaaagagatgcactgaccccaaaagttggctactctattttaagtaaaggatttagttttgtattg

SEQ ID NO: 7394 - protein, 30 aa, Streptococcus pyogenes
LKNIKKNCKRDALTPKVGYSILSKGFSFVL

SEQ ID NO: 7395 - DNA, 132 bp, Streptococcus pyogenes
ttgtctaacgtttggggtgtagttcaaggctttttctcttttttgttgcacttcattttacaacgcgggcaaataaaaaagtacaaaaaaagtaaaaaaagagttgacaatgacagtaaagatatcgtatac

SEQ ID NO: 7396 - protein, 44 aa, Streptococcus pyogenes
LSNVWGVVQGFFSFLLHFILQRGQIKKYKKSKKRVDNDSKDIVY

SEQ ID NO: 7397 - DNA, 108 bp, Streptococcus pyogenes
atgggggcaaccctgaccgagcaacgccgcgtgagtgaaagaaggttttcggatcgtaaagctctgttgttagagaagaatgatggtgggagtggaaaatccaccaag

SEQ ID NO: 7398 - protein, 36 aa, Streptococcus pyogenes
MGATLTEQRRVSERRFSDRKALLLEKNDGGSGKSTK

SEQ ID NO: 7399 - DNA, 96 bp, Streptococcus pyogenes
ttgcattttagagaagagtgtggtaagatagaggcaagatatgcgttggcacccttagctcaactggatagagtacctgactacgaatcaggcggt

SEQ ID NO: 7400 - protein, 32 aa, Streptococcus pyogenes
LHFREECGKIEARYALAPLAQLDRVPDYESGG

SEQ ID NO: 7401 - DNA, 153 bp, Streptococcus pyogenes
ttggtttttattgtgatgcttaaaacgattttatatttctattttaccaaagcttttcaaagtgctataataagggagttagagtcaatattagtaacgttaatgttgacaatattcaataaaatactattaaaaggagacaaaaatgggacg

SEQ ID NO: 7402 - protein, 51 aa, Streptococcus pyogenes
LVFIVMLKTILYFYFTKAFQSAIIRELESILVTLMLTIFNKILLKGDKNGT

SEQ ID NO: 7403 - DNA, 114 bp, Streptococcus pyogenes
atgacatcatctaaacaacaacaccctaagtttttacttagggtgttgtttcgtttatttatgactaaaccttctagtcaagctatcaccaataaattggatagcaaaaataat

SEQ ID NO: 7404 - protein, 38 aa, Streptococcus pyogenes
MTSSKQQHPKFLLRVLFRLFMTKPSSQAITNKLDSKNN

SEQ ID NO: 7405 - DNA, 108 bp, Streptococcus pyogenes
gtgagcgtttggggtttttgctcaagcctcacttttttatgtctttgggcagataatctaaaatggcaggaattatcaaaaatatctgaacaaaaagaaaaaaatgag

SEQ ID NO: 7406 - protein, 36 aa, Streptococcus pyogenes
VSVWGFCSSLTFLCLWADNLKWQELSKISEQKEKNE

SEQ ID NO: 7407 - DNA, 102 bp, Streptococcus pyogenes
ttgaaaaaacagctattctttgatatactctttagagaatatggttacttatctaaagtagaaggtattttgaccatagagggcagagaaggtaatgactat

SEQ ID NO: 7408 - protein, 34 aa, Streptococcus pyogenes
LKKQLFFDILFREYGYLSKVEGILTIEGREGNDY

SEQ ID NO: 7409 - DNA, 93 bp, Streptococcus pyogenes
atgaaaaactcagttggaaatagccaactgagtttctttttaaaccctgaacagttgacaaatctaactgataagacaagtgctactgaacat

SEQ ID NO: 7410 - protein, 31 aa, Streptococcus pyogenes
MKNSVGNSQLSFFLNPEQLTNLTDKTSATEH

SEQ ID NO: 7411 - DNA, 93 bp, Streptococcus pyogenes
ttgagaagtagcttattttctcaaaatcttcactattatagcatagaaaaaaggcttaacaaagccttttttgatgtgatttttaggatgtat

SEQ ID NO: 7412 - protein, 31 aa, Streptococcus pyogenes
LRSSLFSQNLHYYSIEKRLNKAFFDVIFRMY

SEQ ID NO: 7413 - DNA, 90 bp, Streptococcus pyogenes
ttgttcaatggttatcatacccttattttatccttaaagttcttgttttacaagtcacaagcaaaagtttataataaagctaatagaaac

SEQ ID NO: 7414 - protein, 30 aa, Streptococcus pyogenes
LFNGYHTLILSLKFLFYKSQAKVYNKANRN

SEQ ID NO: 7415 - DNA, 132 bp, Streptococcus pyogenes
atgctggtgatcgtttatttgggacaaaataaaagagacaaccatcaaatagtagcctttttaggccaatcgttcttgattttgtttaaaaaatcagagagatttctcttctttaaaggaaaagcaagttta

SEQ ID NO: 7416 - protein, 44 aa, Streptococcus pyogenes
MLVIVYLGQNKRDNHQIVAFLGQSFLILFKKSERFLFFKGKASL

SEQ ID NO: 7417 - DNA, 99 bp, Streptococcus pyogenes
ttgagagacggcaacccactaggtcatctcttttttactgattgtctttattataatattttggtcaataaaggtcaaatcataaacttgcttttcctt

SEQ ID NO: 7418 - protein, 33 aa, Streptococcus pyogenes
LRDGNPLGHLFFTDCLYYNILVNKGQIINLLFL

SEQ ID NO: 7419 - DNA, 96 bp, Streptococcus pyogenes
gtgtggtataatcagattatgctagccaaaactaaaaaaggcattgccattaaaggtgttgtagatcggcttatcctagatctcataacaatgctg

SEQ ID NO: 7420 - protein, 32 aa, Streptococcus pyogenes
VWYNQIMLAKTKKGIAIKGVVDRLILDLITML

SEQ ID NO: 7421 - DNA, 273 bp, Streptococcus pyogenes
atgtttcaaaaacaagaacgtattggactcgtcgtttacctgtattataaccgagatgccagaaagttatcaaaatttggtgatttatattaccattccaagcgctctcgttacctcattatttatattaataaaaatgatttagacacaaaattagaagaaatgagacgtttgaaatgtgttaaagacattagaccatcagcttttgatgatattgaccgccaatttgtaggtaaccttcatcgcgacgaaacaaacaaccatcaaaagggt

SEQ ID NO: 7422 - protein, 91 aa, Streptococcus pyogenes
MFQKQERIGLVVYLYYNRDARKLSKFGDLYYHSKRSRYLIIYINKNDLDTKLEEMRRLKCVKDIRPSAFDDIDRQFVGNLHRDETNNHQKG

SEQ ID NO: 7423 - DNA, 255 bp, Streptococcus pyogenes
gtgcaattggaattcgttatggggaaacgaagcttgtcaaaagacttgcccgtagcgaccaaagtagcggcgcataagggcaaaaaagcttttgaagaaaatactgcctttgcaacagatttgatgaaagaagtatcacgattaataacacaaaatcaacttgaaatgacgtttgttaatagtgtctttctcttagatcagcatgttgtcctaattcccttttcagcagaagagcacatggatttttacaactgt

SEQ ID NO: 7424 - protein, 85 aa, Streptococcus pyogenes
VQLEFVMGKRSLSKDLPVATKVAAHKGKKAFEENTAFATDLMKEVSRLITQNQLEMTFVNSVFLLDQHVVLIPFSAEEHMDFYNC

SEQ ID NO: 7425 - DNA, 114 bp, Streptococcus pyogenes
gtgagctgccccagattaacagccaagaagatttcattttctatggaggctatggaccgtgtggcaggccactgtgctgctttcgtttttgggaaaatttctgacagtatctat

SEQ ID NO: 7426 - protein, 38 aa, Streptococcus pyogenes
VSCPRLTAKKISFSMEAMDRVAGHCAAFVFGKISDSIY

SEQ ID NO: 7427 - DNA, 129 bp, Streptococcus pyogenes
ttgggaaaatttctgacagtatctattaaaatactaaaaagtcaagggttatcattgactttgggtaaagcaacaagcccttatggccgtttgctttgctgtctctatgatgaaggtgtcttttaccaa

SEQ ID NO: 7428 - protein, 43 aa, Streptococcus pyogenes
LGKFLTVSIKILKSQGLSLTLGKATSPYGRLLCCLYDEGVFYQ

SEQ ID NO: 7429 - DNA, 135 bp, Streptococcus pyogenes
gtgactaaggtcaactggtcttttaaccgcaccttaatgggatctgtaaatatatcaacggctgctactgttgcagggccatcacttgtctctactatggtaccatattcagggaattttttcttgctttattgg

SEQ ID NO: 7430 - protein, 45 aa, Streptococcus pyogenes
VTKVNWSFNRTLMGSVNISTAATVAGPSLVSTMVPYSGNFFLLYW

SEQ ID NO: 7431 - DNA, 390 bp, Streptococcus pyogenes
atgacagaagatcaagcaactatccttattttaggagtatacggaatcatattggctgtattcttattatcagctttattatgccttatcgctaactggcgactctttaaaagagcaggttacaaaggatggtatagtctcattcctttctatgcaggttttgtcaaacacaaaatcacttttggagaagataataaatggttttactttattggttgggtcattgctatttattattactatgtgcacttttgctatgtccgtgcttttggtggatcaaagggtctagcagtatttggcttgtttttcccaggcattgcttctttgatagtggcttttggaaaaacttataccacacaagaatgccaccctgtgccacatcttttaaac

SEQ ID NO: 7432 - protein, 130 aa, Streptococcus pyogenes
MTEDQATILILGVYGIILAVFLLSALLCLIANWRLFKRAGYKGWYSLIPFYAGFVKHKITFGEDNKWFYFIGWVIAIYYYYVHFCYVRAFGGSKGLAVFGLFFPGIASLIVAFGKTYTTQECHPVPHLLN

SEQ ID NO: 7433 - DNA, 168 bp, Streptococcus pyogenes
ttggcaggtgctacattttgggtattggtaaatcgtaatcatttgttctcctttagtgtaactgttttaggcgtgaggcgcctgtttttggtcatcatttcacaaaaaaaagggggcttttttaaaatgctaagctttgtctttcttttcttcttgagagttcgttgg

SEQ ID NO: 7434 - protein, 56 aa, Streptococcus pyogenes
LAGATFWVLVNRNHLFSFSVTVLGVRRLFLVIISQKKGGFFKMLSFVFLFFLRVRW

SEQ ID NO: 7435 - DNA, 165 bp, Streptococcus pyogenes
atgttccatgaaatcagtttcatttggtttctctttctaacagatagtcttgttgttattgtaacaaaaaacgaaacgataagcgactttgggcacctagcccccataaaacagtctagccaaatgaagcatagcagcgtaagaacaagacaaggaggtgatcag

SEQ ID NO: 7436 - protein, 55 aa, Streptococcus pyogenes
MFHEISFIWFLFLTDSLVVIVTKNETISDFGHLAPIKQSSQMKHSSVRTRQGGDQ

SEQ ID NO: 7437 - DNA, 1185 bp, Streptococcus pyogenes
atgtcaatggcacaaaaaacagtcatcaccgaagaaacaaccgattttgttatggatttcaaaacaagtagcgctgagggaaatgttgattttattaacgtttttgaccttgagaaaatggcacaacaggtcatccctaaaggagcctttggttatattgctagtggtgctggtgatacctttaccctccatgaaaatattcgctcatttaatcataaattaattgtccctcactccctcaaaggggttgaaaatccgtcaacagagattacgtttgatggtgattacttaacctctcctcttattttagcacctgtagcggctcataaactggccaatgaacaaggagaagtagcgtctgctaaaggattgaaggaatttggaagtatctacaccactagttcctactcaacaactgacctgccagaaatcagtgctgccttaggtgggacaccccattggtttcaattttattacagtaaagacgatggcattaatcgtaatattatggatcgtgtcaaagcacaaggttgcaaagctatcgttttgacagcagatgcaacagttggaggaaaccgcgaagttgataggcgaaacggttttgtttttccggtcggtatgccaattgttcaagaatatttacctgatggtgcaggtaaaacaatggattatgtctataaatcagctaaacaagcgcttacctcaaaagatattgaatatatcgcaacttactcaggcctgcctgtttatgtcaaaggaccacagtgtgctgaggataccttgcgggcattggacgcaggagcatcaggtatctgggtaaccaatcatggtggccgtcaattagatggtggtccagctgcttttgattccttacaagaagtcgctgaagcagttgatcaaaaagttcctattgtctttgactcaggtataagacggggtcaacatattttcaaagctcttgcttcaggtgctgaccttgttgccttggggcgtccagcgatttacggcttggctatgggaggaagcattggtactcgtcaggtctttgaaaagttaaatgacgagttaaaaatggttatgcaactggctgggacacaaactatccaagatgttaaagcctttaaccttcgccacaatccgtatgattcatcgattccatttgatcaaaatgcgctacgcttagat

SEQ ID NO: 7438 - protein, 395 aa, Streptococcus pyogenes
MSMAQKTVITEETTDFVMDFKTSSAEGNVDFINVFDLEKMAQQVIPKGAFGYIASGAGDTFTLHENIRSFNHKLIVPHSLKGVENPSTEITFDGDYLTSPLILAPVAAHKLANEQGEVASAKGLKEFGSIYTTSSYSTTDLPEISAALGGTPHWFQFYYSKDDGINRNIMDRVKAQGCKAIVLTADATVGGNREVDRRNGFVFPVGMPIVQEYLPDGAGKTMDYVYKSAKQALTSKDIEYIATYSGLPVYVKGPQCAEDTLRALDAGASGIWVTNHGGRQLDGGPAAFDSLQEVAEAVDQKVPIVFDSGIRRGQHIFKALASGADLVALGRPAIYGLAMGGSIGTRQVFEKLNDELKMVMQLAGTQTIQDVKAFNLRHNPYDSSIPFDQNALRLD

SEQ ID NO: 7439 - DNA, 117 bp, Streptococcus pyogenes
atgtggttaaataatcaaatattattaacgaaaaatgagttaatgattaacattaaactggttttagttaaaacatttaggagggtatcaggtggagaaaaagcaacgtttttccct

SEQ ID NO: 7440 - protein, 39 aa, Streptococcus pyogenes
MWLNNQILLTKNELMINIKLVLVKTFRRVSGGEKATFFP

SEQ ID NO: 7441 - DNA, 192 bp, Streptococcus pyogenes
atgttgaatgacaaagccaaagcttctttttttgacacctgctcagatagtgacaagtcagtctgctttaccaccttgatcacagcaaaggcatcgtttgcagctactcatctggagtttttggatagattagtgtcctttttttcagtcttttccacaaaaggagtccttcttgaaagaataggcttagta

SEQ ID NO: 7442 - protein, 64 aa, Streptococcus pyogenes
MLNDKAKASFFDTCSDSDKSVCFTTLITAKASFAATHLEFLDRLVSFFSVFSTKGVLLERIGLV

SEQ ID NO: 7443 - DNA, 138 bp, Streptococcus pyogenes
gtgatcaaggtggtaaagcagactgacttgtcactatctgagcaggtgtcaaaaaaagaagctttggctttgtcattcaacatactgagcttcagtctttcagaacggagacacccccagttttgtactcaaaaagca

SEQ ID NO: 7444 - protein, 46 aa, Streptococcus pyogenes
VIKVVKQTDLSLSEQVSKKEALALSFNILSFSLSERRHPQFCTQKA

SEQ ID NO: 7445 - DNA, 177 bp, Streptococcus pyogenes
ttgtactcaaaaagcataaacagctctgctgatgtgacatctgatttctacgtgcgcagtgagccaaaacagctgctgtttgctatggaaaaagtggcgccaatcgagatttttgagaccctaggctcaaaaataaggcatagaattccaaaggaagtcgctgccgtgagcacaacc

SEQ ID NO: 7446 - protein, 59 aa, Streptococcus pyogenes
LYSKSINSSADVTSDFYVRSEPKQLLFAMEKVAPIEIFETLGSKIRHRIPKEVAAVSTT

SEQ ID NO: 7447 - DNA, 165 bp, Streptococcus pyogenes
gtgctcaagtcaaaaagagacatcccatcaaaccattgctgtttagcaggtctttttgtgttgctcaaaaaaacaattcctgtctgtttggcgtctagtgatgacttaggcttagcgctactagacttttgtttgaaaaatacctcaagccttgaaggagacaaa

SEQ ID NO: 7448 - protein, 55 aa, Streptococcus pyogenes
VLKSKRDIPSNHCCLAGLFVLLKKTIPVCLASSDDLGLALLDFCLKNTSSLEGDK

SEQ ID NO: 7449 - DNA, 765 bp, Streptococcus pyogenes
gtgtcagggggaactatgctaaaaaagcgctatcaactggctattgtccttcttcttagctgttttagtctgatctggcaaactgagggcttggtcgagctttttgtctgtgagcactatgagcgggcggtttgtgaggggacgcctgcttattttaccttttcggatcaaaagggcgctgagacactgattaaaaagcgatggggcaagggtctcatctacccaagggctgagcaagaggcgatggctgcttatacctgtcagcaggcaggccctatcaacaccagcctagacaaagccaaaggtgagctcagccaactcacgcctgagctaagggatcaggtggcccagctcgatgctgcgactcaccggctagtcatcccgtggaacattgtagtataccgctatgtatacgagacgtttttgcgtgatatcggtgtttcacatgctgatctcacgtcttactaccgtaaccatcagtttgaccctcatatcctttgtaagatcaagcttggtacacgctacaccaagcacagttttatgagcacgacagccttgaaaaacggcgccatgacccatcgaccggtggaggtgcgcatctgtgtcaaaaaaggggccaaggcagcctttgtcgagccttattcggctgtgccttcagaggttgagctcttgtttccaagaggctgtcagctggaggtcgttggagcttacgtgtcacaggaccaaaaaaagctccacatagaagcgtatttcaagggcagtttg

SEQ ID NO: 7450 - protein, 255 aa, Streptococcus pyogenes
VSGGTMLKKRYQLAIVLLLSCFSLIWQTEGLVELFVCEHYERAVCEGTPAYFTFSDQKGAETLIKKRWGKGLIYPRAEQEAMAAYTCQQAGPINTSLDKAKGELSQLTPELRDQVAQLDAATHRLVIPWNIVVYRYVYETFLRDIGVSHADLTSYYRNHQFDPHILCKIKLGTRYTKHSFMSTTALKNGAMTHRPVEVRICVKKGAKAAFVEPYSAVPSEVELLFPRGCQLEVVGAYVSQDQKKLHIEAYFKGSL

SEQ ID NO: 7451 - DNA, 90 bp, Streptococcus pyogenes
ttgctgtggtggctaataaggactaacacaaaatctcaaacgctttcaaaaacagctcctaagcttaaaaaagctgatgaacagatttgt

SEQ ID NO: 7452 - protein, 30 aa, Streptococcus pyogenes
LLWWLIRTNTKSQTLSKTAPKLKKADEQIC

SEQ ID NO: 7453 - DNA, 552 bp, Streptococcus pyogenes
atgaaatggagtggttttatgaaaacaaaatcaaaacgctttttaaacctagcaaccctttgcttggccctactaggaacaactttgctaatggcacatcccgtacaggcggaggtgatatcaaaaagagactatatgactcgcttcgggttaggcgatttagaagatgattcagctaactatccttcaaatttagaagctagatataaaggatatttagagggatatgaaaaaggcttaaaaggagatgatatacccgaacggcccaagattcaggttcctgaggatgttcagccatctgaccatggcgactatagagatggttatgaggaaggatttggagaaggacaacataaacgtgatccattagaaacagaagcagaagatgattctcaaggaggacgtcaagaaggacgtcaaggacatcaagaaggagcagattctagtgatttgaacgttgaagaaagcgacggtttgtctgttattgatgaagtagttggagtaatttatcaagcatttagtactatttggacatacttaagcggtttgttc

SEQ ID NO: 7454 - protein, 184 aa, Streptococcus pyogenes
MKWSGFMKTKSKRFLNLATLCLALLGTTLLMAHPVQAEVISKRDYMTRFGLGDLEDDSANYPSNLEARYKGYLEGYEKGLKGDDIPERPKIQVPEDVQPSDHGDYRDGYEEGFGEGQHKRDPLETEAEDDSQGGRQEGRQGHQEGADSSDLNVEESDGLSVIDEVVGVIYQAFSTIWTYLSGLF

SEQ ID NO: 7455 - DNA, 288 bp, Streptococcus pyogenes
ttgggttttagtgacccgtgtgttgagaaaggagcatttatgccagaaaagaaagtgttgcccgtcctaagcatagtggtgagttttgtctgcctgcttgatcatatcttcttttttgctacttatagttatctctacttaccgcttgtagcaagtagtctagctcttatcggtctggtgcaaaacaaaggcaggcaaaaggtgtggtcgctagctggactcgtcctagctgctctagccgtggcagtagtggcctatgcctactatgacccaaccgtcatcccctac

SEQ ID NO: 7456 - protein, 96 aa, Streptococcus pyogenes
LGFSDPCVEKGAFMPEKKVLPVLSIVVSFVCLLDHIFFFATYSYLYLPLVASSLALIGLVQNKGRQKVWSLAGLVLAALAVAVVAYAYYDPTVIPY

SEQ ID NO: 7457 - DNA, 630 bp, Streptococcus pyogenes
atgaaaaagacattaactttgctactggcactctttgccatcggggtaactagtagcgtcagagcggaggatgaacaaagtagtacacaaaagccagtaaaatttgatttggatggacctcaacaaaaaattaaagattatagtggcaacacaatcactctagaagacttatatgttggtagtaaagtagtaaaaatatatatccctcaaggatggtgggtatatctttacagacaatgtgatcataacagtaaagaacgaggaattttagctagtcctattctcgaaaaaaatataacaaaaacagatccttatcgtcaatattatacaggagtaccttatattcttaacttaggagaagatcctttgaagaaaggagaaaaattaactttctcatttaaaggagaagacggattttatgtcggtagctatatctatagagactctgatactataaaaaaagaaaaagaagctgaagaagcacttcaaaaaaaggaagaggaaaagcaacaaaaacagctagaagaaagcatgctaaagcagataagagaagaagaccataaaccttggcatcagcggttaagtgagagcatccaagatcagtggtggaactttaagggactgtttcag

SEQ ID NO: 7458 - protein, 210 aa, Streptococcus pyogenes
MKKTLTLLLALFAIGVTSSVRAEDEQSSTQKPVKFDLDGPQQKIKDYSGNTITLEDLYVGSKVVKIYIPQGWWVYLYRQCDHNSKERGILASPILEKNITKTDPYRQYYTGVPYILNLGEDPLKKGEKLTFSFKGEDGFYVGSYIYRDSDTIKKEKEAEEALQKKEEEKQQKQLEESMLKQIREEDHKPWHQRLSESIQDQWWNFKGLFQ

SEQ ID NO: 7459 - DNA, 318 bp, Streptococcus pyogenes
atgaaaaaaacactattattaagtactgctgttttgacgctagccggtactgtcgccctattaactcattctgtagatgcatcgacttattcttactacagcactagtcattttttaagacaagatggaagagagactcttagagaagctaaatatgcggcagagttacaaattagaaacttgttaagtcagtatcatattaatggaaaagaatataataattatttcagatattattatagacaagctatgcaagctagaaatatagacgaagttaataaaatcattgaagatttagaaaaaaacttgcaagcacaa

SEQ ID NO: 7460 - protein, 106 aa, Streptococcus pyogenes
MKKTLLLSTAVLTLAGTVALLTHSVDASTYSYYSTSHFLRQDGRETLREAKYAAELQIRNLLSQYHINGKEYNNYFRYYYRQAMQARNIDEVNKIIEDLEKNLQAQ

SEQ ID NO: 7461 - DNA, 696 bp, Streptococcus pyogenes
atgaaaagaataataaaaacaataattttagttataataatctttcatgggtacggaagtgtaaaatcagatagtgaaaatattaaagacgttaagctacaattaaattacgcatacgaaatcataccagtagattatacgaattgtaatattgattacttgactactcatgatttttatattgatatttccagttataaaaagaaaaatttttcagttgattctgaggtcgagagctatattacaacaaagtttacgaaaaatcaaaaagtaaatatttttggtcttccgtacatatttactcgttatgatgtttattatatatatggtggggttacaccatcagtaaacagtaattcggaaaatagtaaaattgtaggtaatttactaatagatggagtccagcaaaaaacactaataaatcccataaaaatagataaacctatttttacgattcaagaatttgacttcaaaatcagacaatatcttatgcaaacatacaaaatttatgatcctaattctccatacataaaagggcaattagaaattgcgatcaatggcaataaacatgaaagttttaacttatatgatgcaacctcatctagtacaaggagtgatatttttaaaaaatataaagacaataagactataaatatgaaagatttcagccattttgatatttacctttggactaaa

SEQ ID NO: 7462 - protein, 232 aa, Streptococcus pyogenes
MKRIIKTIILVIIIFHGYGSVKSDSENIKDVKLQLNYAYEIIPVDYTNCNIDYLTTHDFYIDISSYKKKNFSVDSEVESYITTKFTKNQKVNIFGLPYIFTRYDVYYIYGGVTPSVNSNSENSKIVGNLLIDGVQQKTLINPIKIDKPIFTIQEFDFKIRQYLMQTYKIYDPNSPYIKGQLEIAINGNKHESFNLYDATSSSTRSDIFKKYKDNKTINMKDFSHFDIYLWTK

SEQ ID NO: 7463 - DNA, 612 bp, Streptococcus pyogenes
atgaaaaaaacattaaccttgctactggcactctttgccatcggggtaactagtagcgtcagagcggaggatgaacagaataagtttatacttgatggattacaggaaaaagtaaaagaagttagtgtatcagatttttctgttggagaatctaaaatcaaagtctggcttcctcaagcttggtcggtcaaaatttctagagaacattcaccaaaatcaagcatttctaattctggagaacaaaaacctttaagcaatagctcagagaataaagaaggtcaattttctaaaagattaccttatggtacccaacatactattaaattatcatcccaacttacaaaaggtgagagagtcactttgacattcagagatgaagatttttggggagcaggttactgcttctatagagattcactatccataaaagaagacaaacaatacgaagaagaaattaagaaaattgaggatgacctagagagacaagatcttgaaaatgatgcactagagatgtttaaaaaacaaaccgaaagagaggctaataaaccttggcatcagcggttaagcgaaaacatccaagatcagtggtggaactttaagggactgtttcag

SEQ ID NO: 7464 - protein, 204 aa, Streptococcus pyogenes
MKKTLTLLLALFAIGVTSSVRAEDEQNKFILDGLQEKVKEVSVSDFSVGESKIKVWLPQAWSVKISREHSPKSSISNSGEQKPLSNSSENKEGQFSKRLPYGTQHTIKLSSQLTKGERVTLTFRDEDFWGAGYCFYRDSLSIKEDKQYEEEIKKIEDDLERQDLENDALEMFKKQTEREANKPWHQRLSENIQDQWWNFKGLFQ

SEQ ID NO: 7465 - DNA, 339 bp, Streptococcus pyogenes
atgacactaaaaaaacactattatcttctcagcctgctagctcttgtaacggttggtgctgcctttaacacaagccagagtgtcagtgcacaagtttatagcaatgaagggtatcaccagcatttgactgatgaaaaatcacacctgcaatatagtaaagacaacgcacaacttcaattgagaaatatccttgacggctaccaaaatgacctagggagacactactctagctattattactacaacctaagaaccgttatgggactatcaagtgagcaagacattgaaaaacactatgaagagcttaagaacaagttacatgatatgtacaatcattat

SEQ ID NO: 7466 - protein, 113 aa, Streptococcus pyogenes
MTLKKHYYLLSLLALVTVGAAFNTSQSVSAQVYSNEGYHQHLTDEKSHLQYSKDNAQLQLRNILDGYQNDLGRHYSSYYYYNLRTVMGLSSEQDIEKHYEELKNKLHDMYNHY

SEQ ID NO: 7467 - DNA, 90 bp, Streptococcus pyogenes
ttggcctttctcttatttataatgattattatatcagaatttttaggaaaaagcttgacaaaaagcctaaaagaggatatccttatagca

SEQ ID NO: 7468 - protein, 30 aa, Streptococcus pyogenes
LAFLLFIMIIISEFLGKSLTKSLKEDILIA

SEQ ID NO: 7469 - DNA, 111 bp, Streptococcus pyogenes
gtgccagttgacgaacaagctactaaaagaaaaacagataaaaaagcacccaaaatgaggctcattctctttcccatcatttctctccttaggatatattatttatttaat

SEQ ID NO: 7470 - protein, 37 aa, Streptococcus pyogenes
VPVDEQATKRKTDKKAPKMRLILFPIISLLRIYYLFN

SEQ ID NO: 7471 - DNA, 351 bp, Streptococcus pyogenes
atgatgatctataaattaactgccttagctttcttgatagtaacgcctctttttgccatgattgtaacctctttatttaaacttaataaaaagggatttaaatttccagatgtcgcacttttactttttgcgatagaaattgtgcttgtctcaggaaaatttttcacccataatttactgccttattaccttattatcatgtcgctgctagccatcgtcatttcactactgctagtcatccgaactcagtcgttttcttaccatcgctttatgaagctattttggcgagttggctttttagtcaccgttattttctacctgattctagttatctttatttttacattagca

SEQ ID NO: 7472 - protein, 117 aa, Streptococcus pyogenes
MMIYKLTALAFLIVTPLFAMIVTSLFKLNKKGFKFPDVALLLFAIEIVLVSGKFFTHNLLPYYLIIMSLLAIVISLLLVIRTQSFSYHRFMKLFWRVGFLVTVIFYLILVIFIFTLA

SEQ ID NO: 7473 - DNA, 252 bp, Streptococcus pyogenes
atgtcaggtttattttatcataaatcatacttttttaaatctaagcaagtatatgaccttctaaacgaaatacgtatgcgttatcctcatgctcatattattctaatcggaaatcatattaattacgaggaaatatttaaaaatcattatcgagtttttggtgttattgacacaacaagtcataaatcattaaggtccattcgagaccaaattcaactttacttagacgaactttacaattcgaataatgga

SEQ ID NO: 7474 - protein, 84 aa, Streptococcus pyogenes
MSGLFYHKSYFFKSKQVYDLLNEIRMRYPHAHIILIGNHINYEEIFKNHYRVFGVIDTTSHKSLRSIRDQIQLYLDELYNSNNG

SEQ ID NO: 7475 - DNA, 243 bp, Streptococcus pyogenes
atgataaaatttgcagaagaaatacaaaaagaagagttgttccatattattggaggttatagtgctacagattgtaaaaatcatttaattggtggtattacttcaggtgctattgcaggtggtgttggagcaggtatggctactttaggtgttggaggagttgcaggtgcgtttgcaggtgcacatgtaggtgctattgcgggtggattaacttgcgttggtggtatgttatttaatggaaaa

SEQ ID NO: 7476 - protein, 81 aa, Streptococcus pyogenes
MIKFAEEIQKEELFHIIGGYSATDCKNHLIGGITSGAIAGGVGAGMATLGVGGVAGAFAGAHVGAIAGGLTCVGGMLFNGK

SEQ ID NO: 7477 - DNA, 180 bp, Streptococcus pyogenes
atggataattttttagaattacagtttgaagaattagtaaatatttctggtggaaaaggaaatattggatctgctatcggagggtgcttaggtgggatgcttatagctgcagcaggaggtccaataactggaggtgcggcagcatttgtatgtgtagcatctggaattgcagcttatcaa

SEQ ID NO: 7478 - protein, 60 aa, Streptococcus pyogenes
MDNFLELQFEELVNISGGKGNIGSAIGGCLGGMLIAAAGGPITGGAAAFVCVASGIAAYQ

SEQ ID NO: 7479 - DNA, 246 bp, Streptococcus pyogenes
atgatactgttctttatgatattctgtactagctcgaggttgcaacgagacaaatttaagaattatgaaaagaagttattcgatatggagataaagaaactggaaacatttcaccaaatgactatagaaaagcttgccaaggttgagggtggtaagaataattggcaggcaaatgtcagtggggttatcgctgcaggtagtgctggagctgctataggttttccagtttgcggtgtagcctggagc

SEQ ID NO: 7480 - protein, 82 aa, Streptococcus pyogenes
MILFFMIFCTSSRLQRDKFKNYEKKLFDMEIKKLETFHQMTIEKLAKVEGGKNNWQANVSGVIAAGSAGAAIGFPVCGVAWS

SEQ ID NO: 7481 - DNA, 198 bp, Streptococcus pyogenes
atgacaacaatgaaggaattaacaattaatgacatgtctagtataagtggaggaaacgctccaggagatgctgtaattggtggtcttggaggcttagcttctggattgaaattttgtaaactgccacatccagtattgacaggtggatgtgttgtaggatttacagttggtggagcatatttgggatatacagcaaat

SEQ ID NO: 7482 - protein, 66 aa, Streptococcus pyogenes
MTTMKELTINDMSSISGGNAPGDAVIGGLGGLASGLKFCKLPHPVLTGGCVVGFTVGGAYLGYTAN

SEQ ID NO: 7483 - DNA, 99 bp, Streptococcus pyogenes
atgatctatacgatttttattattatgcatgcgtctataatgtttttaatgattgttgatgccattcataaaaaaatgttgataaatctataccatatt

SEQ ID NO: 7484 - protein, 33 aa, Streptococcus pyogenes
MIYTIFIIMHASIMFLMIVDAIHKKMLINLYHI

SEQ ID NO: 7485 - DNA, 192 bp, Streptococcus pyogenes
atggaagtgctaaaaaatggtctggctatcataaatggaggcggaaaagacggagcaaatatctttttgacagggatggcaggtgctgcgcagggagtgacagtttgtgctcagacaggcgtatttatcccttggcaaggttatattttgtgtggagcagctggtgctgctacaaatattatctggcctcac

SEQ ID NO: 7486 - protein, 64 aa, Streptococcus pyogenes
MEVLKNGLAIINGGGKDGANIFLTGMAGAAQGVTVCAQTGVFIPWQGYILCGAAGAATNIIWPH

SEQ ID NO: 7487 - DNA, 993 bp, Streptococcus pyogenes
ttgcggcagattcagtccattcgtctgatagacgttttggagttggcttttggagttggctataaggaagaaacaacctctcagttttcttcggatcagccctcccaagtggttttgtatcgaggtgaggctaacacggttaggtttgcctataccaatcagatgtctctgatgaaagatattcgcattgctttggatggttctgataagtctttgaccgctcagattgttcctggtatgggtcatgtttatgagggctttcaaacttctgctagagggatttttacgatgtcaggagttcctgaaagcactgttcccgttgctaaccctaatgtacaaaccaaatatataaggtatttcaaagtcattgatgatatgcataacacaatgtataaaggaactgtttttcttgttcaaccgcaagcttggaaatacaccatgaaatctgttgatcagttaccagtagatgacttgaaccatattggcgttgctggtattgaacgaatgacaactctcattaaaaatgcgggtgcccttttaaccacaggaggtagtggggctttcccagacaatattaaagtatctattaatccaaaggggaggcaggccacgattacttatggggacggctctacggatattattcctccagcagttttatggaaaaaaggctccgtaaaagagcctactgaagccgatcaatctgtcggaacaccgactcctggtattcctggtaaattcaaacgagaccagagccttaacgagcatgaagctatggtaaatgtcgaaccactgtctcatgtagtaaaagacaatataaaggtcatagatgaaaaatcaacagggcggtttgagccttttagacctaatgaagatgagaaggagaagcctgccagcgatgttaaggtaagaccagcagaagttggtagctggctagaaccagcgacagctcttcctagtgttgaaatgagcgctgaggacaggttaaaaagt

SEQ ID NO: 7488 - protein, 331 aa, Streptococcus pyogenes
LRQIQSIRLIDVLELAFGVGYKEETTSQFSSDQPSQVVLYRGEANTVRFAYTNQMSLMKDIRIALDGSDKSLTAQIVPGMGHVYEGFQTSARGIFTMSGVPESTVPVANPNVQTKYIRYFKVIDDMHNTMYKGTVFLVQPQAWKYTMKSVDQLPVDDLNHIGVAGIERMTTLIKNAGALLTTGGSGAFPDNIKVSINPKGRQATITYGDGSTDIIPPAVLWKKGSVKEPTEADQSVGTPTPGIPGKFKRDQSLNEHEAMVNVEPLSHVVKDNIKVIDEKSTGRFEPFRPNEDEKEKPASDVKVRPAEVGSWLEPATALPSVEMSAEDRLKS

SEQ ID NO: 7489 - DNA, 480 bp, Streptococcus pyogenes
ttgccggttgctttagacaggcaaacaggaaagggcttggaggtttcttctgaagtagctgtgagcgcctcacagccggaagaattgcatcgattgcctaaccgtttgatacctgaggaagacaataataaactatcacgagtagccaaggaagtcgttactgagccaaggctaaataacccctttttgttacccaagaaggttctttcgttagaagatgatgctgctatccttaatcatttggaggaagaccgtgatgtcaataagttgttcctcgagccagttgcggctgaagccaagagagaaattaattttcatccaagtgaccagcaggtgactgctaaagttaaggagtcatctgattttcatcagaaacagcaccaaacagggattacttatggagatgatactctggcagatctgacgcatcatttgcttcattcagatggtgttattcctagtctaaatgataagagtgct

SEQ ID NO: 7490 - protein, 160 aa, Streptococcus pyogenes
LPVALDRQTGKGLEVSSEVAVSASQPEELHRLPNRLIPEEDNNKLSRVAKEVVTEPRLNNPFLLPKKVLSLEDDAAILNHLEEDRDVNKLFLEPVAAEAKREINFHPSDQQVTAKVKESSDFHQKQHQTGITYGDDTLADLTHHLLHSDGVIPSLNDKSA

SEQ ID NO: 7491 - DNA, 165 bp, Streptococcus pyogenes
gtggacactaccatttcggtagtgttcttttttaagctaatctcatcaccacgctttcttcaagctaaaaaactgatcatgaaagagcaaccccatcaccctaacagcccactttgcccgcactttcttaaaaagttaggagaaaacgatataccaattattttc

SEQ ID NO: 7492 - protein, 55 aa, Streptococcus pyogenes
VDTTISVVFFFKLISSPRFLQAKKLIMKEQPHHPNSPLCPHFLKKLGENDIPIIF

SEQ ID NO: 7493 - DNA, 99 bp, Streptococcus pyogenes
gtggcctatggtcatcgcagtccttttcctttcaatagtgtgtttaagaattggtggtttagggctgacggcaagaataaaacacagtatgctaatagc

SEQ ID NO: 7494 - protein, 33 aa, Streptococcus pyogenes
VAYGHRSPFPFNSVFKNWWFRADGKNKTQYANS

SEQ ID NO: 7495 - DNA, 267 bp, Streptococcus pyogenes
atgaccaaaaaacagttttatcttatcttagctattagcatactgtgttttattcttgccgtcagccctaaaccaccaattcttaaacacactattgaaaggaaaaggactgcgatgaccataggccactcaaaacaaaaccctcacaaaaaagaagcccttaaacacaaaaaaaacaaaaataaggctctttttcttccaagtggggacagcgctatcaaatctgttattagcatgacagttagactcctgttagatgaccaatct

SEQ ID NO: 7496 - protein, 89 aa, Streptococcus pyogenes
MTKKQFYLILAISILCFILAVSPKPPILKHTIERKRTAMTIGHSKQNPHKKEALKHKKNKNKALFLPSGDSAIKSVISMTVRLLLDDQS

SEQ ID NO: 7497 - DNA, 105 bp, Streptococcus pyogenes
atgaatggtaacgatgtttcaagcatggtgctcattcaatccttttttatcacataccaagctgataagcctgcagcttctgccatatctttaaacatgacggca

SEQ ID NO: 7498 - protein, 35 aa, Streptococcus pyogenes
MNGNDVSSMVLIQSFFITYQADKPAASAISLNMTA

SEQ ID NO: 7499 - DNA, 114 bp, Streptococcus pyogenes
ttgacaaacaccacacttgtcacgataaagagctttaggagtatgattgttgatgctgcttacggttttgcaattggtgctaagttattttgtggcgtaagtgtattcgttgat

SEQ ID NO: 7500 - protein, 38 aa, Streptococcus pyogenes
LTNTTLVTIKSFRSMIVDAAYGFAIGAKLFCGVSVFVD

SEQ ID NO: 7501 - DNA, 93 bp, Streptococcus pyogenes
atgcgtatgcgtcttggaatgagccgaaacaaattcgtcaatcgtaatattcagtttatccaaaagattaagcaagcgactgcaggtgatttc

SEQ ID NO: 7502 - protein, 31 aa, Streptococcus pyogenes
MRMRLGMSRNKFVNRNIQFIQKIKQATAGDF

SEQ ID NO: 7503 - DNA, 108 bp, Streptococcus pyogenes
ttgccttttgcaattgtcattgtagtcataggcttcctcttttttgatgatcatacttatcgatatgtgtttacccataagttaaagtgtttagaagggtctcactct

SEQ ID NO: 7504 - protein, 36 aa, Streptococcus pyogenes
LPFAIVIVVIGFLFFDDHTYRYVFTHKLKCLEGSHS

SEQ ID NO: 7505 - DNA, 1500 bp, Streptococcus pyogenes
atgactacaatgacaattgcaaaaggcaatcaaccgatagccttacaattagggatgctaaatcgtcacggtttgattgctggagcgactggaacaggtaaaactgtgaccttaaaagtgctagcagagcaattaagtttagctggtgtgccagtctttttggcagatatcaaaggagacctgtctaatcttactaaagcaggagaggtgactgataaattggctgcgcgtttagccacaatcggggtaagtgattaccagcctcaggcctttcctgtaagaatgtgggatgtttttggtcaaaacggtcaacccttacggacaacgatttctgagctgggacctatgatgttgtcgcgtttattgaatcttaatgatacccagacaggtgtcttaaacatcgtctttaaaatcgccgacgagaaaggttggcttttgattgatttgaaagacttgcaggctatcttaaaagaagttggtgaccatgcctcagactactccagccattacggtaatatcgctaagcaatctatcggggctatccaaagaagtctcttgactttggaacaagaaggggcccaccaattttttggagagcctgctttagatgtggctgatttgatgcaattagatgttgcttcgggttatggagccattaacattttgtcagcgactaagctttttcaatctcctaccctttacacaaccttcttactttggttattatcagagctgtacaaattattgccagaagttggggatttggacaaacctaagatggttttcttttttgatgaagctcacttgctcttcaaagatgcccctaaagttttcttggaaaaagttgaacagattgtgcgacttattcgttcaaagggagttgggattttctttgtgactcaaaacccacttgatttgccagaaacggttttggctcagcttggaaatcgtattcagcatgcctttcgcgcttatacaccgaaagaacaaaaggcggttcgtgtcgctgcggatactttccgacaaaatcctgacttagatgtggcaagggtgattacagaactagaagtcggtgaggccttgatttctgttttgaatgataagggacaaccatccatcgttgaacgtgcctatatcatgccgcctaagagtagctttgctgttttgtcagagatagagagtcagcagcttgtgcagtcctcaccttttgccagtaaatatagtcagtccattgaccgtgaatctgcttatgaaaaattagctgctaaggttttagaagacaaccgactggcccaagaagcgatagcgacagcacaacgcgaaaaagaagctaaagaagccatcaaggcgcaagcagctaccaaaaaagctaatcggcgttctgttgggcgttcccacaaaacagtcgtcgaaaaagcaacagatgcgtttattagtacgacggttagaacaattgggcgagaactggtcagaggtttactgggtagtttacgtaaacga

SEQ ID NO: 7506 - protein, 500 aa, Streptococcus pyogenes
MTTMTIAKGNQPIALQLGMLNRHGLIAGATGTGKTVTLKVLAEQLSLAGVPVFLADIKGDLSNLTKAGEVTDKLAARLATIGVSDYQPQAFPVRMWDVFGQNGQPLRTTISELGPMMLSRLLNLNDTQTGVLNIVFKIADEKGWLLIDLKDLQAILKEVGDHASDYSSHYGNIAKQSIGAIQRSLLTLEQEGAHQFFGEPALDVADLMQLDVASGYGAINILSATKLFQSPTLYTTFLLWLLSELYKLLPEVGDLDKPKMVFFFDEAHLLFKDAPKVFLEKVEQIVRLIRSKGVGIFFVTQNPLDLPETVLAQLGNRIQHAFRAYTPKEQKAVRVAADTFRQNPDLDVARVITELEVGEALISVLNDKGQPSIVERAYIMPPKSSFAVLSEIESQQLVQSSPFASKYSQSIDRESAYEKLAAKVLEDNRLAQEAIATAQREKEAKEAIKAQAATKKANRRSVGRSHKTVVEKATDAFISTTVRTIGRELVRGLLGSLRKR

SEQ ID NO: 7507 - DNA, 234 bp, Streptococcus pyogenes
atgtacaacttactacttacgatattgctagtactgtcgggattgcttgagattgctatttttatgcaacctcaaaaaaacccaagtagcaatgtttttgatagcagcggttcagaagccttgtttgaacgtacaaaagctcgtggctttgaagcattcatgcaacgattcacagcagttctagtatttttttggctagcgattgcacttgtgcttgccattttatcaagtaaa

SEQ ID NO: 7508 - protein, 78 aa, Streptococcus pyogenes
MYNLLLTILLVLSGLLEIAIFMQPQKNPSSNVFDSSGSEALFERTKARGFEAFMQRFTAVLVFFWLAIALVLAILSSK

SEQ ID NO: 7509 - DNA, 717 bp, Streptococcus pyogenes
atgagtattatgataactaaaggacaagttcgtttgttacgaacttattcttatgatagcaacttatacacgcagggattagaacaactcaacaacaatcatatattacttagtgccggtcgttatggtttctcaaaagtaggggtgtatgaccttactcaagagatcttttcagaaaaaatagcttttccagatacagtttttgcagaagggctaacagttgttgaggattatttttggttactaacctataaagagggtgtagcctacaagtttgataaggctacctgcaattgtttaggggcctatccatttgaaggagatggctggggattagcctatgataaggaaaaccagtgtctttggatgactagtggaaatgcttttttgcaaaagcgagaccccaaagattttgctttattggataccgtactagttgctatagaaagtgtccccatctcaatgcttaacgaattagagtatgtagatggttatctctatgccaatatttggcaaaccaatactattgtcaaactccaacctgattctggaaaggtggtagccacctatgatattagccctttgttaaaagccttaaatcttgataagtcccattaccctgaccttaatgttttgaatgggattgctcatttagatcaacaacgtttcttaattactggcaaactatacccgctgatgttagaagtagtattagat

SEQ ID NO: 7510 - protein, 239 aa, Streptococcus pyogenes
MSIMITKGQVRLLRTYSYDSNLYTQGLEQLNNNHILLSAGRYGFSKVGVYDLTQEIFSEKIAFPDTVFAEGLTVVEDYFWLLTYKEGVAYKFDKATCNCLGAYPFEGDGWGLAYDKENQCLWMTSGNAFLQKRDPKDFALLDTVLVAIESVPISMLNELEYVDGYLYANIWQTNTIVKLQPDSGKVVATYDISPLLKALNLDKSHYPDLNVLNGIAHLDQQRFLITGKLYPLMLEVVLD

SEQ ID NO: 7511 - DNA, 645 bp, Streptococcus pyogenes
atgaaaattcttgtaacaggctttgatccctttggcggcgaagctattaatcctgcccttgaagctatcaagaaattgccagcaaccattcatggagcagaaatcaaatgtattgaagttccaacggtttttcaaaaatctgccgatgtgctccagcagcatatcgaaagctttcaacctgatgcagtcctttgtattgggcaagctggtggccggactggactaacgccagaacgcgttgccattaatcaagacgatgctcgcattcctgataacgaagggaatcagcctattgatacacctattcgtgcagatggtaaagcagcttatttttcaaccttgccaatcaaagcgatggttgctgccattcatcaggctggacttcctgcttctgtttctaatacagctggtacctttgtttgcaatcatttgatgtatcaagccctttacttagtggataaatattgtccaaatgccaaagctgggtttatgcatattccctttatgatggaacaggttgttgataaacctaatacagctgccatgaacctcgatgatattacaagaggaattgaggctgctatttttgccattgtcgatttcaaagatcgttccgatttaaaacgtgtagggggcgctactcac

SEQ ID NO: 7512 - protein, 215 aa, Streptococcus pyogenes
MKILVTGFDPFGGEAINPALEAIKKLPATIHGAEIKCIEVPTVFQKSADVLQQHIESFQPDAVLCIGQAGGRTGLTPERVAINQDDARIPDNEGNQPIDTPIRADGKAAYFSTLPIKAMVAAIHQAGLPASVSNTAGTFVCNHLMYQALYLVDKYCPNAKAGFMHIPFMMEQVVDKPNTAAMNLDDITRGIEAAIFAIVDFKDRSDLKRVGGATH

SEQ ID NO: 7513 - DNA, 924 bp, Streptococcus pyogenes
atggctaacattgcaaaccttgttttagaaacgatatatatccttatcggcttgcaactgtttcacacagcctactgcacctttaaagataaaaccaaccctgtctattttgggacagctctgttctggggattgctgggtgttaccttcgttggcggtgcctttttgcctaataaagttatcggttttatcgtgattgtcctagctcttttaaccttgtttaagcaagttcgtattggaacattaccagcttttaatgaacaaaaagctgaagaaagtgctcaccgcattggtaactggattttcttaccagttatgttaatggctatgatttctctacttcttgccttgatccttcctgatttcagtaaaagtgccattgggattgctggtatcttagccactattgctattttaataatcactaagcaaaaaccatctgctcttttagctgaaaataatcggatgaaccaacaagtgtccacaagcggtattttgccacagctcttaggagctttaggagctatttttgcagctgctggtgttggtgatgtgattgcttctctcattcgggagattgtacctgctgatagccgcttctttggcgttctcgcttatgtgcttggcatggttatttttactatgattatgggaaacgcttttgctgcctttaccgttattacaaccggtatcggtgttccttttgtttttgctttaggagctgaccctattattgccggtgctttagctatgactgctggtttttgtggtaccttattaacaccaatggcagcaaactttaacgccttgcctgttgctttgatggagatcaaagatcgaaatgcagttatcaaaaagcaagctcctatcgcccttgttttaattattagtcacattgccttaatgtatttacttgcttattat

SEQ ID NO: 7514 - protein, 308 aa, Streptococcus pyogenes
MANIANLVLETIYILIGLQLFHTAYCTFKDKTNPVYFGTALFWGLLGVTFVGGAFLPNKVIGFIVIVLALLTLFKQVRIGTLPAFNEQKAEESAHRIGNWIFLPVMLMAMISLLLALILPDFSKSAIGIAGILATIAILIITKQKPSALLAENNRMNQQVSTSGILPQLLGALGAIFAAAGVGDVIASLIREIVPADSRFFGVLAYVLGMVIFTMIMGNAFAAFTVITTGIGVPFVFALGADPIIAGALAMTAGFCGTLLTPMAANFNALPVALMEIKDRNAVIKKQAPIALVLIISHIALMYLLAYY

SEQ ID NO: 7515 - DNA, 738 bp, Streptococcus pyogenes
ttgcaaatcctagcgactaatgttataatcgtcatactattgaaaaaggagttctttatggagtggattaaattaatcggtattgtgattatcgtattagggtttattttaaaatgtgatgctatcgctaccgtagttgttgcaggacttgttaccgcgctggtttcaggaatttcgtttattgattttctagatattttaggaaaagaatttaccaatcaacgtttgctaaccattttcttcatcactttaccgcttatcggcttgtcagaaacttatgggctgaaacaccgagctactcagttgattcaacgtgttcaagcccttaccgtcggccgtttattgactctctaccttattattcgagaattagcaggtctcttttcgattcgactagggggacatccacagttcgttcgacccttgattcaacctatgggagaagctgctgctaaagccaacattggagaagagttgaccgatgcagaaaaagatgacatcaaagctatggcagctgccaatgaaaactttggcaatttctttgcccaaaatacctttgttggcgcaggaggtgtcctacttatcgctggaactttagaacagcttggctatgatggtaaccaagctaaaattgcattttcttctattttaattgctattatctctattattatagttgctatttacaattacctctttgagaaaaaaatggaacgtcaacatcagaaaggagataac

SEQ ID NO: 7516 - protein, 246 aa, Streptococcus pyogenes
LQILATNVIIVILLKKEFFMEWIKLIGIVIIVLGFILKCDAIATVVVAGLVTALVSGISFIDFLDILGKEFTNQRLLTIFFITLPLIGLSETYGLKHRATQLIQRVQALTVGRLLTLYLIIRELAGLFSIRLGGHPQFVRPLIQPMGEAAAKANIGEELTDAEKDDIKAMAAANENFGNFFAQNTFVGAGGVLLIAGTLEQLGYDGNQAKIAFSSILIAIISIIIVAIYNYLFEKKMERQHQKGDN

SEQ ID NO: 7517 - DNA, 90 bp, Streptococcus pyogenes
ttggttactggtgatggtagtcttatcgcaagtcatctggaaaaaggttcagtaccatttaacgattcaaggagggtgagatggcaaaat

SEQ ID NO: 7518 - protein, 30 aa, Streptococcus pyogenes
LVTGDGSLIASHLEKGSVPFNDSRRVRWQN

SEQ ID NO: 7519 - DNA, 90 bp, Streptococcus pyogenes
atgcctacgcttggtaaaccatcacaaaaaaaggcagccgtttttacaacagctgccttccttcattatctaggttttcatattctgacc

SEQ ID NO: 7520 - protein, 30 aa, Streptococcus pyogenes
MPTLGKPSQKKAAVFTTAAFLHYLGFHILT

SEQ ID NO: 7521 - DNA, 147 bp, Streptococcus pyogenes
atgcaattgctagataacgtttatggaactttgagatcttttgcctttatgagacctgccaaatctagtaacgataccagcttagcagatgccttgcaggctggtacagacatggcttttattttagttagaggcattaactatcaa

SEQ ID NO: 7522 - protein, 49 aa, Streptococcus pyogenes
MQLLDNVYGTLRSFAFMRPAKSSNDTSLADALQAGTDMAFILVRGINYQ

SEQ ID NO: 7523 - DNA, 132 bp, Streptococcus pyogenes
atgggccgggggatgtctggttttaagccaaaagctgtctttgaaaacgtggttaagcttatggcaagcaaaaaaggtgagtcacctttaccttttaccgacctacctaaatcgcttgctaccttatttgac

SEQ ID NO: 7524 - protein, 44 aa, Streptococcus pyogenes
MGRGMSGFKPKAVFENVVKLMASKKGESPLPFTDLPKSLATLFD

SEQ ID NO: 7525 - DNA, 834 bp, Streptococcus pyogenes
atgacttttcacattacagtaaatcttgatgaaatatcagacaaactagatgattcattgaaatttttaaatagattatcaattaaaagttgtgaattacgaatgataaacactaaaaatattatacaacttagtgatgcagagttaattaatttaaaagaacggttacaaaagtataatatcactccaatttcaattgcaagcccactttttaaatggaatatagaagaaaatcatttagagagtaatcttgatttatacggtatttcagctaatgttacgttaaatgaacaatggctttatgtaaggaaaattatttttattgcaaaatttttaaatatcaaatatgtaagaatatttggtgggattgggtgctcagtagatgacttcttgaataatgaactatttttgaatttgttaaaagagactgaaattatctttttaattgagaacgagttaggaacttcagtgagcactgcagacgatttgttaaaaataggacattttatagatgaaaaatctataaaaaatctaaaaatctggtttgatattgcaaattattacatagttgaacctcaggtagacaaggttattccaaaattgaaaaaatatatttactatattcactgtaagaactatgttaacaatgatttaggaatacattatgtagaactaggtaaaggaattatcgattataaaacaatcattcatgaaatccatgaacattttatagacttaatttttagtttagaagtacatgaaaaagaaatagacaaaaaggcagaagtagtgaggaagtcttatctgacactaaatgagtatattaatggaggc

SEQ ID NO: 7526 - protein, 278 aa, Streptococcus pyogenes
MTFHITVNLDEISDKLDDSLKFLNRLSIKSCELRMINTKNIIQLSDAELINLKERLQKYNITPISIASPLFKWNIEENHLESNLDLYGISANVTLNEQWLYVRKIIFIAKFLNIKYVRIFGGIGCSVDDFLNNELFLNLLKETEIIFLIENELGTSVSTADDLLKIGHFIDEKSIKNLKIWFDIANYYIVEPQVDKVIPKLKKYIYYIHCKNYVNNDLGIHYVELGKGIIDYKTIIHEIHEHFIDLIFSLEVHEKEIDKKAEVVRKSYLTLNEYINGG

SEQ ID NO: 7527 - DNA, 756 bp, Streptococcus pyogenes
atgagtatattaatggaggctaaaatgaatttgagtatatttggtttaaagaatattccttatttgaaagaaggggatagtatagaaaagcttattgaagaaagcattaaaacttcagaattttttatcgaagacaatgatgtgctttgcatagcttctaaagttgtatctatcgcagaaggccaggtgatgtctttaaacgagatacaagtgagtgatgtagcaaaagaaatccacaggaatattcctcgtaaagatcctagaataattgaaattatgctaaatttagtcaatagagatctgtcacgtttagatatcaaaaaaaattacattggttgtcgcttggaaaatggtttaaagttgacaagtggtggaatcgatagaaaatcagtagatgaagtatttcttttacctaataatccggatgcttctgcaaaaagaatttcggaatatcttaaaaaatcacttggaaaaaatgttgcagttgttataacagatagtgatggtagagaggataaaagaggtgctactcaagtagcaattggtatttatggtattcatcctttgagaaaaacagaagtaatagattcacaaggagagacaataaaattccaagaagagactttgtgtgatatgattgcagcttgtgctggcttagtaatggggcaacgtggaactggaattccagctgtcctcattaggggcttggattataaatggtctgaaaatactagtattaaggaagcattaaatgag

SEQ ID NO: 7528 - protein, 252 aa, Streptococcus pyogenes
MSILMEAKMNLSIFGLKNIPYLKEGDSIEKLIEESIKTSEFFIEDNDVLCIASKVVSIAEGQVMSLNEIQVSDVAKEIHRNIPRKDPRIIEIMLNLVNRDLSRLDIKKNYIGCRLENGLKLTSGGIDRKSVDEVFLLPNNPDASAKRISEYLKKSLGKNVAVVITDSDGREDKRGATQVAIGIYGIHPLRKTEVIDSQGETIKFQEETLCDMIAACAGLVMGQRGTGIPAVLIRGLDYKWSENTSIKEALNE

SEQ ID NO: 7529 - DNA, 984 bp, Streptococcus pyogenes
atgagtagaaatcaggactgtaagaatattctaatcattggttttggaaaaattgggaaaattaaagcgtacaagtggctatcacgcggatatgaggtatatgtcaaagatttgaaattctccagcatgaaataccttaatacaaatagtgatgtgttggatgatttatcacgacaatattttactattgagatttgtactccgacaaatcaccaccttacgctattgaaaaccgttataacaaggtatgtctattcttatattagcattgaaaaaccactgtgtaataggttagaagatttagaagaaatgaagtcgctagtagaaagtcacccacatctagcaaaaaaaatttttgccagtgaacaatacttcttttcgaaaattttggaaaaactgttacaagtagattgtttctctctagataaaatcaaggaaataacagttgatttttctaaagataggattgaggataacgagaatgggagatttttagataaagagatattgggctatggaatagagattcctcatatcattgctgtcatttcttatttaggaatttcattagaagaattcaaaaaaggaatctttgtgaatgctatttatataaaagacttagagaaacacgattattcaatagaaatcttatcttgtattaatcaaacagtgattaaaattattagtaatttgggaagttttgcaataagagagggcaagattgaaggaggtgatgctaaaacagtaagaagagttaccattgatgacaaaacaatactatttgatccacatcctaaactcgagaggtataagagtgaattggtaactgggacaaatacgtttcaaatacacgatgatatgatggacacgtatatcagtttgttagaaggaaatgctattcctgaagattgctatatcaataatgcaattgagataacaaaattattaattaacttatattcagaatgtgaaaaaatttattta

SEQ ID NO: 7530 - protein, 328 aa, Streptococcus pyogenes
MSRNQDCKNILIIGFGKIGKIKAYKWLSRGYEVYVKDLKFSSMKYLNTNSDVLDDLSRQYFTIEICTPTNHHLTLLKTVITRYVYSYISIEKPLCNRLEDLEEMKSLVESHPHLAKKIFASEQYFFSKILEKLLQVDCFSLDKIKEITVDFSKDRIEDNENGRFLDKEILGYGIEIPHIIAVISYLGISLEEFKKGIFVNAIYIKDLEKHDYSIEILSCINQTVIKIISNLGSFAIREGKIEGGDAKTVRRVTIDDKTILFDPHPKLERYKSELVTGTNTFQIHDDMMDTYISLLEGNAIPEDCYINNAIEITKLLINLYSECEKIYL

SEQ ID NO: 7531 - DNA, 1197 bp, Streptococcus pyogenes
atggatttaaaaattacaaacggcttttatgacccaagtcatttatcatacgaagtagtagaacgcaaaggcttaggtcaccctgataccttagcagatggaattgctgagcaaattgaaattgattactcactttattgtttggacaagtttggtgttattccacatcataattttgataagattattatccgagggggacattcagttcaggattttggtggaagtgactttattgaaccaattaaaattatttttctaggtagggcgagcaaaaaatgttttaatagttcaattccactttttaaaattcagaaaaaggctgcaactaaatatttaaatagaattttacctaatttagatgttgaaaattatgtagaatttgagacattgacctcagattttactacaaaaactaattggttctcgcctgaagcaatagaagatttaccggagtatctagatgtaccaaaggcaaatgatacagctacaatgataagttattggccattaacaatttctgaagaattagcattaatgattgaagggtatttttataaattagataagaatgaattaccaacgccaagatttactaaaatgggtggtgatattaaagtaatggtcgtaaggaacgatttagaatattctattagaataaattttcctttaataagtaaattttttaacaatgatattgaaagtcagttgtatgttgataaacacgtagaaaaaattaagaaatatattgaacaaaagtataaaaacataagcttttctattgattaccattattatttaactactacaggttcttgtattgattttggagaagaaggtgcagttggtcgaggtaataaaactcatggtatcatatcaagttttaggccaaatactatggaagcaccagctggaaaaaattgtacttattttgtaggaaaggtttggggatttttgtctgatactattgccaaagaaatttatgaagcattcaatactccctgtcaaatcattatgcaattaaatattggatcaaaattgtatagaccaacccatttatttattcagacagaagaaagtgttgatcaagaaagagtattagaaattgttaacaggcatttaaataatggtaaacaaaatactaatttaatcttgtcaactcaacattttattcctaaaaccaatgtctatgatgga

SEQ ID NO: 7532 - protein, 399 aa, Streptococcus pyogenes
MDLKITNGFYDPSHLSYEVVERKGLGHPDTLADGIAEQIEIDYSLYCLDKFGVIPHHNFDKIIIRGGHSVQDFGGSDFIEPIKIIFLGRASKKCFNSSIPLFKIQKKAATKYLNRILPNLDVENYVEFETLTSDFTTKTNWFSPEAIEDLPEYLDVPKANDTATMISYWPLTISEELALMIEGYFYKLDKNELPTPRFTKMGGDIKVMVVRNDLEYSIRINFPLISKFFNNDIESQLYVDKHVEKIKKYIEQKYKNISFSIDYHYYLTTTGSCIDFGEEGAVGRGNKTHGIISSFRPNTMEAPAGKNCTYFVGKVWGFLSDTIAKEIYEAFNTPCQIIMQLNIGSKLYRPTHLFIQTEESVDQERVLEIVNRHLNNGKQNTNLILSTQHFIPKTNVYDG

SEQ ID NO: 7533 - DNA, 966 bp, Streptococcus pyogenes
atgtctatgatggataaaactgttttatattttgggttggttgaaatttcttttgatgtgcctgactttatatttcaaaaaataaaagagcagaataataaaattagatattatagcaaatcaataaatatattaggtagtgtaaaatttattaacagcaatcagcaatttatagaatatgatggcaatggaaatattttagtttatggaagattaaagtattttaaagaaggaatttcattatactacattggagagtacttagctgaatgtctcttgattgaacatagtgacaccttattaattcatgcagcagcagtttataatcctttatctggccattcaattttactattaggagataaaggtgctggaaaaactacggttgcaataaggctttgtatagaacatgggtatcaccttattggtaatgaccaagtaatatttggttcgaactctggaatactactaacttatgcagggacatctttctttaaaataagaaggacagctgttttgtcggacaatttactgtttaaattatttagcaaattttttaatcgttcattacaatttaataaggcaagttgggatgataaaatttcaattttcccaaaggagttgggaatacgaacttgtaatttttctactgaaatctcaaaaatttattatataaagacagacaagaaagaaaagcaaatttatcattcaatttggagtgatagtttagcaagtctatatctaaatgagctattgggaaggcatatttctggacaggttgcatgttttcaatcagataatggaaaatatttttctacaatgcctttgataaattatgaaaaaaataatcgggtacgagaacagatagtgaagggtattttcgctaaacaaaaattatttaaaattacagcagctacgccagctaagattgcagaagcgattatagaaaatgttaagaaaaactca

SEQ ID NO: 7534 - protein, 322 aa, Streptococcus pyogenes
MSMMDKTVLYFGLVEISFDVPDFIFQKIKEQNNKIRYYSKSINILGSVKFINSNQQFIEYDGNGNILVYGRLKYFKEGISLYYIGEYLAECLLIEHSDTLLIHAAAVYNPLSGHSILLLGDKGAGKTTVAIRLCIEHGYHLIGNDQVIFGSNSGILLTYAGTSFFKIRRTAVLSDNLLFKLFSKFFNRSLQFNKASWDDKISIFPKELGIRTCNFSTEISKIYYIKTDKKEKQIYHSIWSDSLASLYLNELLGRHISGQVACFQSDNGKYFSTMPLINYEKNNRVREQIVKGIFAKQKLFKITAATPAKIAEAIIENVKKNS

SEQ ID NO: 7535 - DNA, 987 bp, Streptococcus pyogenes
atgtttgtgataggcattccaactttaaatgaggcagataatatcagtagattagttaaacaaattgatgagtatgctgtaaatttagggaaagaaattattattattaattcggatagtaaaagtacagatggaactccgcagatttttttagaaaccaaaacttataacaccaaagtttcgatagtatcagaagctaaaggaaaaggttataatgtgagaaatattttcgaatatgcaataaatcatgtgccgaatttctccggtttaattttgattgatggagacgttgtctcaatgaaaaaaatgtggttagaaaagatgtttatagcaattgaatctggaaatgatcttataatcccaaattatgctagaaaatcttttgaaggaaatgcgacaaaccattttatttatcccatgttagtgaaaattttcaaacgtgatatgccttatcaatgcatctctggtgattttggattttcaagaggattgataaaagatttaactttgaaatgtaattggcacaaatatacattaggttacgggatagatatttttttaaccttaacagctatattaaagtcatacaaaattaaggaaatcgatttacaatcaaagattcataaaaaaagctttgagaaaattgaaaaaatttttttagaagtttcacaaagtttcttcgaaactattaatgataattctttgaatcaagataagttacgtttaaatataaattttgaaagtcattcaagacagtttattaagtccagtgatatcctatccagcaatgatatcgagaatttaaagttaagagcgttgtttttattacaggaagaaaaacagtatctacatgggctgtcagaggtagaatgggacggaattttgtctaatacaattaacaatatttatagatatagtagtgaggaacattcgttatatttattaccactttatttattgagagtatacaattatctaaagtacaac

SEQ ID NO: 7536 - protein, 329 aa, Streptococcus pyogenes
MFVIGIPTLNEADNISRLVKQIDEYAVNLGKEIIIINSDSKSTDGTPQIFLETKTYNTKVSIVSEAKGKGYNVRNIFEYAINHVPNFSGLILIDGDVVSMKKMWLEKMFIAIESGNDLIIPNYARKSFEGNATNHFIYPMLVKIFKRDMPYQCISGDFGFSRGLIKDLTLKCNWHKYTLGYGIDIFLTLTAILKSYKIKEIDLQSKIHKKSFEKIEKIFLEVSQSFFETINDNSLNQDKLRLNINFESHSRQFIKSSDILSSNDIENLKLRALFLLQEEKQYLHGLSEVEWDGILSNTINNIYRYSSEEHSLYLLPLYLLRVYNYLKYN

SEQ ID NO: 7537 - DNA, 1155 bp, Streptococcus pyogenes
atgaaaattacagttgtaggcattggatacgttggattatcgatagggctcctacttgcaaaggaacacgacgtcaccttttttgatattgataataaaaaaattgatttaataaataaaaggcaatcccctcttaaagaagcagctataaacaaacttttatgtaaggcaaaaaatattaatgcaacttcttctgaagaattagcatataaggatgcgactttcataatcttgtctttgccaaccaacctaaaatttaataagcttgatacttccattatcgaaatttctgtaagtaatattttaaagataaacaaaaaggctacaattgtaataaagtcgacagttccaattggttttacagaatatttaaggaatcgatttcactacaacgatatcattttttcacctgagttccttagggaaggatcaactattcatgatcaattgtatccttcgagaactatagttggaaatgaatctagaaattctcaattattcttagacatactaacagatatatcggttgaaaaagactcgccatctttattagttggctcttctgaagcagaagcgataaagttattttcgaatgcatacttggcacaaaaaattgctttttttaatgagttggatacgtttgctgaaatgcaaaatttggactcaaaaaaaattattgaggctatgggatatgaccagagaataggaaattcgcacaataatccttctttcggttttggtgggtactgtcttcctaaggatattaagcaattagagtatcattttaaagaaattccagcaccaattattaccagtataagtgaatctaatttattaagaaaaattcatatagcaaaaatgattttgaacagctcagctaaaacaataggaatttatagaattaattccaaaaaagattcggataattgtagggaatcttctacaattgatgttgctaaacttctaaaaagcagtggtaaggatgttatcatctttgagcccttaattaaccaaaaaaagtttttggggtgccctttaagtaatgattttaatgaatttattaaatattcggatattatagttgccaatagaatagatgatgctctgagaaaatgtaattcaaaagtttttacacgtgatatttttcagtatgat

SEQ ID NO: 7538 - protein, 385 aa, Streptococcus pyogenes
MKITVVGIGYVGLSIGLLLAKEHDVTFFDIDNKKIDLINKRQSPLKEAAINKLLCKAKNINATSSEELAYKDATFIILSLPTNLKFNKLDTSIIEISVSNILKINKKATIVIKSTVPIGFTEYLRNRFHYNDIIFSPEFLREGSTIHDQLYPSRTIVGNESRNSQLFLDILTDISVEKDSPSLLVGSSEAEAIKLFSNAYLAQKIAFFNELDTFAEMQNLDSKKIIEAMGYDQRIGNSHNNPSFGFGGYCLPKDIKQLEYHFKEIPAPIITSISESNLLRKIHIAKMILNSSAKTIGIYRINSKKDSDNCRESSTIDVAKLLKSSGKDVIIFEPLINQKKFLGCPLSNDFNEFIKYSDIIVANRIDDALRKCNSKVFTRDIFQYD

SEQ ID NO: 7539 - DNA, 207 bp, Streptococcus pyogenes
atgagatttagttacaataaattatggaaacttcttattgataaaggttggaccaaaacaaagctcaggcaagaagctgggattagttcttccacgatcgcaaaattgggaaaaggggaaaatatcactactgatattttattggaaatttgtattgcacttgattgtaagattgaagatatagtagaaattgtagataataatatc

SEQ ID NO: 7540 - protein, 69 aa, Streptococcus pyogenes
MRFSYNKLWKLLIDKGWTKTKLRQEAGISSSTIAKLGKGENITTDILLEICIALDCKIEDIVEIVDNNI

SEQ ID NO: 7541 - DNA, 843 bp, Streptococcus pyogenes
ttggacatcagtatcgaatttggcttatatcctactgaatctgacttaacagagcttcaacaatacttcccagatactaatctcaaaaaattatatgaagttgaagcttaccacaaaaaattggaaactattttagattccgaattctcaactgaacgtgaatccctaatagctgagatcgacgaattagagagtcaattaacaactctaaaccaagaacttcaagaactaggaaacatcccaaatctttcaagtgagtacttagaaaactattctaaactaacagctacaatcaatgcactaaaagaacaaaacgaggcctacttaaaggagtctggtctatccaaagaaaaatcagaaacggacgctgacttgaaacgcagtacagaagatatccttctagatctagaagtaaaaatcaacagtaagatgcgtgaagtcaataacattctatatccagatattcgcaaagctcctcaaattaacctaaatgctcacaatagctactccttctatacaccagatgatgatggtacaggaactaagtttaaagggatgattgtattcgacttagtaatgctctaccttactaatctgccagcactcgcacacgattcattactcttgagtaatgttagctaccaagcgactgaagcacttttgaagctatatgaccagtcaaggtcattgaacaaacaagtctttttagtcttcgataaagccagctcttattctccagatgctaatcaactcttgtcagaaaatacggtattgagactctctagtaacggaaatgaactctacggtatttcatggaacaaaggagaaaactcagatgagatt

SEQ ID NO: 7542 - protein, 281 aa, Streptococcus pyogenes
LDISIEFGLYPTESDLTELQQYFPDTNLKKLYEVEAYHKKLETILDSEFSTERESLIAEIDELESQLTTLNQELQELGNIPNLSSEYLENYSKLTATINALKEQNEAYLKESGLSKEKSETDADLKRSTEDILLDLEVKINSKMREVNNILYPDIRKAPQINLNAHNSYSFYTPDDDGTGTKFKGMIVFDLVMLYLTNLPALAHDSLLLSNVSYQATEALLKLYDQSRSLNKQVFLVFDKASSYSPDANQLLSENTVLRLSSNGNELYGISWNKGENSDEI

SEQ ID NO: 7543 - DNA, 726 bp, Streptococcus pyogenes
atgcttatagaaatgtggtctccagtatttaagaaacacggagaaattcgggaaccaatctgcttccaccatgggttaaacgtgattatggggatggatttagctgataactctatcggcaaatcctcctcactattagccattgatttcatctttggaggtaatagctatctaaaatcaattgcggttaaaaaattaggtgatcatcctatctacttctgctttcaatttgagaaaaagttttatttttcaagagatacggccaacccagatatcattctagtgtgtgacaagagctactctccaaccggtgaaacaatggacctaggaatttttcttaacaaacttaagaaacgatatcatttagattctccagagctatcattccgattagctatgagtggcttctttaggattgcaggaaaaagtaatcaaaataccgatttccccttacaagtttattcgagccaaaaatcttctgaatctattactactctcatccaactgtttaatttgtatgataacattgcacgatacaaagaacgtctgaaagataagagcgaccagttaacaacttttcgtaatgctcgcaggtatgccttcatctccaacctggttggcggtaaaaagcaatttgaagcaaatgtctcagaaataaaaagattggaatatgatttagcacatctccaagatactcatcaagataaaattgactctgatgatatt

SEQ ID NO: 7544 - protein, 242 aa, Streptococcus pyogenes
MLIEMWSPVFKKHGEIREPICFHHGLNVIMGMDLADNSIGKSSSLLAIDFIFGGNSYLKSIAVKKLGDHPIYFCFQFEKKFYFSRDTANPDIILVCDKSYSPTGETMDLGIFLNKLKKRYHLDSPELSFRLAMSGFFRIAGKSNQNTDFPLQVYSSQKSSESITTLIQLFNLYDNIARYKERLKDKSDQLTTFRNARRYAFISNLVGGKKQFEANVSEIKRLEYDLAHLQDTHQDKIDSDDI

SEQ ID NO: 7545 - DNA, 222 bp, Streptococcus pyogenes
atgcaattaccaaataaactttactcctatcaaaaaagcacccttgcttatttgcctagagtgctaaatgaaatcaaaagtagaaactcaaacgtcaaagatatctttcacgctatctcagaagagttggatgatcctacagattttctatccataatggattgcttgtatgcattgaacgctattgaaatgtctaatgaaggagaagtaaaattatgctta

SEQ ID NO: 7546 - protein, 74 aa, Streptococcus pyogenes
MQLPNKLYSYQKSTLAYLPRVLNEIKSRNSNVKDIFHAISEELDDPTDFLSIMDCLYALNAIEMSNEGEVKLCL

SEQ ID NO: 7547 - DNA, 174 bp, Streptococcus pyogenes
atgggacaaaacgtggtgatgcgacaagcccctggaggcaacatcaagccagataaggaaaaatctgttgagaagattgacggtattgtaggtcttatcctggggcttgaccgttgcatttgccgccaaggtgatgaagctagcgtctatgatgagcgagggatattgagtttt

SEQ ID NO: 7548 - protein, 58 aa, Streptococcus pyogenes
MGQNVVMRQAPGGNIKPDKEKSVEKIDGIVGLILGLDRCICRQGDEASVYDERGILSF

SEQ ID NO: 7549 - DNA, 1092 bp, Streptococcus pyogenes
ttgactcaactaaaaactcaatatccctcgctcatcatagacgctagcttcatcaccttggcggcaaatgcaacggtcaagccccaggataagacctacaataccgtcaatcttctcaacagatttttccttatctggcttgatgttgcctccaggggcttgtcgcatcaccacgttttgtcccatccatttaaggactggatgaccaacatgttagattttccctaccatcatgagtttatagagttccttggacggtggactcatatccttatagccctgcccaaaaggcaccatggtcaagtcgacaccgcaattccaaggtatcttctggtaaccatcagagagaagacagggattgtaaaattaaccactgtgcaaaatacagcgttcactacccagtcgaatcaactcaaaaaacaatacgggcagttcttgttaacagaatctaataactgttgtgcatgcccaggctgtgatagaccactcattctaaccagtggcaacttagcagcagaaaattacgaggtttcagccattgaaaaagataaggacgctgaagcactgaatctgatagccctctgcccagatggttttttaacctatcaagcagataggcgcaaaaaaattgtaacaactctaaaaaatgttaaaaagattctagtctctgcacataacagccaacaagcgatttctgatatgaagttagacagtggaattgtttcagttttgactagtctcaataaactaaaatgtgatgaatataatatctcctatgactcgaagcaattgactgataagatatcacctgagaacaatcgtacgctttatcaattggttaaaaaccaagttattgataactacttaaccattcaaaaaatcatcgtaaatttggacaaacaaggaaaaattgattacgagaaaatccaatatcaaacgcgatcgatgtataaaaagttaaaagcagccaagcataataatctggctattttcaatactatttcggaaaaactccatctggctacactacaggacatctacttctgtcagatgattgtctcttactttatccaaaaatgcgaggtacttgaa

SEQ ID NO: 7550 - protein, 364 aa, Streptococcus pyogenes
LTQLKTQYPSLIIDASFITLAANATVKPQDKTYNTVNLLNRFFLIWLDVASRGLSHHHVLSHPFKDWMTNMLDFPYHHEFIEFLGRWTHILIALPKRHHGQVDTAIPRYLLVTIREKTGIVKLTTVQNTAFTTQSNQLKKQYGQFLLTESNNCCACPGCDRPLILTSGNLAAENYEVSAIEKDKDAEALNLIALCPDGFLTYQADRRKKIVTTLKNVKKILVSAHNSQQAISDMKLDSGIVSVLTSLNKLKCDEYNISYDSKQLTDKISPENNRTLYQLVKNQVIDNYLTIQKIIVNLDKQGKIDYEKIQYQTRSMYKKLKAAKHNNLAIFNTISEKLHLATLQDIYFCQMIVSYFIQKCEVLE

SEQ ID NO: 7551 - DNA, 321 bp, Streptococcus pyogenes
atgaagggaaattgcttattgaaagaatatcaggtcaccatgtcggatgatgctaaagcagatttgctgagcatctatcactatgttcgtgatgaactctgtgcaccacaggcagcggatgatcttcttgagaggttatcccaaggaatgttatcactatccatttttcctgaacgttgtgccatcattgaggatctgattggaaaaggctataccttcagacaactgattgtcaaaaaatatcgcattgtatatcatgttctggaagatgaagttataattgttgcggtcgtctatggatcacgtcatatgaataattgg

SEQ ID NO: 7552 - protein, 107 aa, Streptococcus pyogenes
MKGNCLLKEYQVTMSDDAKADLLSIYHYVRDELCAPQAADDLLERLSQGMLSLSIFPERCAIIEDLIGKGYTFRQLIVKKYRIVYHVLEDEVIIVAVVYGSRHMNNW

SEQ ID NO: 7553 - DNA, 270 bp, Streptococcus pyogenes
atggaactcgtaaagacgatacaaattggtgatgacatctatcctccgatacctgacctatttggcattcaagagaatcaggagtttaacctttataaatcaactgatggaactttggtgttaagtccatctgatagcaaactatcagcggatcaccaaagtataagcagtgatgagcagatgacaacagctgttgaacaagcaaggttagatgagattgcgacttcagtattatcacgacatcttgacgcatttaaggaattgacagaa

SEQ ID NO: 7554 - protein, 90 aa, Streptococcus pyogenes
MELVKTIQIGDDIYPPIPDLFGIQENQEFNLYKSTDGTLVLSPSDSKLSADHQSISSDEQMTTAVEQARLDEIATSVLSRHLDAFKELTE

SEQ ID NO: 7555 - DNA, 93 bp, Streptococcus pyogenes
ttgattactttgaaagaaatataccgaaagcacttcaaaggaggtgctttttttgtaccccaaaataaggagggcttatgggactacttgatt

SEQ ID NO: 7556 - protein, 31 aa, Streptococcus pyogenes
LITLKEIYRKHFKGGAFFVPQNKEGLWDYLI

SEQ ID NO: 7557 - DNA, 450 bp, Streptococcus pyogenes
atgggactacttgatttaattggaagaaaaagggctagagataagccccaaaacagttatgaaggtcaggacttttcctacctctttggtcgcacgactagtggcgagaatgtggatgagtttaagactatgcagacgacggcagtctatgcctgtgtgcgtgttcttgctgaagcggtggcgtcacttcctattcacatctatgaacggacagaaaatgggaaggagaaaaagctggaccacccactgtactttcttcttcatgatgaacccaatccagagatgtcctcctttatctttcgagagacaatcatgagccatcttttgatatggggaaatgcctatgtacagattatacgagataaaagtggtatggtatcgctactgctaaagcagaaggcgagcgttctgataagaaagctgctcttgattatctggcaacggatgcct

SEQ ID NO: 7558 - protein, 150 aa, Streptococcus pyogenes
MGLLDLIGRKRARDKPQNSYEGQDFSYLFGRTTSGENVDEFKTMQTTAVYACVRVLAEAVASLPIHIYERTENGKEKKLDHPLYFLLHDEPNPEMSSFIFRETIMSHLLIWGNAYVQIIRDKSGMVSLLLKQKASVLIRKLLLIIWQRMP

SEQ ID NO: 7559 - DNA, 336 bp, Streptococcus pyogenes
ttgaccgtctctagttcagcatggatgccaaggcttatctcccaacagattctatcagagtatgtgaagagcctagaagttgaagctgataaggtcgttattccaggacagaatactccagtctttagttgggatagggatgggaatgggaatctttccattgacacaccgctcctaaaggtgagaggggaaagtctagcgacacaagctgaccttacaaccatctctttaactcctggtccaaagggagaactctggcagacaagtgttgaaaggttggatataaaagtagacaagcacatcagcctaaccttcaaaaatggcgtacggattgat

SEQ ID NO: 7560 - protein, 112 aa, Streptococcus pyogenes
LTVSSSAWMPRLISQQILSEYVKSLEVEADKVVIPGQNTPVFSWDRDGNGNLSIDTPLLKVRGESLATQADLTTISLTPGPKGELWQTSVERLDIKVDKHISLTFKNGVRID

SEQ ID NO: 7561 - DNA, 339 bp, Streptococcus pyogenes
atgatgaaaccaccttttacagttacgaataccatgttaaataaggtagtagagatttctaaaattattggtaatttagaattacaagtacagaaagatttaaaattaagaaaagaaaatcgtattcagtctattcactcatcactcgctattgaacaaaattctttaacagtagaacaaataacagccattattgatgggaaaagagtgttagggaacccccgtgagataagagaagtaaaaaacgcttatgaagcttatgaagaaattttaacgctaactccctatgatgaatcacatttttttaaaatgaagaaatttcaacagtacatttaccga

SEQ ID NO: 7562 - protein, 113 aa, Streptococcus pyogenes
MMKPPFTVTNTMLNKVVEISKIIGNLELQVQKDLKLRKENRIQSIHSSLAIEQNSLTVEQITAIIDGKRVLGNPREIREVKNAYEAYEEILTLTPYDESHFFKMKKFQQYIYR

SEQ ID NO: 7563 - DNA, 1281 bp, Streptococcus pyogenes
atgggattgattatttaccataaaggaggaagaaaaatgaaaaagaatattttaattgtaggtggaggtccagagataactatatgttatgatttaattaacaatagtacggagtataatttcttttcagtatcagaaattcctacgatgtatccagagttgtttgtagaaacaattgaaaccagctttagaaattttggaaagacgattgaacaaattaaagagctcaaatattctattgatgctgttgcttgttgggatgaagctttaacgcatatagctgatgatatttcaaaagaattaggattgaaccctatttcatcgctagattctcaatcattcaggtttaaagatcgaatgagaatggtatgtgaagctggtggactaaaaatgcccaaatataaaattatcaatcaattttcagatacaaataaaataatcaattggaaatatccattaatagtgaaaccaacctcttttttagcaagtataggagtgaaaaaagtttataatttttcagaattacaacaagcagtttctcaaatgcttaatgtaaaatttccggtttacatagcttcaggggtatatgaattgggggaattatataatttagaacctagagttttggtggaagagtttattgatggagaagaatatagcttagagagcgtggtaagaaatggaatctatacacctctagggataactaaaaaaatagtggatgaaaaattatttatggatgaaataggccatattttcccttcaaatttaaacaaagaagaaaaaagtagagtatattcttgggcagaaaaattacatcaaattttgcaattaaatcatattacgactcatacagaatttagaattggaagaaatggagatattattttaatagaaattggagcaagaatcggtggagattgtattccaaacttaatgaaaaacagctttatagtcaagggatttgatttttataatacttatttaaaagctagactaggtttacaagaagagttaaatacagacactaataagttttcaggaattgtatttttcagactcaatccagagaattacggaaaaatatttaatggagtgagttacgatgcacctaaaacttcactaatatttgaagaaaagatatataaaaaggaaggaactgtattgccaaatccgattaattggagtaatgagagagtaggatatgtctgtttggaaaacaaggaatacgctgtgctagaaaaggagatgaaagaaatattaaaatcattgtcaatagag

SEQ ID NO: 7564 - protein, 427 aa, Streptococcus pyogenes
MGLIIYHKGGRKMKKNILIVGGGPEITICYDLINNSTEYNFFSVSEIPTMYPELFVETIETSFRNFGKTIEQIKELKYSIDAVACWDEALTHIADDISKELGLNPISSLDSQSFRFKDRMRMVCEAGGLKMPKYKIINQFSDTNKIINWKYPLIVKPTSFLASIGVKKVYNFSELQQAVSQMLNVKFPVYIASGVYELGELYNLEPRVLVEEFIDGEEYSLESVVRNGIYTPLGITKKIVDEKLFMDEIGHIFPSNLNKEEKSRVYSWAEKLHQILQLNHITTHTEFRIGRNGDIILIEIGARIGGDCIPNLMKNSFIVKGFDFYNTYLKARLGLQEELNTDTNKFSGIVFFRLNPENYGKIFNGVSYDAPKTSLIFEEKIYKKEGTVLPNPINWSNERVGYVCLENKEYAVLEKEMKEILKSLSIE

SEQ ID NO: 7565 - DNA, 198 bp, Streptococcus pyogenes
atgaacaatagagaaagtaaattaacgggtttctatgatgtttttgaggaagaagtagaaaaaataaatcatattcataatgtttttgtagaggagtcagaaaaatttggctttcaacagatgaagattgctatggtagagcatagaaaaaaatacttagatgcaaccgatgttcattatacaaaatacaaaaatatt

SEQ ID NO: 7566 - protein, 66 aa, Streptococcus pyogenes
MNNRESKLTGFYDVFEEEVEKINHIHNVFVEESEKFGFQQMKIAMVEHRKKYLDATDVHYTKYKNI

SEQ ID NO: 7567 - DNA, 897 bp, Streptococcus pyogenes
gtgttatttagagatagaattcctacatataaaggttatagaagacaatttaatcaaatattattaggtgcatggggaatagaatcagcttatgtggatgcagaaataatagttgcaacttggcgaggcttgcaacgatttaaaggaattaaagtagaatttattcaactgtctaacaaaaatatatttgatgttttggagaaagatttatctaaaaagttaagatttgaagatatttcaattgaagcaatattgggtaaatatttgtgtaataatgacatagaaatcataaaatgtctttatgaaaaagataaaataaatatggaactcttaattagtcttatttcaaaaataagtaacaaactggtgaaacaggaatttataaaagttttagtcttgtatgagtatgtaaaaaactttttaccagtagattgcatttacttttcattatctaatttatatggaacaggacattattcaagtatgaactataaaatcttcatacgaactaagtcaggtgacatatttgatattgctgatggtggtagaattgatgatatggtttctaaatttaataaagtaaacgtattaggagtttgcatgggaataggaaccactgttttatcacaagagattgagtatgaaattgaagatagaataatgatattagttgaaaaaatagatgtgaaaatctataagaattgtcttgaattagcaaataaattaagtgggtatcattgttccgtttttgagtttccttataaaaaaatcaaaaagttttttaaacatgaattatattcgagacatcattatattattgttcgattagatggaagtatggaatacagattttcatctgtagctttaaaaaataaaattaaaagcatacttgatagt

SEQ ID NO: 7568 - protein, 299 aa, Streptococcus pyogenes
VLFRDRIPTYKGYRRQFNQILLGAWGIESAYVDAEIIVATWRGLQRFKGIKVEFIQLSNKNIFDVLEKDLSKKLRFEDISIEAILGKYLCNNDIEIIKCLYEKDKINMELLISLISKISNKLVKQEFIKVLVLYEYVKNFLPVDCIYFSLSNLYGTGHYSSMNYKIFIRTKSGDIFDIADGGRIDDMVSKFNKVNVLGVCMGIGTTVLSQEIEYEIEDRIMILVEKIDVKIYKNCLELANKLSGYHCSVFEFPYKKIKKFFKHELYSRHHYIIVRLDGSMEYRFSSVALKNKIKSILDS

SEQ ID NO: 7569 - DNA, 216 bp, Streptococcus pyogenes
gtgtcttttaaaacagattgtaacacacaaagttttgtctacttttatagtatacatccagtggtcatttataaaaataaaaaaagtagcagttcacttcaaaaacggtcaggttatcgaaatataatctggctgttttttacgaatggaatgaaagctgctttttatgatataataagaaaaattgaacagaatgcagaaatgatggggcttatt

SEQ ID NO: 7570 - protein, 72 aa, Streptococcus pyogenes
VSFKTDCNTQSFVYFYSIHPVVIYKNKKSSSSLQKRSGYRNIIWLFFTNGMKAAFYDIIRKIEQNAEMMGLI

SEQ ID NO: 7571 - DNA, 195 bp, Streptococcus pyogenes
atgagacaaactagctatggtttgcttggttttgtttgttctgtcgttttttctttggtcgctagtttaccatcagtattgacttccaaaggcttatcaaaactagggattgatgcaaagcctgctagcattttttcaagttcatcattttttttatgggtaattgccatatctatgaccttctttcattcaaga

SEQ ID NO: 7572 - protein, 65 aa, Streptococcus pyogenes
MRQTSYGLLGFVCSVVFSLVASLPSVLTSKGLSKLGIDAKPASIFSSSSFFLWVIAISMTFFHSR

SEQ ID NO: 7573 - DNA, 126 bp, Streptococcus pyogenes
gtgattattgttattttccataatattgctattataacacaaaccatgttaatgcaaaaaatgatagcgaaacattgtcctaatataaagttgcgtaaagaatcaaaaaaagctacttttagtaaa

SEQ ID NO: 7574 - protein, 42 aa, Streptococcus pyogenes
VIIVIFHNIAIITQTMLMQKMIAKHCPNIKLRKESKKATFSK

SEQ ID NO: 7575 - DNA, 435 bp, Streptococcus pyogenes
gtgacactcactaattatgtccaagaagtttccctggctgattttggcaaaccacttcaccacaaggcttattggaacaagcgcctaaaaacaactggcggtcgcttttttccaaaagatggtcatttggattttaaccctaggatgcttgaggagcacggtgagcttatttttcggaaaattgttcgccatgagctctgccattaccatctttattttgaaggaagagggtaccatcataaagatagggatttcaaagatctgctagctcaagtaaacgggcttcgttatgtcccaactagctctaaatcaaagactaatcatcattatagttgccaaacctgtgggcaggtttatcaacgaaaaaggcgtatcaatctggctaaatatgtttgtggaaattgccacgggaaacttatggaaaaaaatcagtcg

SEQ ID NO: 7576 - protein, 145 aa, Streptococcus pyogenes
VTLTNYVQEVSLADFGKPLHHKAYWNKRLKTTGGRFFPKDGHLDFNPRMLEEHGELIFRKIVRHELCHYHLYFEGRGYHHKDRDFKDLLAQVNGLRYVPTSSKSKTNHHYSCQTCGQVYQRKRRINLAKYVCGNCHGKLMEKNQS

SEQ ID NO: 7577 - DNA, 282 bp, Streptococcus pyogenes
atgcctgcaccgttaaagaagcataattcggttgaacaggatgattcttaccaagaatctcaaagtaaatttcgagattttcaagagttcaatggccaaagtgcaaagctaaaagaattagtcttctttgctcgtatcgctagtttcagccttattaccgttttatttgcatttgtcctgctcgtaatgaatttagcgccaatgtttgctttcttatttgcaagcatcatcagcttaggcattacttccttattcgccaaggttatcaaatcattactgatg

SEQ ID NO: 7578 - protein, 94 aa, Streptococcus pyogenes
MPAPLKKHNSVEQDDSYQESQSKFRDFQEFNGQSAKLKELVFFARIASFSLITVLFAFVLLVMNLAPMFAFLFASIISLGITSLFAKVIKSLLM

SEQ ID NO: 7579 - DNA, 126 bp, Streptococcus pyogenes
atgactcattctcctattattctatcaagttttgagaaaataagctattgtgatatccaattttcaaaaaaaacaggctctcttttcccaactatggtcgtataccatttggaaaaagagggcctc

SEQ ID NO: 7580 - protein, 42 aa, Streptococcus pyogenes
MTHSPIILSSFEKISYCDIQFSKKTGSLFPTMVVYHLEKEGL

SEQ ID NO: 7581 - DNA, 138 bp, Streptococcus pyogenes
atgaccaaagaatatatctcctacattagtgctgctatcttcttgctttatggccttttagctgccaaatggatttttcttgggctaggcttaattttggtacttgtcggccttgctgatcgcctcaattcaaaaaaa

SEQ ID NO: 7582 - protein, 46 aa, Streptococcus pyogenes
MTKEYISYISAAIFLLYGLLAAKWIFLGLGLILVLVGLADRLNSKK

SEQ ID NO: 7583 - DNA, 96 bp, Streptococcus pyogenes
atgtcactatctcttatagttggtagctatattctttacaatattagtttagtctttgactatatcatgacagtcagcaagtactgttttgttatt

SEQ ID NO: 7584 - protein, 32 aa, Streptococcus pyogenes
MSLSLIVGSYILYNISLVFDYIMTVSKYCFVI

SEQ ID NO: 7585 - DNA, 402 bp, Streptococcus pyogenes
gtggttttggtcgtgaatacagctaccaaatgtgggctaaccccacaataccaggccttgcaagcactatatgacacataccatgacaagggatttgaggtcttagattttccttgcaaccaatttttaaatcaagctccaggagatgctgaggagattaatcacttttgcagtctgacctatcacactactttccctcgctttgcaaaaatcaaagtgaatggtaaagacgctgatcctttgttcacctggttaaaagaagaaaaaagtggtccccttgggaaacgcatcgaatggaatttcactaaatttctcattgaccaaaatggtcaagtcattaaacgctattcctcaaagacagatcctaaactaattgaagaagaccttaaagcacttcttggt

SEQ ID NO: 7586 - protein, 134 aa, Streptococcus pyogenes
VVLVVNTATKCGLTPQYQALQALYDTYHDKGFEVLDFPCNQFLNQAPGDAEEINHFCSLTYHTTFPRFAKIKVNGKDADPLFTWLKEEKSGPLGKRIEWNFTKFLIDQNGQVIKRYSSKTDPKLIEEDLKALLG

SEQ ID NO: 7587 - DNA, 93 bp, Streptococcus pyogenes
atggagactaaacctatccaaacattctttaaaataaagcgcttacttttgttaaaaaacaaacgttatgaacatgatcacttttatttttgg

SEQ ID NO: 7588 - protein, 31 aa, Streptococcus pyogenes
METKPIQTFFKIKRLLLLKNKRYEHDHFYFW

SEQ ID NO: 7589 - DNA, 138 bp, Streptococcus pyogenes
ttggaattccacgctttatttttgccacagcaaaaagcagctgtttgggctcatgtcacacgcaaaaataagaaatcagcagagcagttcaagttttttgagcatcaaactgggattgtctatattctaaaatctcct

SEQ ID NO: 7590 - protein, 46 aa, Streptococcus pyogenes
LEFHALFLPQQKAAVWAHVTRKNKKSAEQFKFFEHQTGIVYILKSP

SEQ ID NO: 7591 - DNA, 102 bp, Streptococcus pyogenes
gtggtttatcttaaaaatgttctccctcctatcttactaaaaataggtgcttttgtcatgggatgggaaaggaaacttaaggaaaaacgagagaaaacgttt

SEQ ID NO: 7592 - protein, 34 aa, Streptococcus pyogenes
VVYLKNVLPPILLKIGAFVMGWERKLKEKREKTF

SEQ ID NO: 7593 - DNA, 231 bp, Streptococcus pyogenes
ttggaattctatgctttatttttgagcctagggtctcaaaaattccgcgtaacgtcactgccagtattgacaccacttttgccacagcaaaaagcagctgttttggctcacgtcacacgcagaaataagaaatcagttgtcaaatcagcagagcagttcatgctttttgagcatcaaactgggtttgtctccattctaagattgaagaaagagtactttcttcaatctttt

SEQ ID NO: 7594 - protein, 77 aa, Streptococcus pyogenes
LEFYALFLSLGSQKFRVTSLPVLTPLLPQQKAAVLAHVTRRNKKSVVKSAEQFMLFEHQTGFVSILRLKKEYFLQSF

SEQ ID NO: 7595 - DNA, 96 bp, Streptococcus pyogenes
ttggcaagaatcaactttttaatgtcaggcataccaatagtccttatcattgtaacgattataaaaaaaggtttgagacaattgtctcaaaccttt

SEQ ID NO: 7596 - protein, 32 aa, Streptococcus pyogenes
LARINFLMSGIPIVLIIVTIIKKGLRQLSQTF

SEQ ID NO: 7597 - DNA, 447 bp, Streptococcus pyogenes
atgccttctttagaacatgttataagtcctgatactaagtcgtcaaaagaagctgctgtttgtcttgcaaaactagcttcaatcagcatggctaagttaaggccagaaagaacattacacgtcgtgtttggaagagattccattaaggttgcagcgactttaaaaggggtacctcctagaaggtcacaaagaactaaggtttcctcttctgggattaaagcacgagataattggtcctgcacatcagcggcggtcatctcagtagtaaaatcaattgcagttaccttttcttgtttgcctgcgatcaattctaaggctgaaacaataccactcgcaaaatgtccatgtcccataacgataatagcaatcataaataaatctccttcggtttaccggtttactcaaaaatattgtagcgctttcaaaattctttgtcaatactttttt

SEQ ID NO: 7598 - protein, 149 aa, Streptococcus pyogenes
MPSLEHVISPDTKSSKEAAVCLAKLASISMAKLRPERTLHVVFGRDSIKVAATLKGVPPRRSQRTKVSSSGIKARDNWSCTSAAVISVVKSIAVTFSCLPAINSKAETIPLAKCPCPITIIAIINKSPSVYRFTQKYCSAFKILCQYFF

SEQ ID NO: 7599 - DNA, 153 bp, Streptococcus pyogenes
gtgatttctgaccaagtagaggtaaccagaaaagggacttttacgatggaattgaatttacttgttgcattcttgtgcatgttaagagagaaaacccagataaatcaggaagtaaaatggttatgtttgattagaattgtccttctttttcct

SEQ ID NO: 7600 - protein, 51 aa, Streptococcus pyogenes
VISDQVEVTRKGTFTMELNLLVAFLCMLREKTQINQEVKWLCLIRIVLLFP

SEQ ID NO: 7601 - DNA, 1413 bp, Streptococcus pyogenes
atgagaaaagtagctatttactctagagtatcaacaataaatcaagccgaagaaggatattccattcaaggacagattgaagctttaacaaagtattgtgaggcaatggaatggaaaatttacaaaaactactctgatgcaggtttttcaggcggtaaacttgaacgaccggcaataacagaattgattgaagacggtaaaaacaataaatttgatactattttagtctataaactagacaggctatcaagaaatgtaaaagacacactttacttagtcaaagatgtatttactgctaacaatatccattttgtcagcttaaaagaaaatatcgacacttcttcagcaatgggaaatctctttctcactctcttgtcagctattgcagagtttgaaagagaacagattaaagagcgaatgcagtttggtgttatgaatagagcaaaatctggaaaaacaacggcttggaaaacaccaccttatggatatagatacaacaaagacgaaaaaacattgtcggtcaacgagttagaggctgctaatgtcaggcagatgtttgacatgataatctctggctgctcaatcatgtcaattacaaattacgcgagagacaatttcgtcgggaatacgtggacacatgtaaaagtaaaaagaatattagaaaacgaaacatataaaggattagtgaagtatagggaacaaactttctcaggtgatcatcaagccattatcgacgaaaaaacatataataaagcgcaaatagctttagcacataggacagatacgaaaacaaatactagaccttttcaagggaaatatatgctttctcacatagcaaaatgcggttattgtggtgcccctttaaaagtatgcacaggaagagctaagaacgatggtacgagaaggcaaacttacgtttgtgttaataaaacagaaagtttggctagacgaagtgttaataattataataaccaaaagatttgtaacactggtcgatatgaaaaaaaacacatcgaaaaatatgttattgatgttctttataaacttcaacacgataaagaatatcttaaaaaaataaaaaaagatgacaatataattgatattacacctttaaaaaaagaaatagagataatcgataaaaaaatcaatcgtctaaacgatttatatattaatgatttgattgacctaccaaaactaaaaaaagacatcgaagaactcaatcatttaaaagatgattataacaaagcaattaaattgaattatttagacaagaaaaacgaagactctcttggaatgctgatggataaccttgacattagaaaatcttcgtatgatgttcaatctaggatagttaagcaattgatagatagagtcgaggttactatggataacatcgatattatttttaagttt

SEQ ID NO: 7602 - protein, 471 aa, Streptococcus pyogenes
MRKVAIYSRVSTINQAEEGYSIQGQIEALTKYCEAMEWKIYKNYSDAGFSGGKLERPAITELIEDGKNNKFDTILVYKLDRLSRNVKDTLYLVKDVFTANNIHFVSLKENIDTSSAMGNLFLTLLSAIAEFEREQIKERMQFGVMNRAKSGKTTAWKTPPYGYRYNKDEKTLSVNELEAANVRQMFDMIISGCSIMSITNYARDNFVGNTWTHVKVKRILENETYKGLVKYREQTFSGDHQAIIDEKTYNKAQIALAHRTDTKTNTRPFQGKYMLSHIAKCGYCGAPLKVCTGRAKNDGTRRQTYVCVNKTESLARRSVNNYNNQKICNTGRYEKKHIEKYVIDVLYKLQHDKEYLKKIKKDDNIIDITPLKKEIEIIDKKINRLNDLYINDLIDLPKLKKDIEELNHLKDDYNKAIKLNYLDKKNEDSLGMLMDNLDIRKSSYDVQSRIVKQLIDRVEVTMDNIDIIFKF

SEQ ID NO: 7603 - DNA, 363 bp, Streptococcus pyogenes
atgacgttaaaacaacttttaaaatcaaaaaatctgggagaatattttgaagcaaaaaacaatgcagaaaagatgaatgagattgaaaaccgtggcttaaagcaagtaatgaaaaactcagtacgacagacccaattaaatagcgaaataaaacaagtgataaaaaaagaaaaagaggcggtaagatgtccaaaatgtaaaagtactaatgttggatttatgcagcaaggtaaaaagacattttctgttaaaaaggccgtcgcaggaactcttttaataggtggaacagttatgggatttttaggagaaaaagggaagaagcaatggcactgtaacgagtgcagctgtatatttgagacaaaa

SEQ ID NO: 7604 - protein, 121 aa, Streptococcus pyogenes
MTLKQLLKSKNLGEYFEAKNNAEKMNEIENRGLKQVMKNSVRQTQLNSEIKQVIKKEKEAVRCPKCKSTNVGFMQQGKKTFSVKKAVAGTLLIGGTVMGFLGEKGKKQWHCNECSCIFETK

SEQ ID NO: 7605 - DNA, 303 bp, Streptococcus pyogenes
ttgacaatttggaacgtaggttttataataaaggtgttccaaaacgggaacaaaaataaaaaaaggagtatgtatatgacaatcaatttgaagcgactaaaagccgagcgaattgctagcggtatgacacaatgtgaagttgcacaatctatggggtggaaaacacgaacaccatatgcaaaaagagagaacggtattgtttcaattggagctgatgagcttgcaaaaattactttgatttttggattaccaatcgaaaaaatagcaattttttttgataaagacgttcccgtaatggaacga

SEQ ID NO: 7606 - protein, 101 aa, Streptococcus pyogenes
LTIWNVGFIIKVFQNGNKNKKRSMYMTINLKRLKAERIASGMTQCEVAQSMGWKTRTPYAKRENGIVSIGADELAKITLIFGLPIEKIAIFFDKDVPVMER

SEQ ID NO: 7607 - DNA, 135 bp, Streptococcus pyogenes
atgaaaaacaaaaaagagcaatggaccccaaaagttcactgttttcgaaaagatggttcacaatgtgagccagaaaatataacagtgccaatttcttttgcaggttactatcaaattttattagaactaggagta

SEQ ID NO: 7608 - protein, 45 aa, Streptococcus pyogenes
MKNKKEQWTPKVHCFRKDGSQCEPENITVPISFAGYYQILLELGV

SEQ ID NO: 7609 - DNA, 123 bp, Streptococcus pyogenes
atgaaactattagattttatttttacaaaaccaaaaaaacaggaaccgattaaacacgatactaagcgattgtcatctgaaaagcagtatgatgcattccacgcttatatgagaaaaaaagta

SEQ ID NO: 7610 - protein, 41 aa, Streptococcus pyogenes
MKLLDFIFTKPKKQEPIKHDTKRLSSEKQYDAFHAYMRKKV

SEQ ID NO: 7611 - DNA, 225 bp, Streptococcus pyogenes
atgaaacaacaactaattaacgacaacgaatttttgcgagacgaaaatcgcaggttaaataatgaattggcggaacattactttgtagttacagctaaagcaaatttattagatgtcattattgctagtgattttatcttgaaaagtacgctagataaatgcattgctgaattggatgaaattgatcaaatagccctgttaaaagcatggaacaagggagaatta

SEQ ID NO: 7612 - protein, 75 aa, Streptococcus pyogenes
MKQQLINDNEFLRDENRRLNNELAEHYFVVTAKANLLDVIIASDFILKSTLDKCIAELDEIDQIALLKAWNKGEL

SEQ ID NO: 7613 - DNA, 1338 bp, Streptococcus pyogenes
atggaacaagggagaattataatgtcaataacaataaacaaacttgaaatcgaaaacgttaagcgtattaaagcggtaaagattgaaccatctgcaacaggcttgaccattatcggtggtaataataaccaaggcaaaacaagcgtattagatgctattgcttgggcactaggcggtaataaatacaagcctagtcaagctatgcgcgaaggatcgcaagtgccacctacgcttaaaattaccatgtcaaatggacttattgttgaacggaaaggcaaaaatgccagtcttaaagtaattgatccaaacggccaaaaaggtggtcagcagttgctagatagctttgtagaagaattggctattaacttgccgaaatttatggatagtacaccaaaagagaaagcagatgtcttgcttgaaattattggtgtcggtgatcagctagcagagttagagctaaaagaaaaagaaatatacaatcaacgtcacgctatcggtgttatagcagaccaaaaagaaaagtttgctaaggagatgacatattatcctgacgcacctaaacaactggtaagtatttctgagcttatccaacaacaccaagctatcttagccaaaaacggagagaatgctcaaaagcgtcaaaatgtagaacgtattcgctatgattataatcaatctatcttggaagttgaccgtttacgcaagttattagcagatgcagaagctaagacgaataagttaagcgaggatttaaaaatagcaaatactgacgctatggatttacatgatgaatcaacagctgaaatcgaggcgaatattgccgatattgatgaagtcaaccgcaaagtgcgcgctaactttgataaagataaagctgaagaagatgctaaacagcagcgtgaacaatataacatattgactaatgatattgagtcaattcgtcaacaaaaaagagacttattgattaatgcagatttgccgcttgaaggcttatcagtagatgatggaaagttactttaccttggtcaagagtgggataacatgtcaggcagccaacaactaatagtagcaactgctattgtacgtaaactaaaaccagattgtggctttgttttgattgataaactcgaacagatggacaacatcacacttgaacaatttggtaaacggctagagcaggagggtttgcaagctattgcaacccgtgtatcaattggtgaagagtgtgccatcattatagaagatggatactcagtggaaaacaaagctcataactttaaaacagcagagggtggtaattttgctgaaacagtagcaccgacttggaaaggtgagttt

SEQ ID NO: 7614 - protein, 446 aa, Streptococcus pyogenes
MEQGRIIMSITINKLEIENVKRIKAVKIEPSATGLTIIGGNNNQGKTSVLDAIAWALGGNKYKPSQAMREGSQVPPTLKITMSNGLIVERKGKNASLKVIDPNGQKGGQQLLDSFVEELAINLPKFMDSTPKEKADVLLEIIGVGDQLAELELKEKEIYNQRHAIGVIADQKEKFAKEMTYYPDAPKQLVSISELIQQHQAILAKNGENAQKRQNVERIRYDYNQSILEVDRLRKLLADAEAKTNKLSEDLKIANTDAMDLHDESTAEIEANIADIDEVNRKVRANFDKDKAEEDAKQQREQYNILTNDIESIRQQKRDLLINADLPLEGLSVDDGKLLYLGQEWDNMSGSQQLIVATAIVRKLKPDCGFVLIDKLEQMDNITLEQFGKRLEQEGLQAIATRVSIGEECAIIIEDGYSVENKAHNFKTAEGGNFAETVAPTWKGEF

SEQ ID NO: 7615 - DNA, 1089 bp, Streptococcus pyogenes
atgcaaattacaagaggtaaacgagcacgtgctcaacgtgtcatcatttatggaccagaaggaatcggtaaatctagttttgctgctaattttcctgaaccattgttcattgatacggagggatcaacagacaatatggatgtggcccgtatggataaaccaacaagctacactatgctaaaaaatcaaattgcatggattaaagcgaatccaacatgttgcaagacactggtcattgacacaatcgattgggcagaaagcttaatagtagatgatgtctgtgctcaacatggcaagaaaggtatcgaggactttggttggggcaatggttatacctacacaaaagaggaagtaggtcgattcttgaatatgctccaagaactgattgaactcggtatcaatattgtattaactgcccatgcacaaatgagaaaatttgaacaacctgacgagatgggagcttatgaccgttgggagttgaaacttggtaaaaagacaagctcacagactgcccccttggtcaaagaatgggctgatatggtcttgtttgccaactacaaaacagtagttatgactagcgaatcaaaaaagaaaaaggcaactggtggtcaacgtgtgctatacacgcaacatcacccagcgtgggatgcaaaaaaccgtcatgggttaccagacgaaatgcctcttgactatgcagtaatcgcacatctattcgcacaagtaccaactcaaccagtgccacaaacgccaccagtacaggaaactcctgcatcacaaaccgcacatgaatccgtacatgagcaagctgaaaaagcaccagaacaaccacctatgcaaccgacatctgcgccggtagcctacccaccaagtatgccaaaagcattgactgacttgatgtcggcagagcaggtcactcctgatgagcttgtggcagtagcaaacatccgaggacacttcccgccaatgacaccaattgaaaacttcccgtcagattattggaatatgattgtggccaattggttagctacgttagaagtgattaaaacgcaagtgcgtactgtcgagccaccctttactgtggaaggcgca

SEQ ID NO: 7616 - protein, 363 aa, Streptococcus pyogenes
MQITRGKRARAQRVIIYGPEGIGKSSFAANFPEPLFIDTEGSTDNMDVARMDKPTSYTMLKNQIAWIKANPTCCKTLVIDTIDWAESLIVDDVCAQHGKKGIEDFGWGNGYTYTKEEVGRFLNMLQELIELGINIVLTAHAQMRKFEQPDEMGAYDRWELKLGKKTSSQTAPLVKEWADMVLFANYKTVVMTSESKKKKATGGQRVLYTQHHPAWDAKNRHGLPDEMPLDYAVIAHLFAQVPTQPVPQTPPVQETPASQTAHESVHEQAEKAPEQPPMQPTSAPVAYPPSMPKALTDLMSAEQVTPDELVAVANIRGHFPPMTPIENFPSDYWNMIVANWLATLEVIKTQVRTVEPPFTVEGA

SEQ ID NO: 7617 - DNA, 420 bp, Streptococcus pyogenes
atgaataaaacaatcaaattagacttgtctgccatcggagaaggtggcttacaagaaaaagtagacaaggaattggaaaaagtctttgacaatatcttagatcctaatacagaaacaaaagtagcccgtaaagtaactattacgttaactatgaaaccagacgatgcccgtcaaactgtttcaacagctatggaagttaagtcaacgctagcaccacagacaggcgtggctacaacggtccttgttggtcaaaaagatggtaaggtttatgctaacgagctcaaaagcgcgatgcctggtcaaacttattttgacgatgaggcagtgctaagaactgacatcggtgaaccaattgatcaccttgaaaaaggtattaatgaagatgttattgattttaataagcaaaagaaagtaggaaac

SEQ ID NO: 7618 - protein, 140 aa, Streptococcus pyogenes
MNKTIKLDLSAIGEGGLQEKVDKELEKVFDNILDPNTETKVARKVTITLTMKPDDARQTVSTAMEVKSTLAPQTGVATTVLVGQKDGKVYANELKSAMPGQTYFDDEAVLRTDIGEPIDHLEKGINEDVIDFNKQKKVGN

SEQ ID NO: 7619 - DNA, 732 bp, Streptococcus pyogenes
atgacagaaaacattaaagaagctttggaatatgcagtaaatacagctcacgaaaaacctaagactatcttgggtagtgatggtaaagagtattatgatcgcaacaaatattctttggttgaacttaaaactaagtattatccaaaaacattgaatttaaacacgcttgacagtttaattgattatcttaaatcagatatgaacaatattaattccaagcgtcttatggtcattgtagaaggccctcgtgaagttattgtttgcgaagaagatgatgacgaccttaatcgaaatgtgttagtaactgtggaggcaattattccaaatgttcaatttggccactatgattcaccttctgattttaatattagtctgcaatcattattcgttaacgctgacgatcgtaacacagttattgaattcgctagtgcattaaaaatcgaaaatggctcagaaattgttgatgatggcattggtcaaactgccacaattaaacaaggtgtggcaagccttgcaaaagctaaggcgccaaacccagttacattacgtccataccgcacattttctgaagtagaacaaccttcaagtgagttcattttccgcattaatcaacttgctaatatggctttgtttgaagcagatggtggaaagtggcgcttagatgctatcaataatattgctaactacttaaaagaagaacttgctgatcaaactaacattacaattttagct

SEQ ID NO: 7620 - protein, 244 aa, Streptococcus pyogenes
MTENIKEALEYAVNTAHEKPKTILGSDGKEYYDRNKYSLVELKTKYYPKTLNLNTLDSLIDYLKSDMNNINSKRLMVIVEGPREVIVCEEDDDDLNRNVLVTVEAIIPNVQFGHYDSPSDFNISLQSLFVNADDRNTVIEFASALKIENGSEIVDDGIGQTATIKQGVASLAKAKAPNPVTLRPYRTFSEVEQPSSEFIFRINQLANMALFEADGGKWRLDAINNIANYLKEELADQTNITILA

SEQ ID NO: 7621 - DNA, 633 bp, Streptococcus pyogenes
atgactgaatacaataacaactttgaccgtgaattgggatgggatgatgaaattacacaagacagtgtaggttttgttcaattagtgcctggtgattatcaattcacagtaaccaatatggagcgtgctcgtcacacacctaatccgaagagtccaggaaaattaccagcgtgtaacaaggcggtcgttacgattcaaatagaaacatcagaaggaatcgcgcaattaactcataacttattcctacatactacaacagaaggtatgctatcagctttctttggagctattggtcaaaagaaacatggggaaccacttaaaatgaactggaataccgtcatcggagctaagggggttgctcgtattaataaacgtaaaggcaccggcgattatgctgatcgcgaatacgataacatcaaatctatgatttacgctgatgaagttgattggacaaaagtattaaataaagatgtcgcacaaccacagcaaatgacacatcaacaatctgctcaacctacatatcagggacaacaggcacaaggcactaattttgcacaacaaccagcaacgcagtcatatcaacaaggtcaaatgcaaacacctcaacaacctcaaggcggatggggaggattc

SEQ ID NO: 7622 - protein, 211 aa, Streptococcus pyogenes
MTEYNNNFDRELGWDDEITQDSVGFVQLVPGDYQFTVTNMERARHTPNPKSPGKLPACNKAVVTIQIETSEGIAQLTHNLFLHTTTEGMLSAFFGAIGQKKHGEPLKMNWNTVIGAKGVARINKRKGTGDYADREYDNIKSMIYADEVDWTKVLNKDVAQPQQMTHQQSAQPTYQGQQAQGTNFAQQPATQSYQQGQMQTPQQPQGGWGGF

SEQ ID NO: 7623 - DNA, 627 bp, Streptococcus pyogenes
atgggagaatattgtcacttaaaagaattagatggacttagatttggatcattgacagtcattaatagaaaccgtaacaattctaagggtggcaatgcacgatggaattgtctttgcgactgcggaaataaaacagttgttattggaagtaaattaagaagtggttatacaaaatcatgtggatgtgcacgtaaaaatgacaacgctaaaggttattcatctacaagactttacagaatttggaaaggcatgatgaatagatgctataaccacaaaaacgataattacaaatattatggtggaaaaggtatttcaatctgtgatgaatggctaacttttattaattttagaacatggtcgctctctaatggatataaagaatcattaaccattgatagaataaatccaaaaggtaactatactccactaaattgcagatgggtaagtatgaaaatgcagcaaaacaataaaacgaataataggtatttatcatatttaggtcaagaatatactattgctgaattttcagagaagttaaatgttacctattggactgtaataaatcaattgaaattaggttggagtgtagaaagaatagtagaagaagcgagaatgaaaaatgacaga

SEQ ID NO: 7624 - protein, 209 aa, Streptococcus pyogenes
MGEYCHLKELDGLRFGSLTVINRNRNNSKGGNARWNCLCDCGNKTVVIGSKLRSGYTKSCGCARKNDNAKGYSSTRLYRIWKGMMNRCYNHKNDNYKYYGGKGISICDEWLTFINFRTWSLSNGYKESLTIDRINPKGNYTPLNCRWVSMKMQQNNKTNNRYLSYLGQEYTIAEFSEKLNVTYWTVINQLKLGWSVERIVEEARMKNDR

SEQ ID NO: 7625 - DNA, 2271 bp, Streptococcus pyogenes
atgacagatgataaatttgatttattacctttacttgattatattgatccatcaaaactatcatatcaagactgggtgaatgttggttttgccctaaaacacgaaggatatactgctatggattgggacatttggtcacagtctgacagtagatacaaaaagggtgaatgtttcgctaaatgggatagtttccaaggtaatggacttgggactgtcactggcgcaactatcacacagttagcgaaagaaaacgggtggacatctgactaccgtacgagtgatgaagcccacgagcttgattgggatagcactattgatcgtgactataaaattattgacaagaactggatcgaagcaaaagaaattagagaacctactaactggtcacccgttcacgatttgattacttacatcaacactctttttgaatcaactgacaaagtcggatatgtaacagaaacatacccgattgaaatagataagggcattatctataaaccaacaaaaggagcctatgacaggacagctggtcagcttatccaagaattacaaaaaaatcctaatgacattggtgctgtcctcggtgactataaagaagaagctggtgcatggatacgatttaaccctttagatggcaatggtgtcaaaaacgacaatgtaacagactttaggtatgccttggttgaatccgatagtatggaacttggtaagcagtatgctttatttaaagaactagaattgccaatagcgacattggtccatagcggtaaaaaatcattacacgctattgtcaaagtagatgctaaagattatcaggagtaccgcaaacgggttgattacatctatcaaatctgtaagaaaaacggccttgatattgacacacagaatcgtaatccaagtcgtctatcacgaatgccaggtattatgcgaaatggtcacaagcaatttttgattgatacaaatattggtaaaaccaattatgaagaatggtatcaatggattgaagatttaaatgatgatttaccagagccagaaacgctagctgatgaatgggataatttgccagagctggctcctgaattaattaaaggagtgttacgccaaggacataaaatgctaattgcaggaccatcaaaagccggtaagtcatttgcattgattgagttatctattgctttggctgagggacagaaatggttaggttggcaatgtgaacaagggaaagtcctctatgtcaatttggagctagacagaccatcagctttgcaccgctttaaagatgtttatgatgcgatgggattacctcccgctaatgtggcaaacattgacatttggaacctccgtggaaaaacagtaccaatggataaattagcacctaaacttatcagacgctcactgaagaaaaattaccaagctgttattatcgaccctatttataaagttctcactggcgatgaaaacagtgctgatcagatggcccattttacaaatcaatttgataaggtggccactgaacttggatgtagcgtaatttattgccaccaccattctaaaggaagtcaaggtggcaaaaaatccatggacagggcaagtggttctggagtatttgctcgtgaccctgatgcattgattgacttagtggagcttgagttgactgaagaccttatcaaggcacgctcagaaaaagcagctgctaagatttaccaacaagcgttgcaggaaaaagctctaggatactatcaacaggaagtaacgctagacgacctagaaagtcgttatcagatgcaacaacattttgacaaagctatcaaggatatcatggttaaacagccatatcttgaggccgtcaaaaaagcccagcatgaggtagaaattgccacagcgtggcgagttgatggaacgctacgtgagtttgcgaagtttcagccagttaatatgtggtttagttatcccaagcacgaggtggatacaactggcgtgttggctgatattcagttggaagatagtaaacctctttggaaaaaagctaaagaagctaggaaaagtaaagaagagaatctcaaggaacggaaccaaaaacttgagacagcttatagcgccttatttgatggttcaacaccggttacagtgcaagaaattcgtgaatacttggatttaaaatccaataaaagcgttgaaaattatatcaaggaacacgatggttacgatgtcaaaaaaggtgttgtgttccaaatttctgataacaaagaaacggaaaagaaagaaaataac

SEQ ID NO: 7626 - protein, 757 aa, Streptococcus pyogenes
MTDDKFDLLPLLDYIDPSKLSYQDWVNVGFALKHEGYTAMDWDIWSQSDSRYKKGECFAKWDSFQGNGLGTVTGATITQLAKENGWTSDYRTSDEAHELDWDSTIDRDYKIIDKNWIEAKEIREPTNWSPVHDLITYINTLFESTDKVGYVTETYPIEIDKGIIYKPTKGAYDRTAGQLIQELQKNPNDIGAVLGDYKEEAGAWIRFNPLDGNGVKNDNVTDFRYALVESDSMELGKQYALFKELELPIATLVHSGKKSLHAIVKVDAKDYQEYRKRVDYIYQICKKNGLDIDTQNRNPSRLSRMPGIMRNGHKQFLIDTNIGKTNYEEWYQWIEDLNDDLPEPETLADEWDNLPELAPELIKGVLRQGHKMLIAGPSKAGKSFALIELSIALAEGQKWLGWQCEQGKVLYVNLELDRPSALHRFKDVYDAMGLPPANVANIDIWNLRGKTVPMDKLAPKLIRRSLKKNYQAVIIDPIYKVLTGDENSADQMAHFTNQFDKVATELGCSVIYCHHHSKGSQGGKKSMDRASGSGVFARDPDALIDLVELELTEDLIKARSEKAAAKIYQQALQEKALGYYQQEVTLDDLESRYQMQQHFDKAIKDIMVKQPYLEAVKKAQHEVEIATAWRVDGTLREFAKFQPVNMWFSYPKHEVDTTGVLADIQLEDSKPLWKKAKEARKSKEENLKERNQKLETAYSALFDGSTPVTVQEIREYLDLKSNKSVENYIKEHDGYDVKKGVVFQISDNKETEKKENN

SEQ ID NO: 7627 - DNA, 216 bp, Streptococcus pyogenes
atggaaatttacaaacaaagaatgattgaagaatataaacagttaaaaaaacgcgcagaaaaactatctattgtgctaaacagatactaccttgatgagttagattttgaattatcttgcccaattgaacttttacaaacgcaatggcatattatgggagcgtatttgaaaattctagaacaaagatttttggttgaagggatttattttaatgat

SEQ ID NO: 7628 - protein, 72 aa, Streptococcus pyogenes
MEIYKQRMIEEYKQLKKRAEKLSIVLNRYYLDELDFELSCPIELLQTQWHIMGAYLKILEQRFLVEGIYFND

SEQ ID NO: 7629 - DNA, 411 bp, Streptococcus pyogenes
ttgaagggatttattttaatgattgaattttttttgcctatggataaaatcccgacgacaactcatcagcaaaagaaagtgactgtcataaatggcaagcctcacttttacgagcctgagagtttgaaaaatgctagggataagtttacaagtcttttggctcagcatgtaccacccagtaagttagatggtcctatccgtctgacagtcaagtggctatttcccaaaatcaagggcagcacaaacggacagtacaaaacgacaaaaccagataccgacaacctgcagaagctgcttaaagactgcatgaccgaattgggattttggaatgatgatgcgcaggttgcttcggaaattattgagaagttctgggctgatacagtaggaatatacgtaaaggtggaagagtta

SEQ ID NO: 7630 - protein, 137 aa, Streptococcus pyogenes
LKGFILMIEFFLPMDKIPTTTHQQKKVTVINGKPHFYEPESLKNARDKFTSLLAQHVPPSKLDGPIRLTVKWLFPKIKGSTNGQYKTTKPDTDNLQKLLKDCMTELGFWNDDAQVASEIIEKFWADTVGIYVKVEEL

SEQ ID NO: 7631 - DNA, 219 bp, Streptococcus pyogenes
atgaaaattgattatattaatttttttgaacaagtggttcctgactggatgagagagagtaatgtcaaaatgcaagaagttggatttaatactgaagcgtattggcaatgggcaaatcaatctattgttgcaatctgcgaaaagtacggaaatgacagtctgatcaatgggcagtttcatctgatttgggaatggttggaggataaagcaaacggaggt

SEQ ID NO: 7632 - protein, 73 aa, Streptococcus pyogenes
MKIDYINFFEQVVPDWMRESNVKMQEVGFNTEAYWQWANQSIVAICEKYGNDSLINGQFHLIWEWLEDKANGG

SEQ ID NO: 7633 - DNA, 426 bp, Streptococcus pyogenes
atgaaactgcccattgatcagactgtcatttccgtacttttcgcagattgcaacaatagattgatttgcccattgccaatacgcttcagtattaaatccaacttcttgcattttgacattactctctctcatccagtcaggaaccacttgttcaaaaaaattaatataatcaattttcataactcttccacctttacgtatattcctactgtatcagcccagaacttctcaataatttccgaagcaacctgcgcatcatcattccaaaatcccaattcggtcatgcagtctttaagcagcttctgcaggttgtcggtatctggttttgtcgttttgtactgtccgtttgtgctgcccttgattttgggaaatagccacttgactgtcagacggataggaccatctaacttactgggtggtacatgc

SEQ ID NO: 7634 - protein, 142 aa, Streptococcus pyogenes
MKLPIDQTVISVLFADCNNRLICPLPIRFSIKSNFLHFDITLSHPVRNHLFKKINIINFHNSSTFTYIPTVSAQNFSIISEATCASSFQNPNSVMQSLSSFCRLSVSGFVVLYCPFVLPLILGNSHLTVRRIGPSNLLGGTC

SEQ ID NO: 7635 - DNA, 699 bp, Streptococcus pyogenes
gtgctagcgaagatagagctagacagacaaagcgaattgcggaacttacgcacaacggagggtaacatgattaagatcgatgagatacatcgcatactaggcatcgacgaagtttataaagcacccaaacgacttacggacatactctttgataaagatagtcgtgaggatatatttagacagtttttgaaatatgaaacagatgtatcttacgactggtttatgcaatattttgaggaagaacaagctgaccgcaaaaataaaaagcaagactttactcctaaatcggttagtacactattatctaaaataataagtggtaatcaatactacgaggtagcagtcgggacgggtgggatacttatccaagcatggcaagaacaacgattaaatgacagtccatttacttatcgtccgagtaaatactggtatcacgtagaagagttatcggacaaagcagtaccgtttctactctttaatatgtctataagagggataaatggtgtggtggtgcatggcgactctttaacaagacaagttaaaaacatttattttttgcaaaatacaaaagacgacatgctgagttttagtgatattaacgttatgccaaggactcaagatattgagcgagaatttaatgtcaaagagtggattggtgatgggatagaacacattgaaaatccactaattgaatggata

SEQ ID NO: 7636 - protein, 233 aa, Streptococcus pyogenes
VLAKIELDRQSELRNLRTTEGNMIKIDEIHRILGIDEVYKAPKRLTDILFDKDSREDIFRQFLKYETDVSYDWFMQYFEEEQADRKNKKQDFTPKSVSTLLSKIISGNQYYEVAVGTGGILIQAWQEQRLNDSPFTYRPSKYWYHVEELSDKAVPFLLFNMSIRGINGVVVHGDSLTRQVKNIYFLQNTKDDMLSFSDINVMPRTQDIEREFNVKEWIGDGIEHIENPLIEWI

SEQ ID NO: 7637 - DNA, 432 bp, Streptococcus pyogenes
atgacgttttttcctgagattgatatccaaaaaacaaaatccaatgccaagcgtaaattgagagagtatccacgctggcgaaggatagctaatgacgtagatactcaaaaagttacagctacttactcctttgagccaaggcaatcacatggggttcctagcaaaccggttgagagactagcgctaaaccgtgtgtcagcagaacaagagctggatgcgattgagcaagccgtcagtatgatactagagccagagagacgcaggattttgtatgacaaatacttagcgccttataaaaaggcagataaggttatttatacagaattgtgtatgtcagagagcttttactatgatacacttgacattgctttgttagcttttgcagagctgtacagagagggtgtgttgcttgttgaggaaggagtttttagc

SEQ ID NO: 7638 - protein, 144 aa, Streptococcus pyogenes
MTFFPEIDIQKTKSNAKRKLREYPRWRRIANDVDTQKVTATYSFEPRQSHGVPSKPVERLALNRVSAEQELDAIEQAVSMILEPERRRILYDKYLAPYKKADKVIYTELCMSESFYYDTLDIALLAFAELYREGVLLVEEGVFS

SEQ ID NO: 7639 - DNA, 144 bp, Streptococcus pyogenes
gtgggacgtgcaggttcgattccgactgttcctgtgaaaagctctaagaagcctacgggccttaggagcgatgaagttagagaattgcatatcgctctaactcaatatgcactagtcatcacaccgtggtggctttttattatg

SEQ ID NO: 7640 - protein, 48 aa, Streptococcus pyogenes
VGRAGSIPTVPVKSSKKPTGLRSDEVRELHIALTQYALVITPWWLFIM

SEQ ID NO: 7641 - DNA, 1164 bp, Streptococcus pyogenes
atggagtttgtggacaaaaaattaagtgaaataacaccttataaaaataaccctagaaacaatgatgaggctgttggaccagttgctgaatctattaaagagtttggttttaaagtgcctattgtcgttgataaaaacggcgaaatcgtaaacggccacactcgttataaagcagcccaaaaattagggctagaaacagttcctgttattgtcgcagatgacttatctgaagagcaaattaaagcgttcagacttgctgacaataaagttggtgagattgcggtttgggatttagatttgttaaacgaagaattaaacgacattttagacctcgatatgtctgcttttggatttgacgttttagataatttagatgatttaatcgaagatgaaaaagatttagacgattttacagggactgtgccagatgagccaaagtcaaaacttggtgacatttatcaacttggtagtcacaagttgatgtgcggcgacagtacaaatggagccgatgttaaaaaacttatgaatggagaattagctgatttactacttacagacccaccatacaacgtggcttatgagggtaaaacaaaagatagtttaactataaaaaacgacagtatggataatgacagttttagacagttcttggttaatgcttttagttctgcaaatgaagttatgaagccaggcgctgttttttatatttggcatgctgattcagaaggctataattttagaggtgcttgttttgatatcggttggacagtacgtcaatgcttaatttggaataaaaactcaatggttctcggtcgccaagattatcattggaagcacgaaccttgtctttatggctggaaagatggcgctggtcacttgtgggcttcagacagaaagcaaacatcagttattgattatgagaaacctcaacgaaatggcgttcatccaacaatgaaacctgtcggactttttgattaccaaatcaaaaacaacacaaagggaagcgacattgtccttgatttgtttggtggctctgggacaacgttaattgcttgtgagtcaaatggtcgtcacgctagattaatggaatatgacccaaaatatgtagatgtcattataaaacgctgggaagaattaactggagaaagtgttatacaactaaac

SEQ ID NO: 7642 - protein, 388 aa, Streptococcus pyogenes
MEFVDKKLSEITPYKNNPRNNDEAVGPVAESIKEFGFKVPIVVDKNGEIVNGHTRYKAAQKLGLETVPVIVADDLSEEQIKAFRLADNKVGEIAVWDLDLLNEELNDILDLDMSAFGFDVLDNLDDLIEDEKDLDDFTGTVPDEPKSKLGDIYQLGSHKLMCGDSTNGADVKKLMNGELADLLLTDPPYNVAYEGKTKDSLTIKNDSMDNDSFRQFLVNAFSSANEVMKPGAVFYIWHADSEGYNFRGACFDIGWTVRQCLIWNKNSMVLGRQDYHWKHEPCLYGWKDGAGHLWASDRKQTSVIDYEKPQRNGVHPTMKPVGLFDYQIKNNTKGSDIVLDLFGGSGTTLIACESNGRHARLMEYDPKYVDVIIKRWEELTGESVIQLN

SEQ ID NO: 7643 - DNA, 474 bp, Streptococcus pyogenes
atggcaaatgaagataatttgataccaaactccaaacgaaccccgagcgaactccgagaaattgcaaaaaaaggaggcatagcttccggcaaagctaggagggaaaaagcgaatttgagaaaagctgtggagctggtgttaggatcaactgtaccaagcgccttgcttcgagaacaattagaacaattggatatttcccccacaaatcaatcagctattgcactcaagcttgtggaaaatgctttaaagggtgatgttagatctgcagagctattagctaaaattacaactaccgaggtcaaagatagcctggatagaaaagaacaaagacagcgaattaaggccgcggagctcgccacagacgagcaacgaacgcgcatcgagctgcttaaagtcaaacttgacgcagagaagggcgctaagcctgatactagcttaatgagagccttgttagatgctgtggaaggaggtgat

SEQ ID NO: 7644 - protein, 158 aa, Streptococcus pyogenes
MANEDNLIPNSKRTPSELREIAKKGGIASGKARREKANLRKAVELVLGSTVPSALLREQLEQLDISPTNQSAIALKLVENALKGDVRSAELLAKITTTEVKDSLDRKEQRQRIKAAELATDEQRTRIELLKVKLDAEKGAKPDTSLMRALLDAVEGGD

SEQ ID NO: 7645 - DNA, 1209 bp, Streptococcus pyogenes
ttgacccctcgtagcggaaagaccacagctgggcattttcgttatgctaggtatctgattgagtcagaagatgaaaatcaccttgtgactgcttataatcaagaacaagcttatcgtttgtttatcgacggcgatggtacgggtttgatgcatatatttgacggtaactgtgaaataaaacacgacgagcgtggagatcacttgttaatcacgacaccaaaaggcaataagcgcgtttattataaaggcggcggtaaagttaacagtgttggtgctattacaggtatgtctttaggatcagtagtattctgcgagattaacttactgcacatggattttatccaggagtgttttaggcgtacttgggcggctaagctacgttatcatctagcagatttaaatcccccagcacctcaacatccagtaattaaagatgtctttgatgttcagaacacgaggtggactcattggaccatggatgataacccaatactaaccgcagagcgtaaacaaaacattatcaacagtcttaaaaaaaatccatatctatacaaacgagatgtacttggacagcgggtcatgcctcagggagttatttatggcctttttgacacggaaaaaaatgttttggatgctttgattggcgaaccagtagagatgtatttctgtgcagatggaggtcaatcagatgccacctctatgtcttgtaatatcgtaacaagagttagagataacggtaggataagcttcagacttaatcgtgtagctcactactaccacagcggagctgacactggccaagtaaaagctatgtcaacctacgctttagagttaaaagtttttatagactggtgcgttaaaaagtatcagatgcgctatacagaggtatttgtggatcctgcctgtaaatctttgagagaggagctgcataagttaggagtatttactctgggagctccgaacaattctaaagatgtatctagcaaagcaaaaggtattgaggtcggtatcgaacgcggccaaaacattatctcagatggcgctttttatcttgttaatcatagcgaagaagagtatgaccactaccactttttaaaagagatagggctgtacagtcgtgacgacaatggcaaacctattgataaagataaccatgccatggacgagtttagatacagcgtcaacgtgtttgtgcatcggtattacaac

SEQ ID NO: 7646 - protein, 403 aa, Streptococcus pyogenes
LTPRSGKTTAGHFRYARYLIESEDENHLVTAYNQEQAYRLFIDGDGTGLMHIFDGNCEIKHDERGDHLLITTPKGNKRVYYKGGGKVNSVGAITGMSLGSVVFCEINLLHMDFIQECFRRTWAAKLRYHLADLNPPAPQHPVIKDVFDVQNTRWTHWTMDDNPILTAERKQNIINSLKKNPYLYKRDVLGQRVMPQGVIYGLFDTEKNVLDALIGEPVEMYFCADGGQSDATSMSCNIVTRVRDNGRISFRLNRVAHYYHSGADTGQVKAMSTYALELKVFIDWCVKKYQMRYTEVFVDPACKSLREELHKLGVFTLGAPNNSKDVSSKAKGIEVGIERGQNIISDGAFYLVNHSEEEYDHYHFLKEIGLYSRDDNGKPIDKDNHAMDEFRYSVNVFVHRYYN

SEQ ID NO: 7647 - DNA, 1500 bp, Streptococcus pyogenes
atgggagtaatccaaaaaataaaaaatcttgttacaaggagtaaatacgtgatgacaacgcagagtcttacaaatataactgatcatcctaaaatagctatcagtaagctagagtacgatcgtataacaaccaatctaaagtattataagagcgattgggatagtgttttatacttaaacacggacggcgagactaaaaaaagagatcttaaccatctaccaattgcacggacagctgctaaaaagattgccagtctagtctttaacgagcaggcagagattaaggttgatgatgatgcggctaacgaatttattagtgagacactaaaaaacgacaggtttaataaaaacttcgagcggtatctggagagttgtttagcgttaggcggattagctatgaggccttatgtggatggtgataaagttagggtagcatttgttcaagcgcctgtttttttgccgctgcagagtaatacgcaagacgtttcgagtgccgccgtcgtcattaagtccgttaagacaatcaacggcaaagaggtctactataccttgatagagttccatgagtggcagagctctgatgattatgttatctcaaatgagttatatcgctcggatgataaagccaaagtaggtagccgagtgccgttatctgaggtatacaaggacttaaaagacgaggcaaaagttacagatgtgactaggcctatctttacttatctcaagacccctggaatgaataacaaggatattaatagcccacttgggctatctatctttgataacgccaagacaacgattgactttatcaatacgacctatgacgaatttatgtgggaagttaagatgggtcaacgtcgagttgctgtgccagagagtttgaccgctttaactgttcgtaccgctgatggcgatgttgttccaaggcctcggttcgagtctgatcaaaacgtttatatccgtatgggcggcagggatttagactcaagcgcaatacaggacctaacaacccctattagagctgatgactatatcaaggctatcaacgagggcttgtcgttgtttgaaatgcaaataggcgtatccgctgggttatttagttttgatggcaaaagcatgaagactgcaacagaaatcgtctctgaaaactcagacacctaccaaatgcgtaacagtattgttactttagtagagcaatcgctaaaagagttagttatctctatttttgagattgctaaagcttatgatttgtaccaaagcgaagttccaagcatggataacatcagcataagtcttgatgacggtgtttttacagatcgagacgctgagttagactactggataaaagttgttaatgctggctttggcactcgtgagatggccatccaaaaagtgctaaacgtgacagaggaaaaagcccaagaaatagctgcagaaattaatactggaatcgttgacgaaatcaatcaacagcgcactgatacacatttatacggagag

SEQ ID NO: 7648 - protein, 500 aa, Streptococcus pyogenes
MGVIQKIKNLVTRSKYVMTTQSLTNITDHPKIAISKLEYDRITTNLKYYKSDWDSVLYLNTDGETKKRDLNHLPIARTAAKKIASLVFNEQAEIKVDDDAANEFISETLKNDRFNKNFERYLESCLALGGLAMRPYVDGDKVRVAFVQAPVFLPLQSNTQDVSSAAVVIKSVKTINGKEVYYTLIEFHEWQSSDDYVISNELYRSDDKAKVGSRVPLSEVYKDLKDEAKVTDVTRPIFTYLKTPGMNNKDINSPLGLSIFDNAKTTIDFINTTYDEFMWEVKMGQRRVAVPESLTALTVRTADGDVVPRPRFESDQNVYIRMGGRDLDSSAIQDLTTPIRADDYIKAINEGLSLFEMQIGVSAGLFSFDGKSMKTATEIVSENSDTYQMRNSIVTLVEQSLKELVISIFEIAKAYDLYQSEVPSMDNISISLDDGVFTDRDAELDYWIKVVNAGFGTREMAIQKVLNVTEEKAQEIAAEINTGIVDEINQQRTDTHLYGE

SEQ ID NO: 7649 - DNA, 1491 bp, Streptococcus pyogenes
atgaaaaagaagcctattaagttaaatgacgaacagcttcttttggaagctagtcagttatctgatatgtatcatcagctgactcttgatttatttgatcaagtgattgagaggataaaagccagaggctcagcgagcttagccgataatccttatctttggcaagctaataagttacatgacgttggactgcttaatgcagataacatcaagcttattgcaaagtattctggcattgcggaagctcaacttcgctatattatcaagaatgaaggatttaaaatttataaaaacacgtctgagcagctagaagaggctctaggtagagagtctggggtaaacagtactatccaagacgacctatctaactatgctagacaagctattgatgatgtgcataatttgactaacaccaccttgccatttagtgttataggagcttatcaagggataatccaagacgctgttgctggtgtggtgacaggcttaaaaacgcctgaccaagctatcaatcaaactgtgattaaatggtttaaaaaggggttttatggttttacagataaagctgggagaaagtggagagcagactcttatgctcgtaccgttatcaatactacgacttggcgagtctttaacgaagccaaagaagcccctgctagggagtttggcattgataccttctattactcaaaaaaagctacagctagagagatgtgtgcacctttgcaacatcaaattgtcactactggcgaagcgagagaagaaggagggataaaaatcttagctttatctgattacgggcatggtgagcctgatggatgcttgggaatcaactgcaagcacactaaaacgccgtttgtcgtcggtgtgaatagtaagccagaattgccagagcatctaaaaaatatcactcctgcacaagctaaagctaatgcgaatgcgcaagctaagcagagggcaatcgagagatcaatacgtaagagtaaagagctactgcacgttgcgaagcaattgggtgataaagagttgattaggcaatatcaatcggatgttagaagtaaacaagatgcactcaattatctgataaacaacaatgcctttttacatcgcaatcaagccagagaaaagcgttacaataatccttataccaaaactcaaagtgaagtcgaagttagaaaagaaaaagctaaattagataaacgtagggatgttgaaagtgctataataggagtagaaactagtgaagggataccgctaaaaataacaaagcatttagccgaaagggcggtgctgagaaatatagcacctattgatattgtcgattctataaaagaaccgttgaagatagctcctattaagtacgataaccttgatagaccttcccagaaatacattggtaagtgtgtctcgacagtaataaacccgatagacggaaatattgttacagttcatgctactagcacgagaatccgcaaaaaatatggaggaaat

SEQ ID NO: 7650 - protein, 497 aa, Streptococcus pyogenes
MKKKPIKLNDEQLLLEASQLSDMYHQLTLDLFDQVIERIKARGSASLADNPYLWQANKLHDVGLLNADNIKLIAKYSGIAEAQLRYIIKNEGFKIYKNTSEQLEEALGRESGVNSTIQDDLSNYARQAIDDVHNLTNTTLPFSVIGAYQGIIQDAVAGVVTGLKTPDQAINQTVIKWFKKGFYGFTDKAGRKWRADSYARTVINTTTWRVFNEAKEAPAREFGIDTFYYSKKATAREMCAPLQHQIVTTGEAREEGGIKILALSDYGHGEPDGCLGINCKHTKTPFVVGVNSKPELPEHLKNITPAQAKANANAQAKQRAIERSIRKSKELLHVAKQLGDKELIRQYQSDVRSKQDALNYLINNNAFLHRNQAREKRYNNPYTKTQSEVEVRKEKAKLDKRRDVESAIIGVETSEGIPLKITKHLAERAVLRNIAPIDIVDSIKEPLKIAPIKYDNLDRPSQKYIGKCVSTVINPIDGNIVTVHATSTRIRKKYGGN

SEQ ID NO: 7651 - DNA, 228 bp, Streptococcus pyogenes
ttgatgaaattaaaaagtattttaaatgatagtcaaatcgattttgtcaaaaatgaacttccgggattacctgtggatatagatgttaattccgaaaagtatgatgttttttgtgaaggtatagagacttactaccagacagaaagctttgatgaaaagtacaatataacagctaaaggtaaactagctgagagtattattgatttactgactgataaaggttattgg

SEQ ID NO: 7652 - protein, 76 aa, Streptococcus pyogenes
LMKLKSILNDSQIDFVKNELPGLPVDIDVNSEKYDVFCEGIETYYQTESFDEKYNITAKGKLAESIIDLLTDKGYW

SEQ ID NO: 7653 - DNA, 264 bp, Streptococcus pyogenes
atgaataaacgcattaagaaaaaacgtaaactagaaacagcagttgtgatgcttgttgcagaaaatgccatgcaggttgaagcaattaaaaatcaaaacaaacaaatcatggagctaaaatcaatcgttcaacgaaacgctctggcaacaaacgaagagttagcgactgttaaagctgctactttagataaccaatcagttatcaaggcaattggtgacacggttgactatattaagaaaaactacaaacggaagtgggggaaa

SEQ ID NO: 7654 - protein, 88 aa, Streptococcus pyogenes
MNKRIKKKRKLETAVVMLVAENAMQVEAIKNQNKQIMELKSIVQRNALATNEELATVKAATLDNQSVIKAIGDTVDYIKKNYKRKWGK

SEQ ID NO: 7655 - DNA, 612 bp, Streptococcus pyogenes
atgcacatggaaaatgtgacaaacgaaaatgtcgaccaagagactactgacttggaaaataatcaacaagaagataaagcatttacacaagatgatctcaaccgagtgggaactaaagagcattctaaaggctataacaaagcagttaaagacttgggttttgatgatgtagagtctgccaaggatgcactaaaagccttccaagagtggcaagagtcacaaagaagcgagtcagaaaaacaaacagaaatcttgaatgctaaagacaaagagcttgaggaagctcgggcaaacaataaggctcttaatgcaaagctagcagcaatgtctttaggtgtgaacgctgaatctattgatgatgtgattgcactatctgagcgtcttgtcactgacgagacaagcatagaggatgcaatcaaaacggttttgggtaagtatcctcactttggccaaacaaaggataaagctcccaaaatcacagtggcaggcaacccgtctgctgataacggacaaggttcggtgtctaaggaagactttgcaaagatgtcttaccaagaaaaactggacctaaaactaaaaaataagaatctttatgaccaattgaaaggaaat

SEQ ID NO: 7656 - protein, 204 aa, Streptococcus pyogenes
MHMENVTNENVDQETTDLENNQQEDKAFTQDDLNRVGTKEHSKGYNKAVKDLGFDDVESAKDALKAFQEWQESQRSESEKQTEILNAKDKELEEARANNKALNAKLAAMSLGVNAESIDDVIALSERLVTDETSIEDAIKTVLGKYPHFGQTKDKAPKITVAGNPSADNGQGSVSKEDFAKMSYQEKLDLKLKNKNLYDQLKGN

SEQ ID NO: 7657 - DNA, 816 bp, Streptococcus pyogenes
atggcagtaggaacaactaaaatggcacaaatgctagaccctgaggttctagcggatatgattgacgcagaggtagggaaagcgattcgctttgctcctcttgctgaagtagatacaactttagaaggacaaccaggtacaactttaacagtgcctaaatgggattacattggtgacgcagaagatgttgccgagggtgaagctatcccaatgactcaacttggcttcaaaaagactactatgaccattaaaaaagccggaaaaggtgtagaaatcactgacgaagctatcttatctgggtatggggatcctgtaggtcaggcagcaaagcaaatcgttgaggctattgaccacaaagtcgatgcagacgtgcttgatgcgttaagtaaatcgactcaaactgtggaagctactgctacggttgatggtgtatctaaagcgctagatatttttaatgacgaagatgacgcagagacagtcattgtcatgaatccggcggatgcctctaccctacgtttagatgccgcgaaggagtggttaggtgctaccgaggttggagcaaatcgtgttgtctctggtgtttatggtgaagttttaggggtacaaattgtgcgttctcgcaaatgccctaaaggaactgcctacatggttcgcaaaggtgcactacgtatcatgcttaaacgtaacacaatggttgaaacagaccgagatatcacaaaagcgattaatcaaatcgtagctaataagcattatggtgtttatctttataaggcagaaaaagccgtcaaaattacacttaaagatgccgcaaaaaag

SEQ ID NO: 7658 - protein, 272 aa, Streptococcus pyogenes
MAVGTTKMAQMLDPEVLADMIDAEVGKAIRFAPLAEVDTTLEGQPGTTLTVPKWDYIGDAEDVAEGEAIPMTQLGFKKTTMTIKKAGKGVEITDEAILSGYGDPVGQAAKQIVEAIDHKVDADVLDALSKSTQTVEATATVDGVSKALDIFNDEDDAETVIVMNPADASTLRLDAAKEWLGATEVGANRVVSGVYGEVLGVQIVRSRKCPKGTAYMVRKGALRIMLKRNTMVETDRDITKAINQIVANKHYGVYLYKAEKAVKITLKDAAKK

SEQ ID NO: 7659 - DNA, 414 bp, Streptococcus pyogenes
atggaggtggttattatcgcttttttaacgcaaaaagaatttgaagatttgggttttgacgaggtagaagattttgaaaaaatggaaaaacgtgctagccacgctgtcaatctttactgtcgtaatcgctatgattacaaagatttaaaaaaagaaatagccctagtgcaaaaggctgtaaagcgggcaatcgcttatcagatagcatatttaaatgactcaggagtaatgacagcagaggataaacaatcctttgctggaatatctctaggacggacaagtattagctacactgtcgggcatggccaaggcagccaacaaaaaactctggcagacaggtttaatctctgtctagatgcagagaatgagttactagctgttgggttgggatatacgggtattagctatgatcga

SEQ ID NO: 7660 - protein, 138 aa, Streptococcus pyogenes
MEVVIIAFLTQKEFEDLGFDEVEDFEKMEKRASHAVNLYCRNRYDYKDLKKEIALVQKAVKRAIAYQIAYLNDSGVMTAEDKQSFAGISLGRTSISYTVGHGQGSQQKTLADRFNLCLDAENELLAVGLGYTGISYDR

SEQ ID NO: 7661 - DNA, 357 bp, Streptococcus pyogenes
ttgggttgggatatacgggtattagctatgatcgataaaagactgcttattgacgaactgcaggtaaaacttgtcaaagataaaggtgattatggagggtttgtctatgacgaaccttttacactctctcccgttaggtttgaccgtaatcttgcaaccgcaggtaaagataatgcaaggcaagagactaagccgtcggttatctttatttatcctaaatactgtaagacagtagccgataggtcatgggttgatgctgttgtcattgatggtgatactgagtacaccgttgataaagtgataccagtctaccacccactaacaaacaaaattttttgttttgaagtggaggttatc

SEQ ID NO: 7662 - protein, 119 aa, Streptococcus pyogenes
LGWDIRVLAMIDKRLLIDELQVKLVKDKGDYGGFVYDEPFTLSPVRFDRNLATAGKDNARQETKPSVIFIYPKYCKTVADRSWVDAVVIDGDTEYTVDKVIPVYHPLTNKIFCFEVEVI

SEQ ID NO: 7663 - DNA, 354 bp, Streptococcus pyogenes
atggctaaggtagtggtagagttgggaggcatcaagcgtaaagtatctccgcaagcattagctaaaggaaagctcatcatgaacaaccaagtcatgatgtccatgaacccttatgttccttacagagacggagctttgagaggaagctcgagagctaacagtgtaggtgtaacgtggagcggaccacacgccagagcccagttttatggtggtgcttacaacaagtacaagtcctttaaatttaaaaagtacacaacaccaggtacaggcaaacgttgggataaacgtgcgttagctaatgcaacaattgtcaaggattgggaaaaatccttactgagaggaatgggatttaaa

SEQ ID NO: 7664 - protein, 118 aa, Streptococcus pyogenes
MAKVVVELGGIKRKVSPQALAKGKLIMNNQVMMSMNPYVPYRDGALRGSSRANSVGVTWSGPHARAQFYGGAYNKYKSFKFKKYTTPGTGKRWDKRALANATIVKDWEKSLLRGMGFK

SEQ ID NO: 7665 - DNA, 396 bp, Streptococcus pyogenes
atgacaaatgactttgcaactgttttgaggcaatttgtcgaaggattagacttaggcataaagcccagacttgactatctaacaagacaagaagatttagccatttatccaatgccaggtgggaaggtaaataacgagtacatggacggtactcgtgagataagcctgccttttgagattgcaatcaaaactaaaaatcaggagttagcaagcactgtgatgtggactattaacagtgctttgtctaactttgacttaaaattaccaagtcttaatcattcgtacacatttattagccttgatgtcgaaaagccgtttttaaatgacttaagcgatcaaggtttttatatttatgtgctggatattacagcacacttagaaatagaagggaataac

SEQ ID NO: 7666 - protein, 132 aa, Streptococcus pyogenes
MTNDFATVLRQFVEGLDLGIKPRLDYLTRQEDLAIYPMPGGKVNNEYMDGTREISLPFEIAIKTKNQELASTVMWTINSALSNFDLKLPSLNHSYTFISLDVEKPFLNDLSDQGFYIYVLDITAHLEIEGNN

SEQ ID NO: 7667 - DNA, 393 bp, Streptococcus pyogenes
atgagacaaaagaacgccctacgtgggcattttatcgcaccttatgtaaaaggtgaggaaaagacagaagttacaaaagagaagcttttggaattggctagatggattaaagacatctcagacgataccgacgaaaagacagaagatgaggcgtactatgacggagatggaacagaagaaacaaccgttgtaggagttaagggcgcgtacactttcgaagggacgtatgatccagaagacaaagctcaagctcacattgcaagtcttaagtataagctaggagatgagcgaaaagtttggcatttgattgtatcggctgatgggaaaacccagtggctaggggttgcaacagtgacagaaattattgctggttctggtgctgccgcacgattt

SEQ ID NO: 7668 - protein, 131 aa, Streptococcus pyogenes
MRQKNALRGHFIAPYVKGEEKTEVTKEKLLELARWIKDISDDTDEKTEDEAYYDGDGTEETTVVGVKGAYTFEGTYDPEDKAQAHIASLKYKLGDERKVWHLIVSADGKTQWLGVATVTEIIAGSGAAARF

SEQ ID NO: 7669 - DNA, 432 bp, Streptococcus pyogenes
atgtctggaattgtagttgacctaaagcgcacagggtttccggtcaaaattgggcaggtagagctttggtttgatacaagccaagagcgattgattgagttttttgatattgagacagaagtaaatcgtcgcctcaatgaatacgaaaaacaggttatcgaagccaacttagacaacgaaattgaagataaaggggttacgaaagatgttgcccaaagtgctttagatttggaagctaaatacttagaaatcaattatgatctactattcggagaaggtacatttgcacagctctacgcggagtatcccgacaaagaagcactcgagaatactctggaaattgtttgcagggaaatcgaggtcaaactcaaagagttagctatcgaaagagaaaaaatcgttaagcagaaaacgaaaaagtacaaaaaggag

SEQ ID NO: 7670 - protein, 144 aa, Streptococcus pyogenes
MSGIVVDLKRTGFPVKIGQVELWFDTSQERLIEFFDIETEVNRRLNEYEKQVIEANLDNEIEDKGVTKDVAQSALDLEAKYLEINYDLLFGEGTFAQLYAEYPDKEALENTLEIVCREIEVKLKELAIEREKIVKQKTKKYKKE

SEQ ID NO: 7671 - DNA, 579 bp, Streptococcus pyogenes
atgaaactaaacgatccattagtagagtcgtttgagtttagaggtgaaatctatcctattgatttgagctttaacaaggttttagatgtctttgatgttattgatgatgattttttaaacgaggcggaaaagtgttttttgtgccttgatattttgctagataggacagatttaccttttacttacgcggtggatctttgggtttatatcaaaaccaattttatcgatgcagaaaggcccgagaaacctcagctcgacatcaaagggaatccaatgcctgtagtaaaagaaaaagaggataacaaaaaagtcattgatttgagtttagacgctgagtttatctatgcgagctttaggcaagcctaccaaatcaatcttttaaaagagcaaaacagattgtcttggattgaattcaaggctcttttaaatgctcttccagacgatactgtcatgcagcgtatcatagccattagacagtgggaagatgatggtgaaggcagtaaaaaatacagagataacatgcgtaagctaaaggctaagtacagtttagatgaaagagaggaggaggacgatggcagc

SEQ ID NO: 7672 - protein, 193 aa, Streptococcus pyogenes
MKLNDPLVESFEFRGEIYPIDLSFNKVLDVFDVIDDDFLNEAEKCFLCLDILLDRTDLPFTYAVDLWVYIKTNFIDAERPEKPQLDIKGNPMPVVKEKEDNKKVIDLSLDAEFIYASFRQAYQINLLKEQNRLSWIEFKALLNALPDDTVMQRIIAIRQWEDDGEGSKKYRDNMRKLKAKYSLDEREEEDDGS

SEQ ID NO: 7673 - DNA, 714 bp, Streptococcus pyogenes
atgacagcttttatcaagtttgatggtaaaaaatcttcagattttgatttgagaattattaatgacgttgagcatgactcgtccttttacgatgttgatcaagttaaggtacctggtcgtgatggtgtggttttaaaggacaataaaaggcttgaggctattgaacggtcttaccctttacgtctatatagcaaaagacgactcaccgaagtagaaactgacataagcaattggctgaatgtaaaaggttggaaagacttagagttgtcatgggagcctgattatatctataaagcaacacatatcaccccttttagcataaaggaggttttaaggaatttcggcagactgaaaatcaacttcttaatccaccctatcaaatatttaaaaacaggtaagcaagaggtgcctctcgttaatggcggtactctacaaaatcccggcaatgttcaagctaaacctatcctaaaaatcaaaggcacaggcaatggtattttaaccattaatgactttgagacaggacttgaaaatgtgcagagcgagcttgttatagatatggaaaggcacctagtctataaagatgtcctatctgcttgggataatatcgtaagaacagaacgccaccgcatgccgttatttgacgttggacaaaataaaatctcgtggactggtagctttacaattaccgcagtgccaaactggggggttaaagta

SEQ ID NO: 7674 - protein, 238 aa, Streptococcus pyogenes
MTAFIKFDGKKSSDFDLRIINDVEHDSSFYDVDQVKVPGRDGVVLKDNKRLEAIERSYPLRLYSKRRLTEVETDISNWLNVKGWKDLELSWEPDYIYKATHITPFSIKEVLRNFGRLKINFLIHPIKYLKTGKQEVPLVNGGTLQNPGNVQAKPILKIKGTGNGILTINDFETGLENVQSELVIDMERHLVYKDVLSAWDNIVRTERHRMPLFDVGQNKISWTGSFTITAVPNWGVKV

SEQ ID NO: 7675 - DNA, 105 bp, Streptococcus pyogenes
atgtcactagctgttcttcgggttgtttatgctcgcctacatgcggcttaccagggggttcctcttgcggttttggttgtggcgtatatcttacgtaaggataga

SEQ ID NO: 7676 - protein, 35 aa, Streptococcus pyogenes
MSLAVLRVVYARLHAAYQGVPLAVLVVAYILRKDR

SEQ ID NO: 7677 - DNA, 1011 bp, Streptococcus pyogenes
atgagtgaaaatataccgctgcgagtccaatttaagcgcatgaaagccgccgagtgggctcgtagtgatgtcatcttactggagagcgagataggctttgagacagacacaggttttgccagagcaggtgatggccacaatcgatttagtgaccttggatacattagcccactcgattacaatctactgactaacaagccaaatatcgatggattagcgacaaaagtcgagaccgctcagaaactacaacaaaaagcagataaagagaccgtctatacaaaagctgaatcgaagcaagagcttgacaagaaattaaatctcaaaggtggcgttatgacaggtcaactaaaatttaagccagccgccactgttgcttattcctcgtcaacgggtggagcggtcaatattgacttgtcgtctaccagaggtgctggtgttgttgtctattctgacaatgataccagtgatgggccgttaatgagcttgcggacgggtaaagagacctttaatcaatcggcgctttttgtcgactataaggggacaacaaatgctgttaatattgcgatgcgtcagccaaccacccccaatttttcatcggcgcttaatattactagcggcaatgaaaatggtagtgcaatgcagctacgagggtcagaaaaagcgctaggaacgctaaaaattactcatgagaacccaagtattggagcggattatgataaaaatgcggcagcgttatccattgatattgtcaaaaagacaaacggtgcaggaacagccgctcagggaatctacattaactcaacctcaggcacgacagggaagttgcttaggattagaaaccttagtgatgataagttctacgtcaagtctgacggtggtttttatgccaaggaaacttcgcagattgatggcaacctgaaactcaaggaccccacagcgaatgatcatgcggcaaccaaagcttatgtagataaagcaatttctgagttaaaaaaactcatactaaaaaaa

SEQ ID NO: 7678 - protein, 337 aa, Streptococcus pyogenes
MSENIPLRVQFKRMKAAEWARSDVILLESEIGFETDTGFARAGDGHNRFSDLGYISPLDYNLLTNKPNIDGLATKVETAQKLQQKADKETVYTKAESKQELDKKLNLKGGVMTGQLKFKPAATVAYSSSTGGAVNIDLSSTRGAGVVVYSDNDTSDGPLMSLRTGKETFNQSALFVDYKGTTNAVNIAMRQPTTPNFSSALNITSGNENGSAMQLRGSEKALGTLKITHENPSIGADYDKNAAALSIDIVKKTNGAGTAAQGIYINSTSGTTGKLLRIRNLSDDKFYVKSDGGFYAKETSQIDGNLKLKDPTANDHAATKAYVDKAISELKKLILKK

SEQ ID NO: 7679 - DNA, 1884 bp, Streptococcus pyogenes
atgagcagagacccaacacttattttagacgagtcaaacctcgttattggtaaggatggacgtgtgcattacacatttaccacagaggacgacaacccaaaagtcagactagctagcaagtgtctaggcacagcgcattttaatcagctcatgattgagcgaggagaccaagctactagctatgttgcgccagtagtagttgagggtacaggtaatccgactggactatttaaagacctcaaagagattagcttagagctgacagatactgctaattcccagctttggtcaaaaatcaagctgactaaccgtggtatgttgcaggaatactacgacggtaagatcaagaccgagatagtcaactccgccagaggtgtcgctacacgtatcagcgaggatactgataaaaagctagcgctcatcaatgacaccattgatggtatcaggcgtgagtatcgagatgctgataggaagctatccgcaagctatcaggcaggcatcgaggggctaaaagccacaatggccaatgataaaatcggtttacaagctgagattaaagcctcagcacaagggctatcgcaaaagtatgatgatgagttgcgcaagctatcggctaagatcacaacaacctcaagcggcactacagaggcctacgagagtaagcttgcgggcttacgtgctgagtttactcgctcaaatcaaggcacgaggacagagctcgagtcacaaattagcgggctaagagcggtacagcagtcaacagctagccaaatctctcaagagattagagaccgtgaaggtgctgtcagtcgtgtgcagcagagtttggagagttaccaaaggcggatgcaggacgcagaagaaaactatagtagcttgacccatacggttagagggctacagagcgacgttggatctccgactggtaaaatccaatcgcgccttactcaactagcaggacaaattgagcagcgggttactagagatggtgtcatgagtattattagtggcgctggagacagcattaaattagctatccaaaaggctggcggcattaatgccaaaatgtctggtaatgagattatctcagcaattaacctcaactcctacggagtaacaatcgcaggtaaacacatcgctctcgatgggaatacgacggttaatggcacctttaccacaaaaatagccgaggctatcaagattagggctgatcagattattgcaggcacgattgacgctgctaggattagagtgattaaccttaacgcaagtagtatcgttggtttagacgctaactttatcaaagctaaaattggctatgctatcactgatttgctcgagggtaaggtcattaaggctcgtaatggagcgatgcttatcgacttaaatacagctaagatggactttaatagcgatgccacaattaattttaatagcaaaaacaatgccttagtacgtaaagatggcacacatactgcctttgtacattttagtaatgcgacgcccaaaggttatacagggtcagcgttgtatgcatcgatcgggataacctcatctggtgacggtgttaactcggcttcttccggtcgttttgcagggctaaggtcatttaggtacgctacgggatataatcacactgcggcagtcgaccagactgaaatttacggtgataatgttttagttgtggatgattttaatattactcggggatttaagtttagaccagacaagatgcaaaaaatgcttgacatgaacgacttgtatgcggctgtagtagccttaggccgctgttgggggcacttggctaacgtcggctggaatactgctcatagcaattttacaagtgctgtgaatagggaattgaataactacatcacaaaaatt

SEQ ID NO: 7680 - protein, 628 aa, Streptococcus pyogenes
MSRDPTLILDESNLVIGKDGRVHYTFTTEDDNPKVRLASKCLGTAHFNQLMIERGDQATSYVAPVVVEGTGNPTGLFKDLKEISLELTDTANSQLWSKIKLTNRGMLQEYYDGKIKTEIVNSARGVATRISEDTDKKLALINDTIDGIRREYRDADRKLSASYQAGIEGLKATMANDKIGLQAEIKASAQGLSQKYDDELRKLSAKITTTSSGTTEAYESKLAGLRAEFTRSNQGTRTELESQISGLRAVQQSTASQISQEIRDREGAVSRVQQSLESYQRRMQDAEENYSSLTHTVRGLQSDVGSPTGKIQSRLTQLAGQIEQRVTRDGVMSIISGAGDSIKLAIQKAGGINAKMSGNEIISAINLNSYGVTIAGKHIALDGNTTVNGTFTTKIAEAIKIRADQIIAGTIDAARIRVINLNASSIVGLDANFIKAKIGYAITDLLEGKVIKARNGAMLIDLNTAKMDFNSDATINFNSKNNALVRKDGTHTAFVHFSNATPKGYTGSALYASIGITSSGDGVNSASSGRFAGLRSFRYATGYNHTAAVDQTEIYGDNVLVVDDFNITRGFKFRPDKMQKMLDMNDLYAAVVALGRCWGHLANVGWNTAHSNFTSAVNRELNNYITKI

SEQ ID NO: 7681 - DNA, 429 bp, Streptococcus pyogenes
atgcaattaactattaaaaacaaagatttaaacacactatatcgtgtactagacaaaatcaaaatcactaatatgcgtgctaatcgtggccgtgctaagctactcgcaaaagtagtcgataaaatcaacgagtatgcaaaagatgagaccgacttaattgatatgtatgcagctaaggataaagatgacaaatttgtcattgatgagcacaaaaacatcaagctagcagaccccgctaaactcgacgagctcaacgacctactcaacgagctagcagacgaagaaattgtgattaaagggggtgagtactccaagcgatttattgactttttaaactttttagaagagtgtgaagatgaatttacatcatctgaaatcattcttatcgacaacattttggaacaatttgaagaaagtaaaaaaggagaa

SEQ ID NO: 7682 - protein, 143 aa, Streptococcus pyogenes
MQLTIKNKDLNTLYRVLDKIKITNMRANRGRAKLLAKVVDKINEYAKDETDLIDMYAAKDKDDKFVIDEHKNIKLADPAKLDELNDLLNELADEEIVIKGGEYSKRFIDFLNFLEECEDEFTSSEIILIDNILEQFEESKKGE

SEQ ID NO: 7683 - DNA, 615 bp, Streptococcus pyogenes
atgagaaattggaaagtgacaggaaaatacccacaatttgacagcacaggagcagtcgcaagcacacatattattatcactgctgaggatggctcagtcatctctcaaccaatcaagcaggacttaacctcaactaatgacacagagattatcaaagctactttggaagaatttaaaaaatctgaatacgttgaaatcgctatgggcgaagccgtgcaaaaagtagacgaccttgaaaaaatctcacaggaaaccgctaagaccgctaaaacagcccaaacagccgcaggattagctaaggtgtccgcagagcgtacacagcgaatgattaacttgcaaaccatccacatgttaacgagcggcggcaagattgattctgacatttataaaggcatgcttgagctaatcgagccagcccaaaaaggtgagtatcaagcctatgatgtctttacggtggtcgacagtactaaagaggaagacggagaggctggtgaaggtaacctagtcttcgtacacgttaacgaagcatttgagtatgacaaacaaaccttagaggagctagagtcagaagccaaagtaacagttatcaagtacgctgatttggttaaacaagat

SEQ ID NO: 7684 - protein, 205 aa, Streptococcus pyogenes
MRNWKVTGKYPQFDSTGAVASTHIIITAEDGSVISQPIKQDLTSTNDTEIIKATLEEFKKSEYVEIAMGEAVQKVDDLEKISQETAKTAKTAQTAAGLAKVSAERTQRMINLQTIHMLTSGGKIDSDIYKGMLELIEPAQKGEYQAYDVFTVVDSTKEEDGEAGEGNLVFVHVNEAFEYDKQTLEELESEAKVTVIKYADLVKQD

SEQ ID NO: 7685 - DNA, 273 bp, Streptococcus pyogenes
atggcaacagagttgatatttggcgttggtggctttattttagctatcgtcacgacttacaatatttttaatgcaaaatccatcaagcatgcgacagatattactttgttgcaatctgaggtagagcatttaaaaattgttacacgccaaaatgctcggcggcttgaagagcacgctgagcaaaataaaacgttgattacaatgacagagcaaattaaaaatttaacagatgatgttaaagatttaaaagatatgatgagaggagaaatcaaa

SEQ ID NO: 7686 - protein, 91 aa, Streptococcus pyogenes
MATELIFGVGGFILAIVTTYNIFNAKSIKHATDITLLQSEVEHLKIVTRQNARRLEEHAEQNKTLITMTEQIKNLTDDVKDLKDMMRGEIK

SEQ ID NO: 7687 - DNA, 225 bp, Streptococcus pyogenes
atgatcaatttaaaattacgactacaaaacaaagtaaccttgatggctattttgggagctatctttttactggcacagcaattaggtattaaactaccatcaaacatcgcagatattgcaaacacagctgtaacgcttttggtattgctcggtgttgtcacagatccaaccacgaaaggcctgtcagatagtgagcaagcattgacttaccatgagcccaaaaaa

SEQ ID NO: 7688 - protein, 75 aa, Streptococcus pyogenes
MINLKLRLQNKVTLMAILGAIFLLAQQLGIKLPSNIADIANTAVTLLVLLGVVTDPTTKGLSDSEQALTYHEPKK

SEQ ID NO: 7689 - DNA, 705 bp, Streptococcus pyogenes
atgaaaaagattaacatcatcaaaatagttttcataattacagtcatactgatttctactatttcacctatcatcaaaagtgactctaagaaagacatttcgaatgttaaaagtgatttactttatgcatacactataactccttatgattataaaaattgcagggtaaatttttcaacgacacacacattaaacattgatactcaaaaatatagagggaaagactattatattagttccgaaatgtcttatgaggcctctcaaaaatttaaacgagatgatcatgtagatgtttttggattattttatattcttaattctcacaccggtgagtacatctatggaggaattacgcctgctcaaaataataaagtaaatcataaattattgggaaatctatttatttcgggagaatctcaacagaacttaaataacaaaattattctagaaaaagatatcgtaactttccaggaaattgactttaaaatcagaaaataccttatggataattataaaatttatgacgctacttctccttatgtaagcggcagaatcgaaattggcacaaaagatgggaaacatgagcaaatagacttatttgactcaccaaatgaagggactagatcagatatttttgcaaaatataaagataatagaattatcaatatgaagaactttagtcatttcgatatttatcttgaaaaa

SEQ ID NO: 7690 - protein, 235 aa, Streptococcus pyogenes
MKKINIIKIVFIITVILISTISPIIKSDSKKDISNVKSDLLYAYTITPYDYKNCRVNFSTTHTLNIDTQKYRGKDYYISSEMSYEASQKFKRDDHVDVFGLFYILNSHTGEYIYGGITPAQNNKVNHKLLGNLFISGESQQNLNNKIILEKDIVTFQEIDFKIRKYLMDNYKIYDATSPYVSGRIEIGTKDGKHEQIDLFDSPNEGTRSDIFAKYKDNRIINMKNFSHFDIYLEK

SEQ ID NO: 7691 - DNA, 99 bp, Streptococcus pyogenes
ttgccaagagatttaggatttttaaaaaataaggaaagaaaagccttgtcaagtcattcaagttttgttacactagaatggttaataactatgatgcat

SEQ ID NO: 7692 - protein, 33 aa, Streptococcus pyogenes
LPRDLGFLKNKERKALSSHSSFVTLEWLITMMH

SEQ ID NO: 7693 - DNA, 99 bp, Streptococcus pyogenes
ttgttaaatgctcaaagacgtagctttgcagctttgctattttcaaaggaaacgaatccatttgccttgaaatcgcagcaaagtcgaactcgaaatgtc

SEQ ID NO: 7694 - protein, 33 aa, Streptococcus pyogenes
LLNAQRRSFAALLFSKETNPFALKSQQSRTRNV

SEQ ID NO: 7695 - DNA, 111 bp, Streptococcus pyogenes
gtgttaaaaaacaagaaagaaagtgatttttcttgcaaaaaacaaaggaagcttttcatgagattgctttttaagttgattaaaggcctagtttgtggtattatgaacatg

SEQ ID NO: 7696 - protein, 37 aa, Streptococcus pyogenes
VLKNKKESDFSCKKQRKLFMRLLFKLIKGLVCGIMNM

SEQ ID NO: 7697 - DNA, 588 bp, Streptococcus pyogenes
ttgtcagctatcatccgtcaatctacctctaaacgtatctctgacaagcgtgggatctacttagtggaaaaacttgtctcattagccaagcagtcttattttactgttacgaaaacctctccgatgatagaagaggttcgctactatgccaaagaattacttagactttctgaacgtcgtcaagctatttttgataagatggtggcgtcggctcaacctttaccagaagacaagattctacgctctattccaagtatcgtagaaacaactgcaacaagtattattggcgaactcggtgctattcgtcgttttcaatctgctaatcaaattaatgctttcattgggattgactttagacattatgagtctggcaactatctagctcaagagcacattaccaaacgtgggaatccttatgctccaaagattcttttcaagtgtatccatgacattgcttttgctagtcataccaatccttgtcatatcgcagacttctatgagaaacgaaaaaggcaatcgcaaacagcttcaaccaagccacatacgattgcctctagacattgccttgtcagacaatgctttacctca

SEQ ID NO: 7698 - protein, 196 aa, Streptococcus pyogenes
LSAIIRQSTSKRISDKRGIYLVEKLVSLAKQSYFTVTKTSPMIEEVRYYAKELLRLSERRQAIFDKMVASAQPLPEDKILRSIPSIVETTATSIIGELGAIRRFQSANQINAFIGIDFRHYESGNYLAQEHITKRGNPYAPKILFKCIHDIAFASHTNPCHIADFYEKRKRQSQTASTKPHTIASRHCLVRQCFTS

SEQ ID NO: 7699 - DNA, 249 bp, Streptococcus pyogenes
gtgcgtaaagcggataagttagacactgaaaaattggctcagtctcaatttattctagttagaaaaccaacttacgttcaggaagaagtttatcagctgctacgtgacttgagtcgcttctatcaaaacttgactgaggataatattgttcgagagttaagaatcgccttcacaagatcttacaagtcacttttcctgaactggaacacatcttatttgcaccaactggtgagtaatactggaatgtgg

SEQ ID NO: 7700 - protein, 83 aa, Streptococcus pyogenes
VRKADKLDTEKLAQSQFILVRKPTYVQEEVYQLLRDLSRFYQNLTEDNIVRELRIAFTRSYKSLFLNWNTSYLHQLVSNTGMW

SEQ ID NO: 7701 - DNA, 123 bp, Streptococcus pyogenes
atggatgagcgcagaaggcatcgtggggaaactgccgtcttatcatttattgctcttcacgatacagttagaggaactcctaaaaacatatttgccaccgatacctgtctatcttttgaccaa

SEQ ID NO: 7702 - protein, 41 aa, Streptococcus pyogenes
MDERRRHRGETAVLSFIALHDTVRGTPKNIFATDTCLSFDQ

SEQ ID NO: 7703 - DNA, 948 bp, Streptococcus pyogenes
atgtcattttttacaaaggaacaacaacctaaagagaattgtccgccaataactgttgaaaaagcaaggcaattgtttgaatttaatacaaaccacttgtccttatcggattaccatcatcaaacggtgctaaaaacgtcaaagcagctagttgctcaacatttaatgcctaatgcaaccgataatcttagtcaacattttttgatgaactataaagctaataataattatttaggcttccaagctagtattgtcgacttttttacagattctgccgttgctaatttttcaagtagttacgtttatgaaagtcaggaaaagataattcgtttaccaaaacctaccaagatatcaactgctctgtcgacatgtattataaaacgaagaagtcatcgtcaattttcagatagacaaatgcctcttcaagatttatcaaacattctttattatgcatgtggtgttagttcacaagcatcaattagagatggagcatcagataagattacactcagaaactgtgcttcaggtggaggtttataccctattcatttagttttttatgctagaaacatcagtaaattaatagatggtttctatgaatatctaccctatcagcatgcactaaggtgttatcggcatagctctgaggaaaacgttagagattttgcggaatacggtgctattaatgctgaaaattgtaatattattattatttatgtctaccattacatgaaaaatacacgtaaatatgggaatcaggcgactgcctatgcttttattgaatcaggagaaatagcccagaatattcaattgactgcaactgccttaacttatggaagtattgatattggtggttataataaggaatatctccaagaattattagatttagatgggctaggagagcatgtgattcacatgacactcgtaggaactaaggagtctcaa

SEQ ID NO: 7704 - protein, 316 aa, Streptococcus pyogenes
MSFFTKEQQPKENCPPITVEKARQLFEFNTNHLSLSDYHHQTVLKTSKQLVAQHLMPNATDNLSQHFLMNYKANNNYLGFQASIVDFFTDSAVANFSSSYVYESQEKIIRLPKPTKISTALSTCIIKRRSHRQFSDRQMPLQDLSNILYYACGVSSQASIRDGASDKITLRNCASGGGLYPIHLVFYARNISKLIDGFYEYLPYQHALRCYRHSSEENVRDFAEYGAINAENCNIIIIYVYHYMKNTRKYGNQATAYAFIESGEIAQNIQLTATALTYGSIDIGGYNKEYLQELLDLDGLGEHVIHMTLVGTKESQ

SEQ ID NO: 7705 - DNA, 1056 bp, Streptococcus pyogenes
atgaaatatcaacttaatagtaatgttcgtgtcgtgacatttcaagatacattttgttttagaaaaggaatctgggactttaatgaagccattctagatttgacacaagaacctcaaaatttaaagatagtttatcaagaaatagtttcacagttggttaagggagtagccattgatactgaaacttatgaaaatactttagaacctgagacgttcgctaatttaatggaagtcatttcaggcttgtattacaatgatatgctgatgcttgaggatgactacaatcttgaagaaaatgtcatgaaaattttaatgggtaatttccgttttatggcgcaagcaggtcatatggtaagcaatgatcctgttttgtttatcagtgattcgacttatgttaatgaatctgctgagttgctagctgaacaactgcatttacaattgcaagtggctagtgatgacttaaaaatgttaattcagcagacagatgttagttcgcgtttagatgctttggagcatcgccgtaacatgaattgtttatcagatgccttgtgcgattaccaaagtattattatttgtcaagaacgcttgaatattatgatgttgcgacacttgaatgaagttagcgtagctatgaaaaaacaattagtgattggttttgtagatggaccattcttgcacacttgtactttgaatcctccccatagtgctgactttgatagcttagaaagaagagttttggcacgtttacaagactcaactctctatcaacattttgctaatcaggttttaccagccacacaagatgtgagccaggcctatttaccattgttaaatgttttaatgaatttagtcgttagcgaagctttcattattgctcaaacaggtagttctaaatttgagggacgtttattaagcatttacttaccgacgcttgagattcaggtccaagatattttgaaaatgtctaattcacagacacaaggagctttggcaaaattaaagtatgaggatcagcagatatcaacacgtgagattgttaaaaaactccttgacgag

SEQ ID NO: 7706 - protein, 352 aa, Streptococcus pyogenes
MKYQLNSNVRVVTFQDTFCFRKGIWDFNEAILDLTQEPQNLKIVYQEIVSQLVKGVAIDTETYENTLEPETFANLMEVISGLYYNDMLMLEDDYNLEENVMKILMGNFRFMAQAGHMVSNDPVLFISDSTYVNESAELLAEQLHLQLQVASDDLKMLIQQTDVSSRLDALEHRRNMNCLSDALCDYQSIIICQERLNIMMLRHLNEVSVAMKKQLVIGFVDGPFLHTCTLNPPHSADFDSLERRVLARLQDSTLYQHFANQVLPATQDVSQAYLPLLNVLMNLVVSEAFIIAQTGSSKFEGRLLSIYLPTLEIQVQDILKMSNSQTQGALAKLKYEDQQISTREIVKKLLDE

SEQ ID NO: 7707 - DNA, 1356 bp, Streptococcus pyogenes
atgttatactattatccttcttttaatcatatttttgatgaattaaaaagtttaagtggcaatcgaacaggtatcttaaatcaatctcaagttccagtttgcaaccatcctcacgatgtttacttaaaaagtattactggccaaatgccagattatcataaacaatttataggtgagttgagtcaagttagttatcacattattggttacggcagttactatgaagaagcacttatcaagtatttaggagaaagtattgaacgctatgctactgtaattgccggagacttactatcagatcggattgtctatgcttcttataatgagttaaaactgttacataaagtgatgcctttagaatacttgcaagtgtttacccaagaacagatcgcattatcttgtgacttgcaaatgatgatgtgcgataaaatggtaactgagaacgatgtattgggctgggttaaatgtcccatgttctttgaggacgcagagatgtatgttccagctcaaatgctttgtgttgggtataaaacaaatgagactgtaggagaaagacggataataccaggattttctacgggaacagcttctcacaaaacgttagaagcggctatgtgcaacagtttgattgaatacatccagatcgattcaatgatgcttagctggtatactaagaagccttgccccaagattattgttgatgatcctgatattgaagtgattttagaagaagctagactgggaaaagacagtctatacgacattattcctattgatatgactgtaggagaagataatcctctttatacgtttggaatcattctcaaaaataaatatgatgaagggccttacctcttgtttggagtgcaggctgggttagatcctaaacatgctttgctaagagggatcatggaagcttcagctattagctatagttactactataatcttttatatcaaaaagcttcccttgcaaatattgaatgcgaagaacctttgtttttagatttagatagtaatgtcttctattatgcacatcccaaggaccaagaccataaatggaaggcctttgaacctttgatttcaggagaagttctgttaagtgatttggaagatcattctggtaaagataaaaaagaagatttgaagactttattagcttatgctaagaaagtcagtcctaatgctgtctttttagatattacacctcctgaagctctagaaaaaggctggtacgtcacgcgagttctgatgccagaacttcttgaaatgtgtataccagcatttccttttgctaatcatccacgaatgagacagtttggaggtgtaacaaatgcctttgtccatccaatgcct

SEQ ID NO: 7708 - protein, 452 aa, Streptococcus pyogenes
MLYYYPSFNHIFDELKSLSGNRTGILNQSQVPVCNHPHDVYLKSITGQMPDYHKQFIGELSQVSYHIIGYGSYYEEALIKYLGESIERYATVIAGDLLSDRIVYASYNELKLLHKVMPLEYLQVFTQEQIALSCDLQMMMCDKMVTENDVLGWVKCPMFFEDAEMYVPAQMLCVGYKTNETVGERRIIPGFSTGTASHKTLEAAMCNSLIEYIQIDSMMLSWYTKKPCPKIIVDDPDIEVILEEARLGKDSLYDIIPIDMTVGEDNPLYTFGIILKNKYDEGPYLLFGVQAGLDPKHALLRGIMEASAISYSYYYNLLYQKASLANIECEEPLFLDLDSNVFYYAHPKDQDHKWKAFEPLISGEVLLSDLEDHSGKDKKEDLKTLLAYAKKVSPNAVFLDITPPEALEKGWYVTRVLMPELLEMCIPAFPFANHPRMRQFGGVTNAFVHPMP

SEQ ID NO: 7709 - DNA, 669 bp, Streptococcus pyogenes
atgcctttgtccatccaatgccttaatctttgttttttgttggtaactttttgtccttcaattcctatgcaagctatttttggaaaggaagatagtggttatgcatttaatttaattggttttctaagagcaactctgatttatgacattttggctttggtaagtatttatgttttgtcacctcaaataaccttgtctcttgaaagtattgatagtaagacgttctttatgggacttgtattttgcgtcttgatagtactgattgaactcgttttcttacatggtttacgttgttggcaaaaaaagcaatggcttcctgcaactttctcgtttgtaggaacgacaaatgattggtctaagattggctatcctttattactagctttatttgaagagacgatttatcgttttttgtggtttaatatattagcttttcaatggcatttaccaacaattattgttttaattgtaactagtttttgctatgctttaaatcacttattgatggggaaatccattttttatgctaagttggtaacaggcatcatttatggtagtatttacatgctgactagtcaattgtggttggttgtgataatgcatgtaggaggtaacttgctagttgagtgtcttagccatcttcaaacaaaaaagaagaaggaggtgaca

SEQ ID NO: 7710 - protein, 223 aa, Streptococcus pyogenes
MPLSIQCLNLCFLLVTFCPSIPMQAIFGKEDSGYAFNLIGFLRATLIYDILALVSIYVLSPQITLSLESIDSKTFFMGLVFCVLIVLIELVFLHGLRCWQKKQWLPATFSFVGTTNDWSKIGYPLLLALFEETIYRFLWFNILAFQWHLPTIIVLIVTSFCYALNHLLMGKSIFYAKLVTGIIYGSIYMLTSQLWLVVIMHVGGNLLVECLSHLQTKKKKEVT

SEQ ID NO: 7711 - DNA, 681 bp, Streptococcus pyogenes
atgatgctattggttttgctgtcgtttttaggtctaactactctttggttgaccagttatcgaagacgttgtttggctagatggcatcttcaatggttagtggccttatcctatcaagattttttagatgtcttactgagtctgtttcaatttgtcgttattatacttgttttattcttttactcagctactattaatctaggagaggttctgacctttttgacacaaactagctggcattggcagattctttgttatttagtgttatatcttatggccatcatagagatgacgcttttagttttaattcttatctttgatgttttgctccagaaagacagtcgattgctctttaaaaaaataacttggctgccttttagacaagataaaccagtcttaagtatacttttactaggcacagttattctagtagacagtctcttttatttgggcttgcttatattattaggagaacagtcgctaacaagtttagcaacgcttattttaggttatgggatagtcaaggcttgtcgctattcaggttggttaaatgtactattagctttttgtcttttcactatagttggactatgggcagttacggcaactttattatatggttggctagtaggtgcgatgatattaacggtgacttatttgatgattagttgcaaagagtat

SEQ ID NO: 7712 - protein, 227 aa, Streptococcus pyogenes
MMLLVLLSFLGLTTLWLTSYRRRCLARWHLQWLVALSYQDFLDVLLSLFQFVVIILVLFFYSATINLGEVLTFLTQTSWHWQILCYLVLYLMAIIEMTLLVLILIFDVLLQKDSRLLFKKITWLPFRQDKPVLSILLLGTVILVDSLFYLGLLILLGEQSLTSLATLILGYGIVKACRYSGWLNVLLAFCLFTIVGLWAVTATLLYGWLVGAMILTVTYLMISCKEY

SEQ ID NO: 7713 - DNA, 2730 bp, Streptococcus pyogenes
atgattaacaagaaatgtataatacctgtttcattgttgacactagctattacgcttactagtgttgaagaagttacttcacgccaaaatttgacttatgccaatgaaatcgtaacacaaaggccaaagagagaatctgttattagtgataaatcgaattttcccgtcatatcaccttacctagcaagtgtggattttggtgagagaaaaacacctttgccaacacctgataaaggagtaaaagtaactactgaacagtctattgctcaagtaagaaaggggcctgaagaaagaccctatactgttactggcaagattacgagtgtgatcaatggctggggaggctatggcttttatattcaagatagtgaaggtattggactttatgtttatcctcaaaaagatttaggatacagtaagggagatattgttcaattaacaggtacacttactcgctttaaaggtgatttacaactccaacaggtgactgcacacaaaaagttagagttatcttttccgacttctgttaaagaagcagtaatatcagaattagaaacaacaacaccctcaacattagttaagttatctcacgtgacagttggagaattatcaactgatcaatataacaacacatctttccttgtaagggatgatagtggtaaaagtatagttgttcatatagatcatcgtacaggggttaaaggggctgatgttgttactaaaataagtcagggtgatttgattaacctcacagccatattgtctattgttgatggtcaattacaattaagaccgttttctcttgaacaattggaagtggttaaaaaggtcacaagctcaaatagtgatgcttcatctcgtaatattgtgaaaataggcgagattcaaggagctagtcatacgtcgccacttctcaaaaaagcggtcaccgtagaacaggttgttgtcacttatttagacgattccactcatttttatgttcaagatcttaatggtgatggtgatttagcgacttcagatggtattcgtgtttttgctaaaaacgctaaggttcaagtcggcgatgttttgaccatttcaggtgaagtggaagaattctttggtcgtggttatgaggaacgtaagcagactgaccttaccatcacccaaattgtggctaaagcagtgaccaaaacagggacagctcaagttccatcaccgcttgttttagggaaagatcgtatcgcgccagccaatattattgataatgatggcttgcgtgtgtttgatccagaagaagacgctattgattattgggaatcaatggaaggcatgttagtggcggttgatgatgctaaaatccttggtccaatgaaaaataaagaaatttatgtcttacctggctctagtacaagaccgttaaataattcaggtggagtattacttccagctaattcttataacacagatgtgattcctgttcttttcaaaaaaggcaaacaaattattaaagcaggagactcttacaaaggaagattagctgggccagtatcttatagctatggtaattacaaggtctttgttgatgacagcaaaaacatgccaagtttaatggatggtcatctaaaacctgaaaaaacaaacttgcaaaaagaccttagcaagttaagcattgcttcttacaatattgaaaacttctcagccaatccttcttcaactaaagatgagaaggtcaaacggattgccgaatcctttattcatgatctgaatgctccagacattattggattaattgaagtccaagataataatgggccgactgatgatgggacaacggatgcgacacaaagcgcgcaacgcctcattgatgctattaaaaaactaggtggcccaacttatcgttatgttgatattgctccagaaaataatgttgacggaggtcaaccaggtggtaatattcgaacaggattcctttatcaaccagagcgcgtcagcctttctgataagccaaaaggcggtgctcgtgatgctctaacttgggttaatggagaattaaaccttagtgttggtcgaattgatccaactaacgccgcttggaaagatgttcgtaaatcactagcagcagaatttatcttccaaggtcgtaaagtcgttgttgttgcaaatcatttgaactctaagcgtggggataatgctctttatggttgtgtgcaaccagtcacttttaaatctgagcaaagacgtcacgtcttggctaatatgctagcacaatttgcgaaagaaggggcaaaacaccaagctaatattgtgatgctaggtgactttaatgattttgaattcacaaagacgattcaattaatcgaagaaggtgacatggttaacttggtgagccgacatgatatttcagatcggtattcttattttcaccaaggcaataatcagacccttgataatatattagtttcacgccatttacttgatcactacgaatttgacatggttcatgtgaattccccatttatggaagctcacggacgcgcatcagatcatgatccattgttacttcaattatcattttccaaagaaaatgataaggcagagtcttctaaacaaagtgtaaaagctaaaaaaacttcaaaaggaaaactgttgccaaaaacaggagatagtcttgtttatgtgataacgctactaggaacggctagtttattagtgcctattttattattgactaaaggcaaaaaggaatca

SEQ ID NO: 7714 - protein, 910 aa, Streptococcus pyogenes
MINKKCIIPVSLLTLAITLTSVEEVTSRQNLTYANEIVTQRPKRESVISDKSNFPVISPYLASVDFGERKTPLPTPDKGVKVTTEQSIAQVRKGPEERPYTVTGKITSVINGWGGYGFYIQDSEGIGLYVYPQKDLGYSKGDIVQLTGTLTRFKGDLQLQQVTAHKKLELSFPTSVKEAVISELETTTPSTLVKLSHVTVGELSTDQYNNTSFLVRDDSGKSIVVHIDHRTGVKGADVVTKISQGDLINLTAILSIVDGQLQLRPFSLEQLEVVKKVTSSNSDASSRNIVKIGEIQGASHTSPLLKKAVTVEQVVVTYLDDSTHFYVQDLNGDGDLATSDGIRVFAKNAKVQVGDVLTISGEVEEFFGRGYEERKQTDLTITQIVAKAVTKTGTAQVPSPLVLGKDRIAPANIIDNDGLRVFDPEEDAIDYWESMEGMLVAVDDAKILGPMKNKEIYVLPGSSTRPLNNSGGVLLPANSYNTDVIPVLFKKGKQIIKAGDSYKGRLAGPVSYSYGNYKVFVDDSKNMPSLMDGHLKPEKTNLQKDLSKLSIASYNIENFSANPSSTKDEKVKRIAESFIHDLNAPDIIGLIEVQDNNGPTDDGTTDATQSAQRLIDAIKKLGGPTYRYVDIAPENNVDGGQPGGNIRTGFLYQPERVSLSDKPKGGARDALTWVNGELNLSVGRIDPTNAAWKDVRKSLAAEFIFQGRKVVVVANHLNSKRGDNALYGCVQPVTFKSEQRRHVLANMLAQFAKEGAKHQANIVMLGDFNDFEFTKTIQLIEEGDMVNLVSRHDISDRYSYFHQGNNQTLDNILVSRHLLDHYEFDMVHVNSPFMEAHGRASDHDPLLLQLSFSKENDKAESSKQSVKAKKTSKGKLLPKTGDSLVYVITLLGTASLLVPILLLTKGKKES

SEQ ID NO: 7715 - DNA, 108 bp, Streptococcus pyogenes
ttgataacaaaagaagataacaataagacagctttacttgctaaagacttttgtcaagctaattgttttatggtacaatgtaaccgttgctttgcaacccttggtgct

SEQ ID NO: 7716 - protein, 36 aa, Streptococcus pyogenes
LITKEDNNKTALLAKDFCQANCFMVQCNRCFATLGA

SEQ ID NO: 7717 - DNA, 255 bp, Streptococcus pyogenes
atggtatgttataataatcctatggaattattaatgaagatcattgccttttcgtgtcatttattttttattggccttagttaccaattattgattagtgtgattgactggacaaaatttagtcattatcatccagaaaatcttggccggctacgactttttgtctttttattagctactgccctagggtatttggtgagccattgtatgctggaattgcttcaaattagccagacgctcttttttgagttccgc

SEQ ID NO: 7718 - protein, 85 aa, Streptococcus pyogenes
MVCYNNPMELLMKIIAFSCHLFFIGLSYQLLISVIDWTKFSHYHPENLGRLRLFVFLLATALGYLVSHCMLELLQISQTLFFEFR

SEQ ID NO: 7719 - DNA, 186 bp, Streptococcus pyogenes
atgacaaatggtttaaaatatgtcttagaacaaatgttattacttttcataattgctgccttggcgtgtctttttttagccattggacttatgattggttatagttttatgggagatggccagagtccatggcatattttatctatggataagtgggcagagttagtgaataaatttactggaaag

SEQ ID NO: 7720 - protein, 62 aa, Streptococcus pyogenes
MTNGLKYVLEQMLLLFIIAALACLFLAIGLMIGYSFMGDGQSPWHILSMDKWAELVNKFTGK

SEQ ID NO: 7721 - DNA, 411 bp, Streptococcus pyogenes
ttggagaaaaacatcagaaggtggaggaaaatcagaatgtatcaaacaaaaataacaggcaaccgcctttaccacacggtttcgaaaggctacggagatagtgtgaccttatttggaaaaactgatcaaggggaaacccctatgagtttactggttatcgccttgtcttcttgtgtgactatgtgtgtgcagggtttttaccatcgtcaatttcagcaagacacacttgctgtttctgttgaggctagttatgaggaagaagtttttgaactacttgttaggattgatgatgttttagatgacaaaaagaaagctgatttattggcttacattggaacttattgtcgtgtgaaacaactcctcaaacctgaagttacggtgaccattacgttggaaggactgtctcatgtc

SEQ ID NO: 7722 - protein, 137 aa, Streptococcus pyogenes
LEKNIRRWRKIRMYQTKITGNRLYHTVSKGYGDSVTLFGKTDQGETPMSLLVIALSSCVTMCVQGFYHRQFQQDTLAVSVEASYEEEVFELLVRIDDVLDDKKKADLLAYIGTYCRVKQLLKPEVTVTITLEGLSHV

SEQ ID NO: 7723 - DNA, 801 bp, Streptococcus pyogenes
atgaattttttaacaaagaaaaaccgtattttactgagagaaatggtaaaaacggattttaaattacgctatcaagggagcgcaattggctatctatggtctatcttaaaaccgcttatgatgtttacgattatgtacttggtatttattcgttttcttcgcctgggtggaaatgtacctcattttccagtagcgcttttattggcaaatgtcatctggtcttttttttcagaagcaactagcatgggaatggtatctattgtatctcggggagacttgttgcgaaaattgaacttttctaagcacatcattgttttttcggcagtgttaggagctttaattaattttcttattaatttggttgttgttttaatttttgcgttgataaatggtgtgactatatcagggtatgcttatctctctctttttctttttatagaattagttgttttagtgcttggaattgcattgttattgtcgaatgtctttgtttattatcgtgacttagctcaagtctgggaagtactattacaagcaggtatgtatgccactccaatcatttatccgatcacttttgttttagatagccaccctttggcggcaaagttgttgatgctaaatccagtagcacaaatgattcaagattttcgttatttattgattgacagggccaacgtaacgatttggcagatgtcaaccaattggttttacattgttattccatatttagtaccatttgttatattatttattggcatctttgtctttaagaaaaatgccgatagatttgcggagattatt

SEQ ID NO: 7724 - protein, 267 aa, Streptococcus pyogenes
MNFLTKKNRILLREMVKTDFKLRYQGSAIGYLWSILKPLMMFTIMYLVFIRFLRLGGNVPHFPVALLLANVIWSFFSEATSMGMVSIVSRGDLLRKLNFSKHIIVFSAVLGALINFLINLVVVLIFALINGVTISGYAYLSLFLFIELVVLVLGIALLLSNVFVYYRDLAQVWEVLLQAGMYATPIIYPITFVLDSHPLAAKLLMLNPVAQMIQDFRYLLIDRANVTIWQMSTNWFYIVIPYLVPFVILFIGIFVFKKNADRFAEII

SEQ ID NO: 7725 - DNA, 1743 bp, Streptococcus pyogenes
atgaatcgtattttattatatgttcacttcaacaaatacaataaaataagtgcacatgtttactatcaattggaacaaatgagatcactgttttctaagattgtttttatctcaaatagtaaagtgagtcacgaagatttaaaacgtctcaaaaaccactgtcttattgatgagtttttgcaacgcaaaaataaaggttttgatttttctgcatggcacgatggcttgattattatgggatttgacaagttggaagagtttgactcattgacgattatgaacgatacttgttttggtcctatttgggagatggctccttattttgaaaattttgaagaaaaagagacagttgacttttggggaattactaataatagaggtacaaaagcttttaaagaacatgtccaaagttattttatgacgtttaaaaatcaagtcattcaaaacaaagtttttcaacaattttggcaatcgataatagaatatgaaaacgttcaagaagtgattcagcattatgaaacgcaattaacatccattctcttaaatgaaggctttagttatcagacggtctttgatactagaaaagctgagtcgtcattcatgccacatccggatttttcatattataatccaacagcaattttaaaacaccatgtgccttttataaaagtaaaagctattgatgctaaccagcatatcgctccttacttattgaatctgatacgagaaacaaccaattatcctatagatcttattgtttcacatatgtcgcaaatctctttgccagatactaagtaccttttatctcaaaaatacctaaactgccaacggttagcaaaacaaacttgtcaaaaggtagctgttcatttacatgttttttacgttgatttgctagatgaatttttaacagctttcgaaaactggaacttccattatgatctttttattacaacagatagtgatatcaaaagaaaagagatcaaagaaatacttcaaagaaaaggtaaaactgctgatatacgcgttacgggaaatagaggaagagatatttatccaatgttattactaaaagataaactttctcaatatgattatattggtcatttccatacgaaaaaatcaaaagaagctgatttttgggcaggagaatcttggcgaaaagaattgattgatatgctcgtgaaaccagcagatagtattcttagcgcttttgagacagatgatattggtattataatcgcagatattccaagtttttttagatttaataagattgtcaatgcttggaatgagcatttaatcgctcaagaaatgatgtctttgtggagaaaaatggatgttaaaaaacaaattgattttcaagctatggatacatttgttatgagttatggaacatttgtatggtttaaatacgatgctctaaaatcactttttgatttagaattaactcaaaatgatattccaagtgaacctttaccacaaaactctatattacatgcgattgagcggttacttgtctatatagcgtggggggattcttatgattttaggattgttaaaaatccctatgagttaacaccttttattgacaataaactgttaaatttacgtgaagatgaaggagctcatacctacgttaactttaatcaaatgggcggtatcaaaggagcattgaaatatattatcgttggtcccgctaaagcaatgaagtatatattcttgcgtttaatggagaaacttaaa

SEQ ID NO: 7726 - protein, 581 aa, Streptococcus pyogenes
MNRILLYVHFNKYNKISAHVYYQLEQMRSLFSKIVFISNSKVSHEDLKRLKNHCLIDEFLQRKNKGFDFSAWHDGLIIMGFDKLEEFDSLTIMNDTCFGPIWEMAPYFENFEEKETVDFWGITNNRGTKAFKEHVQSYFMTFKNQVIQNKVFQQFWQSIIEYENVQEVIQHYETQLTSILLNEGFSYQTVFDTRKAESSFMPHPDFSYYNPTAILKHHVPFIKVKAIDANQHIAPYLLNLIRETTNYPIDLIVSHMSQISLPDTKYLLSQKYLNCQRLAKQTCQKVAVHLHVFYVDLLDEFLTAFENWNFHYDLFITTDSDIKRKEIKEILQRKGKTADIRVTGNRGRDIYPMLLLKDKLSQYDYIGHFHTKKSKEADFWAGESWRKELIDMLVKPADSILSAFETDDIGIIIADIPSFFRFNKIVNAWNEHLIAQEMMSLWRKMDVKKQIDFQAMDTFVMSYGTFVWFKYDALKSLFDLELTQNDIPSEPLPQNSILHAIERLLVYIAWGDSYDFRIVKNPYELTPFIDNKLLNLREDEGAHTYVNFNQMGGIKGALKYIIVGPAKAMKYIFLRLMEKLK

SEQ ID NO: 7727 - DNA, 2472 bp, Streptococcus pyogenes
atgattaaagacacatttttaaaaaccaattggttaaatattagtcaccatattatccttcttgttttcggtttttatttcagtttttacagtttggcgaaagaactagtaagctccacggcacaaccggtaaactattatgctcatttactaaatgtttcttttgtgggatatattatatcactgattggattatcttattatttgagtcgccaagttagtcgacagttgtttttgaaaactagttttattgtgatatcttatctaattgtcagctattgggtacaaataacacagcacctgaatgataaacggtttgatatctggtcattaactaaaaatcaattttatcaatttcaagctctaccttctttactcattattttagtgatggccactttaataaaaatattggcagcatattttgcaatagaaaaagatagatttgggctattaggctatcaaggtaatactttttctgtagctctgattttagcagttgtgccaattaatgacatacatctgttaaaactaataagttctcgattttctgaattagtaacagcaggtaatagccaaattgcactgttaaaaataagtggactgttgatagttttacttgtcatatttgcaacaatcatatacgtggttttaaatgctctaaaacaccttaagtcaaataaaccttcattttcagtagcagctactactagtttgtttttagcattagtttttaactatacgttccagtatggagtaaaaggtgatgaagcattgctaggatattatgttttccctggagctactctttttcagatagtagctattacactagttgctcttttagcatacgtgataacgaatagatattggccaactaccttctttttgcttattctgggaacaattatttctgttgttaatgatttaaaagaatcaatgagaagcgagccgttattagtaactgattttgtttggttacaagaattaggtttagtgacaagctttgttaaaaaatcggtgattgtagaaatggttgtaggacttgctatttgtattgtggtagcttggtatctacatggccgagttttagcagggaaattatttatgagccctgtcaaacgggcaagtgctgtattaggtttatttattgtatcttgtagtatgttaataccattttcttatgaaaaagaaggtaaaatattatctggtcttccgattatttcggctttaaataatgataatgacataaactggttaggtttttcaacaaatgctaggtacaaatctttagcatatgtttggacaagacaggtgaccaagaaaataatggaaaaaccgacaaattatagccaagaaacaatagcgagtatcgctcagaagtaccaaaaattagcagaagatattaataaagacagaaaaaataatattgctgaccaaacggttatttatcttttaagtgaaagcttgtcagatcctgatagagtatcaaatgttactgttagccacgatgttttacctaatatcaaggcaatcaaaaatagcacaactgcgggactcatgcagtcagactcctacgggggtggaacggctaacatggagtttcaaacgttaacaagcttacctttttataatttttcttcttcagtatctgttctttattcagaagtctttcctaaaatggccaaacctcatacgattagtgagttttaccaaggaaaaaatcgtattgcgatgcatcctgctagtgctaacaattttaatagaaaaacagtttatagtaatttaggtttttccaaattcttagctctatcgggttctaaggataagtttaagaacattgaaaatgtcggtttattgactagcgataaaactgtctataataatattttatctttaattaatcctagtgaaagccaatttttctcagttattacaatgcaaaatcatattccttggtcatccgattatcctgaagaaattgttgctgaaggaaaaaatttcacggaagaagaaaatcacaacctaacaagttatgctcggttattatcgtttactgataaggaaacaagagcatttttagaaaaattaacacaaattaacaagcctatcacagtggtgttttacggagatcatttacccggtttatatcctgatagtgcttttaacaagcatattgaaaataaataccttactgattattttatttggagtaatggtactaacgagaaaaaaaatcatccgcttatcaactcaagtgattttactgcagctttatttgagcatactgattcaaaagtatcaccttactatgctttgttaacagaggtactgaataaagctagtgtcgataaatcaccagatagtcctgaagttaaagctattcagaatgatttaaaaaatatccaatacgatgtgactataggaaaaggttaccttttgaaacacaaaactttttttaagatatcacgt

SEQ ID NO: 7728 - protein, 824 aa, Streptococcus pyogenes
MIKDTFLKTNWLNISHHIILLVFGFYFSFYSLAKELVSSTAQPVNYYAHLLNVSFVGYIISLIGLSYYLSRQVSRQLFLKTSFIVISYLIVSYWVQITQHLNDKRFDIWSLTKNQFYQFQALPSLLIILVMATLIKILAAYFAIEKDRFGLLGYQGNTFSVALILAVVPINDIHLLKLISSRFSELVTAGNSQIALLKISGLLIVLLVIFATIIYVVLNALKHLKSNKPSFSVAATTSLFLALVFNYTFQYGVKGDEALLGYYVFPGATLFQIVAITLVALLAYVITNRYWPTTFFLLILGTIISVVNDLKESMRSEPLLVTDFVWLQELGLVTSFVKKSVIVEMVVGLAICIVVAWYLHGRVLAGKLFMSPVKRASAVLGLFIVSCSMLIPFSYEKEGKILSGLPIISALNNDNDINWLGFSTNARYKSLAYVWTRQVTKKIMEKPTNYSQETIASIAQKYQKLAEDINKDRKNNIADQTVIYLLSESLSDPDRVSNVTVSHDVLPNIKAIKNSTTAGLMQSDSYGGGTANMEFQTLTSLPFYNFSSSVSVLYSEVFPKMAKPHTISEFYQGKNRIAMHPASANNFNRKTVYSNLGFSKFLALSGSKDKFKNIENVGLLTSDKTVYNNILSLINPSESQFFSVITMQNHIPWSSDYPEEIVAEGKNFTEEENHNLTSYARLLSFTDKETRAFLEKLTQINKPITVVFYGDHLPGLYPDSAFNKHIENKYLTDYFIWSNGTNEKKNHPLINSSDFTAALFEHTDSKVSPYYALLTEVLNKASVDKSPDSPEVKAIQNDLKNIQYDVTIGKGYLLKHKTFFKISR

SEQ ID NO: 7729 - DNA, 186 bp, Streptococcus pyogenes
atgttaggtaaccacgtaaatagtaaaattaataaagctaaaataaaccacaataaagagtacttaatcgctagtttatcttttttgattaagttaatcaaaaagaaaacaaaggttaatacaataaaacttataaataaactggctgttaccgtcattttaacgatttcctttcaatctaacaac

SEQ ID NO: 7730 - protein, 62 aa, Streptococcus pyogenes
MLGNHVNSKINKAKINHNKEYLIASLSFLIKLIKKKTKVNTIKLINKLAVTVILTISFQSNN

SEQ ID NO: 7731 - DNA, 171 bp, Streptococcus pyogenes
atgtctcacttcctgggtattcattcaccaaccaatatgttattctttttaggtttttgtttgagtttagctattattttttcactgactaataatatttcacttcaaaatgataaagtaaaacgtctgacccaagaagtggcccttatgaaaaaagagaaaaccaatgat

SEQ ID NO: 7732 - protein, 57 aa, Streptococcus pyogenes
MSHFLGIHSPTNMLFFLGFCLSLAIIFSLTNNISLQNDKVKRLTQEVALMKKEKTND

SEQ ID NO: 7733 - DNA, 1284 bp, Streptococcus pyogenes
atgattaatccttcaaaacaaaaccaaacgatttttttatggaatatgttaggaagtttatcaacagctgtaatatcagttatattacttatggtggttactaggttactaacttcggctgattcagatatttacgcctttgcctattcttttgctaatatgatggtagttgttggactttttcaggttcgtaattatcaagcaacagatattaatgaaaaatattcctttagtcagtacttagtggcaagactgatgacttgtttattaatgttagccataacagtaatttatttaacgttaactaagacagatagctacaagagtacaattgtctttctagtctgtttctatagatcgacagatgctttttcggatttatatcagggaatgttccaacaacatgaacggctggatattgcaggtaaatcgctagcctacagaaatactcttatttttatggtgtacacagcaataatattatattccaaaaatcttactttagcattagtagctgtctgtatagtttcattagtttttataatgtattatgacattggtcattcgaaaaaatttcaaaagttgatgtttagtgaattattaagtaatatttcatttcaaaacagtttaaagttattaaaagaaagttttccactttttctaaacggttttttgattatctatatttatactcaaccaaaatacgctattgaactaatgacgactttaggtgaagttgctttgggctctcaaacaatttttaatattttatttatgccagcctttgttatgaatttgctaattttattttttagacctcatattacacagatggctattgctttaatcagaggtcaaataaaagagtttaataagatacaagttcaattgtttgcttatttaggagttttttcactgatagcgttagttggaagtggtttgtttggtattccctttttatcaatactatatggtactaaccttacggattattgggtagattttatgttgattatgctaggaggctcgattggtagttttgcgacagttatcgataatatcttaaccgctatgagaaaacagcaacttcttcttattccatatacaggaggatttttgatttcgttattaattaccaatctttttgttatgaaatatcatattttaggagctgctttgagctttttaataacaatgttggtttggttgggattatccattatgatttatctatttattatgaatagatttaagaagggaagagttaatgcaacaatctatgac

SEQ ID NO: 7734 - protein, 428 aa, Streptococcus pyogenes
MINPSKQNQTIFLWNMLGSLSTAVISVILLMVVTRLLTSADSDIYAFAYSFANMMVVVGLFQVRNYQATDINEKYSFSQYLVARLMTCLLMLAITVIYLTLTKTDSYKSTIVFLVCFYRSTDAFSDLYQGMFQQHERLDIAGKSLAYRNTLIFMVYTAIILYSKNLTLALVAVCIVSLVFIMYYDIGHSKKFQKLMFSELLSNISFQNSLKLLKESFPLFLNGFLIIYIYTQPKYAIELMTTLGEVALGSQTIFNILFMPAFVMNLLILFFRPHITQMAIALIRGQIKEFNKIQVQLFAYLGVFSLIALVGSGLFGIPFLSILYGTNLTDYWVDFMLIMLGGSIGSFATVIDNILTAMRKQQLLLIPYTGGFLISLLITNLFVMKYHILGAALSFLITMLVWLGLSIMIYLFIMNRFKKGRVNATIYD

SEQ ID NO: 7735 - DNA, 1494 bp, Streptococcus pyogenes
atgcaacaatctatgactaaagttaaatatctttggaaagaaaataataactatatttattcgacttttttgacattacttctgacagttattttatatgccaatagtttaaatctacctttaaaatttattagtcttctttttgtggtgagcactttactgatagtgtttttaccaaaaaagttagaggttgctacgatcatttttattttagtatttggaacgatatctgctatcatatcacctataaatgatattcctgatgaatatgttcattattcaaggacagtttatatctcagaaggtgatattaatcttaccaacaataacaaaaagttaagaatatccaaagatgttgataagcttattaaacagtcaggaaaaacatttataacatcaaacttgaaagcaactaaacacagcacaagagagtatagctatccttacatcaaaggaactaatgcatattatagtttttcttatataccacaagctttgggtattttagtaggaaatgcgctggatttacctatacttttaacatattatttcggaagattgtgcaaccttattagctacgctatgcttgcttttatagctatcaagttgtctggttcttttaaacaagtgatagctgttgttactttactacctatgaacatttatttagcagcatcttttaatcaagacggctttgctatcggtttagttttagtaacaattggattgtttattaacttgctctcatcaaaagataaatctaactataataccaaattcttcctttatttagttctatgtgggttactagttctttcaaaattcacatactttttattagtatgccttccattatttattcctaatgaaaaattcggaaaaaataccaagttagtcatcttgaaaaaattgggaggactattactcatttttctttttgctgcaatgtggtttagactttatggacaggttaaaaccccatatgtcgcggattttctaaaagaagtaaacgttagccagcaagttaaaaatatgctagaatcccctatagtctatagcagtattattattagacatatggtaattaatctgattaatatgaataatatttttcagtttggcgcattaagctatggtataacgaaccttttcccgctttatgtgtgtttcttcttttttgtttatattagtaatgctagtaaaataactattaatattgtagaaaaaatgggtataatctttgttatttcagcgattataggtgcaactgtattagctatgtacctgacttggacaccagtagggtcctcaactgtcttaggtgttcaaagtcgttatctgataggaattatcccattagtgttgcttctttttagtagtcaacagcaaaagttcaaacaaatagaggatatcctttctgacaaactggctattcatgtttcgcttttgtttattcttgcaatgttaatgagtactatttttagatattatcat

SEQ ID NO: 7736 - protein, 498 aa, Streptococcus pyogenes
MQQSMTKVKYLWKENNNYIYSTFLTLLLTVILYANSLNLPLKFISLLFVVSTLLIVFLPKKLEVATIIFILVFGTISAIISPINDIPDEYVHYSRTVYISEGDINLTNNNKKLRISKDVDKLIKQSGKTFITSNLKATKHSTREYSYPYIKGTNAYYSFSYIPQALGILVGNALDLPILLTYYFGRLCNLISYAMLAFIAIKLSGSFKQVIAVVTLLPMNIYLAASFNQDGFAIGLVLVTIGLFINLLSSKDKSNYNTKFFLYLVLCGLLVLSKFTYFLLVCLPLFIPNEKFGKNTKLVILKKLGGLLLIFLFAAMWFRLYGQVKTPYVADFLKEVNVSQQVKNMLESPIVYSSIIIRHMVINLINMNNIFQFGALSYGITNLFPLYVCFFFFVYISNASKITINIVEKMGIIFVISAIIGATVLAMYLTWTPVGSSTVLGVQSRYLIGIIPLVLLLFSSQQQKFKQIEDILSDKLAIHVSLLFILAMLMSTIFRYYH

SEQ ID NO: 7737 - DNA, 678 bp, Streptococcus pyogenes
atgaaagcaattaaaattgcgattgatgggccagcttcaagtggaaaaagtacagtagccaagattattgcaaaaaatcttggctatacttatctagatactggtgctatgtatcgctcagcaacttatatcgcactgacacatggctatacgggtaaagaagtagcccttatcttagaggaacttgagaaaaatcctattttctttaaaaaagcaaaagatggctcccaattagtttttcttggggatgaggacgtgaccttagccattaggcaaaatgatgtgactaacaatgtttcttggatctcagctttgccagaaattagagaagagctggttcatcaacaaagacgcattgcacaagctggtggcattatcatggatggtcgtgacattggaacggttgttctcccagatgcggaactaaaaatctttttagtggcttctgtcgaagagcgggcagagcgccgctataaagaaaacctagaaaaaggaattgaatcagattttgagacgctaaaagaagagattgcagctcgtgattacaaggatagtcatcgtaaggtttcacctctaaaagcagctgaagatgcccttatttttgataccacaggtgtttctattgatggcgtggtgcaatttatccaagaaaaagcagaaaaaatagttgacatgtcc

SEQ ID NO: 7738 - protein, 226 aa, Streptococcus pyogenes
MKAIKIAIDGPASSGKSTVAKIIAKNLGYTYLDTGAMYRSATYIALTHGYTGKEVALILEELEKNPIFFKKAKDGSQLVFLGDEDVTLAIRQNDVTNNVSWISALPEIREELVHQQRRIAQAGGIIMDGRDIGTVVLPDAELKIFLVASVEERAERRYKENLEKGIESDFETLKEEIAARDYKDSHRKVSPLKAAEDALIFDTTGVSIDGVVQFIQEKAEKIVDMS

SEQ ID NO: 7739 - DNA, 195 bp, Streptococcus pyogenes
atgccaaaacaaaaaacacaccgcgcatcagctaaacgttttaaacgtacaggttcaggcggtttgaaacgcttccgcgcctttacatcacaccgtttccacggaaaaactaaaaaacaacgtcgtcatcttcgtaaagctggtttggttagctcaggagatttcaaacgtatcaaagcaatggttactggtctt

SEQ ID NO: 7740 - protein, 65 aa, Streptococcus pyogenes
MPKQKTHRASAKRFKRTGSGGLKRFRAFTSHRFHGKTKKQRRHLRKAGLVSSGDFKRIKAMVTGL

SEQ ID NO: 7741 - DNA, 120 bp, Streptococcus pyogenes
ttggtcactttatttgactatatcacaaataagaaagaggctcaactttctgatacaaagaaaataaacactaaaaaacagatcctgacgagctgccagcaatctgtttttttcctatct

SEQ ID NO: 7742 - protein, 40 aa, Streptococcus pyogenes
LVTLFDYITNKKEAQLSDTKKINTKKQILTSCQQSVFFLS

SEQ ID NO: 7743 - DNA, 438 bp, Streptococcus pyogenes
atgtcatcacgttattcccgtcaacaaaaacctcgtaaatcaggaggtgtccctaccgagcatattaaaacaggttttacagctttccaaaaatccattgcacttattggtagtattttgagtatcatcgtggcaaccattaccatttcaagagcactgcagcctgtaccagataagacctctaatgatacacccaaagaatcgagtaataccattgtcaagattattgaaaaagagtcttctcagggtaatcaaaaccatacaggtacttcagaaaccacagatgataataagacaactcttccgtcatcttctaccacaccttctcacaacgagacaactcctacagctcctgagacaccatcagccactgaagggacgcaaattcctaatgcaactggagctgaagatgctaatactggtcttcctacgaaccct

SEQ ID NO: 7744 - protein, 146 aa, Streptococcus pyogenes
MSSRYSRQQKPRKSGGVPTEHIKTGFTAFQKSIALIGSILSIIVATITISRALQPVPDKTSNDTPKESSNTIVKIIEKESSQGNQNHTGTSETTDDNKTTLPSSSTTPSHNETTPTAPETPSATEGTQIPNATGAEDANTGLPTNP

SEQ ID NO: 7745 - DNA, 417 bp, Streptococcus pyogenes
ttgacgatgaccttgtttacggtggctaccttttttaggtttgtatttgaaagttacaactttcttttgttttccttgtttttcaacagttccaacgacagtagctccttcaacaactggagtaccaactacagttttgtcaccacctacaagaacaacttcgttaaaagtgacttctgcgccagcttcagcgtcaattttctcaacgtagattgcttgacctacttcaactttaacttgttttccaccagttttgatgattgcgtatgtgctcatgatgcacctcctataaaatttttgtttgaggtttccctctgtgaagactcgcctggaatcgtgagacttggtctacttgacaacgattttcgcgcggttgcacaggatgtgcatttagtcaacgttactattttagcacca

SEQ ID NO: 7746 - protein, 139 aa, Streptococcus pyogenes
LTMTLFTVATFFRFVFESYNFLLFSLFFNSSNDSSSFNNWSTNYSFVTTYKNNFVKSDFCASFSVNFLNVDCLTYFNFNLFSTSFDDCVCAHDAPPIKFLFEVSLCEDSPGIVRLGLLDNDFRAVAQDVHLVNVTILAP

SEQ ID NO: 7747 - DNA, 99 bp, Streptococcus pyogenes
atgagcgtagatattcatggtagtttggatagtttcacgaccaagtgtattggattttcttctatcctactaaagattgtagttgcttatttagagcaa

SEQ ID NO: 7748 - protein, 33 aa, Streptococcus pyogenes
MSVDIHGSLDSFTTKCIGFSSILLKIVVAYLEQ

SEQ ID NO: 7749 - DNA, 456 bp, Streptococcus pyogenes
atgaaaaaacgattgtttgtgcttagcttgatcctccttgtagctttggatcaacttagtaaattttggattgtttctcatatagcgcttggagaagtgaaaccctttatcccaggtatcgtcagcttgacttacttgcaaaacaatggggctgccttttccatattgcaggaccagcaatggttctttgttgtcataacggttttagttatcggttatgctatttattaccttgctactcatccccatttaaatatctggaaacaattagctctcttgcttattatttctggtggaatcgggaattttattgatcgtttgcgtttagcttacgtgattgatatgattcatttagactttgtggattttgccatttttaatgtggcagattcataccttaccgttggtgtcatattattattgatatgtttatggaaagaagaggattatggaaat

SEQ ID NO: 7750 - protein, 152 aa, Streptococcus pyogenes
MKKRLFVLSLILLVALDQLSKFWIVSHIALGEVKPFIPGIVSLTYLQNNGAAFSILQDQQWFFVVITVLVIGYAIYYLATHPHLNIWKQLALLLIISGGIGNFIDRLRLAYVIDMIHLDFVDFAIFNVADSYLTVGVILLLICLWKEEDYGN

SEQ ID NO: 7751 - DNA, 135 bp, Streptococcus pyogenes
atgctttttagtattttttataatgttaaaaactttacacaaagatataagactaaaaataatggctactcctcgctgtttatttttttcttagcagctttaacaccttttgaaaaatttcgggagcttcaacag

SEQ ID NO: 7752 - protein, 45 aa, Streptococcus pyogenes
MLFSIFYNVKNFTQRYKTKNNGYSSLFIFFLAALTPFEKFRELQQ

SEQ ID NO: 7753 - DNA, 144 bp, Streptococcus pyogenes
ttgacagcctcacaggactgttttaaaggaatattttatttcaatcagtatagcaaaaaaagaaaagaaaaacaagtaaaaaagacaatacctagcatctatttggaatatctcttttctttaaggagtttaaataaagatctc

SEQ ID NO: 7754 - protein, 48 aa, Streptococcus pyogenes
LTASQDCFKGIFYFNQYSKKRKEKQVKKTIPSIYLEYLFSLRSLNKDL

SEQ ID NO: 7755 - DNA, 123 bp, Streptococcus pyogenes
ttgagaagtgctgactttaccgcttcttgtggtattcttggtatcattaattatgccaaaacgaaaagatattcaaaaaatcatggttatcgggtctggcccgattattattggacaagctgc

SEQ ID NO: 7756 - protein, 41 aa, Streptococcus pyogenes
LRSADFTASCGILGIINYAKTKRYSKNHGYRVWPDYYWTSC

SEQ ID NO: 7757 - DNA, 105 bp, Streptococcus pyogenes
ttgagatggattgaaaagcttgttgacttaaagtcaacaagctttttgaatagcaaaaatcttaatatttctgaaatgaaaagattagatttttctgtctttaac

SEQ ID NO: 7758 - protein, 35 aa, Streptococcus pyogenes
LRWIEKLVDLKSTSFLNSKNLNISEMKRLDFSVFN

SEQ ID NO: 7759 - DNA, 117 bp, Streptococcus pyogenes
ttgatatttatctttggactaaataagctaaaagctttggataaatatgatcaattgacctataataacattgataccaaatctaaaactgctcagattgaattgcgccccaaaagt

SEQ ID NO: 7760 - protein, 39 aa, Streptococcus pyogenes
LIFIFGLNKLKALDKYDQLTYNNIDTKSKTAQIELRPKS

SEQ ID NO: 7761 - DNA, 210 bp, Streptococcus pyogenes
ttgatggaatcaaaagaaatttatttgactaagtctccttatataagggggagtttagaaattcacagtaaaaataggaaacatgaaaaaatcaatttatatgacgcaaaacccaatagcaccagatctgatgtctttaaaaaatataaagacaataagactataaatatgaaagatttcagccattttgatatttatctttggactaaa

SEQ ID NO: 7762 - protein, 70 aa, Streptococcus pyogenes
LMESKEIYLTKSPYIRGSLEIHSKNRKHEKINLYDAKPNSTRSDVFKKYKDNKTINMKDFSHFDIYLWTK

SEQ ID NO: 7763 - DNA, 1017 bp, Streptococcus pyogenes
atgagaaaaagatgctattcaacttcagctgcagtattggcagcagtgactttatttgttctatcggtagatcgtggtgttatagcagatagtttttctgctaatcaagagattagatattcggaagtaacaccttatcacgttacttccgtttggaccaaaggagttactcctccagcaaacttcactcaaggtgaagatgtttttcacgctccttatgttgctaaccaaggatggtatgatattaccaaaacattcaatggaaaagacgatcttctttgcggggctgccacagcagggaatatgcttcactggtggttcgatcaaaacaaagaccaaattaaacgttatttggaagagcatccagaaaagcaaaaaataaacttcaatggcgaacagatgtttgacgtaaaagaagctatcgacactaaaaaccaccagctagatagtaaattatttgaatattttaaagaaaaagctttcccttatctatctactaaacacctaggagttttccctgatcatgtaattgatatgttcattaacggctaccgccttagtctaactaaccacggtccaacgccagtaaaagaaggtagtaaagatccccgaggtggtatttttgacgccgtatttacaagaggtgatcaaagtaagctattgacaagtcgtcatgattttaaagaaaaaaatctcaaagaaatcagtgatctcattaagaaagagttaaccgaaggcaaggctctaggcctatcacacacctacgctaacgtacgcatcaaccatgttataaacctgtggggagctgactttgattctaacgggaaccttaaagctatttatgtaacagactctgatagtaatgcatctattggtatgaagaaatactttgttggtgttaattccgctggaaaagtagctatttctgctaaagaaataaaagaagataatattggtgctcaagtactagggttatttacactttcaacagggcaagatagttggaatcagaccaat

SEQ ID NO: 7764 - protein, 339 aa, Streptococcus pyogenes
MRKRCYSTSAAVLAAVTLFVLSVDRGVIADSFSANQEIRYSEVTPYHVTSVWTKGVTPPANFTQGEDVFHAPYVANQGWYDITKTFNGKDDLLCGAATAGNMLHWWFDQNKDQIKRYLEEHPEKQKINFNGEQMFDVKEAIDTKNHQLDSKLFEYFKEKAFPYLSTKHLGVFPDHVIDMFINGYRLSLTNHGPTPVKEGSKDPRGGIFDAVFTRGDQSKLLTSRHDFKEKNLKEISDLIKKELTEGKALGLSHTYANVRINHVINLWGADFDSNGNLKAIYVTDSDSNASIGMKKYFVGVNSAGKVAISAKEIKEDNIGAQVLGLFTLSTGQDSWNQTN

SEQ ID NO: 7765 - DNA, 117 bp, Streptococcus pyogenes
gtggttgtgcttaaaaatgaacggttttttgatgatatgttgctgcatgaggaagtgagcaataggagagctgtgatagaagaaagaggggaagaagcgttgatgaaattagacaaa

SEQ ID NO: 7766 - protein, 39 aa, Streptococcus pyogenes
VVVLKNERFFDDMLLHEEVSNRRAVIEERGEEALMKLDK

SEQ ID NO: 7767 - DNA, 105 bp, Streptococcus pyogenes
atggcgcttcttttctatatattacgtgaggaaaaatcaagtaaaaaagttaagtcaactgaaaaacttgacagaaatattcagaaaatttataatactaactat

SEQ ID NO: 7768 - protein, 35 aa, Streptococcus pyogenes
MALLFYILREEKSSKKVKSTEKLDRNIQKIYNTNY

SEQ ID NO: 7769 - DNA, 192 bp, Streptococcus pyogenes
gtgaggaaaaatcaagtaaaaaagttaagtcaactgaaaaacttgacagaaatattcagaaaatttataatactaactattaacaacatatcagctattaaagcatttcaaacagcaggtgttttgtttggacctatcaaggctgcaaatgcaagagaaagcagtatctggtttgaaaatctcacaaagcaa

SEQ ID NO: 7770 - protein, 64 aa, Streptococcus pyogenes
VRKNQVKKLSQLKNLTEIFRKFIILTINNISAIKAFQTAGVLFGPIKAANARESSIWFENLTKQ

SEQ ID NO: 7771 - DNA, 168 bp, Streptococcus pyogenes
atgcaacgtagtatttttggagtatttacggcttttttgtgcgtgatttgtgttctttgtgccattccagcttttaaaaagaatcgttatggcttagcaagtctgttcttattaaatgcgtttactaatctggttaatagtattcacgccttctatggtacattgttt

SEQ ID NO: 7772 - protein, 56 aa, Streptococcus pyogenes
MQRSIFGVFTAFLCVICVLCAIPAFKKNRYGLASLFLLNAFTNLVNSIHAFYGTLF

SEQ ID NO: 7773 - DNA, 120 bp, Streptococcus pyogenes
ttgaccaagtccttagcccgaattcaaattaatgaactcagccctcacctttcttatttttttattttttataaggaagaaaaacagttctccgcccgtattcaattcaatgaatacagt

SEQ ID NO: 7774 - protein, 40 aa, Streptococcus pyogenes
LTKSLARIQINELSPHLSYFFIFYKEEKQFSARIQFNEYS

SEQ ID NO: 7775 - DNA, 189 bp, Streptococcus pyogenes
ttgcaacaagatacaagtgaacgtggacaccaagctcattttgtcatgcagagccatcaacagcgaagacgtcaacaccaactctgtctagcaccttttcaaaagaattgtgagtttctgtattacgagatagagaaggtaaaactggattctgaagactgccttaccatcaatcctttgggaatggtt

SEQ ID NO: 7776 - protein, 63 aa, Streptococcus pyogenes
LQQDTSERGHQAHFVMQSHQQRRRQHQLCLAPFQKNCEFLYYEIEKVKLDSEDCLTINPLGMV

SEQ ID NO: 7777 - DNA, 417 bp, Streptococcus pyogenes
ttgccctttatagcgaaacaaaccctgaaatctcagctcattccccaagataatcttttggcagaaagtcggttcaacgaaatcatggacttcttaacaggtgattttccccttgtttttaggccaatgatcaaccctcatcgctacactatttctcaagacaatcaagcgcttgaaaaagtcaaacaagcttcttacaagcggatggatattgctatgacgcatttagatagtcttattggggagagtgggcatgtttatcgagatcaacaaaccattgcagatgcttatgcttacgccatggcgctatggtctcaaaaaacaccaaaatcttacgagaattatccgcatctggcagcttttatggcaaaaatggtggaagattcagctgttcaacaagtgcttaatgcagctcac

SEQ ID NO: 7778 - protein, 139 aa, Streptococcus pyogenes
LPFIAKQTLKSQLIPQDNLLAESRFNEIMDFLTGDFPLVFRPMINPHRYTISQDNQALEKVKQASYKRMDIAMTHLDSLIGESGHVYRDQQTIADAYAYAMALWSQKTPKSYENYPHLAAFMAKMVEDSAVQQVLNAAH

SEQ ID NO: 7779 - DNA, 807 bp, Streptococcus pyogenes
atggatagtaaagcattgaataaacaaaatttaagccgtagcaagaaaattctgttgaatatctctgataatccgaaaaatcccaaattttacaaattatcaagacaagaactcgagcgcgctaaaatttttaaaacagaaaacttaattaaatctcaaaaatatcagagatacaaacgaggaactatcgtctttattcattttggagtaaatatcggcaatgaattttccgattcgcactttgggattgtgctgaataaaaaagatcatcccaataacggaaagctaactatcttaccgctaacatcaaaaaactctaaagagagtctgtcaattaacaaagagatttttacgagcataatggatgatgccgaaaaaacagttcaaacagttcaaaatgtgctaaacctaacaactgaagtagaacggatacaccactcgttaccagttcccccagcgttttttcagattaaaaaagaaaataaatatcatgatatatggatgaaatattacaataggaatgaccctaaagggattcatgtccccgtagcaaacattaccgtccgaaaatggatacaatcagacttagacaaaattaacttcctcaaaaaaagatatgcaaattatgacaaggtgtcctacgccaagctggactcaatcacttctgtcagtaaactaaaaatcgctaaaccaattaacgatcttgaccctgtcggaaaaataacattgtctaaagaaatcatggacaacattgataaagctctcgcaaggcagttattatctggccagtgggggaaacttgacaat

SEQ ID NO: 7780 - protein, 269 aa, Streptococcus pyogenes
MDSKALNKQNLSRSKKILLNISDNPKNPKFYKLSRQELERAKIFKTENLIKSQKYQRYKRGTIVFIHFGVNIGNEFSDSHFGIVLNKKDHPNNGKLTILPLTSKNSKESLSINKEIFTSIMDDAEKTVQTVQNVLNLTTEVERIHHSLPVPPAFFQIKKENKYHDIWMKYYNRNDPKGIHVPVANITVRKWIQSDLDKINFLKKRYANYDKVSYAKLDSITSVSKLKIAKPINDLDPVGKITLSKEIMDNIDKALARQLLSGQWGKLDN

SEQ ID NO: 7781 - DNA, 150 bp, Streptococcus pyogenes
ttggatgatcgcttggtttattacaaaataaaaactcccaagagggagtggaaaggaggaaaatatgatattcatagcaataattctatctgtattaatatcgtttctggtatcactggttatgatgaaatggcatatatggaatgccaa

SEQ ID NO: 7782 - protein, 50 aa, Streptococcus pyogenes
LDDRLVYYKIKTPKREWKGGKYDIHSNNSICINIVSGITGYDEMAYMECQ

SEQ ID NO: 7783 - DNA, 150 bp, Streptococcus pyogenes
gtgggggagaaaatggagaaaatgaaagcacctagcctagaagttaatctacggctaggcgaaaaggaaatcaaggcagttgtttctggatcaactcatcaatcctctgagcaatcaaaggttgaagttgatgagcaaaatcttgagaaa

SEQ ID NO: 7784 - protein, 50 aa, Streptococcus pyogenes
VGEKMEKMKAPSLEVNLRLGEKEIKAVVSGSTHQSSEQSKVEVDEQNLEK

SEQ ID NO: 7785 - DNA, 234 bp, Streptococcus pyogenes
gtgaatgtgatggatccattaaaaattaacataaagtttgacggcgatttccgtcaagttgttttaaaacttgcaaatacttttgaaccttctgaattgccacaattagacagttttagtaatctgcaagaactaacagaagagctttcgatttctatttctcaagattttgctcatcaacttcaacctttgattgctcagaggattgatgagttgatccagaaacaactgcct

SEQ ID NO: 7786 - protein, 78 aa, Streptococcus pyogenes
VNVMDPLKINIKFDGDFRQVVLKLANTFEPSELPQLDSFSNLQELTEELSISISQDFAHQLQPLIAQRIDELIQKQLP

SEQ ID NO: 7787 - DNA, 204 bp, Streptococcus pyogenes
atgcaggaaaatgctttcgagcaattaattgatgatagcggaattaaaaagaaagttatcgcaactaaaatgggttttacgcgctctggattttatcagaaacgtaaaaaacccaaaaaatcattcgatgcgtcagaagtggcaatgctagcggatattttaggggtagaccccggaaaagtcctggaagccattttaatttca

SEQ ID NO: 7788 - protein, 68 aa, Streptococcus pyogenes
MQENAFEQLIDDSGIKKKVIATKMGFTRSGFYQKRKKPKKSFDASEVAMLADILGVDPGKVLEAILIS

SEQ ID NO: 7789 - DNA, 264 bp, Streptococcus pyogenes
atggaagagaaaaaattttttactacatatgaaatggatctgatgaattcagttgtaactcttcaaaaatcaatcttaacgcaaacggaacatttgtcagatcaactaacaaaaaagcttcatcacctagaagactacaatagtccgattgatgatgaagcaattagattggctgaggtaacagcagaattttacaagttgttaatcaagtctcctagtgttggagcaactgtcaaggagattgtgagcgagggacataagcgt

SEQ ID NO: 7790 - protein, 88 aa, Streptococcus pyogenes
MEEKKFFTTYEMDLMNSVVTLQKSILTQTEHLSDQLTKKLHHLEDYNSPIDDEAIRLAEVTAEFYKLLIKSPSVGATVKEIVSEGHKR

SEQ ID NO: 7791 - DNA, 804 bp, Streptococcus pyogenes
atgttaaatattgacacccaattcgttgatacaatcggtaaaatactatctgactatgtttcgcattctgaaataacccgaatgggcgaagttttaggttatccccaaaacgaccaaaattctggatttaacaagcacaaacgggtgcacaatctcgtgtccgatatattaaataggacacagaatacagataatataaaacttgtgattgaatacgtctgtaatcctttaagatacattaatgaagtttcaatttttgaacagttaagaaccgccattaacattccgctctcgctaaaaggtttgattgtatcagatagcggacaaattgttactactactacttcaaaaactttatcagaggccaaaaaacgcttcgaaacacttgatagtagattaaaagaattaaaagtacaccctcacgttttaaaattctgcactcaagagctcttacaagaaaactattttcatgccgtatttgaagcaagtaaaggtgtttttcatcgtattcgtctgctaacgggctcagcaatggactcagctagtctgatagatcaatgtttcaaacccggagaacccattgtgattatcaacggtaataaattgcagactctagacgaacaaagtgagtataagggattaaaaaatttgctacttgcaatcgctcacctttatcgcaactctaaagctcacaaactcaaatactacaatccagataatctcaatgacgctcttacggccttaacgcttatgtccctcgctcacaatctccttgacagttgctccaacactaggagacttgat

SEQ ID NO: 7792 - protein, 268 aa, Streptococcus pyogenes
MLNIDTQFVDTIGKILSDYVSHSEITRMGEVLGYPQNDQNSGFNKHKRVHNLVSDILNRTQNTDNIKLVIEYVCNPLRYINEVSIFEQLRTAINIPLSLKGLIVSDSGQIVTTTTSKTLSEAKKRFETLDSRLKELKVHPHVLKFCTQELLQENYFHAVFEASKGVFHRIRLLTGSAMDSASLIDQCFKPGEPIVIINGNKLQTLDEQSEYKGLKNLLLAIAHLYRNSKAHKLKYYNPDNLNDALTALTLMSLAHNLLDSCSNTRRLD

SEQ ID NO: 7793 - DNA, 135 bp, Streptococcus pyogenes
atgaatgcacctattacacaaaagcaagctcagcatatcgttaatattttggagtatgtctctaagtcaacctctaaatctactatcgcagctatgacaaatgcattgttagagcttggcgtacttaagggagat

SEQ ID NO: 7794 - protein, 45 aa, Streptococcus pyogenes
MNAPITQKQAQHIVNILEYVSKSTSKSTIAAMTNALLELGVLKGD

SEQ ID NO: 7795 - DNA, 93 bp, Streptococcus pyogenes
ttgagacaacagaaaggaagaaaaaaatcattgaaatttgatgatgtcgttaaaatcgccgatgtcttaggtgtcagcttggacgaattcaga

SEQ ID NO: 7796 - protein, 31 aa, Streptococcus pyogenes
LRQQKGRKKSLKFDDVVKIADVLGVSLDEFR

SEQ ID NO: 7797 - DNA, 237 bp, Streptococcus pyogenes
ttgattcaacaatgggaggggttgacagttgctactgcaaagcagtgggcgacagaaatgcgtgatcatccagactttaaacagtttgtattaaatccaacgcatagaatcgtattcattgattacgaaggattcaaactgtttgtacagtggaaatctcgcaatcgttataaaacaaaaaaagagacactgtcagaaatgcttgaaaatattaaattcgaaaaaagagtaggagca

SEQ ID NO: 7798 - protein, 79 aa, Streptococcus pyogenes
LIQQWEGLTVATAKQWATEMRDHPDFKQFVLNPTHRIVFIDYEGFKLFVQWKSRNRYKTKKETLSEMLENIKFEKRVGA

SEQ ID NO: 7799 - DNA, 183 bp, Streptococcus pyogenes
atgaacaaattagaactatttttattagtaacaacgatcatcttagcaatcatcactagagtacaacacgaagtcattaaaaaacataattcgccagagaataaacgcagaatttttagagaagtggctttagaaaacagcaaagggtggagcgagaagcgttctggaggaaaggtggtcagc

SEQ ID NO: 7800 - protein, 61 aa, Streptococcus pyogenes
MNKLELFLLVTTIILAIITRVQHEVIKKHNSPENKRRIFREVALENSKGWSEKRSGGKVVS

SEQ ID NO: 7801 - DNA, 204 bp, Streptococcus pyogenes
atgacaccagaacaagtagaaaaagcaaaaatcagagctaaacaagaacttgaaacgtttagcatataccttgaccaggcagttgatgaactcggtggagttttaacttcgcgagaagtctttttggcagcgggattcacctaccttggcgcaggtcagacagatatacatgctgcagtcgagggattatgtgagcaaatccaa

SEQ ID NO: 7802 - protein, 68 aa, Streptococcus pyogenes
MTPEQVEKAKIRAKQELETFSIYLDQAVDELGGVLTSREVFLAAGFTYLGAGQTDIHAAVEGLCEQIQ

SEQ ID NO: 7803 - DNA, 327 bp, Streptococcus pyogenes
atgaacatcaaagaaaaaattgtagtgctaagaaacactgaagacggaagttttttaaagagtttcaaaaacaaaaaagatgtacttgcttataatgtggaacttacagatagcattcaactggcatcatttttaccagaagaagcttacaacatacaaaaagaaaaaattgataatttggcagaaacgcttgggtgtgatgttgtagttatcgaagcatcatatgacctaaaatttgttgatggcgaggatgttccagagttaacaaaagagcaaaaagttaaaagtatggtaaacggaatgtttgagcaggtttttggaggtgaa

SEQ ID NO: 7804 - protein, 109 aa, Streptococcus pyogenes
MNIKEKIVVLRNTEDGSFLKSFKNKKDVLAYNVELTDSIQLASFLPEEAYNIQKEKIDNLAETLGCDVVVIEASYDLKFVDGEDVPELTKEQKVKSMVNGMFEQVFGGE

SEQ ID NO: 7805 - DNA, 789 bp, Streptococcus pyogenes
atggcaaatcaattatcaacacaacaagttaaacgtgatatcacaactgatccaactttgctgacaggagctgatattaaaaaatattttgatcctcagaacttgcttagcgaaaaacaagtagggcaagctctggctttgtgtaaggggcgcaaccttaatccatttgcaaacgaagtttatattgtggcctataaaaataatagcggcacagatttcagtttgattgtatctaaagaggcatttatgaaacgtgctgaacgttgtgaaggatatgatggattcgaggctggcattactgttatgagaaatggtgagatggttgaaattgagggctctctaaaactacctgatgatgttttgataggtggatgggccattgtttaccgcaaagaccgctcacatcgatacaaagttactgttgactttaacgaatatgtcaaacttgacaaatatggtaatccacgaagtacttggaaatcaatgccaggaacaatgattagaaaaacagcacttgttcagacacttagagaggcttttcctgatgaactcggtaatatgtacaccgatattgacggtggcgatacttttgatgctattaaagatgtgactcctcaggaaacacaggaagaagtcagagcacggaagatggcacagattgagcagtacaagcaagaacagactcagaaacaaactcaaaaagcagacactagctatcccgttgatgaagtgtctgaacatactgatgatccagtacaaggagaactacttgatggagaactggagtat

SEQ ID NO: 7806 - protein, 263 aa, Streptococcus pyogenes
MANQLSTQQVKRDITTDPTLLTGADIKKYFDPQNLLSEKQVGQALALCKGRNLNPFANEVYIVAYKNNSGTDFSLIVSKEAFMKRAERCEGYDGFEAGITVMRNGEMVEIEGSLKLPDDVLIGGWAIVYRKDRSHRYKVTVDFNEYVKLDKYGNPRSTWKSMPGTMIRKTALVQTLREAFPDELGNMYTDIDGGDTFDAIKDVTPQETQEEVRARKMAQIEQYKQEQTQKQTQKADTSYPVDEVSEHTDDPVQGELLDGELEY

SEQ ID NO: 7807 - DNA, 663 bp, Streptococcus pyogenes
atgcaagaattacaattaaaagtcacacaggcacaagttgaaattattgatcgtgaaaaatttgaacaaaacatcaacgaagttgtggcaaaataccaaaattatgcagtcacagctggaactatcaaagatgacaagcaagtcctagctgatctacgcaagctcaaaaaacagttgtctgatgagcgtatcaaagtaaaaaaggaactctcaaagcctgctgacgacattgatggatatatcaaacaggcaagcaagccactagatgacacgattgacaagattgcaactgatgtcaaagaattcgaagaccatcaaaaagcgctgcgattagatacagtaaagagctacttgtctaataaggcatccgagtatatgcttgacccccgtatttttgacgaaaaagctatggagtacaccaaagctggcaattttatggcggacggtgtaaccctcaaaaaagtcaccatgaaatctcttgaggacttggttacctttgaatatcaaaaggagcaagaggtcgaaaaagcaaaagctaccatctcaggacaatgtgctgagtatggtatgactgaccaaccttacatccgtatgctaaaagagatgacgcttgtagaggtgctaggtcagattaaagctgattatctcgctgaaaagcaaaag

SEQ ID NO: 7808 - protein, 221 aa, Streptococcus pyogenes
MQELQLKVTQAQVEIIDREKFEQNINEVVAKYQNYAVTAGTIKDDKQVLADLRKLKKQLSDERIKVKKELSKPADDIDGYIKQASKPLDDTIDKIATDVKEFEDHQKALRLDTVKSYLSNKASEYMLDPRIFDEKAMEYTKAGNFMADGVTLKKVTMKSLEDLVTFEYQKEQEVEKAKATISGQCAEYGMTDQPYIRMLKEMTLVEVLGQIKADYLAEKQK

SEQ ID NO: 7809 - DNA, 357 bp, Streptococcus pyogenes
atgcgaaaagccgaggaggaaagagagcaacttttagcagctcagcaaactaaagaacaagaacaggctcagaaatcagcagaaataccacaaatcgacaaggaaacaggcgaaatcttggatggttggcaattatcccaaaacaaccaagaaacgctcacaggagctgaaaacgagtttaaaaagtacaatcaaaaaatgacacttgaggtgtactttgaagatacggctgaaaaagaccgtttcaagaccggtctaactcagctaggttttgattttaaaaaaaattatcaagtcagcggttatcaaaatatagagcctcttactcaagctgaattggctcggcggtgcggatgg

SEQ ID NO: 7810 - protein, 119 aa, Streptococcus pyogenes
MRKAEEEREQLLAAQQTKEQEQAQKSAEIPQIDKETGEILDGWQLSQNNQETLTGAENEFKKYNQKMTLEVYFEDTAEKDRFKTGLTQLGFDFKKNYQVSGYQNIEPLTQAELARRCGW

SEQ ID NO: 7811 - DNA, 345 bp, Streptococcus pyogenes
gtgagaaatatggaacaaatcaaaattacagaaacaggaatggtcgttataagcgataaagcactcaaaacttttgtgattgcaggacatttatcggagaggtgggaatttacctctaaatttaaaaaattagatgagccatcacttgatgaaaacggagatttgtttgagcctgtatacgagttgatgcttgaagccaggtcgaagggacaaattagcataacatcatcatattgtggcaaaaatcacaaaaaagacacagacgaaatcataaaagtattctcgtttatcgaagataacaagagaaatatttttgaaaaccttggtattcgtggggtgcttgaa

SEQ ID NO: 7812 - protein, 115 aa, Streptococcus pyogenes
VRNMEQIKITETGMVVISDKALKTFVIAGHLSERWEFTSKFKKLDEPSLDENGDLFEPVYELMLEARSKGQISITSSYCGKNHKKDTDEIIKVFSFIEDNKRNIFENLGIRGVLE

SEQ ID NO: 7813 - DNA, 510 bp, Streptococcus pyogenes
atgagcaatctagttttatcgttagacatctcaacatctggaacagggtgggccttatttaaaggctcagaccttatccagagtggtgtcttaaaacataagagtaaatcctactttgagcgcggacgctatatggctagccaattaggactaatccagtcacgagcattaaaaaaatacgattgctattttagtacaatcgcagtcgaaaaaaattcagttatgggacctaaccagcaatccatgcttaaaatcggtattgttacaggaattatcttaggaagattaatagctgataacgtcgcctttataaatgtatcaacgtggcgtaagcactggaagtttagctacaaagaccgctctaaaaaagcgatgaaagcacaatcgaaagaaaaagctctcgaatattgcggaaaaacagtaaaagatgatgaagcggatgctattttgattggctcatactatgtcaatcaaggctatcttgatgaattggagacacatgactactac

SEQ ID NO: 7814 - protein, 170 aa, Streptococcus pyogenes
MSNLVLSLDISTSGTGWALFKGSDLIQSGVLKHKSKSYFERGRYMASQLGLIQSRALKKYDCYFSTIAVEKNSVMGPNQQSMLKIGIVTGIILGRLIADNVAFINVSTWRKHWKFSYKDRSKKAMKAQSKEKALEYCGKTVKDDEADAILIGSYYVNQGYLDELETHDYY

SEQ ID NO: 7815 - DNA, 141 bp, Streptococcus pyogenes
ttgtggaaaagtgcaacagaccacctgaacgattttatcgacaaaaacaagtacgcaaaagtgacaggcgacttatggcaaggcagtgatcaagtcattgctgagcagtgttttttaaaagtattagaggagatgcaaaaa

SEQ ID NO: 7816 - protein, 47 aa, Streptococcus pyogenes
LWKSATDHLNDFIDKNKYAKVTGDLWQGSDQVIAEQCFLKVLEEMQK

SEQ ID NO: 7817 - DNA, 123 bp, Streptococcus pyogenes
gtgattatccaaggcgtcgctaatgctttaacacgacatcgtgcgcctgtgtcaaaaaacaaaggaaagagaggacttttctccacaaaacaaaaagacgtccatacggaacgcccccttggt

SEQ ID NO: 7818 - protein, 41 aa, Streptococcus pyogenes
VIIQGVANALTRHRAPVSKNKGKRGLFSTKQKDVHTERPLG

SEQ ID NO: 7819 - DNA, 438 bp, Streptococcus pyogenes
atgacgttttttcctgagattgatatccaaaaaacaaaatccaacgccaagcgtaaattgagagagtatccacgctggcggaggatagctaatgatgtagatactcaaaaagttacagctacttactcctttgagccaagacaaccgcatggaacgccaagcaagcctgttgagagactagcgctcaaccgtgtgtcggcagaacaggagctggatacgattgagagagcagtcaacgggatatttgatccagagtatagattgatactgattgacaagtatttgctcacatatccaaagactgattgtgatatttatacaaaacttggttatgaaaaaagccagtattacaacatgctagataatgctttgttgtcgttctcagagctatataaagagggaatgttgcttgtcgaaaaattggaaaaaagctggaat

SEQ ID NO: 7820 - protein, 146 aa, Streptococcus pyogenes
MTFFPEIDIQKTKSNAKRKLREYPRWRRIANDVDTQKVTATYSFEPRQPHGTPSKPVERLALNRVSAEQELDTIERAVNGIFDPEYRLILIDKYLLTYPKTDCDIYTKLGYEKSQYYNMLDNALLSFSELYKEGMLLVEKLEKSWN

SEQ ID NO: 7821 - DNA, 912 bp, Streptococcus pyogenes
atggaaaacaaacccgcaaaagcaagtttctttaaattaagttcttctaaagaatctaatttaaaattgtttatcgaaaagatggaggaaatgtttgataattttagaaaaaaacaatatagtaacattccaacattagagataaatgatcttatgtattatataaatgcaatgcagaaggtaacaagtgaagaagaattaaatggaacgaatctattttattggttagtcaccatttcacgggtggacacagaatctccaattattcttgcgaatcttgaaaaaaatattgatgtaagaaaaagggaaattgaacatggggataatgagggccttgtggttgatacaagattattatttgatccatttagacaaattttagttgtttataatcaaagaggtacaattaataattacgacttaagaaggtttttttgtcaaataattggagttagaggattgaagtttgatattatattaaacagtgatgctttcaaaagggttggtaagcttgacgttgtaaattcaattagttatactgttgcaagcccaacaaactttaaggagtttcgagatgatactcaaagtgaaaatgccgatttaaagtttgcaaattctatgctaggagagtcaatgcaggttgttataaagtcaaaccatctttctaaaaaaaatatatttgataaattttcagatatgttagttaatgactcagttaatgtaaaaaatgctaaagttgaaggttttaccgatggtcatccggaattaatagacttaataaaaaataaattggaatataagggaactattttttatgaaaatactttagacgatgaggctgtttatgcatttctgaataccgcgtatagctttcattttagtcatttaaaaagaatgtttactataacttta

SEQ ID NO: 7822 - protein, 304 aa, Streptococcus pyogenes
MENKPAKASFFKLSSSKESNLKLFIEKMEEMFDNFRKKQYSNIPTLEINDLMYYINAMQKVTSEEELNGTNLFYWLVTISRVDTESPIILANLEKNIDVRKREIEHGDNEGLVVDTRLLFDPFRQILVVYNQRGTINNYDLRRFFCQIIGVRGLKFDIILNSDAFKRVGKLDVVNSISYTVASPTNFKEFRDDTQSENADLKFANSMLGESMQVVIKSNHLSKKNIFDKFSDMLVNDSVNVKNAKVEGFTDGHPELIDLIKNKLEYKGTIFYENTLDDEAVYAFLNTAYSFHFSHLKRMFTITL

SEQ ID NO: 7823 - DNA, 210 bp, Streptococcus pyogenes
atgaaagataaaaaagtagcaactaataggcggtccattatttttatctctgtccctaaatcttccatcatcactactaatttattagaaccggaagttggtatcaatgaaaaactagcaaagaatattgcggttacaattgctgaaaatgatagagatgccgacattatatcagtaaaattttttaaactttttggagaaattttaaaa

SEQ ID NO: 7824 - protein, 70 aa, Streptococcus pyogenes
MKDKKVATNRRSIIFISVPKSSIITTNLLEPEVGINEKLAKNIAVTIAENDRDADIISVKFFKLFGEILK

SEQ ID NO: 7825 - DNA, 471 bp, Streptococcus pyogenes
ttgaggtatgcgatgaaaaaaggaaggtttaaaagaaactggccgattatactatttggtataatagtttttatatttagtttttattttaaaatttctccaaaaagtttaaaaaattttactgatataatgtcggcatctctatcattttcagcaattgtaaccgcaatattctttgctagtttttcattgataccaacttccggttctaataaattagtagtgatgatggaagatttagggacagagataaaaataatggaccgcctattagttgctacttttttatctttcattagttctttattatcttttatttctctattctttagtaagactgatactgatttaatttcaattttagtagtttcaagttggttgagctcaacagtaatgatgttcctaagttcgttctttgtgctaagaacattaattttgttagttgaaacttataataatttcaaaaataaa

SEQ ID NO: 7826 - protein, 157 aa, Streptococcus pyogenes
LRYAMKKGRFKRNWPIILFGIIVFIFSFYFKISPKSLKNFTDIMSASLSFSAIVTAIFFASFSLIPTSGSNKLVVMMEDLGTEIKIMDRLLVATFLSFISSLLSFISLFFSKTDTDLISILVVSSWLSSTVMMFLSSFFVLRTLILLVETYNNFKNK

SEQ ID NO: 7827 - DNA, 498 bp, Streptococcus pyogenes
ttgtggtggctttttattatggattggaggtggtggaaaatcgcatacgaggaattaaccgaaaaacaacagcgttttgtggataagtacatcaccacatttaacgctactgagtctgcaaaacaagctggatattctgaaaaaagcgcttatagccaaggtcaacgcttgttgaaaaatgttgaaattcaaaaagcaatgaaggaacgttttttggaggcaaaagatactaaaggagaccgtattcaagatgttgcagaaacgttggaacaagatacatcgatagcccgtggagaaatccaaatatctgaattcaaagaaacagatatgctgacaggtcaagtggttatccacacgaaaagagaatataccccaagtcacgaagaacagggtagggctagggatagaatttataaagttaatggagcttactcagaaaaacgtgaattagagcattctggaacggtggtgtttgcaaatgaagacaacatccctgat

SEQ ID NO: 7828 - protein, 166 aa, Streptococcus pyogenes
LWWLFIMDWRWWKIAYEELTEKQQRFVDKYITTFNATESAKQAGYSEKSAYSQGQRLLKNVEIQKAMKERFLEAKDTKGDRIQDVAETLEQDTSIARGEIQISEFKETDMLTGQVVIHTKREYTPSHEEQGRARDRIYKVNGAYSEKRELEHSGTVVFANEDNIPD

SEQ ID NO: 7829 - DNA, 1293 bp, Streptococcus pyogenes
ttgcaaatgaagacaacatccctgattaaagtagatttgccatcaacaatcggtataggttatggcgctttttggcggtctagaaatttttatcgagtagttaaaggcagccgtggatctaaaaaatctaaaacgactgctttaaattttatcgtcagactgctgaagtacccttgggctaacttattggtcatccgtagatactcaaacactaacaaacaatctacttataccgattttaaatgggcgtgtaatcaattaaaggttacacacctttttaagtttaatgagagtttgccagaaataactgtaaaggcaacgggccaaaagatactgttccgtggacttgatgatgagttaaaaatcacatctattactgtcgatgttggcgctttgtgctgggcttggtttgaagaggcttatcaaattgagaccgaagataagttttcaacagttgtcgaatcaatccgcggtagtttagatgctcctgatttttttaaacagataacagtcacgtttaacccgtggtcagaaagacattggcttaaacgtgtcttttttgatgaagaaactaaacgggctgatacattttctgggactacaacatttagagtaaacgaatggcttgatgatgtcgataaaagacgctacgaagatttgtacaagactaatccaaggcgggctagaatcgtgtgcgatggtgaatggggcgttgctgaaggtcttgtttttgataactttgaagtcgtagattttgatgttgaaaaaacaattcaacgcgttaaagagacctcggccggtatggactttgggtttactcaagaccctacaactcttatatgtgttgcagttgacctcgcaaacaaagagttatggctttacaacgaacattatcaaaaggctatgttaacagatcatattgtcaaaatgataagagataaaaacttgcataggtcttacatcgcaggggatagcgccgaaaaacgcctcattgcagaaataaaaagtaaaggggtgtctggaattgtcccgagtattaaaggtaaagggtcaatcatgcaagggattcaattcatgcaggggtttaagatatatattcacccatcttgcgaacacacaatagaagagtttaatacttacacttttaagcaagacaaagaaggtaattggttaaacgaaccgatagataagaataaccacgttattgatgcgattagatatgcgcttgaaaaataccatatcagaagcaacgagtcaaatcagtttgaagttcttagggctggttttggttac

SEQ ID NO: 7830 - protein, 431 aa, Streptococcus pyogenes
LQMKTTSLIKVDLPSTIGIGYGAFWRSRNFYRVVKGSRGSKKSKTTALNFIVRLLKYPWANLLVIRRYSNTNKQSTYTDFKWACNQLKVTHLFKFNESLPEITVKATGQKILFRGLDDELKITSITVDVGALCWAWFEEAYQIETEDKFSTVVESIRGSLDAPDFFKQITVTFNPWSERHWLKRVFFDEETKRADTFSGTTTFRVNEWLDDVDKRRYEDLYKTNPRRARIVCDGEWGVAEGLVFDNFEVVDFDVEKTIQRVKETSAGMDFGFTQDPTTLICVAVDLANKELWLYNEHYQKAMLTDHIVKMIRDKNLHRSYIAGDSAEKRLIAEIKSKGVSGIVPSIKGKGSIMQGIQFMQGFKIYIHPSCEHTIEEFNTYTFKQDKEGNWLNEPIDKNNHVIDAIRYALEKYHIRSNESNQFEVLRAGFGY

SEQ ID NO: 7831 - DNA, 360 bp, Streptococcus pyogenes
atgtacacagaatcatttagagatagtacgggaaagactaaaacattagagtttaggttccaccgtgaagctcgcatgaggtatcaagcggaaagtctagaaagcttgttaaccgaaaaatataagctactccgtgaaatgattgaacaccacgataaagtccaaaaaccacgcatacaagagcttctagattatgcagagggaaataaccacaccatcagcgaaataggccgtaggaaagacgatgacatggctgatgttcgtgctgtgcataactatggtaagtatatttcaacgctcaaacagggctatttggtgggtaatcctattcgtgtagagtatattgatggtaccgagcag

SEQ ID NO: 7832 - protein, 120 aa, Streptococcus pyogenes
MYTESFRDSTGKTKTLEFRFHREARMRYQAESLESLLTEKYKLLREMIEHHDKVQKPRIQELLDYAEGNNHTISEIGRRKDDDMADVRAVHNYGKYISTLKQGYLVGNPIRVEYIDGTEQ

SEQ ID NO: 7833 - DNA, 1041 bp, Streptococcus pyogenes
ttgatttatcgcagcatggatgacaagacagaggtcgttagactagatccacgggaagtatttgttatctatcaaaataacctagagcaatcaagcttagctggtgtgcggtactataacaaaaatcaattagatggtactacaaaaattgtcgagctttacaccgataataaaatcctgaagtttgaatatgatggtgatttaacacctatcggagagacttcctctcatgcgtttggttcggtgccaatcacggagtacctcaacacagatgacggcatgggtgactacgagacagagttgtctttaatcgacttgtatgatgcagcgcagtctgacacagctaactacatgcaggatttgtcagacgcgattctggcaatcattggtcgtgtatcattccctggctatgtcgacactgccgaaaaagccattgaatacttacgtaagatgcgtaaagctagattacttaacttagagcctcctgtcgaccaagacgggcgtgagggatctgtagatgccaaatatctatataaacaatatgacgtacaaggaaccgaagcctataaaaatcgtattgtgtccgacatccataaatttaccaatacgccagacatgacagacagtaagtttgccggtcaacaatctggcgaggcgttgaaatggaaggtgtttggacttgaccaggaacgtgtagatatgcaagctttatttgagcaatctcttaaacgtaggtacaaactaatcgctcgtgtaagccaactgcttaaagagattgatgactttgacatcagcaagcttaaaatcacatttacgccaaacctacctaagtcgctacaagaaaagattgaagcctttaaagcattgggtggagagttgtcgcaagagacagctatggctattacagacatcgtggaagatgctaagaaagaaattagccttatcaacagcgagtcgaaatcacgtagtcaactagcgcagaagttagaagaaaccagtagattgactgatagggagttagctcatgaccaccagaaagag

SEQ ID NO: 7834 - protein, 347 aa, Streptococcus pyogenes
LIYRSMDDKTEVVRLDPREVFVIYQNNLEQSSLAGVRYYNKNQLDGTTKIVELYTDNKILKFEYDGDLTPIGETSSHAFGSVPITEYLNTDDGMGDYETELSLIDLYDAAQSDTANYMQDLSDAILAIIGRVSFPGYVDTAEKAIEYLRKMRKARLLNLEPPVDQDGREGSVDAKYLYKQYDVQGTEAYKNRIVSDIHKFTNTPDMTDSKFAGQQSGEALKWKVFGLDQERVDMQALFEQSLKRRYKLIARVSQLLKEIDDFDISKLKITFTPNLPKSLQEKIEAFKALGGELSQETAMAITDIVEDAKKEISLINSESKSRSQLAQKLEETSRLTDRELAHDHQKE

SEQ ID NO: 7835 - DNA, 1623 bp, Streptococcus pyogenes
atgaccaccagaaagagtaaatactggcgtgaccgtatcaagaaagaaatggatgctaaagaggcagacgatatctctcttgagcaatccatgaagcaattgcacgattatcatttcaggaatatcgaaaaagaaattgagtcgttttatcaacgttatgctgacaaagagaaaatagacctttcagaagcccgtaagagagcttctgagcttgatatttctgcttaccagaagaaagctaaggaacttgttgcaaaggctgagaaactacgaagagaaggtaagatagtaacaagagatgactttacccaccaagaaaatgcagacatgtctatttacaacttagccatgaaaacgaatgctttggaactattgcgcttaaacattgatttagaaatgcaagaacttgccaacggcgaacacaagctaaccaagaaatttcttgatgaaggctatcgcaaagaaaccgagtttcaagctgggctattaggattatcagttgctagccaagcgagtgtgaaaagcttagctgatgccgttattaatgctaatttcaaaggagcaaaatggtcagataacatttgggacagacaagataagttacgtagcatcatatctcaaagcgtccaaagtgctatcctaaaaggtaaaaatggcttaactattgcaagggatatcagacgagaatttgatgtgtcagcgtcttacgcaaagcgactagcgataacggagcatgcaagggttcagatggaagttggtagattatccatggcggagaatggctttgctatgtttgatatattgcctgagcctaaagcatgtgatgtttgcaaggatatagctaagcatggtccatatcaccttgacaagtggagaataggggaaaactctccgccgtttcatccgtattgtcgttgtgcgattgtaggggtagatgaaagtggtgttgcaacagacaggcaattggactataatcgaaacatgaacaatattgatttgatggctaaaactcaatcttttatcattaacaaagatgtccgagtaagtgccaagaaagttgtcggcacaagatatgatttttgggcgcaagataataccaaaaaaattagagatacgattcaaagtgttggagagcacttagacaacttagaagggtatagcattcctaaaattgtatttgttaaaaaagctaagctccaaggctgggcgggatatgattataaacaagacactttgtttataagtgatttgttgaattcaaaagccgctgtgagtgatatgctgctggataactactttgcggctgtcgacttaaacggtattctagtgcatgagttaacccacaaaaaacattgggatactgctaaacaattttacaaacataataaaaagcgttataatacacttgaagaggcaaaaaatgcacttgattcgtctctagtttcctatattaaagaacaaaagcaatctgattataattatttatataaaataagcgagtatgctgatgttgctagtttacaagggaaatataacgaagttatagccgaggcaatgactgcgggagataaattatcagatccgctattgttagaaaaaataaaggaggtattcagatggaaa

SEQ ID NO: 7836 - protein, 541 aa, Streptococcus pyogenes
MTTRKSKYWRDRIKKEMDAKEADDISLEQSMKQLHDYHFRNIEKEIESFYQRYADKEKIDLSEARKRASELDISAYQKKAKELVAKAEKLRREGKIVTRDDFTHQENADMSIYNLAMKTNALELLRLNIDLEMQELANGEHKLTKKFLDEGYRKETEFQAGLLGLSVASQASVKSLADAVINANFKGAKWSDNIWDRQDKLRSIISQSVQSAILKGKNGLTIARDIRREFDVSASYAKRLAITEHARVQMEVGRLSMAENGFAMFDILPEPKACDVCKDIAKHGPYHLDKWRIGENSPPFHPYCRCAIVGVDESGVATDRQLDYNRNMNNIDLMAKTQSFIINKDVRVSAKKVVGTRYDFWAQDNTKKIRDTIQSVGEHLDNLEGYSIPKIVFVKKAKLQGWAGYDYKQDTLFISDLLNSKAAVSDMLLDNYFAAVDLNGILVHELTHKKHWDTAKQFYKHNKKRYNTLEEAKNALDSSLVSYIKEQKQSDYNYLYKISEYADVASLQGKYNEVIAEAMTAGDKLSDPLLLEKIKEVFRWK

SEQ ID NO: 7837 - DNA, 177 bp, Streptococcus pyogenes
atggaaatgatgtcaagaccgactcaagaagtgctaacgttttctaaaatcatccgccgatggattgtaggcgatgaaaccattggcggcaagaaaaaattcattttcagagatgatactccggaagatgttttagagctatatcaaaaaataaaaaataagttagattttgcatat

SEQ ID NO: 7838 - protein, 59 aa, Streptococcus pyogenes
MEMMSRPTQEVLTFSKIIRRWIVGDETIGGKKKFIFRDDTPEDVLELYQKIKNKLDFAY

SEQ ID NO: 7839 - DNA, 267 bp, Streptococcus pyogenes
gtgaataaacgaatcaagaaaaaacataaattggaaacagcagttgtgttgcttatcgcagaaaatgctatgcaggctgaagctattaagaatcaaaacagacaaattgcagagctgagatcgattatacaacaaaacgcccaagcaataaatagagagtttgcagcagttaaaggtgtgtgtcttgataatcaagcagctattacaaacattgcagttgatattaactacgtcaagaaaaactacaaacggaagtgggggaagaaa

SEQ ID NO: 7840 - protein, 89 aa, Streptococcus pyogenes
VNKRIKKKHKLETAVVLLIAENAMQAEAIKNQNRQIAELRSIIQQNAQAINREFAAVKGVCLDNQAAITNIAVDINYVKKNYKRKWGKK

SEQ ID NO: 7841 - DNA, 171 bp, Streptococcus pyogenes
gtgatgaacttgactgacaaaaagaaaatggggcgacctactagcgaccctaagactgttaaattgactgttagaattaacgaggatacgaacaaaactttggaagaatattgtaagaataataatgtttccaaagctgacggtgttagagaagctattagtcgtctgaaa

SEQ ID NO: 7842 - protein, 57 aa, Streptococcus pyogenes
VMNLTDKKKMGRPTSDPKTVKLTVRINEDTNKTLEEYCKNNNVSKADGVREAISRLK

SEQ ID NO: 7843 - DNA, 246 bp, Streptococcus pyogenes
atggcgaaaattgatattattgataattatgagacattgctaattagtgtcgaagaaattagagcaagtttggaatccttgcatgcctggctggataaagacattgattgggatagtcagtgtgattggtacgattttatttctcaacacagttcccaaattgcgattctaaacttgattatgtaccgtttagacagtttagaagtggaacacagaagcgttatcgaaaacacaatgaaaggtaaa

SEQ ID NO: 7844 - protein, 82 aa, Streptococcus pyogenes
MAKIDIIDNYETLLISVEEIRASLESLHAWLDKDIDWDSQCDWYDFISQHSSQIAILNLIMYRLDSLEVEHRSVIENTMKGK

SEQ ID NO: 7845 - DNA, 540 bp, Streptococcus pyogenes
gtgccaaccatggcagaagaaacacaaacagttgaaacggttgaagagcaagtggtaccagaagcaaaacaaccgcaagacgaaaaaaagtacacagatgcagatgtggacgctatcatcgacaaaaagtttgcgaagtggaagtcagaacaagaagcggagaaatcggaagctaaaaaaatggctaagatgaatgaaaaagagaaagcagactacgaaaagcagaagctgttagacgaattgcaagagctaaaaaacgataagacacgcaatgagttaacagcagtagctcgtcaaatgtttgcagaatctgaaatcaacgtcaacgatgacgtacttggtttagttgtgactttggacgcagaacaaacaaaagcaaatgtaacaacgctagcaaacgcatttgctaaagttatcgctgatgaccgcaaggctcttgtacgccagactactccgtcaacaggtggtggattgagcaaacaaaccaattacggtgctaacttggctagtaaggcagcacaacaaagcaccaaacttttt

SEQ ID NO: 7846 - protein, 180 aa, Streptococcus pyogenes
VPTMAEETQTVETVEEQVVPEAKQPQDEKKYTDADVDAIIDKKFAKWKSEQEAEKSEAKKMAKMNEKEKADYEKQKLLDELQELKNDKTRNELTAVARQMFAESEINVNDDVLGLVVTLDAEQTKANVTTLANAFAKVIADDRKALVRQTTPSTGGGLSKQTNYGANLASKAAQQSTKLF

SEQ ID NO: 7847 - DNA, 378 bp, Streptococcus pyogenes
atgaataaacgtaaagtaacaacatctaaagagattctacacaatctcgactatgaagctatttcagtaactttggattcaaacaaaatcggcaagaaagttgttccagctgggacaattttggcaggcaaagataaatccatttttgaagaccgcaaacagaaagtagaaaccgtgacaaatgaagaagtctctacaaaagaatatgtcgatggtattttacttacagatgtcgatttaacaaatggcgatgcagtcggttcctgtgtttatcgtgggactatcaatgcagacaagcttgctgattcatctgttgcggaaaattatgatgatttggaagaagtactaccacacattgtctttatcaaaggaggtaaa

SEQ ID NO: 7848 - protein, 126 aa, Streptococcus pyogenes
MNKRKVTTSKEILHNLDYEAISVTLDSNKIGKKVVPAGTILAGKDKSIFEDRKQKVETVTNEEVSTKEYVDGILLTDVDLTNGDAVGSCVYRGTINADKLADSSVAENYDDLEEVLPHIVFIKGGK

SEQ ID NO: 7849 - DNA, 1047 bp, Streptococcus pyogenes
atggcattgatccacgaaattatcacatcggaaaatatcaaaggtttttataacgctaaaaacgaaaatgttgaaaatacattgggagaaaaagcattcccgccaaaacaacaactgggccttaagttgtcatttattaaaggtgcagcaggaaaaccggttactcttaaagcggccgcttttgacactaaggtgcctctacgtgaccgcatggctgttgaattgattgacgaagaaatgccattctttaaagaggctatgcttgttaaagaggctgaccgtcaacaactcaacatgttagcgcaaactaaaaataacgaacttatcgacaccatcttggcatctatctacaatgaccaggctacgcttattgcaggtgctaaagcacgccttgaagcaatgcgcatggaagtgttatctaaaggtaaaattcatatccagtctaacggcgtgatgaaagacatcgactatggattggccgaagatcaaacgaccaaaccagacgccaaatgggatagcgcaggaacagctacaccacttaaagacattgaaaaggctatcgaaaaaatggcagagcgtggttttgtgccagaagctatcatcatgaactctaagacatttagtttgattaaaaacgcagagagcaccttagatgtcgtgaagcctatggcaccaaatggggcagcggttactaaacgtgacctaaacacatatcttgaagatgaactacaaatcaaagtcatcctaaaagatggcatgtttgttggtgatgatggtgaatctcgtaaatacttcccagatggttttgcaacattagtacctaacggcaaccttggctacactgtatttggcacaactccagaacagtcagacttgcttggtggtgaagcgacagatgcaaatgtctcaattgtcgaaactggtatcgcaatcacaacaaccaagacaactgatccagtaaacgtccaaaccaaggtatctatgattgccttgccatcatttgaacgcttggaagaagtacatattattaatggcttgcaagatgca

SEQ ID NO: 7850 - protein, 349 aa, Streptococcus pyogenes
MALIHEIITSENIKGFYNAKNENVENTLGEKAFPPKQQLGLKLSFIKGAAGKPVTLKAAAFDTKVPLRDRMAVELIDEEMPFFKEAMLVKEADRQQLNMLAQTKNNELIDTILASIYNDQATLIAGAKARLEAMRMEVLSKGKIHIQSNGVMKDIDYGLAEDQTTKPDAKWDSAGTATPLKDIEKAIEKMAERGFVPEAIIMNSKTFSLIKNAESTLDVVKPMAPNGAAVTKRDLNTYLEDELQIKVILKDGMFVGDDGESRKYFPDGFATLVPNGNLGYTVFGTTPEQSDLLGGEATDANVSIVETGIAITTTKTTDPVNVQTKVSMIALPSFERLEEVHIINGLQDA

SEQ ID NO: 7851 - DNA, 264 bp, Streptococcus pyogenes
atggccaaagttattaagacttttagagataaagtgacgactaatgcttattatgtaggcgatgattacaaaggagatcgtatcgaggaattgacagccaatggttacttggccggaaatactcctaaactggatactgtcgaagaagttgacctagataaactcaaaagcgatgaaatcaaggcaaaacttgacgaattgggcattgagcacgattctaagcttaaaaaggcggaattgttggagcttttaaaagctaacatt

SEQ ID NO: 7852 - protein, 88 aa, Streptococcus pyogenes
MAKVIKTFRDKVTTNAYYVGDDYKGDRIEELTANGYLAGNTPKLDTVEEVDLDKLKSDEIKAKLDELGIEHDSKLKKAELLELLKANI

SEQ ID NO: 7853 - DNA, 357 bp, Streptococcus pyogenes
gtgtttatggcaaatgtaaacacatttagcattgtaaaaaatgtcaagctcgatttaggcattgaggacgacaatcaagaccagttgttggagatgttgctaaatcgtattacagaccacttcaaagcaaattatggcgtgttagaaattgacaatgctttttcttttgtcttggaagattgtctgattgctcgttttaaccgtagaggttcagagcgtgccaaaacagaggaagtggaaggtcataaaacaacctactacgaccatttgaatgagtttgaaccctacgatgccatgattatggcaaagcttaatttaatcaaagacaaatctcgtaaagggggactgtacttttta

SEQ ID NO: 7854 - protein, 119 aa, Streptococcus pyogenes
VFMANVNTFSIVKNVKLDLGIEDDNQDQLLEMLLNRITDHFKANYGVLEIDNAFSFVLEDCLIARFNRRGSERAKTEEVEGHKTTYYDHLNEFEPYDAMIMAKLNLIKDKSRKGGLYFL

SEQ ID NO: 7855 - DNA, 306 bp, Streptococcus pyogenes
atgagatatgcagatagagttacatttgttaaaacgacggatgagcaatacaatcccgatttaggtgagtatacgcacacagaggtcataagtatcacaaaaccttgttttgtgatggacatgggcatggaaaagtccgtacagatttttggagattatcaaaaggatcgtaaagttatctacctaaagcagccttatacaaaagcatttgattattgcgagtatgagggcaggagatacaaaacgcaggcaaataagcttggcgctattgttttttatctggaaggagatgactctattggtggc

SEQ ID NO: 7856 - protein, 102 aa, Streptococcus pyogenes
MRYADRVTFVKTTDEQYNPDLGEYTHTEVISITKPCFVMDMGMEKSVQIFGDYQKDRKVIYLKQPYTKAFDYCEYEGRRYKTQANKLGAIVFYLEGDDSIGG

SEQ ID NO: 7857 - DNA, 363 bp, Streptococcus pyogenes
atgactctattggtggctgatatatctttaaaagtagttggaacagctggtttaaaaaagaaacttgagcttattatcaaaaaagatgccgtcaagaagattgtcagagacaatgggacgcagcttcaaaggaaaatgattaataaagcggtatttacaaaaggctattcaacaggtgcaactagacgttctattaccatgcaaatcggcgatggtggattgagtgtcaaggttaaaccaggaactcattatgccggctaccttgaaagaggaactcgccttatgagcaaacaaccgtttgttttgccagctctaaaagagcaaaaagtaaaatttagaaaagatttggaggcgcttgtcaaa

SEQ ID NO: 7858 - protein, 121 aa, Streptococcus pyogenes
MTLLVADISLKVVGTAGLKKKLELIIKKDAVKKIVRDNGTQLQRKMINKAVFTKGYSTGATRRSITMQIGDGGLSVKVKPGTHYAGYLERGTRLMSKQPFVLPALKEQKVKFRKDLEALVK

SEQ ID NO: 7859 - DNA, 387 bp, Streptococcus pyogenes
atgattaaaactagagatcagtctatttttgacgaaatgtttaaacgcatccagtctttaggttttaaggtttacgattataaaccgatgacggaagttccatatccatttgtggaaatggaatctactgatgcggaatatattccaaataaagatgacattaaaggttctgttgaacttatgttgtctgtttggggggtgcagaaaaaacggaagcaggtgtctgacatggcatctgctattttttcgcaagctttgacagtagagagttctgacgttttccgctggtcattaaatactcgtcaatcatctattcaaatgttagatgacacaacaactgtgacacctcttaaacgagcgattgtcacacttagatttaatttgaga

SEQ ID NO: 7860 - protein, 129 aa, Streptococcus pyogenes
MIKTRDQSIFDEMFKRIQSLGFKVYDYKPMTEVPYPFVEMESTDAEYIPNKDDIKGSVELMLSVWGVQKKRKQVSDMASAIFSQALTVESSDVFRWSLNTRQSSIQMLDDTTTVTPLKRAIVTLRFNLR

SEQ ID NO: 7861 - DNA, 114 bp, Streptococcus pyogenes
atgtcaggggataatgtttctgattctggcatttctacctcctatctcaaattaaatctaagtgtgacaatcgctcgtttaagaggtgtcacagttgttgtgtcatctaacatt

SEQ ID NO: 7862 - protein, 38 aa, Streptococcus pyogenes
MSGDNVSDSGISTSYLKLNLSVTIARLRGVTVVVSSNI

SEQ ID NO: 7863 - DNA, 564 bp, Streptococcus pyogenes
atggaaacacaattagaagcaaaacaagggattcattcaatcttgttatttcgtttgttgaaagaagcatctagtgaggcagcaactaaacttgcttttcaaacagagcatgaagtaggtaaaagccgtgacgtagatggacaaaaaactaaagatggtattatccagtccgtgggggctttggagtacgactttaaagcaacatctattttagctaaaggtgacgtactagcagctaaactagaaaaagccatggagaatggtgagcttgtagaaatttgggatattgatttagaagaaacaagcaaaaacggcgacagcgacaataagcttgcaaacgtttggggtattgataaaaatggaacaaacagaggaaacggtaaatacctagcgacttattaccaagggtacatctcaagcttcagtgctaagaaaaatgctgaggaaaatattgaaattgaaatggaatttgccatcaacggtgttggccaaaaaggattcgctacattaacagatgcccaaaaagcagctgtacagtacgcatttaaagatacaacgaaaggt

SEQ ID NO: 7864 - protein, 188 aa, Streptococcus pyogenes
METQLEAKQGIHSILLFRLLKEASSEAATKLAFQTEHEVGKSRDVDGQKTKDGIIQSVGALEYDFKATSILAKGDVLAAKLEKAMENGELVEIWDIDLEETSKNGDSDNKLANVWGIDKNGTNRGNGKYLATYYQGYISSFSAKKNAEENIEIEMEFAINGVGQKGFATLTDAQKAAVQYAFKDTTKG

SEQ ID NO: 7865 - DNA, 351 bp, Streptococcus pyogenes
atgcaattggaaattaaaggtaaaactcataacgtaaaatttggtacacgatttgttgccgagatggacaaaaatcatatagcagaacgtcagggatttaaatttggagctggtctacaatctagcgttccgtttttaatcgaccacagcgttgttactcttgcggaagtaatttatacaggtacaatcaccgaaccaccacgtcctagtttgaatgatatttacgactatattgacgaagttgaagatattgaaaagctttttgatgatgttttagacgaactacgtcaatcaaacgcatcaaagttgtttatggctcaggtggaaaaagacctggcggaagccaaagcg

SEQ ID NO: 7866 - protein, 117 aa, Streptococcus pyogenes
MQLEIKGKTHNVKFGTRFVAEMDKNHIAERQGFKFGAGLQSSVPFLIDHSVVTLAEVIYTGTITEPPRPSLNDIYDYIDEVEDIEKLFDDVLDELRQSNASKLFMAQVEKDLAEAKA

SEQ ID NO: 7867 - DNA, 327 bp, Streptococcus pyogenes
atgattgtgcttaattgcattagataccttggcatgactgacatcaatgaaatcgggcgattaactttgtatgaatatgatttattaatgacaggcaaagcactagcggctgttgatgaatcacataaagctcacaaacaagcttggataaaccaccaagttacggcaacaaaacttgttggtggcaagaaaaataaaaaagaagtccctgtttataaaaaattcaaggacttttttgattatgaggaagaaatccgaaaaatcactcaagaaattgatgaaggttacgacaagaaaggtatggatttacttctcaaagctaacctt

SEQ ID NO: 7868 - protein, 109 aa, Streptococcus pyogenes
MIVLNCIRYLGMTDINEIGRLTLYEYDLLMTGKALAAVDESHKAHKQAWINHQVTATKLVGGKKNKKEVPVYKKFKDFFDYEEEIRKITQEIDEGYDKKGMDLLLKANL

SEQ ID NO: 7869 - DNA, 777 bp, Streptococcus pyogenes
atgtacgaatttaacgatactatcagaggtactccgaaagttacttttaatttaaagacaacaattggtggaaaggtattagaagacgaactcaataatggtttcggtacctttaggacattgactgtttctggtcgtgatgtggtggacttagagcatcaaacaacaagtgtgttaggacgaaacggagagtatttccacaatgccacagttgaagtcagaaaactagaaataaaagctaaaatcagtggaaaagataacaagtcaatgcgtttacaatatgaaaaattaaacaaattaattgttagtcacaatcaagtttttttatcattttcagacgaacctgacagaaattatctaggcatctttaaatctaaagatgtcccagaagaagtttctaacgagcagattataggactaacattcatctgctacaatccgtttaaaatgtctgatgtaaaaactaaaaaaggaacatctatccaaaatggtgggttatttcaaacaaagcctatcatcactctcaacctatcatcaccaacaaaagaaattaagttgttgcatgtcgaaagccagaagtatatcagattgactggaacttataccactgacgaaatcaagattgatatggccacgggtaagattacccagaacggacgcaatatccttggcgatttagatatgattaatagtaggtattttgagctattacctggtaataatacattacagtgtgccaatgccgccataaccgcagagtttagagaggtttatcta

SEQ ID NO: 7870 - protein, 259 aa, Streptococcus pyogenes
MYEFNDTIRGTPKVTFNLKTTIGGKVLEDELNNGFGTFRTLTVSGRDVVDLEHQTTSVLGRNGEYFHNATVEVRKLEIKAKISGKDNKSMRLQYEKLNKLIVSHNQVFLSFSDEPDRNYLGIFKSKDVPEEVSNEQIIGLTFICYNPFKMSDVKTKKGTSIQNGGLFQTKPIITLNLSSPTKEIKLLHVESQKYIRLTGTYTTDEIKIDMATGKITQNGRNILGDLDMINSRYFELLPGNNTLQCANAAITAEFREVYL

SEQ ID NO: 7871 - DNA, 2046 bp, Streptococcus pyogenes
atgatatacctgtttgataaacttgagcgattggtcgctactgttggtactgatgacttgctctcatggcactttaaggtcaaaaacaatgattgggaccaggctagttttgaggtgccagttgattatgacgtagagccatttgtctactttggtttttttaactacgaccctcatcaaaaagaagatgtctttaagctctttaaagtcattgattacaacctagaagatagcaagttttacaaaggcttagacaaagctgagagtgatcttgataccattgccattatcaaagataagcgatttagacaatcgtccgcagatgcttgtattgatggtgctttagagggtacgggttatcaagtcggcaaagttgagggaataacaaatgttagaacacttagttattactacatcagtccacgagcggctctgattaagattgtggaagcttttaactgcgagttcaatgtcaggtatacctttattaataacaaaatcactagtcgttatatcgacctcaaaaagcgctttggaaagccaacaggcaagcaatttgaacatggcaacaacctactaaaagtcgtctacgaggaatcaacagatgacattgtgacttgtctgattggcagaggtaagggtgaggaaatccaacacgaagaagctgagcctaaagatgtcgagggacacttgccacaggaagaaaggcggcaaggctacggtcgaagaatcgaatttactgatgttgtctggtcggtcgaaaaaggcgacccgatagacaaaccagctggtcaaaactttgtagcactagatagtgcaagggaagaatacggtttgtctcaaaatggtgagctaaaacaccgctggggtgtctttgtcaatgaggaaatcgaggataagacagaactcttaaaagcaacttgggaagaattgcagcgtttgtcaatccctatcagaatttacaaggcagaaatcttagacattggtccagagacgtggaaaggcgactcagtagccattatctatgatgaggtaaaaatagcttttgaaactcgggttgatgagattgatattgacaagcttaattttaacaggtcagtcgtaacacttggtgattacagcgttgtccaaaatcgtgagtcacggtctcgtaaagaggctgtccaaaacatgatagatgaatctttagagactatcacagacttagggatgacatttcaggaatttttgcaaggcatcgaaaaacgcatcgagactggcaaaaaggagatggaagacaattggcgcaaagttaaccttgaatttgataactttaaaaagaaggttgagcaagaaggcttgcaattcaacaccttgaaagaacaaatcaaagaagttgatgaacgcaccgataaagagcttgaagagttccgagccaccctcaaaaacctagcgttaccggaagaagccatcaaaaaaatcaccgaggctatcaaagttgatgacatcccgtctattaaacaaagctttgatgacctaaaaaacaaagtcagtgaaacgagcgagacgtcccgtctaaacgccgaaattttaggtaacaacggtaagacccgctacaacaaaaatttgctggttggcgaccctaaccgcaccaaaacctatgatgaggattacatagaagtagaagctaacgacggtggttttaagcgtggcgagacctacacgattagctttagccagacttgtgagctactcaaaaaagtggctgtcacgctgacacaggctaacaacaagggagttaagttagtgctgacacctaccaaggctaagatggaagcacagacgtttgaggtcgctaaggataaacagtctatagaggtttatcctttgagctacacggctgttttaactggcgactggtataaatctaagcagatagatttaaacgcgtcggaggtgcaggaattggccctggatatgagctataaagatgttgtggacggtaaaggagcaactatcacaggggcatggtcagacagcccacaaattatattagacggaggtaat

SEQ ID NO: 7872 - protein, 682 aa, Streptococcus pyogenes
MIYLFDKLERLVATVGTDDLLSWHFKVKNNDWDQASFEVPVDYDVEPFVYFGFFNYDPHQKEDVFKLFKVIDYNLEDSKFYKGLDKAESDLDTIAIIKDKRFRQSSADACIDGALEGTGYQVGKVEGITNVRTLSYYYISPRAALIKIVEAFNCEFNVRYTFINNKITSRYIDLKKRFGKPTGKQFEHGNNLLKVVYEESTDDIVTCLIGRGKGEEIQHEEAEPKDVEGHLPQEERRQGYGRRIEFTDVVWSVEKGDPIDKPAGQNFVALDSAREEYGLSQNGELKHRWGVFVNEEIEDKTELLKATWEELQRLSIPIRIYKAEILDIGPETWKGDSVAIIYDEVKIAFETRVDEIDIDKLNFNRSVVTLGDYSVVQNRESRSRKEAVQNMIDESLETITDLGMTFQEFLQGIEKRIETGKKEMEDNWRKVNLEFDNFKKKVEQEGLQFNTLKEQIKEVDERTDKELEEFRATLKNLALPEEAIKKITEAIKVDDIPSIKQSFDDLKNKVSETSETSRLNAEILGNNGKTRYNKNLLVGDPNRTKTYDEDYIEVEANDGGFKRGETYTISFSQTCELLKKVAVTLTQANNKGVKLVLTPTKAKMEAQTFEVAKDKQSIEVYPLSYTAVLTGDWYKSKQIDLNASEVQELALDMSYKDVVDGKGATITGAWSDSPQIILDGGN

SEQ ID NO: 7873 - DNA, 1116 bp, Streptococcus pyogenes
atggctgaaaatataccgctacgagtccaatttaagcggatgaaagccgccgagtgggcaagtagtgatgtcgtcttactggagggtgagattggctttgagactgacactggttttgctaagtttggcgatggtcaaaacacttttagtaagcttaagtaccttactggtcccaaaggtcctaaaggagacactggtctccaaggtaaaactggaggaactggttctcggggccctgctggcaagcctggaacgacagattatgatcaactccaaaataaaccagatctaggtgcgtttgcacaaaaagaagaaactaatagtaaaatcaccaaattagaatcaagcaaagcagataaaaacgctgtttacttaaaagcagagtcaaatgcaaagctagacgaaaaattaaatctcaaaggcggcgtcatgacaggacaactacagtttaaacctaatagtggtattaaaccctcatcttccgtaggaggagcgattaacattgatatgtctaaatcggaaggtgctgctatggtgatgtatacaaataaagatactactgatggaccattgatgattttacgctctaacaaagatacgtttgatcagtcagttcaatttgtcgattataagggaacaacaaatgccgttaatattgtgatgcgtcagccaaccacccccaatttttcatcggcacttaatataaccagtgctaacgaaggcggtagtgcgatgcaaattagaggcgtcgaaaaagcattgggaacgctcaaaatcacacacgaaaacccaagcgttgacaaagaatacgataaaaacgctgcagcgttatccattgatattgtcaaaaaacagaaaggcggaaaaggtactgctgcccaaggaatctacattaactcaacatcaggcacgacagggaagttgcttaggattagaaaccttaatgatgataagttctacgtcaagcctgacggtggtttttatgccaaggaaacttcgcagattgatggcaacctgaaactcaaggatcccatagcgaatgatcatgcggcaaccaaagcttatgttgatggtgaagtcgaaaaattaaaagcactcttagcggctaagcaaatg

SEQ ID NO: 7874 - protein, 372 aa, Streptococcus pyogenes
MAENIPLRVQFKRMKAAEWASSDVVLLEGEIGFETDTGFAKFGDGQNTFSKLKYLTGPKGPKGDTGLQGKTGGTGSRGPAGKPGTTDYDQLQNKPDLGAFAQKEETNSKITKLESSKADKNAVYLKAESNAKLDEKLNLKGGVMTGQLQFKPNSGIKPSSSVGGAINIDMSKSEGAAMVMYTNKDTTDGPLMILRSNKDTFDQSVQFVDYKGTTNAVNIVMRQPTTPNFSSALNITSANEGGSAMQIRGVEKALGTLKITHENPSVDKEYDKNAAALSIDIVKKQKGGKGTAAQGIYINSTSGTTGKLLRIRNLNDDKFYVKPDGGFYAKETSQIDGNLKLKDPIANDHAATKAYVDGEVEKLKALLAAKQM

SEQ ID NO: 7875 - DNA, 159 bp, Streptococcus pyogenes
atgcaagaaaaattattaggtaaaattattaacgatttagcacttaaagttgctaatttaacgctagaaaatgctcaattaaaagcacagcatgaaatcgaattggaagaactaaacgcacaattggatgaagcaacagcaccgaaggaagaaggtaaa

SEQ ID NO: 7876 - protein, 53 aa, Streptococcus pyogenes
MQEKLLGKIINDLALKVANLTLENAQLKAQHEIELEELNAQLDEATAPKEEGK

SEQ ID NO: 7877 - DNA, 609 bp, Streptococcus pyogenes
atgagaaattggaaagtaacaggaaaatatccacaacttgatggcacaggagcagtcgcaagcacacatattattatcgctgctgaggatggagctgttatcccgcaacttattaagcaagacttaacctcaactaatgacacagagattatcaaagccgctttggaagaatttaaaaaatctgaatacgttgaaattgcaatgggcgaagccgtgcaaaaagtagacgaccttgaaaaaatctcacaggaaaccgctaagaccgctaaaacagcccaaacagccgcaggattagctaaggtgtccgcagagcgtacacagcgaatgattaacttgcaaaccatccacgtattgacaagtggtgggaacgttgaacccgatatctacaaaggtatgttagagcttattgagcctgctaaacaaggcgagtatcaggcttatgacgtgtttactgttgtagatgagtcgcacgaagatcaagcggtagaagggaaccttgtctttgtacatgtcaacgagccgtttacttatgaggcgcaaactcttaaagatttggaatcagaggataaagtcacagttattaaatatgcggatttggttaaacaagat

SEQ ID NO: 7878 - protein, 203 aa, Streptococcus pyogenes
MRNWKVTGKYPQLDGTGAVASTHIIIAAEDGAVIPQLIKQDLTSTNDTEIIKAALEEFKKSEYVEIAMGEAVQKVDDLEKISQETAKTAKTAQTAAGLAKVSAERTQRMINLQTIHVLTSGGNVEPDIYKGMLELIEPAKQGEYQAYDVFTVVDESHEDQAVEGNLVFVHVNEPFTYEAQTLKDLESEDKVTVIKYADLVKQD

SEQ ID NO: 7879 - DNA, 294 bp, Streptococcus pyogenes
atgatagattttgtacaaattggtgctttttgtggcgctgctttgtctatcttgggtgtttggggatttatcgtcaatccctttaaaaaagccatggaagctaatgagtttgccatggctcaactcaaggactcaattaaggagttagcttatgagcttaaaaatcttgatcgtgaacgtgagattaccaaaaaaattatcgacagacacgaggagcgtttaggtcgcgtagaagacgaagttattatcaacaaggagcgtattattacgctatttaaaaaaggagaagaaaaa

SEQ ID NO: 7880 - protein, 98 aa, Streptococcus pyogenes
MIDFVQIGAFCGAALSILGVWGFIVNPFKKAMEANEFAMAQLKDSIKELAYELKNLDREREITKKIIDRHEERLGRVEDEVIINKERIITLFKKGEEK

SEQ ID NO: 7881 - DNA, 183 bp, Streptococcus pyogenes
atgaataactggtttaaaaaagtagcaattaaaacaattaaaacaatggcacaaatggccgttggtctaatcgggtcaagcgtgttaatcacggatattaattggccaacaatgttgtcagcagtgctgttgtcaggactaacatgtatcctgatgaatgtgtcacaaatcaaggaagaggaa

SEQ ID NO: 7882 - protein, 61 aa, Streptococcus pyogenes
MNNWFKKVAIKTIKTMAQMAVGLIGSSVLITDINWPTMLSAVLLSGLTCILMNVSQIKEEE

SEQ ID NO: 7883 - DNA, 219 bp, Streptococcus pyogenes
gtgattgctcgcatgacctattcctcttccttgatttgtgacacattcatcaggatacatgttagtcctgacaacagcactgctgacaacattgttggccaattaatatccgtgattaacacgcttgacccgattagaccaacggccatttgtgccattgttttaattgttttaattgctacttttttaaaccagttattcatttttcttctccttttt

SEQ ID NO: 7884 - protein, 73 aa, Streptococcus pyogenes
VIARMTYSSSLICDTFIRIHVSPDNSTADNIVGQLISVINTLDPIRPTAICAIVLIVLIATFLNQLFIFLLLF

SEQ ID NO: 7885 - DNA, 105 bp, Streptococcus pyogenes
atgcgagcaatcacacgattagcattagttatagcaatcgcaatactgtatgtgccattatctgtggttgctttgattttttatccatttttagataaggaggga

SEQ ID NO: 7886 - protein, 35 aa, Streptococcus pyogenes
MRAITRLALVIAIAILYVPLSVVALIFYPFLDKEG

SEQ ID NO: 7887 - DNA, 102 bp, Streptococcus pyogenes
atgcaacacaagtataaaataggaggtaaagctcctttagataagacaaatgccctcgcttttgcgggggctgtttttgttataaagattttaattgttatt

SEQ ID NO: 7888 - protein, 34 aa, Streptococcus pyogenes
MQHKYKIGGKAPLDKTNALAFAGAVFVIKILIVI

SEQ ID NO: 7889 - DNA, 777 bp, Streptococcus pyogenes
gtgagaaaaattgtaaatgttaattttaaaaagtttttaacttcatcttttctattgtgggtatttatatcagctataattccaacgtgttacgcgtatgagatgagtagtgtgggagttattaatttaaggaatttatactctacatatgatccaacagaagtaaaaggaaaaataaatgaaggtccgccattttcaggtagtttgttctacaaaaatattccttatggcaatagttcgattgaattaaaagtagaacttaatagcgtagaaaaagctaattttttttctggtaaaagggtggatatatttactttggagtattctcctccctgtaactctaatataaaaaagaattcatatggaggtattactttaagcgacggtaatagaattgataaaaaaaatatacctgttaatattttcatagacggcgttcaacaaaaatatagctatacagatataagtacagggagtactgataagaaagaggttacgattcaggaacttgatgtgaaatcaagatattatcttcaaaaacattttaatatatacggattcggtgatgttaaagattttggccgctcctctagatttcaatctggctttgaggaaggaaatattatttttcatttgaatagtggagagagaatttcttataatctttttgatacaggacatggtgacagagagagtatgctaaaaaaatacagtgataataagaccgcttattctgatcaacttcatattgatatatacttagttaaatttaataaa

SEQ ID NO: 7890 - protein, 259 aa, Streptococcus pyogenes
VRKIVNVNFKKFLTSSFLLWVFISAIIPTCYAYEMSSVGVINLRNLYSTYDPTEVKGKINEGPPFSGSLFYKNIPYGNSSIELKVELNSVEKANFFSGKRVDIFTLEYSPPCNSNIKKNSYGGITLSDGNRIDKKNIPVNIFIDGVQQKYSYTDISTGSTDKKEVTIQELDVKSRYYLQKHFNIYGFGDVKDFGRSSRFQSGFEEGNIIFHLNSGERISYNLFDTGHGDRESMLKKYSDNKTAYSDQLHIDIYLVKFNK

SEQ ID NO: 7891 - DNA, 708 bp, Streptococcus pyogenes
atgagatataattgtcgctactcacatattgataagaaaatctacagcatgattatatgtttgtcatttcttttatattccaatgttgttcaagcaaattcttataatacaaccaatagacataatctagaatcgctttataagcatgattctaacttgattgaagccgatagtataaaaaattctccagatattgtaacaagccatatgttgaaatatagtgtcaaggataaaaatttgtcagttttttttgagaaagattggatatcacaggaattcaaagataaagaagtagatatttatgctctatctgcacaagaggtttgtgaatgtccagggaaaaggtatgaagcgtttggtggaattacattaactaattcagaaaaaaaagaaattaaagttcctgtaaacgtgtgggataaaagtaaacaacagccgcctatgtttattacagtcaataaaccgaaagtaaccgctcaggaagtggatataaaagttagaaagttattgattaagaaatacgatatctataataaccgggaacaaaaatactctaaaggaactgttaccttagatttaaattcaggtaaagatattgtttttgatttgtattattttggcaatggagactttaatagcatgctaaaaatatattccaataacgagagaatagactcaactcaatttcatgtagatgtgtcaatcagc

SEQ ID NO: 7892 - protein, 236 aa, Streptococcus pyogenes
MRYNCRYSHIDKKIYSMIICLSFLLYSNVVQANSYNTTNRHNLESLYKHDSNLIEADSIKNSPDIVTSHMLKYSVKDKNLSVFFEKDWISQEFKDKEVDIYALSAQEVCECPGKRYEAFGGITLTNSEKKEIKVPVNVWDKSKQQPPMFITVNKPKVTAQEVDIKVRKLLIKKYDIYNNREQKYSKGTVTLDLNSGKDIVFDLYYFGNGDFNSMLKIYSNNERIDSTQFHVDVSIS

SEQ ID NO: 7893 - DNA, 126 bp, Streptococcus pyogenes
atgaaaaacatcaatttaaactatcaaaagaaccttgtcatatcaattatcgttgatatgacaaggttctttaatgttttatttaatcacttcttgagtttattcccgaaaaaacacaaggaacaa

SEQ ID NO: 7894 - protein, 42 aa, Streptococcus pyogenes
MKNINLNYQKNLVISIIVDMTRFFNVLFNHFLSLFPKKHKEQ

SEQ ID NO: 7895 - DNA, 111 bp, Streptococcus pyogenes
atggacgaaagagcttgcaatttttttgatttaggttataatgttaaaaaaacgagaaaggaagtcaatgatggtaaaaacacaacacttagcaaattggcaaagctggca

SEQ ID NO: 7896 - protein, 37 aa, Streptococcus pyogenes
MDERACNFFDLGYNVKKTRKEVNDGKNTTLSKLAKLA

SEQ ID NO: 7897 - DNA, 177 bp, Streptococcus pyogenes
ttgagaattaatacaatgacatgtgatataaaaggtcaagaaaaaaccataaaaaacaccctcactgagatgaatttggatgccaagttagacaatcgttttgaggatgtaacggttatttttatcatttttagttttaaaatgctctattttagacacgtaaaaaatcttgccttt

SEQ ID NO: 7898 - protein, 59 aa, Streptococcus pyogenes
LRINTMTCDIKGQEKTIKNTLTEMNLDAKLDNRFEDVTVIFIIFSFKMLYFRHVKNLAF

SEQ ID NO: 7899 - DNA, 90 bp, Streptococcus pyogenes
gtgggtgcgtcaacgaaatcaaagatttctgacttaccgcaaaaattcaatcgctttctccttgctcttggtatcttaaattatggctgt

SEQ ID NO: 7900 - protein, 30 aa, Streptococcus pyogenes
VGASTKSKISDLPQKFNRFLLALGILNYGC

SEQ ID NO: 7901 - DNA, 639 bp, Streptococcus pyogenes
atgacaaaacagcaaatcgaaaaactagcggacttactgcctccttttgcagccacactttacttagacatgattcctgaatttcaagaaggttatgcttcttatgtttatcaaacaccaaaacaagatattcaaaagcgccgcatcaagcagttaactaaaaattttgaacgattactagataccccatctttttatgtgatgcctgtgacaagaaaaacagcagagcaattgctagcagataaaggcctagcttatcatttgttatcgacagttgcagctaatcaagtgtttgcggctgctgttaacgaggatcagatgctttttcaagtgcttcgaaatggagcaagagtagcctttgtgattcttcaagaaaagggggaatttctagaaatgactttagggattcttgaaacagtgacagaaaacgaggttccagcagctattgtggaggctgtccagacatatcttctggcagatatgcaagagaaactcccttctttaagcattatggtcagtcaagaatcaagcaagcttttttaccaagaacaagggtttgttttgctagctaagggttgcaagccaggaaacgaaaatgattctgacgtttgtcagctcgtaaaatacttttccaagcca

SEQ ID NO: 7902 - protein, 213 aa, Streptococcus pyogenes
MTKQQIEKLADLLPPFAATLYLDMIPEFQEGYASYVYQTPKQDIQKRRIKQLTKNFERLLDTPSFYVMPVTRKTAEQLLADKGLAYHLLSTVAANQVFAAAVNEDQMLFQVLRNGARVAFVILQEKGEFLEMTLGILETVTENEVPAAIVEAVQTYLLADMQEKLPSLSIMVSQESSKLFYQEQGFVLLAKGCKPGNENDSDVCQLVKYFSKP

SEQ ID NO: 7903 - DNA, 102 bp, Streptococcus pyogenes
ttgaagagatattttgaaaaagaaaaattaaagcatattaaactaatttcggaggtcattaaaactattattgaaatcatcaaactcattatggatttaatt

SEQ ID NO: 7904 - protein, 34 aa, Streptococcus pyogenes
LKRYFEKEKLKHIKLISEVIKTIIEIIKLIMDLI

SEQ ID NO: 7905 - DNA, 345 bp, Streptococcus pyogenes
atgccaccaaaaactattgatattgaaaagtaccaccagcttgcttggcaaaggcaggctgaacaccgaaagtttttagcgactttaaagaaaaaaccacctaaacatctagacaaaattgtccaggacattcatcaggaggtttttcaagagattgattgcacgtcctgtgctaattgttgcaaagaccttggacctgatttgacagagaccgatattgtcaaaatcgctaaactattccgaatgaaattagcgacttttgaaaagacttacttgcgcgtggatgaggatgatgataaggttttccggttcatgccctgtccttttttaggaggggataacctt

SEQ ID NO: 7906 - protein, 115 aa, Streptococcus pyogenes
MPPKTIDIEKYHQLAWQRQAEHRKFLATLKKKPPKHLDKIVQDIHQEVFQEIDCTSCANCCKDLGPDLTETDIVKIAKLFRMKLATFEKTYLRVDEDDDKVFRFMPCPFLGGDNL

SEQ ID NO: 7907 - DNA, 138 bp, Streptococcus pyogenes
atgaataacacaattaaagactttgatctcgatttgaaaacaaataaaaaagacactgctacaccttatgttggtagccgttacctatgtacccctggttcttgttggaaattagtttgctttacaacaactgttaaa

SEQ ID NO: 7908 - protein, 46 aa, Streptococcus pyogenes
MNNTIKDFDLDLKTNKKDTATPYVGSRYLCTPGSCWKLVCFTTTVK

SEQ ID NO: 7909 - DNA, 747 bp, Streptococcus pyogenes
atggtacaaatttttttatcaaatttattaaaaataaaaaatacgagtattagcaagttgattcttattttccctattatttgtgtgatgttatctttattgttttcagcattaggtggtgaaaatatcctacgtttaactgcggaaacaacagtaaatcagtggggagttatttggattaatgttattattgctgtaaattctggtttgttaaataaattagaattagattctaataagtattctgtttttttatcaagggatgttgatttaaaaaaggtagaatatgccagagttctattgatagctcttataaatctaataattagtatgattttaagcttaatgcttattgtaattagttttgtcctacctactccaagtcttattagtataggtaggatactattaactatcttgttaatttggttgactacactatggcaaatcccgtttattttatggctatcaagaaaaattaatgtgtattttgctatgattattaatattatatctccactaattattggtacaagtttttctctcttaaataaatggtatttgttcccttatgattggtcgttgaagttgcttgagccaatgacaagaatgagaataaatagtataccttttggagcggagtttgttccagactactcacagatttttatatcattgttcctaggaattgcttttttcatcttactgaccaatctatttgctatctctttcaaaaaacaggtgaaa

SEQ ID NO: 7910 - protein, 249 aa, Streptococcus pyogenes
MVQIFLSNLLKIKNTSISKLILIFPIICVMLSLLFSALGGENILRLTAETTVNQWGVIWINVIIAVNSGLLNKLELDSNKYSVFLSRDVDLKKVEYARVLLIALINLIISMILSLMLIVISFVLPTPSLISIGRILLTILLIWLTTLWQIPFILWLSRKINVYFAMIINIISPLIIGTSFSLLNKWYLFPYDWSLKLLEPMTRMRINSIPFGAEFVPDYSQIFISLFLGIAFFILLTNLFAISFKKQVK

SEQ ID NO: 7911 - DNA, 720 bp, Streptococcus pyogenes
atgaaatcatatttatgttctaattttttaaaaatcaaaaatacttcatatttactaatacatattttagctgcactattatttcccttacttctatttttctattggagtcaacgtggaggtttacaaagcaggactgtattattctcctactttcaaatagtaggtgtacttcttccttttgttgcaagtattgtgtgcattcaactaaaaaatttggaagaatcatctggaaaatataaatatttattgggttactcacagtcgaattataagccatttattgtagaattagtatttctatggttatgctattgtatagtattaattatttcaattactatatttattcttttattgaaaactattggtataaatgtatctctcagactacttattttgaatagtttaatttatatcatttttgcctatgtaacctatctgatcaatcatattattagctatatatttagtacaggtgtggcattaggtatttcaatggtaggtgttattgctgcagcattttgtgaaacgagccttggtgataaggtatggtttcttattccatgggcatggcttttaagaatatcagatactctatataaccaacagaaaatggcaattgttccacttattgttatattttttgtttcatgcacagtagctttacttcatatacgaatatttaaaaggtggaatcaagactgtttgacaagtagt

SEQ ID NO: 7912 - protein, 240 aa, Streptococcus pyogenes
MKSYLCSNFLKIKNTSYLLIHILAALLFPLLLFFYWSQRGGLQSRTVLFSYFQIVGVLLPFVASIVCIQLKNLEESSGKYKYLLGYSQSNYKPFIVELVFLWLCYCIVLIISITIFILLLKTIGINVSLRLLILNSLIYIIFAYVTYLINHIISYIFSTGVALGISMVGVIAAAFCETSLGDKVWFLIPWAWLLRISDTLYNQQKMAIVPLIVIFFVSCTVALLHIRIFKRWNQDCLTSS

SEQ ID NO: 7913 - DNA, 153 bp, Streptococcus pyogenes
ttggaagaacgtgtattaaggagtaaaaaaattattgtcacagataacactttaggaggtagcaaagactatgtggggctggtattcttatcacgtaaaaaaagcaatgaagataaaagtgtagtgtactttagaacttatttgagtgtttgg

SEQ ID NO: 7914 - protein, 51 aa, Streptococcus pyogenes
LEERVLRSKKIIVTDNTLGGSKDYVGLVFLSRKKSNEDKSVVYFRTYLSVW

SEQ ID NO: 7915 - DNA, 111 bp, Streptococcus pyogenes
atggttcatcaatcaattaagaaaaaagttatcaagatatcattaaaaatagttgctcaaagttctttcaaatcaaaagattatgatatcgctatgttgagttttagtgta

SEQ ID NO: 7916 - protein, 37 aa, Streptococcus pyogenes
MVHQSIKKKVIKISLKIVAQSSFKSKDYDIAMLSFSV

SEQ ID NO: 7917 - DNA, 345 bp, Streptococcus pyogenes
atggcttttgaaaaagaaattaagcttaaagactgtaaatacctttatacaatcagtccaaacattaaaaaatataccctaagagatactacatttagtcaaactaaagtagggcactaccaattaatacgtttactcgaaaaaatacctaattcaggggatggtttccctttaaaaatcactattaataaagaactcacagggtttaaattagctatcaccgatcagtctggtcttagattagttaatatttttaaaacaaaagataatcaaatccttcaagataaattttatttcttgatggacagccttgtagaacgtgaaatttttagcaaaacagtcgtc

SEQ ID NO: 7918 - protein, 115 aa, Streptococcus pyogenes
MAFEKEIKLKDCKYLYTISPNIKKYTLRDTTFSQTKVGHYQLIRLLEKIPNSGDGFPLKITINKELTGFKLAITDQSGLRLVNIFKTKDNQILQDKFYFLMDSLVEREIFSKTVV

SEQ ID NO: 7919 - DNA, 129 bp, Streptococcus pyogenes
gtgaagtctattatgaaaaaaagaaattttaaacttacagaaatgttacaattggttttattagtggttcctgctgtaaaacttgctaaaaaaatgtttaacgatagtaaaacaccgtctaaaagaaag

SEQ ID NO: 7920 - protein, 43 aa, Streptococcus pyogenes
VKSIMKKRNFKLTEMLQLVLLVVPAVKLAKKMFNDSKTPSKRK

SEQ ID NO: 7921 - DNA, 366 bp, Streptococcus pyogenes
atgactaaaaaaaatcatggcgttttttgggggttgttgcttggatcagcagcagctagcattgcttacttaagtttatcgtcttccaaaaaagatcaactcttgaaagatagtgctaaaaaaatagatgatctcaacgcttacttgcaagataaaagtaagcaagttctggatgcagtatcggaaaaagtccaagaatccaaagatgctgttgaagtttacggtggtatcgccgcagaaacagttgaagaatctttgggacaggctaaagaaaaggtagaaggaattggcgaagctactagccaaactatccaatctaaaatggaaaaactcactagcgataagacagatgctgatgatgaaaaa

SEQ ID NO: 7922 - protein, 122 aa, Streptococcus pyogenes
MTKKNHGVFWGLLLGSAAASIAYLSLSSSKKDQLLKDSAKKIDDLNAYLQDKSKQVLDAVSEKVQESKDAVEVYGGIAAETVEESLGQAKEKVEGIGEATSQTIQSKMEKLTSDKTDADDEK

SEQ ID NO: 7923 - DNA, 105 bp, Streptococcus pyogenes
ttgctgaatatccgcaacaatttgattaaagtcatccacaaggtctttgcctttgtgataaaatatctccagcttcggttagtagtagctgtcaatcactttgtg

SEQ ID NO: 7924 - protein, 35 aa, Streptococcus pyogenes
LLNIRNNLIKVIHKVFAFVIKYLQLRLVVAVNHFV

SEQ ID NO: 7925 - DNA, 1404 bp, Streptococcus pyogenes
ttgattcagtttggaggttttagcatgcagcagcaagtcgcaataacagaaacagttttacgggacggtcatcaaagtttgatggcaacgcgtttatctattgaagatatgcttcctgtccttaccatcttagacaagattggttattattccctagagtgttggggaggagcaacctttgatgcctgtattcgttttttgaacgaagacccttgggaaaggctgcgcacgttaaaaaaaggcttacctaatacccgtttacaaatgttattaagaggccaaaaccttttaggctaccgtcattatgcagatgacatcgttgacaaattcattagtttatcagctcaaaatgggattgatgttttccgcatttttgatgccctaaatgacccacgaaatatccagcaagccttaagagctgtgaaaaagacgggtaaagaggctcaactgtgtattgcctatacaactagcccagtgcacacgcttaactattacctttctttagtgaaagaattggttgagatgggagctgattctatctgcatcaaagatatggctggtattctaactcccaaagcggctaaagagttggtatctggtatcaaagccatgactaacttacctcttattgtgcatacccatgcaactagtggcatttctcagatgacctatctagcagcagtagaagctggtgctgatagaattgatacggctttgtcaccttttagcgaaggaacttcacaacctgctacagaatccatgtatttagccttaaaagaagcaagttatgatatcacattagatgaaacgctactggaacaggctgctaatcaccttcgacaagcccgtcaaaagtacttagcagatggcattctggatcccagtcttctctttccagacccaaggacactacaataccaagttcctggaggcatgttgtctaatatgctatctcagctgaaacaagccaatgccgaatcaaaattagaagaagttttagcagaagttcctcgggtaagaaaagacttgggttatcctcccttagtaacaccgcttagccaaatggtcgggactcaagctgctatgaatgtgattttaggaaaaccttaccagatggtgtctaaggaaattaaacaatacttggcaggcgactatggcaaaacaccagcaccagtcaacgaagacttaaaacgaagtcaaattggctcagctcctgtcaccacaaatcgtcctgcagatcaactaagtcctgaattcgaggtgttaaaagcagaagtagcagatttagcccaaacggacgaagatgtgctgacttatgccctcttcccaagcgtagcaaaaccgtttttaacaaccaaataccaaactgatgacgtcattaaagtgactgcctttatcaaagca

SEQ ID NO: 7926 - protein, 468 aa, Streptococcus pyogenes
LIQFGGFSMQQQVAITETVLRDGHQSLMATRLSIEDMLPVLTILDKIGYYSLECWGGATFDACIRFLNEDPWERLRTLKKGLPNTRLQMLLRGQNLLGYRHYADDIVDKFISLSAQNGIDVFRIFDALNDPRNIQQALRAVKKTGKEAQLCIAYTTSPVHTLNYYLSLVKELVEMGADSICIKDMAGILTPKAAKELVSGIKAMTNLPLIVHTHATSGISQMTYLAAVEAGADRIDTALSPFSEGTSQPATESMYLALKEASYDITLDETLLEQAANHLRQARQKYLADGILDPSLLFPDPRTLQYQVPGGMLSNMLSQLKQANAESKLEEVLAEVPRVRKDLGYPPLVTPLSQMVGTQAAMNVILGKPYQMVSKEIKQYLAGDYGKTPAPVNEDLKRSQIGSAPVTTNRPADQLSPEFEVLKAEVADLAQTDEDVLTYALFPSVAKPFLTTKYQTDDVIKVTAFIKA

SEQ ID NO: 7927 - DNA, 312 bp, Streptococcus pyogenes
atgacctattcctttattgatatcttacaagttaccttagtatccttgttcttagtgttaacctgtttaacagggattatgggattaatgatgctaagtggtaaattattgtcacaagaaaaaaaaactctctctcaacaagcttccagcattcctcaagagcaagaagctgacaagttgagtggagaagctctcgaaactcttttagccaaagacgaattggctagaattgctgttatgactagtcttgcttatgctagccaagaagagtcaggaaaacggtttgaagttattgccgtggaaaggaaatcc

SEQ ID NO: 7928 - protein, 104 aa, Streptococcus pyogenes
MTYSFIDILQVTLVSLFLVLTCLTGIMGLMMLSGKLLSQEKKTLSQQASSIPQEQEADKLSGEALETLLAKDELARIAVMTSLAYASQEESGKRFEVIAVERKS

SEQ ID NO: 7929 - DNA, 1128 bp, Streptococcus pyogenes
atgctagacgtactcaatcaaatggtccaatcgtcaggattggctcatctaactgttaataatcttatcatgatttgcttggccagtttctttttataccttggtatcaaaaaggaatatgagccttaccttatggtaccaatcgcctttgggattttactcgttaatttgcctatggcgggattgatggaccaccctgccaatggtaatcctggtggccttctttattacctatataagggaactagcctagggatttacccacctttaatttttctttgtttgggggcatcaactgactttggtcccttgattgccaatcctaaaaccattttactaggaggcgcagcacaagttgggattttcttagcctttttccttgctattatgttaggcatgacacctcaagaagcggcttctgtcgggattattggtggtgccgatggaccaacagctatttatgtgacgacaaagttggcgcctgatttactctctactatcgccctagcagcttattcttacatggctctggtacctattattcaacctcccatcattaaactcttgactaccaaggcggaacgccaagtgaaaatgactcaagcaagaactgtttcacaaaaagaaaaaatcattttcccgattatggtaacaatctttgtcagccttttggttccaagtgctacaaccttggttggctgtttgatgctgggaaatctggtcagagaaattaaaattgttcctaaaattgtagagaatctccaacaagtggttatgttttgcattactatcattttagggttaaccgttggtgctaaggccaatggagatctctttttatcagccacaaccttgaaaattattgcccttgggctaatcgcctttgctgctgggacagcagggggtgtcttgatggggaaggtcatgtactatttatctggtaacaaagtgaaccctatgataggagcagcaggtgtttcagctgttccgatggcagcacgagtggtccaaaagatcggacaagaagaagatccaagtaatttcttactcatgcacgccatggggcccaatgtagctggcgttattggctcagccattgcctcaggtgccttgctggccttctttggc

SEQ ID NO: 7930 - protein, 376 aa, Streptococcus pyogenes
MLDVLNQMVQSSGLAHLTVNNLIMICLASFFLYLGIKKEYEPYLMVPIAFGILLVNLPMAGLMDHPANGNPGGLLYYLYKGTSLGIYPPLIFLCLGASTDFGPLIANPKTILLGGAAQVGIFLAFFLAIMLGMTPQEAASVGIIGGADGPTAIYVTTKLAPDLLSTIALAAYSYMALVPIIQPPIIKLLTTKAERQVKMTQARTVSQKEKIIFPIMVTIFVSLLVPSATTLVGCLMLGNLVREIKIVPKIVENLQQVVMFCITIILGLTVGAKANGDLFLSATTLKIIALGLIAFAAGTAGGVLMGKVMYYLSGNKVNPMIGAAGVSAVPMAARVVQKIGQEEDPSNFLLMHAMGPNVAGVIGSAIASGALLAFFG

SEQ ID NO: 7931 - DNA, 882 bp, Streptococcus pyogenes
atgactaaggcagttctaacaagtattagtcaactggccttaaaagctttgctttatgaagtctcactatctccaaaacctggtttagttgatcgatttgataacggtgcccatgatgacatgtcctttataacctttatcgacagtatgatagcactctctcctttttttcaggcttatatcgaaacaggttttgcttatgcaaaagaagagccacttcttctgtttaaccgtcttagacaactaggtcaaaaggccgaggaaaccatgttttgtgctactcagggaattaacactcataaaggcctgaatttttccatggctttacttcttggtgcaactggggcctatctagcaagaacacctcacttaatgactgatttagggcgttttagcaaggaagatactctagctatctgtcgtttagtaaaacctatgacggcacatttgattcaaacagaccttggtcatttgaacactaaaaaagagttcacttatggggagcaactctttgtaacttatggcatcaaaggacctcggggtgaggcaagcgagggattcacgaccttaacagaccatgccttgccctactttcgtcagatgataagtcaaaatgaccccgaaaccagtcagcttcgtcttcttgtttatttgatgtctattgttgaagatggaaatctgattcatcgtggagggattgaagcatggaaaggcgttaaggcagatatgcgactactcctgcaacaagatttatcaacaactgacctaagattggctttgtcctcctacaatcaatgcctcattaatcagcatttaagccctgggggcgcggcagatttattggctctgaccttttattttgcttttttagaaaaactactt

SEQ ID NO: 7932 - protein, 294 aa, Streptococcus pyogenes
MTKAVLTSISQLALKALLYEVSLSPKPGLVDRFDNGAHDDMSFITFIDSMIALSPFFQAYIETGFAYAKEEPLLLFNRLRQLGQKAEETMFCATQGINTHKGLNFSMALLLGATGAYLARTPHLMTDLGRFSKEDTLAICRLVKPMTAHLIQTDLGHLNTKKEFTYGEQLFVTYGIKGPRGEASEGFTTLTDHALPYFRQMISQNDPETSQLRLLVYLMSIVEDGNLIHRGGIEAWKGVKADMRLLLQQDLSTTDLRLALSSYNQCLINQHLSPGGAADLLALTFYFAFLEKLL

SEQ ID NO: 7933 - DNA, 693 bp, Streptococcus pyogenes
atgaatcctattatcgaagccgttaaacaaaatcttgacctattaagaaatatccctttgaaaatagccttttataacgctcttaaaaagaccattattttgcgacaaattcctgttggaagccgcattaatgaaaaagagttttccattgcgcttaatattagcaggacacctattcgctacgctttgggattattgtctgaagaacaccttgtagagcacattcctaaaaaaggcattattgtcaaaggagttagtatcaaggatgcctgtgaaatttttgaaattcgaaaagctctagagactctcgcaacagtgcaagcgatgcatttaatgacagaagaagattttaaagtcatgcataacttgttggaagactgtgaaacctttatcgcagaggatgacaccaatcgtattttggataattttaatgcctttaacaatttgatttacagctatagccaaatggtccgcttaaaagaaattgtgacagaattgcaagcttatttggtctactttagaaaaatttcgatttcttcagttgaacgccgtaaacgagctctatctgaacactggatgatttaccgaggtatgaagaacaaagatcatgagcaaattacgttgattacacatgaacacttgaatagctcacttgaatttatcttaaaagaaatgaggcctgagcaaaatgac

SEQ ID NO: 7934 - protein, 231 aa, Streptococcus pyogenes
MNPIIEAVKQNLDLLRNIPLKIAFYNALKKTIILRQIPVGSRINEKEFSIALNISRTPIRYALGLLSEEHLVEHIPKKGIIVKGVSIKDACEIFEIRKALETLATVQAMHLMTEEDFKVMHNLLEDCETFIAEDDTNRILDNFNAFNNLIYSYSQMVRLKEIVTELQAYLVYFRKISISSVERRKRALSEHWMIYRGMKNKDHEQITLITHEHLNSSLEFILKEMRPEQND

SEQ ID NO: 7935 - DNA, 1422 bp, Streptococcus pyogenes
ttgaaaaaggagataacaatgatgttattaacaatgctggcttatgccatgattattgtctttatgtacgtggtaatgaagaaaaaaatgaccccttttactgctttggtcatgattccattaatcatgacgattgctgttatactgactggttcagctgacttcaatgcagatgccaaatttgttgcctttgttggtgacggtggaattgctaaagacctaacagctatcggaccaatggttatgtatggtatcaacaatactgctaaaacaggtatcatgttgctatttgccattttgttcttctctgtcatgttagatgcaggattgtttgatccgattactgaaaagatgattcgctttgctaaaggtgatccaatgaaggtgcttatcgcaacagctgtcgttgctgctgcagtatctcttaatggtgatggaacaaccactactttaatttgttgctctgctttcttacctatctataaaaaattggacatgaaaatcatgaacctaggtgtcttgattattcttcaaaatactattatgaacttactgccatggggtggccctactgctcgtgcgatgtctgttcttggtgtcggtcctgaaattcttggctatcttgcaccgggtatgattttatctcttctttatgtgatttgttgggttgctccaagcatggggcgtaaagaacgtgcaagacttggtgttattgacttgtctgaagaagacatgcgtcaactcacagacattactgacccagataccctttttattcgtcgtcctaaaaactttgttttcaatgctatcttaaccattggattaatcacttggttagttgctggctctttcaacaaatctattgctatggcaccgcttcttctttttgcggtgggaacttgtatcgccttgatggtcaattacccagtgcttaaagatcaatcaaaacgcattggtgacaatgctggtgatgcggttcaagtggttattctcgtctttgctgctggtatctttatgggtctttttcaaggttctggtatggctagcgctcttgcacaaagttttgcaaccattattccaaaacaactggcaggtttctggggtctcgttattgccttagtttctgcacctggtaccttctttatctccaatgatggtttttactatggtatcttgcctgttcttgcagaagctggtgctgaatatggtttcagtaacatggctatggcacttgcttccctcatgggacaagccttccacttacttagtccattagttgccttcatttatcttcttcttcgcttgacaggtcttgacatgggggaatggcaaaaagaggctgctaaatatgcccttatcatctttgttatctttgtggtaaccattattgccatgggacaaatgccactttacattccacaa

SEQ ID NO: 7936 - protein, 474 aa, Streptococcus pyogenes
LKKEITMMLLTMLAYAMIIVFMYVVMKKKMTPFTALVMIPLIMTIAVILTGSADFNADAKFVAFVGDGGIAKDLTAIGPMVMYGINNTAKTGIMLLFAILFFSVMLDAGLFDPITEKMIRFAKGDPMKVLIATAVVAAAVSLNGDGTTTTLICCSAFLPIYKKLDMKIMNLGVLIILQNTIMNLLPWGGPTARAMSVLGVGPEILGYLAPGMILSLLYVICWVAPSMGRKERARLGVIDLSEEDMRQLTDITDPDTLFIRRPKNFVFNAILTIGLITWLVAGSFNKSIAMAPLLLFAVGTCIALMVNYPVLKDQSKRIGDNAGDAVQVVILVFAAGIFMGLFQGSGMASALAQSFATIIPKQLAGFWGLVIALVSAPGTFFISNDGFYYGILPVLAEAGAEYGFSNMAMALASLMGQAFHLLSPLVAFIYLLLRLTGLDMGEWQKEAAKYALIIFVIFVVTIIAMGQMPLYIPQ

SEQ ID NO: 7937 - DNA, 180 bp, Streptococcus pyogenes
atgcagtttttacaaaaatggtttaaacactctaaaaaagagaagttgaaagaatcctcgtcccttagtacagaaatagaaccttctgaaaactgggcaaagattcccgcttatattcctgcagacaaaagtgattacaaaaaggttactttaattaccagtgttattgctgctgggcga

SEQ ID NO: 7938 - protein, 60 aa, Streptococcus pyogenes
MQFLQKWFKHSKKEKLKESSSLSTEIEPSENWAKIPAYIPADKSDYKKVTLITSVIAAGR

SEQ ID NO: 7939 - DNA, 162 bp, Streptococcus pyogenes
gtgttattgctgctgggcgatagacctaatagtcaattcaaggttaaacgcattctcaagcgcaatcctgaggcaatcactgtttctttaattgcttcaagtatcgctgcaggtgtttacccagaaagtcagtttcgggtgacatccatctattgcaaaagg

SEQ ID NO: 7940 - protein, 54 aa, Streptococcus pyogenes
VLLLLGDRPNSQFKVKRILKRNPEAITVSLIASSIAAGVYPESQFRVTSIYCKR

SEQ ID NO: 7941 - DNA, 1119 bp, Streptococcus pyogenes
gtggacactttaatcgcaggaataacctccatcaccattcctcaaattgttatgatggtcattggtgccctcttaatgtatctaggaattaaaaaagaatacgaaccaaccttacttgtccccatgggacttggaaccattctcgttaacttccctggttcaggagttttaacacaagtggttaacggagtcgagcaagaaggggtttttgaggctctcttcaattttgggattggaacagaacttttcccactgttgattttcattggtataggagccatgattgactttggccccttgcttcaaaacccattcatgctcttgtttggtgatgcagctcaattcggaattttctttgttgtggttgttgccgtactggctggctttgacattaaagaagcagcttcaatcggcattatcggagcagcagacggaccgacttctatctttgttgccaaccaactggccaaggatttactgggtccaattacggttgcagcctattcttacatggctctggttcctattatccaaccatttgccattaaattagtgacaacgaaaaaagagcgccgtatccgtatgacttacaaagctgagaatgtatctcaaatgactaaaatcttattcccaatcatcattaccttagtagcagggttcatcgccccaatttctctacctttagttggctttttgatgttcggtaacttattacgggagtgtggtgtgctcgatcgcctgtcacaaactgctcaaaatgaattggtaaacattattagtatcttgcttggattgaccatctctattaaaatgcaggcagacctgttcttaaatgtacagacactcttaatcatcgtctttggtttacttgcttttatcatggattctatcggtggggtcatgtttgccaaatttctcaatctcttccgaaaagagaagattaatccaatgattggcgctgcgggtatttcagcttttccaatgtcaagtcgtgtcattcaaaaaatggcaacagatgaagacccgcaaaactttatcctcatgtatgctgtaggtgccaatgtctctggccaaatcgcctctgttatcgcaggtggtttgttgctagcttactttagc

SEQ ID NO: 7942 - protein, 373 aa, Streptococcus pyogenes
VDTLIAGITSITIPQIVMMVIGALLMYLGIKKEYEPTLLVPMGLGTILVNFPGSGVLTQVVNGVEQEGVFEALFNFGIGTELFPLLIFIGIGAMIDFGPLLQNPFMLLFGDAAQFGIFFVVVVAVLAGFDIKEAASIGIIGAADGPTSIFVANQLAKDLLGPITVAAYSYMALVPIIQPFAIKLVTTKKERRIRMTYKAENVSQMTKILFPIIITLVAGFIAPISLPLVGFLMFGNLLRECGVLDRLSQTAQNELVNIISILLGLTISIKMQADLFLNVQTLLIIVFGLLAFIMDSIGGVMFAKFLNLFRKEKINPMIGAAGISAFPMSSRVIQKMATDEDPQNFILMYAVGANVSGQIASVIAGGLLLAYFS

SEQ ID NO: 7943 - DNA, 132 bp, Streptococcus pyogenes
atgacaattaatatggaccatttgattagttcctttgagctaatggcgcttggtatggcaggtgtctttatcgtgttaggcattctctatcttgtcgcagagatcctgatcaaacttttcccagttagtaaa

SEQ ID NO: 7944 - protein, 44 aa, Streptococcus pyogenes
MTINMDHLISSFELMALGMAGVFIVLGILYLVAEILIKLFPVSK

SEQ ID NO: 7945 - DNA, 306 bp, Streptococcus pyogenes
atggatattaaacaaactgccgttgctggttcacttgaatcaagtgacctaatgattacagtatcccctaatgacgagcaaaccattacaataaccctagacagtagtgttgaaaaacaatttggcaatcacattcgtcaactcattcatcaaaccctagtgaatttgaaggtgacggctgctaaagtagaggctgttgataaaggtgcattagattgcaccattcaagcgagaaccatcgcagctgttcatcgcgctgctggtattgaccaatacgattggaaggagattgactcatggaacgtt

SEQ ID NO: 7946 - protein, 102 aa, Streptococcus pyogenes
MDIKQTAVAGSLESSDLMITVSPNDEQTITITLDSSVEKQFGNHIRQLIHQTLVNLKVTAAKVEAVDKGALDCTIQARTIAAVHRAAGIDQYDWKEIDSWNV

SEQ ID NO: 7947 - DNA, 885 bp, Streptococcus pyogenes
atggaacgtttaagaagaacaatgatgtttgtgcctggtgccaatgcagccatgcttcgagatgctcctttatttggcgctgattcaatcatgtttgacttggaagattctgtttcactcaaagaaaaagacacctctagagctctcgttcattttgcgcttaaaacttttgattattcaagcgttgaaacggttgttcgtgtgaatggtcttgattcttgtggggctttagacatcgaagctgttgttttggcaggtgtcaacgtgattcgtcttccaaaaacagagactgctcaagatattattgatgtggaggctgttattgaacgtgtcgaacgcgagaacagcattgaagttggtcgcacacgtatgatggcagccattgaatcagccgaaggtgtcctaaatgctcgtgagattgccaaagcttctaagcgcttgattggtattgctcttggagcagaagactatgtcacgaatatgaaaacgcgtcgttacccagatggtcaagaattattctttgctcgtagcatgattttacacgctgctcgtgctgctggaattgctgccattgatactgtttattctgatgtcaataataccgaagggttccaaaacgaagttcgcatgatcaaacagttaggatttgatggtaaatcggtcatcaaccctcgccaaattcctctggtcaatgagatttataccccaacaaaaaaagaaattgaccatgccaaacaagtcatctgggcaattcgtgaagctgaaagcaaaggctctggcgttatttccttaaatggaaaaatggttgataaaccaatcgttgaacgtgcagaacgtgtgattgccctagcaacagcagcaggtgttttatctgaggaggatatt

SEQ ID NO: 7948 - protein, 295 aa, Streptococcus pyogenes
MERLRRTMMFVPGANAAMLRDAPLFGADSIMFDLEDSVSLKEKDTSRALVHFALKTFDYSSVETVVRVNGLDSCGALDIEAVVLAGVNVIRLPKTETAQDIIDVEAVIERVERENSIEVGRTRMMAAIESAEGVLNAREIAKASKRLIGIALGAEDYVTNMKTRRYPDGQELFFARSMILHAARAAGIAAIDTVYSDVNNTEGFQNEVRMIKQLGFDGKSVINPRQIPLVNEIYTPTKKEIDHAKQVIWAIREAESKGSGVISLNGKMVDKPIVERAERVIALATAAGVLSEEDI

SEQ ID NO: 7949 - DNA, 1530 bp, Streptococcus pyogenes
atggtaacaaataaactcggtagagatattcctcaaccatacgccgaccaatacggtgtctttgaaggagaactcgcaaatatcaaacagtatgacgaatcaagtcgccgtattaaaccagttaagcctggagattctaaattactaggatctgttcgtgaagcgattgaaaaaacaggtttaacagatggcatgaccatttctttccaccaccatttccgtgaaggggatttcattatgaatatggtcttggaggaaattgccaaaatgggcattaaaaacctgtctattgccccaagttccatcgctaatgtacatgagcctttgattgatcacatcaaaaatggtgtggtcactaacatcacttcatctggtcttcgtgacaaagtaggggcagccatctcagaaggactaatggaaaatcctgtggttattcgctcccatggtggtcgcgctcgtgccattgctagtggggatatccatattgatgttgcctttctgggcgccccaagttcagatgcttacggaaatgttaatgggacaaaagggaaagcaacctgtggttctttgggctatgccatgattgatgccaaatatgcggatcaggtggttatcttgacagataatttggttccttatcctaataccccaatcagcattcctcaaacagatgttgactatgtggtaacagtggatgctatcggagatcctcaaggaatcgccaaaggggcaactcgttttacgaaaaatcctaaagaactcttaattgcagaatacgccgctaaagtaatcaccaactctccttattttaaagaaggattctctttccaaactggaacaggtggcgcttctttggcagtaacccgtttcatgcgtgaagctatgattaaagaaaatatcaaagctagctttgctcttggtggtattaccaatgctatggtggagttgctcgaagaagaactggttgaaaaaattcttgatgtccaagactttgatcacccatcagctgtttctcttggtaagcatgctgaacattatgaaattgatgccaacatgtatgcctcacctttgagcaagggtgctgttatcaatcaattagacacttgtattttatcagcccttgaagttgatactaacttcaatgttaatgtgatgacaggatctgacggcgtgattcgtggcgcttctggaggacactgcgacactgcctttgcggctaagatgagtttggttatttcaccacttatccgcggacgcatcccaacttttgtagatgaggttaatacggtcattacaccaggaacaagtgtcgatgtgatcgtcacagaagtgggaattgccattaacccaaatcgtcaagacttagtagaccatttcaaatccctcaatgtgccacaatttagtattgaggagctaaaagagaaggcttacgccatcgttggcacacctgagcgtattcaatatggtgataaggttgttgctcttattgaataccgtgacggtagcctcatggatgtggtttacaatgtg

SEQ ID NO: 7950 - protein, 510 aa, Streptococcus pyogenes
MVTNKLGRDIPQPYADQYGVFEGELANIKQYDESSRRIKPVKPGDSKLLGSVREAIEKTGLTDGMTISFHHHFREGDFIMNMVLEEIAKMGIKNLSIAPSSIANVHEPLIDHIKNGVVTNITSSGLRDKVGAAISEGLMENPVVIRSHGGRARAIASGDIHIDVAFLGAPSSDAYGNVNGTKGKATCGSLGYAMIDAKYADQVVILTDNLVPYPNTPISIPQTDVDYVVTVDAIGDPQGIAKGATRFTKNPKELLIAEYAAKVITNSPYFKEGFSFQTGTGGASLAVTRFMREAMIKENIKASFALGGITNAMVELLEEELVEKILDVQDFDHPSAVSLGKHAEHYEIDANMYASPLSKGAVINQLDTCILSALEVDTNFNVNVMTGSDGVIRGASGGHCDTAFAAKMSLVISPLIRGRIPTFVDEVNTVITPGTSVDVIVTEVGIAINPNRQDLVDHFKSLNVPQFSIEELKEKAYAIVGTPERIQYGDKVVALIEYRDGSLMDVVYNV

SEQ ID NO: 7951 - DNA, 627 bp, Streptococcus pyogenes
ttgttgctcttattgaataccgtgacggtagcctcatggatgtggtttacaatgtgtaaagacacttatttttcaggcgaagctatccaacttagtgatatgttaagagcccgcgaagaaagagctctgcgtcagctgcatttattaaaggagtacccagaaggtagcttattatcggtcaccatgaatatccctggaccaattaaaacctctcctaaacttcttgaagcttttgatatagtgattaaggccattcaaactgccttagctgacgataagatttgttaccagttgcgattactgcctacaacgggttatgagtattacctcatcacaagtctacctagccgcgacctgaagttaaaaatgatagccttagagacagagttgccaataggtcgtctcatggatttagatgtcttggtcttgcaaaatgatctgcctcattcaattagcagaaccgtattaggaggctcccctaggcaatgttttatctgttctaaagaggccaaagtctgcggtcgcctacgtaagcacagtgtcgaggagatgcagactgctatttcaaaattactccattcatttttcaataaagacaaccaatcatcgtcatcagataagacaggt

SEQ ID NO: 7952 - protein, 209 aa, Streptococcus pyogenes
LLLLLNTVTVASWMWFTMCKDTYFSGEAIQLSDMLRAREERALRQLHLLKEYPEGSLLSVTMNIPGPIKTSPKLLEAFDIVIKAIQTALADDKICYQLRLLPTTGYEYYLITSLPSRDLKLKMIALETELPIGRLMDLDVLVLQNDLPHSISRTVLGGSPRQCFICSKEAKVCGRLRKHSVEEMQTAISKLLHSFFNKDNQSSSSDKTG

SEQ ID NO: 7953 - DNA, 1410 bp, Streptococcus pyogenes
ttgatgaggagaacaattatgacgaaaatccgtataacggaaacagttttacgtgatggtcaacaaagtcagattgccacacgtatgacaaccaaggaaatgattcctattctcgaaacgctagacaatgctggttatcatgcccttgaaatgtggggaggagcaacctttgattcctgcctacgctttttaaatgaagacccttgggaacggctaagagccatccgtaaagcagtgaaaaagactaaacttcagatgctcttacgcggacaaaaccttcttggatatcgcaattatgctgacgatgtggtcagatcctttattcaaaaatccattgaaaatgggattgatattgtccgtattttcgatgctttaaacgacccacgcaacttgcaaacagctgtttcagcgactaaaaaatttggagggcatgctcaagttgccatttcttacacgacaagtccggtacataccattgactactttgttgaattggcgaaagcttaccaagctatcggagcggactccatttgtatcaaagacatggctggtgtcttaactcctgaaataggttaccaattggtcaaatgtatcaaggagaatacaactatccctcttgaggttcatacccatgctaccagtggtatttcagaaatgacttacttaaaagtagcagaagcaggagctgatattattgatacggcgatttcctctttttcagggggaaccagtcagcctgccacagagtcaatggcgattgccttgacggatttaggctttgacacaggcttggatatgcaagaggtggccaaagttgcagaatatttcaacactattcgtgaccactatcgagaaatagggattttaaatcctaaagtcaaagatactgagccaaaaacattgatttaccaagttccaggtggcatgctatcaaacctattgagccaattaaccgagcaaggcctaactgataaatacgaagaagtcttagcagaagtacctaaagtaagggctgatcttgggtatccgccactcgtaacgccattatcacaaatggttggcacacaggccttgatgaatatcatctcaggggaacgttacaaggtagttccaaatgaaatcaaagactatgttcgagggctatacggtcaatcaccagcgccattagcagaaggtatcaaagagaaaatcattggtgacgaagcagttattacttgcagaccagccgacctaatcgagcctcaaatgatttatctacgtgacgagattgctccatacgctcattcagaagaagacgtgttaagctatgcaagcttcccgcaacaagctagagatttcttgggacgccgtgaagatcctttctatgatgttccggttcaagaagttactgtacaactggacattcaagac

SEQ ID NO: 7954 - protein, 470 aa, Streptococcus pyogenes
LMRRTIMTKIRITETVLRDGQQSQIATRMTTKEMIPILETLDNAGYHALEMWGGATFDSCLRFLNEDPWERLRAIRKAVKKTKLQMLLRGQNLLGYRNYADDVVRSFIQKSIENGIDIVRIFDALNDPRNLQTAVSATKKFGGHAQVAISYTTSPVHTIDYFVELAKAYQAIGADSICIKDMAGVLTPEIGYQLVKCIKENTTIPLEVHTHATSGISEMTYLKVAEAGADIIDTAISSFSGGTSQPATESMAIALTDLGFDTGLDMQEVAKVAEYFNTIRDHYREIGILNPKVKDTEPKTLIYQVPGGMLSNLLSQLTEQGLTDKYEEVLAEVPKVRADLGYPPLVTPLSQMVGTQALMNIISGERYKVVPNEIKDYVRGLYGQSPAPLAEGIKEKIIGDEAVITCRPADLIEPQMIYLRDEIAPYAHSEEDVLSYASFPQQARDFLGRREDPFYDVPVQEVTVQLDIQD

SEQ ID NO: 7955 - DNA, 1050 bp, Streptococcus pyogenes
atgccttactacactatttcaaaagtctttccttcagataaaacgacaatggctagtgtaaagaacctgcttcatcaagaaggtattcgtttggatgctcatttagattatacttgtgccatcatgaatgcgcaaaatgatgtgattgctaccggttcttactttggaaatagcttgcgctgtctttgcgtatccagtgcctatcaaggtgaaggacttcttaataggattgtgagtcatctcattgatgaagaatatgcccttggcaactatcatctttttgtttatacgaagacctcttctgctgcttttttcaaagatcttggttttactgaaattgtccatatcgacaatcacatcagtttcttggaaaataaaaaaactggttttcaagattatctgatgacacttaataagcctgagcaaacacctggtaaagtcgctgctattgttatcaacgctaacccctttaccttagggcatcaatttttagtagagaaagctgcaagagaaaatgattgggttcatctgtttatggtcagtgaagaccgcagtctaattcctttttcggtgagaaagaggttgattcaagaaggtctagctcatcttgataatgtcatatatcatgaaacaggtccttatttgattagccaagcgactttcccagcctatttccaaaaagaagacaatgacgtgattaagagccaagctttgctggatactgctatttttctaaagattgctcaaaccttacagattacaaaaagatacgttggagaagagccaaccagccgagtaactgctatttacaatgaaattatggcagagcagttgcagcaagctggtatcctcctagatattttgccaaggaaagctatcaatcagcagcaagatcctatcagtgcctcaacggctaggcaggcattgaaagataatgattgggaccttctggcaaaactccttcccaaaacgtctttagattatttttgttcgctaaaagcccaacccattattaaaaagatacaagccacttcatctgtcaaacattac

SEQ ID NO: 7956 - protein, 350 aa, Streptococcus pyogenes
MPYYTISKVFPSDKTTMASVKNLLHQEGIRLDAHLDYTCAIMNAQNDVIATGSYFGNSLRCLCVSSAYQGEGLLNRIVSHLIDEEYALGNYHLFVYTKTSSAAFFKDLGFTEIVHIDNHISFLENKKTGFQDYLMTLNKPEQTPGKVAAIVINANPFTLGHQFLVEKAARENDWVHLFMVSEDRSLIPFSVRKRLIQEGLAHLDNVIYHETGPYLISQATFPAYFQKEDNDVIKSQALLDTAIFLKIAQTLQITKRYVGEEPTSRVTAIYNEIMAEQLQQAGILLDILPRKAINQQQDPISASTARQALKDNDWDLLAKLLPKTSLDYFCSLKAQPIIKKIQATSSVKHY

SEQ ID NO: 7957 - DNA, 102 bp, Streptococcus pyogenes
ttgatgagaaccctactagatttaatctataaacatcacaaaaaagtcattcaaagaagggacaaagttagcagtaatattcctttttctaagtggcttgag

SEQ ID NO: 7958 - protein, 34 aa, Streptococcus pyogenes
LMRTLLDLIYKHHKKVIQRRDKVSSNIPFSKWLE

SEQ ID NO: 7959 - DNA, 99 bp, Streptococcus pyogenes
atggctactattaaccgtgacagtttggtgtcaggccgttttccaaactactcaagccacttagaaaaaggaatattactgctaactttgtcccttctt

SEQ ID NO: 7960 - protein, 33 aa, Streptococcus pyogenes
MATINRDSLVSGRFPNYSSHLEKGILLLTLSLL

SEQ ID NO: 7961 - DNA, 156 bp, Streptococcus pyogenes
atgttacacttgctttcgttttatttttttgatactattagtaaagttataactttactaaaggagctaccaaatgttttctggacatcaactaaaaacagcacgattatcaaagggaataactcaatcagaattgggaagattgttgcatgtcaa

SEQ ID NO: 7962 - protein, 52 aa, Streptococcus pyogenes
MLHLLSFYFFDTISKVITLLKELPNVFWTSTKNSTIIKGNNSIRIGKIVACQ

SEQ ID NO: 7963 - DNA, 1431 bp, Streptococcus pyogenes
atgctaagaaaaaagagaattttgggtttatttcgacttgttgaattaattttcctaggattattgttgagtttagttgtttcgtaccttgcgtggaccaatagttttgcaacacttcataatatattagcaactgtcggaatagtggaacgaagcaaagatcaacagcctcgctatcacattggacaagctattcaagtacaaaaaagtggtccatatcatcaatggattggaactattaataaacaggtagaagatatagccgaaaattaccgagtgagttatcattatgaagtggtatttccaataggaaaagtcactgtttctttgccagaacataacctgaaagagcctgataaaccgaggtttaaaaaaggagatatcgttaaattatcttcattaactaaaaagccacatataaaagtatatcaaggtcaattagcgactattaaacaagttaaaaaatgctatgactattcgttaggaggatatcagtacgatattaatctgaaagataatctaagattagatggaatttcagagcaagattttgttaaaccttattatattaggttcaataaaggaaattcccctgagcaaaacaatcgtcttttgcgaaaagctttcgcttatgcaaagcagcatccaaatagcgttatatcttttccaaaggggcaatttcacattggctctttgccttcacaaaaagattattttgagcttccatctgatacagctattattggtcatcagacagagttcattattcacggtaaaatgttgtggtttggattccctacaggaccaaaggctgaacaaggtgttcgtaatctcgtgttgactggagtgcatttcaaagcaaatgatttgaaaaaaggagaccactttatgattatggctgatcatggtactgattggcatatttacgataacaaatttactatggttcataagcgtaatagtcatatttttgatttaggatctctacaaaattcattgtttgagaaaaaccaatttattggctatgcgccagaattagtacaagaccaacagctgctatcaaaggctcaagggcatgattttttttcagaagtcattcagtttgatgctgctgttcatcattttgcatgggatggaggtctacttagtaatattgctccaaactatgaagcatttaaccaaactcgacatctatgtcacaatattactgtaagccaaaatcaatttttaccttatatagatccgactggttgcctgagagcctatagtggttctattggtcagcattcctcaaaagtaggagttattagggttttaaataatgtttttacctcatccattgttactaaagcgaagctcactagttggtttatggaacctattcattttccaccaaattcaccggttattgtcgcaggtaatatcattaat

SEQ ID NO: 7964 - protein, 477 aa, Streptococcus pyogenes
MLRKKRILGLFRLVELIFLGLLLSLVVSYLAWTNSFATLHNILATVGIVERSKDQQPRYHIGQAIQVQKSGPYHQWIGTINKQVEDIAENYRVSYHYEVVFPIGKVTVSLPEHNLKEPDKPRFKKGDIVKLSSLTKKPHIKVYQGQLATIKQVKKCYDYSLGGYQYDINLKDNLRLDGISEQDFVKPYYIRFNKGNSPEQNNRLLRKAFAYAKQHPNSVISFPKGQFHIGSLPSQKDYFELPSDTAIIGHQTEFIIHGKMLWFGFPTGPKAEQGVRNLVLTGVHFKANDLKKGDHFMIMADHGTDWHIYDNKFTMVHKRNSHIFDLGSLQNSLFEKNQFIGYAPELVQDQQLLSKAQGHDFFSEVIQFDAAVHHFAWDGGLLSNIAPNYEAFNQTRHLCHNITVSQNQFLPYIDPTGCLRAYSGSIGQHSSKVGVIRVLNNVFTSSIVTKAKLTSWFMEPIHFPPNSPVIVAGNIIN

SEQ ID NO: 7965 - DNA, 117 bp, Streptococcus pyogenes
atgtccaacggtttagccaaagcttctgctttctcgtcggtatcagaaaggacaataaaaactgctaatattaacttggggatttttaatagctttgaaggcctaaaagcctttcta

SEQ ID NO: 7966 - protein, 39 aa, Streptococcus pyogenes
MSNGLAKASAFSSVSERTIKTANINLGIFNSFEGLKAFL

SEQ ID NO: 7967 - DNA, 90 bp, Streptococcus pyogenes
gtgcttttttgggacttaccgcaagtttggattgccagtcaccatcacaatagaagcaagaatagactaaaaagaactaagtcagcggct

SEQ ID NO: 7968 - protein, 30 aa, Streptococcus pyogenes
VLFWDLPQVWIASHHHNRSKNRLKRTKSAA

SEQ ID NO: 7969 - DNA, 93 bp, Streptococcus pyogenes
atggttgattgtcaccataacaatgacaccttagaagataatgataataatctcttggtaatcagttgttatacacctattttaacattttct

SEQ ID NO: 7970 - protein, 31 aa, Streptococcus pyogenes
MVDCHHNNDTLEDNDNNLLVISCYTPILTFS

SEQ ID NO: 7971 - DNA, 90 bp, Streptococcus pyogenes
ttgctgcaaaacttggctaataaatatccaatgaaaactccagctggagtttttttatacggtaaaaactcaaaaaatacaataaagcgt

SEQ ID NO: 7972 - protein, 30 aa, Streptococcus pyogenes
LLQNLANKYPMKTPAGVFLYGKNSKNTIKR

SEQ ID NO: 7973 - DNA, 954 bp, Streptococcus pyogenes
atgggttcagttgaacgtacattaaaaatgaccttggctaccattgttgccattttaattgcttaccaacttcatctggattatgcaatgtcagcggggatcattgccctgttaagtgttttagacacccgtaagtccagtttggtggtcgctaggaatcgcttgctatcttttttcctggcttttgggattgcgatgatgtgctttagcttgtttggttttacgacagtaggttttatgtgttatttgttaattattattcctttgctctatcactttcagatagaggcaggactggttcctataacagtacttgtgacacatttgattgctaaaaaaagtattgcattacctattttatcgaatgagtttatgctcttttttgtagggactagtgtcgctttactatttaatgcttatatgggtccacaagatcagcaaattcggtactatcaccaaaaagttgaatcggatctgaaaggtatcttataccgttttgaaagctttctactggaaggaaaaggtcaaaatgaagggctcttgatcaaaaaccttgataaaatattagatgaagctctaaaactagtttatcgagaaaggcataatcaactatttcagcagaccaattatcaagttcattattttgagatgcgacgacaacaaaatagactattgggacaaatggctatcaacgtaaacacgttaatgagacaaagtaaggaaagtattcttttgtcacatctttttcacgaaactgcttgtcagctaagcgaacaaaatccggctttaaccttgattgatgacatcgaacaattgcttgaaacctttcgtcatggtgatcttcctcaaactcgggaggaatttgagcgacgtgcggttttatttcagctcttacaagacttagagcgctttatcttattaaaggtagagttttatcaggattatcaaaatgac

SEQ ID NO: 7974 - protein, 318 aa, Streptococcus pyogenes
MGSVERTLKMTLATIVAILIAYQLHLDYAMSAGIIALLSVLDTRKSSLVVARNRLLSFFLAFGIAMMCFSLFGFTTVGFMCYLLIIIPLLYHFQIEAGLVPITVLVTHLIAKKSIALPILSNEFMLFFVGTSVALLFNAYMGPQDQQIRYYHQKVESDLKGILYRFESFLLEGKGQNEGLLIKNLDKILDEALKLVYRERHNQLFQQTNYQVHYFEMRRQQNRLLGQMAINVNTLMRQSKESILLSHLFHETACQLSEQNPALTLIDDIEQLLETFRHGDLPQTREEFERRAVLFQLLQDLERFILLKVEFYQDYQND

SEQ ID NO: 7975 - DNA, 90 bp, Streptococcus pyogenes
gtgacatctcttttatcaaccttaaaattatatcatgtttccaagaaaaatagcaaagaagaccccaaaagtaaagagattccttttttc

SEQ ID NO: 7976 - protein, 30 aa, Streptococcus pyogenes
VTSLLSTLKLYHVSKKNSKEDPKSKEIPFF

SEQ ID NO: 7977 - DNA, 168 bp, Streptococcus pyogenes
gtgctatcatctttctctcctaaaagtcatcgaagacgccaaaagaaaaaagctatctctttctttgagacaacttctgaagcaatgataaaacagcaaacacaaaaaagactaagactgttcttaatggtgtttgtattttaccttctgtccttttgcctgagagat

SEQ ID NO: 7978 - protein, 56 aa, Streptococcus pyogenes
VLSSFSPKSHRRRQKKKAISFFETTSEAMIKQQTQKRLRLFLMVFVFYLLSFCLRD

SEQ ID NO: 7979 - DNA, 771 bp, Streptococcus pyogenes
atgaaacccaaacaccttctctgtctttcaacagttgttgctggattagctttattttcaactatgacgcactcagttttagctgatgatgcttcaaatcccgatgctattttaatgaataacaaccaagcaaattttcaaagagatgctctagtgcaaaagcttgatgagggacatcaacaattagaagctattaaacatgaagctaaaggtactgatattgagactactgttaacaaagctatcgatgctgttgatcacatgaagagttctatacgcttcaatactgaaacgatctatgattttagttcaattggggcaagagtagaagcattatcagatgctatcaaagcaatcgtattttccacaacccaattaactcataaagtagaaaaagcgcatactgatatggggtttgctattactaaattagtcattcgtattatagatccatttgcatctgttgacgctatcaaagctcaagtacaagaaattaaagcacttgaggaaaaagttatcaattatcctgatttacagccaacagaccgtgctactatctatactaaagctaaactaaataaagctatttggaacactcgtttagaaagagataaaaaggttttgggaatcaaaccatttgacgtttacaatagacttaacaaagctatcacacatgcggttggtgtccaactaaatccgacaaccactgttcaacaagttgacgatgaagttattgctgtgcaagatgctttggaaacagctcttaagtca

SEQ ID NO: 7980 - protein, 257 aa, Streptococcus pyogenes
MKPKHLLCLSTVVAGLALFSTMTHSVLADDASNPDAILMNNNQANFQRDALVQKLDEGHQQLEAIKHEAKGTDIETTVNKAIDAVDHMKSSIRFNTETIYDFSSIGARVEALSDAIKAIVFSTTQLTHKVEKAHTDMGFAITKLVIRIIDPFASVDAIKAQVQEIKALEEKVINYPDLQPTDRATIYTKAKLNKAIWNTRLERDKKVLGIKPFDVYNRLNKAITHAVGVQLNPTTTVQQVDDEVIAVQDALETALKS

SEQ ID NO: 7981 - DNA, 156 bp, Streptococcus pyogenes
gtgtccattcaaaagcacacattggacagattaataaaagaccatcttcgtaaacatattcagactggcattgcaaacaatttggtaatgacatcttacactcctaaacatttcttaatgttaccattttactttagaatcaatgatttgacaaga

SEQ ID NO: 7982 - protein, 52 aa, Streptococcus pyogenes
VSIQKHTLDRLIKDHLRKHIQTGIANNLVMTSYTPKHFLMLPFYFRINDLTR

SEQ ID NO: 7983 - DNA, 813 bp, Streptococcus pyogenes
atgccagataaaaaacaatttcctatttcttacatttcacattgcctttctcctagggcaatgtttgccagccgagctcagtttacttggtggcaaaatcttcttattattgtttttttgaacgccttaataatgattccagttacgttacactatgctaacatgacaacgtatcccttggaacggattgtaactaagagtttgtcgcctatcacagacaaaacctatcaagcattgacccaaggaaagattgagaaagatacgtttcagggtcaatctctgattcgacgagatggtgaattggttttggctgttttaccgacaaaggtcgatttagagcaattggcatcagaatcaaccagacaaattattgtgacaaaaaaagaatggcgttttgttacccctgatggcaaggaactccgtgctcacgttagaggccagcagcagtcactcgctgacctgacaacagttaaagcagtgaaggactttgtcaatcagcaatggtatgacagtaataaagccagtgtacttggttttcttttgctgacgtttgttctcatggtgtgtgtgggtacccttattgtgattggtctaggcgctttctttttgactctgactaaacgatcacgactatttatgattcgaaacttctctgaaggacttggattgatggttaattgtttggcttggccgagtctactggcgattgctcttagtttctttattcaggatccagtactgattatgaattgccaagtatttggtaccttattaatgctgacctgggtgttctacaaaacacagtttagagat

SEQ ID NO: 7984 - protein, 271 aa, Streptococcus pyogenes
MPDKKQFPISYISHCLSPRAMFASRAQFTWWQNLLIIVFLNALIMIPVTLHYANMTTYPLERIVTKSLSPITDKTYQALTQGKIEKDTFQGQSLIRRDGELVLAVLPTKVDLEQLASESTRQIIVTKKEWRFVTPDGKELRAHVRGQQQSLADLTTVKAVKDFVNQQWYDSNKASVLGFLLLTFVLMVCVGTLIVIGLGAFFLTLTKRSRLFMIRNFSEGLGLMVNCLAWPSLLAIALSFFIQDPVLIMNCQVFGTLLMLTWVFYKTQFRD

SEQ ID NO: 7985 - DNA, 90 bp, Streptococcus pyogenes
ttgagtgaagaaacgatgcgtatcatgagaatccaaaagattcaagttcatgcgattgacttgccaagtgtttcgcatcaaaatgttgct

SEQ ID NO: 7986 - protein, 30 aa, Streptococcus pyogenes
LSEETMRIMRIQKIQVHAIDLPSVSHQNVA

SEQ ID NO: 7987 - DNA, 141 bp, Streptococcus pyogenes
atgataaaaaacaaatcaagaatgagaggaattgctgtttttattggcaagacaattttattttatctgattttaatgttgctggtctatttctttggttatctaggacatggtcaaagtaactttatttataatgaattt

SEQ ID NO: 7988 - protein, 47 aa, Streptococcus pyogenes
MIKNKSRMRGIAVFIGKTILFYLILMLLVYFFGYLGHGQSNFIYNEF

SEQ ID NO: 7989 - DNA, 150 bp, Streptococcus pyogenes
atgacagaaaaaaatggagcaacttttttaatggctgttggcttttttctcattgccattagtccgatggttggtaacaaatacttacacatagtgacgggactagctcttacgggattaggttattacctcactaaacataaacgccca

SEQ ID NO: 7990 - protein, 50 aa, Streptococcus pyogenes
MTEKNGATFLMAVGFFLIAISPMVGNKYLHIVTGLALTGLGYYLTKHKRP

SEQ ID NO: 7991 - DNA, 447 bp, Streptococcus pyogenes
atgattatttcagcagaaggagatgtttccattcatcattgttttgaagccatgctgatatcgctccaagaagattatcgacaaaataccttgagacagttgtcaagagatgatatcaaagcggggataaactatgttaaacattatggtaaatacaaagaacgtacagtgagggtgcttattacggccctagaagctccgcaattatatactgcttgttttagttccaatcatgggataaaggaattggcttatcaattagaggctctgggggagaatcggactagaattacctattcttatgactatcatcctctagatatttttcaaaaagcaaatcaatttattgttggcaaactgttcaaaaaaagcctagaacgccaatctcaagctcagttagcagcccttatccaatatgctaaacagttgcagcaaccatcgtctttg

SEQ ID NO: 7992 - protein, 149 aa, Streptococcus pyogenes
MIISAEGDVSIHHCFEAMLISLQEDYRQNTLRQLSRDDIKAGINYVKHYGKYKERTVRVLITALEAPQLYTACFSSNHGIKELAYQLEALGENRTRITYSYDYHPLDIFQKANQFIVGKLFKKSLERQSQAQLAALIQYAKQLQQPSSL

SEQ ID NO: 7993 - DNA, 1092 bp, Streptococcus pyogenes
atggttgatttaggattttctctataccctgagcggtatgatgttaccaagagtaaagcttatattgacttatgtcatagctatggagccaagcgcttgtttatgagtctcttacagctggcaccagctgatcaccagatgtttcattgctacgcagagctcattgcttatgcaaatcaattaggcattcgagtgattgctgacgttagtccaagctttattagccaagctggttggtcagatcagcttattgaacgagctcatgccttcgggttagcgggcttacgcttagacgaggctctccctctagcagagattgtaactttaacaagaaatccctttgggcttaaaattgaacttaatatgagcactgataaacaattattgatgtcattgctagcgacagatgcagaacggagcaatattattggttgccataatttttatccacatgaatttaccggtttgtcatggcaacattttaaggatatgtcacgtttttatcatgagcatgatattgaaacggctgcttttattaccgctcagtcagcatctgaaggcccttggctactggcagaaggcttgccgacagtggaagaccataggcacttgcccattggcctgcaagtagaattaatgaaagcgataggaaccattgataatatcctcatatctaaccaattcatttcggaagaagaattggcagcatgtactcaagctttagcaagaccagtcacgacgatcaaggttaggcctatcatcgatttgacagaagttgaggagcaaatcattggctatccgcattgttatcgtggcgatgtatctgattatgtgattcgatcaaccatgccacgtctagtctatgctcaggaatcgattgctccaagagaccaatctaaggaggtcaaacgaggtagcattattattgacaatgaccgctatcatcgatataagggagaactgcaaattgctttgaaaaattttacggtcagttcaaaagctaatgtggttgctgaggtcagagaggactatcttagtttgttagatgatttgcgaccttggcaggaattttgtttggagattgccccatca

SEQ ID NO: 7994 - protein, 364 aa, Streptococcus pyogenes
MVDLGFSLYPERYDVTKSKAYIDLCHSYGAKRLFMSLLQLAPADHQMFHCYAELIAYANQLGIRVIADVSPSFISQAGWSDQLIERAHAFGLAGLRLDEALPLAEIVTLTRNPFGLKIELNMSTDKQLLMSLLATDAERSNIIGCHNFYPHEFTGLSWQHFKDMSRFYHEHDIETAAFITAQSASEGPWLLAEGLPTVEDHRHLPIGLQVELMKAIGTIDNILISNQFISEEELAACTQALARPVTTIKVRPIIDLTEVEEQIIGYPHCYRGDVSDYVIRSTMPRLVYAQESIAPRDQSKEVKRGSIIIDNDRYHRYKGELQIALKNFTVSSKANVVAEVREDYLSLLDDLRPWQEFCLEIAPS

SEQ ID NO: 7995 - DNA, 507 bp, Streptococcus pyogenes
ttgaataggggtatggcttatttaaactactttacaaaaaccgagtgggcactttggttaagctctgtcttggccattttaattagcgcccttttattcggtaagcaagctcccttagctttaatagcttctttgattggtgtgacctctctcatttttagtgctaaagctaatcctattggtcaagggctcgtcattattttttccattatctatgcctatctttcattacgaaacagttactatggagagttaatgacctatctttttatgaccctccctatgactattttttcactttttacttggttaaaccatccttttgaagggaaaaaatcacaagtgactatttcacgattaacacccactgatcgaagatgtcttttcgtttttactatactgatcactcttattttctacagcatcttggcttctatttcaaacagcctatttacttgtctccactttatcgattgccacttctttctcagcggtttatctcagcta

SEQ ID NO: 7996 - protein, 169 aa, Streptococcus pyogenes
LNRGMAYLNYFTKTEWALWLSSVLAILISALLFGKQAPLALIASLIGVTSLIFSAKANPIGQGLVIIFSIIYAYLSLRNSYYGELMTYLFMTLPMTIFSLFTWLNHPFEGKKSQVTISRLTPTDRRCLFVFTILITLIFYSILASISNSLFTCLHFIDCHFFLSGLSQL

SEQ ID NO: 7997 - DNA, 153 bp, Streptococcus pyogenes
atgtcttttcgtttttactatactgatcactcttattttctacagcatcttggcttctatttcaaacagcctatttacttgtctccactttatcgattgccacttctttctcagcggtttatctcagctataagcgcagcccttattttgctt

SEQ ID NO: 7998 - protein, 51 aa, Streptococcus pyogenes
MSFRFYYTDHSYFLQHLGFYFKQPIYLSPLYRLPLLSQRFISAISAALILL

SEQ ID NO: 7999 - DNA, 135 bp, Streptococcus pyogenes
atgcatgctgctcaaacagatgccagccaatatgctgtggtcatctgctttgccacctttcttattaatgatagttacactttttataattggctaatgctccaacgttaccaagaaaaaaaggtcaaaaaagga

SEQ ID NO: 8000 - protein, 45 aa, Streptococcus pyogenes
MHAAQTDASQYAVVICFATFLINDSYTFYNWLMLQRYQEKKVKKG

SEQ ID NO: 8001 - DNA, 363 bp, Streptococcus pyogenes
atgactatttattctcacacttatgaaacccgtcccaatcattcggctaaagccatgggctcaggaacgctgaatgtcctagctactcctgctcttgttgcttttatggaaaatgcttcttacttatttgcccaagaacagctcgacagtgactttacaacggttggcagcgagatagctatccaacatttggcagcttcagccattggagatcctgttacaattatcattacagcccttaaagaagaaggccgaaaatacgatttccgcttggaagcttttgtgggagaacaactcattggaaaagcctgtcatactagagttagggtgaacagtaaacattttatggccaaagtagcggag

SEQ ID NO: 8002 - protein, 121 aa, Streptococcus pyogenes
MTIYSHTYETRPNHSAKAMGSGTLNVLATPALVAFMENASYLFAQEQLDSDFTTVGSEIAIQHLAASAIGDPVTIIITALKEEGRKYDFRLEAFVGEQLIGKACHTRVRVNSKHFMAKVAE

SEQ ID NO: 8003 - DNA, 126 bp, Streptococcus pyogenes
gtgaagcatgaaagtcttaacagtaaagagagtttttttgtcatctcttattatttagtgaactttgatggacttgcggacttgtttccaagtctttttttgacctttggacaaagggtattcaat

SEQ ID NO: 8004 - protein, 42 aa, Streptococcus pyogenes
VKHESLNSKESFFVISYYLVNFDGLADLFPSLFLTFGQRVFN

SEQ ID NO: 8005 - DNA, 1554 bp, Streptococcus pyogenes
atgaggtatccctgcaaaaaaccttttctttcttggaatttctttgttataatgctttacagaggtgaaaaaatgaagactattgcttttgattctaacaagtatttaaacttgcaaagagatcatattttagaacgtatcagccaatttgatggcaagctttacatggaatttggtggtaaaatgttagaagattaccatgctgcccgtgtgcttcctggctatgaacctgacaataagattaaattactcaaagagctcaaagaacaagtcgaaattgtaattgccattaacgctaataatattgaacattctaaagcgcgtggtgatttaggcatttcttatgaccaagaagtctttcgcttaattgacaaatttaacacgttagatatttacgtaggttctgtcgttattactcaatacaataaccaacccgctgcagatgcctttcgcaagcaactcgaaaaaaatggcattgcttcttacctgcattatcctatcaagggctacccgacagatattaatcatattatctcatctgaggggatggggaaaaataattacatcaaaacgagtcgtaaccttatcgttgttacagcaccaggccctgggtctggaaaattagccacttgcatgtcccaaatgtatcacgaccaaatcaatggggttaagtctggctatgctaaatttgaaaccttcccagtttggaatcttcctcttcatcaccctgtcaatctggcttatgaggcagccacggcagacctagatgatgtgaatatgattgaccccttccatttggaaacttatggcaaaacggccgttaattacaaccgtgatatcgaggtctttcctgtcttaaatcggaccttcgagcgtattttgagcaagtctccttatgcctcaccaaccgatatgggtgttaacatggttggtttttctatcgtcaatgaagaagctgctatcgaagcttctaaacaagaaatcatccgtcgttattaccaaaccctcgtggatttcaaggcagagcgagtcacagaatctgctgtcaaaaaaattgagctcttgatgaatgatatcggtgtcacccctgacgatcgtcacgttactgtagctgctcatcaaaaagcagagcaaacaggccaacctgcccttgctctccaactaccaaatgggcagattgtgacaggtaaaacatctgaactctttggaccaactgcagctgttatcatcaatgcgattaaaaccttggcaaagattgataaaaccactcatttgattgaacccgaatacgtgaaacctattcaaggcctcaaagtgaaccacttaggcagtcacaatccgcggcttcattccaatgaaattctgattgcgttggccattactgctatgactagtgaagaagctaatctagccatgaaagaacttggcaatttgaaaggtagcgaagcccattctaccgttatcttaaccgaagaagataaaaatgtactccgaaaacttggggtaaatattacctttgaccctgtttaccaacatcacaaactttaccgtaaa

SEQ ID NO: 8006 - protein, 518 aa, Streptococcus pyogenes
MRYPCKKPFLSWNFFVIMLYRGEKMKTIAFDSNKYLNLQRDHILERISQFDGKLYMEFGGKMLEDYHAARVLPGYEPDNKIKLLKELKEQVEIVIAINANNIEHSKARGDLGISYDQEVFRLIDKFNTLDIYVGSVVITQYNNQPAADAFRKQLEKNGIASYLHYPIKGYPTDINHIISSEGMGKNNYIKTSRNLIVVTAPGPGSGKLATCMSQMYHDQINGVKSGYAKFETFPVWNLPLHHPVNLAYEAATADLDDVNMIDPFHLETYGKTAVNYNRDIEVFPVLNRTFERILSKSPYASPTDMGVNMVGFSIVNEEAAIEASKQEIIRRYYQTLVDFKAERVTESAVKKIELLMNDIGVTPDDRHVTVAAHQKAEQTGQPALALQLPNGQIVTGKTSELFGPTAAVIINAIKTLAKIDKTTHLIEPEYVKPIQGLKVNHLGSHNPRLHSNEILIALAITAMTSEEANLAMKELGNLKGSEAHSTVILTEEDKNVLRKLGVNITFDPVYQHHKLYRK

SEQ ID NO: 8007 - DNA, 510 bp, Streptococcus pyogenes
atggactggctgattggttatggggttaaagaaatgatcagtacaggaacctgtggcgttttggttcctatcgcagaaaaccgttttttagtgccagttaaggctttgcgagatgaaggaacaagttatcattacgtggcaccatctcgttatattgatattgatcctaagatgcttagactgattgagaaaacgcttttagcacaggggttagcttatcaagaggtcatcacctggtcaacagatggtttttaccgagaaaccaaagaaaaagtggctcatcgccaggaagaagggtgttcggttgttgagatggaatgttctgccttagcagcagtagctcaattaagaggcatcctttgggggcaactcttatttacagcagatactctagcagatgtagaggtttacgatcaacgcaactggggcgctgattcctttagttttgcgctccatttatgcttggaagtgctcaatacgctagaaaaggatggaaaggctactgatttt

SEQ ID NO: 8008 - protein, 170 aa, Streptococcus pyogenes
MDWLIGYGVKEMISTGTCGVLVPIAENRFLVPVKALRDEGTSYHYVAPSRYIDIDPKMLRLIEKTLLAQGLAYQEVITWSTDGFYRETKEKVAHRQEEGCSVVEMECSALAAVAQLRGILWGQLLFTADTLADVEVYDQRNWGADSFSFALHLCLEVLNTLEKDGKATDF

SEQ ID NO: 8009 - DNA, 807 bp, Streptococcus pyogenes
gtgaaacaaatcactcaacagaaatggttacgatacggtctttttattgctttagttttaaatggtattgaacttgaattgttaggactgactgctaacaacctttcctttaaagaagcttttgctctaatactaaccattagtctattaggcatttacttaattccatttgcagcagctattttttatttaagtaaaaaatttcatatgaacctgaacgttattattgttagctgtcttagcggactttatatttcaggttttttagcttcttgtgggaaccatctcgtaggacaattttggtcatacatcatcccttctaaagacgctttaaagctttggggagatgctttaactgcccctattgtcgaagagcccattaaggcttcttcggctattttagtaattactttatttcctagacttactcttaaagaaaaattagttgttgctttactttctggcatgggctttcaactaacagaagatatccgttatttgattcaagcaaaatctatagatagtctcgtaccgactgctattgaacgtattagcactgctgtgacttcacattgggtacatacagctatttttaccattggagcatacttattattaaagggttctaaccttttttcaaaacagcaacaaattttctggttattaagtcctctggttctacatttcatctggaactctcctctaacaagcattcctggcatgacagttttactaggaacattaatccttttaatctttggtgatctttttcaaaaaatcaacacccttgacgatgatgtgcttttt

SEQ ID NO: 8010 - protein, 269 aa, Streptococcus pyogenes
VKQITQQKWLRYGLFIALVLNGIELELLGLTANNLSFKEAFALILTISLLGIYLIPFAAAIFYLSKKFHMNLNVIIVSCLSGLYISGFLASCGNHLVGQFWSYIIPSKDALKLWGDALTAPIVEEPIKASSAILVITLFPRLTLKEKLVVALLSGMGFQLTEDIRYLIQAKSIDSLVPTAIERISTAVTSHWVHTAIFTIGAYLLLKGSNLFSKQQQIFWLLSPLVLHFIWNSPLTSIPGMTVLLGTLILLIFGDLFQKINTLDDDVLF

SEQ ID NO: 8011 - DNA, 261 bp, Streptococcus pyogenes
atgttattaatttggcttggattactatttgtttggaatgaactcgtgtttgtcatatatgcctttgataaaagaaaagccataaaaaagaaacggcgtattagtgaaagaaaattattagtgataacagttttgtttggaggttttggagcattacttgcagctaaaaagtaccaccataaaaccagaaagtggtactttgtcatcacttgttatactagtattttgttgacattactagtaacttatatctttatgaag

SEQ ID NO: 8012 - protein, 87 aa, Streptococcus pyogenes
MLLIWLGLLFVWNELVFVIYAFDKRKAIKKKRRISERKLLVITVLFGGFGALLAAKKYHHKTRKWYFVITCYTSILLTLLVTYIFMK

SEQ ID NO: 8013 - DNA, 123 bp, Streptococcus pyogenes
gtgagtggtttaggcagatcgcctaaagcgattgcccaagaagtaatagatgttttagcatcattagggcatatcgaggaattacgacacggagtaaggaaagtcgataatactttccttacg

SEQ ID NO: 8014 - protein, 41 aa, Streptococcus pyogenes
VSGLGRSPKAIAQEVIDVLASLGHIEELRHGVRKVDNTFLT

SEQ ID NO: 8015 - DNA, 291 bp, Streptococcus pyogenes
atgccaagaaaaacctttgataaagccttcaaactctctgctgtaaaactcatccttgaggaagagcagcctgtaaaaatggttagttcaactttagaaattcatcccaatagtctttatcaatggattcaagaatatgaaaaatatggagaaagtgcgttcccaggacatgggagcgcacttcgtcatgctcaatttaagacaaaaaaacttgaaaaagagcacaaactgctacaggaggaattagctcttctaaaaaagttccaggtctttttgaagccaaaccggaaa

SEQ ID NO: 8016 - protein, 97 aa, Streptococcus pyogenes
MPRKTFDKAFKLSAVKLILEEEQPVKMVSSTLEIHPNSLYQWIQEYEKYGESAFPGHGSALRHAQFKTKKLEKEHKLLQEELALLKKFQVFLKPNRK

SEQ ID NO: 8017 - DNA, 138 bp, Streptococcus pyogenes
ttgcttatgggcaagtatcctgactcttttcattttaagttatcatcttatcagggtaatctggtttggagtacccttgagttatctggttttgggctttacaggactagccttgctgttgaatactttttcttattt

SEQ ID NO: 8018 - protein, 46 aa, Streptococcus pyogenes
LLMGKYPDSFHFKLSSYQGNLVWSTLELSGFGLYRTSLAVEYFFLF

SEQ ID NO: 8019 - DNA, 105 bp, Streptococcus pyogenes
ttgactattatagtcatgatgagtccgacttttgctatgtttagtcatcttgttgttacaaaatcaggtaagcaaaaagattcaattcccactgtctccttaacc

SEQ ID NO: 8020 - protein, 35 aa, Streptococcus pyogenes
LTIIVMMSPTFAMFSHLVVTKSGKQKDSIPTVSLT

SEQ ID NO: 8021 - DNA, 225 bp, Streptococcus pyogenes
gtgttaagaaagaagaaaactaccattgtagggattattttaggaatgatgatagtgaccttacttgtcggctgtttgactggtaaaaagaaaggctttcctcctaaagcaggtgagcggcagcaaacggctgacttaaaaatgaaaaaaagattagaaaaactgttcaaaaaccgttacctgaaaaatctaaagaggctaagcaagctgttatggatgcagatt

SEQ ID NO: 8022 - protein, 75 aa, Streptococcus pyogenes
VLRKKKTTIVGIILGMMIVTLLVGCLTGKKKGFPPKAGERQQTADLKMKKRLEKLFKNRYLKNLKRLSKLLWMQI

SEQ ID NO: 8023 - DNA, 129 bp, Streptococcus pyogenes
atgtgtataagccaatcacctgagataactgtaaaaacaagaaaaaataacgatgagattttaacctatatgcttgaaaagtcaaaaaaacaagcaaaagcgctatcaagagtgacgacaagtaaaaga

SEQ ID NO: 8024 - protein, 43 aa, Streptococcus pyogenes
MCISQSPEITVKTRKNNDEILTYMLEKSKKQAKALSRVTTSKR

SEQ ID NO: 8025 - DNA, 117 bp, Streptococcus pyogenes
atgccattgatggttgttatgaataccatgctaaaatattctattgattatttatcagcaacaaggtatcgtttaaaaataccaaaagatacaggtgtcttgatagttattggtttt

SEQ ID NO: 8026 - protein, 39 aa, Streptococcus pyogenes
MPLMVVMNTMLKYSIDYLSATRYRLKIPKDTGVLIVIGF

SEQ ID NO: 8027 - DNA, 96 bp, Streptococcus pyogenes
ttgttaaagaatactaccttggtggtgaataacttaaaaaccagactttggtctggttttttggttctatatcctaagaagaaagaaaaccctgct

SEQ ID NO: 8028 - protein, 32 aa, Streptococcus pyogenes
LLKNTTLVVNNLKTRLWSGFLVLYPKKKENPA

SEQ ID NO: 8029 - DNA, 114 bp, Streptococcus pyogenes
gtggcgagcgaaaaccaattttaccatgagttaatatctccttttaatttaaaggttgctacctttttacaattcctattttacaaaaaatatagcaaaaaagctagtctattc

SEQ ID NO: 8030 - protein, 38 aa, Streptococcus pyogenes
VASENQFYHELISPFNLKVATFLQFLFYKKYSKKASLF

SEQ ID NO: 8031 - DNA, 114 bp, Streptococcus pyogenes
ttgctacctttttacaattcctattttacaaaaaatatagcaaaaaagctagtctattctgactttattgaaaatcataatgtgactatcatgaaaatttcaaatgttcgtcaa

SEQ ID NO: 8032 - protein, 38 aa, Streptococcus pyogenes
LLPFYNSYFTKNIAKKLVYSDFIENHNVTIMKISNVRQ

SEQ ID NO: 8033 - DNA, 171 bp, Streptococcus pyogenes
atgtttactattatgatcattggtttagctgtattttcaataattaaaatcattctatttttctatttttatcagcaatttgagcgcaagcaaaaaagaaaagttgaatcaaacaaccagcaaagacagtcccaagaaagtgacgctgtcccttcaaaaaaattcccattt

SEQ ID NO: 8034 - protein, 57 aa, Streptococcus pyogenes
MFTIMIIGLAVFSIIKIILFFYFYQQFERKQKRKVESNNQQRQSQESDAVPSKKFPF

SEQ ID NO: 8035 - DNA, 492 bp, Streptococcus pyogenes
ttgttgaggatgattgaatcgagtaatatgtatagtagattgaaaaaaaagggtgattttatgaaaaggtccaaaaaagcatcgttacttagtgttattgttggaatggctttagctgtgataccaatttatattgttaattatgacaatgaacttatcgttcttttaatgagtattttttttaatgggataattgtttccgcttttgaacttattaaaacatatgatggtttgcaggaagaatataaaaagctaactgtagatagatggaagaatactattttactggctttcaattcattatattttgcttctattttgacaaatagtctatcaaataatttatcaaccattttatcaactaatcgttctgacaaagtaagtgcaatatttcttacaggttgttctattttagcactacttccattcctccttcataggttaataaaacgagaaatagaaattgaaaatgaaagaaaaaaattaaaaaaa

SEQ ID NO: 8036 - protein, 164 aa, Streptococcus pyogenes
LLRMIESSNMYSRLKKKGDFMKRSKKASLLSVIVGMALAVIPIYIVNYDNELIVLLMSIFFNGIIVSAFELIKTYDGLQEEYKKLTVDRWKNTILLAFNSLYFASILTNSLSNNLSTILSTNRSDKVSAIFLTGCSILALLPFLLHRLIKREIEIENERKKLKK

SEQ ID NO: 8037 - DNA, 225 bp, Streptococcus pyogenes
atgatcaatttaaaattacgactacaaaacaaagtaaccttgatggctattttgggagctatctttttgttagcgcaacaattaggtattaaactaccatcaaacatcgcggatattgccaacacagctgtaacgcttttggtattgctcggtgttgtcacagatccaaccacaaaaggcctgtcagacagtgagcaagcattgacttaccacgaaccaaaacaa

SEQ ID NO: 8038 - protein, 75 aa, Streptococcus pyogenes
MINLKLRLQNKVTLMAILGAIFLLAQQLGIKLPSNIADIANTAVTLLVLLGVVTDPTTKGLSDSEQALTYHEPKQ

SEQ ID NO: 8039 - DNA, 273 bp, Streptococcus pyogenes
atggcaacagagttgatatttggcgtcggtggctttattttagctatcgtcacgacttacaatatttttaatgcaaaatccatcaagcatgcgacagatattactttgttgcaatctgaggtagagcatttaaaaattgttacacgccaaaatgctcggcggcttgaagagcacgctgagcaaaataaaacgttgattacaatgacagagcaaattaaaaatttaacagatgatgttaaagatttaaaagatatgatgagaggagaaatcaaa

SEQ ID NO: 8040 - protein, 91 aa, Streptococcus pyogenes; identical to SEQ ID NO: 7686

SEQ ID NO: 8041 - DNA, 615 bp, Streptococcus pyogenes
atgagaaattggaaagtgacaggaaaatacccacaatttgacagcacaggagcagtcgcaagcacacatattattatcactgctgaggatggctcagtcatctctcaaccaatcaagcaggacttaacctcaaataatgacacagagattatcaaagctactttggaagaatttaaaaaatctgaatacgttgaaattgcaatgggcgaagccgtgcaaaaggtagacgaccttgaaaaaatctcacaggaaaccgctaagactgccaaaactgctcaaacagctgctggactagctaaggtgtccgcagagcgtacacagcgaatgattaacttgcaaaccatccacatgttaacgagcggcggcaagattgatcctgacatttataaaggcatgcttgagctaatcgagccagccaaaaaaggtgagtatcaagcctatgatgtctttacggtggtcgacagtactaaagaggaagacggtgaagcaggcgaagggaacctagtctttgtacacgttaatgaagcatttgagtatgacaaacaaaccttagaggagctagagtcagaagccaaagtaacagttatcaagtacgctgatttggttaaacaagat

SEQ ID NO: 8042 - protein, 205 aa, Streptococcus pyogenes
MRNWKVTGKYPQFDSTGAVASTHIIITAEDGSVISQPIKQDLTSNNDTEIIKATLEEFKKSEYVEIAMGEAVQKVDDLEKISQETAKTAKTAQTAAGLAKVSAERTQRMINLQTIHMLTSGGKIDPDIYKGMLELIEPAKKGEYQAYDVFTVVDSTKEEDGEAGEGNLVFVHVNEAFEYDKQTLEELESEAKVTVIKYADLVKQD

SEQ ID NO: 8043 - DNA, 429 bp, Streptococcus pyogenes
atgcaattaactattaaaaacaaagatttaaacacactatatcgtgtactagacaaaatcaaagtcacgaacatgcgagcaaaccgcggacgtgctaagctactcgcaaaagtagtagataaattcaaagagtacgccaaggatgagggtgaccttattgatctgtatgctcaaaaagacaaagatggcaagtttgtcattgatgagcacaaaaacatcaagctagcagaccccgctaaactcgacgagttcaacggcctactcaacgagctagctgatgaagaaattgtgattaaagggggtgagtactccaagcgatttattgactttttaaactttttagaagagtgtgaagatgaatttacatcatctgaaatcattcttatcgacaacattttggaacaatttgaagaaagtaaaaaaggagaa

SEQ ID NO: 8044 - protein, 143 aa, Streptococcus pyogenes
MQLTIKNKDLNTLYRVLDKIKVTNMRANRGRAKLLAKVVDKFKEYAKDEGDLIDLYAQKDKDGKFVIDEHKNIKLADPAKLDEFNGLLNELADEEIVIKGGEYSKRFIDFLNFLEECEDEFTSSEIILIDNILEQFEESKKGE

SEQ ID NO: 8045 - DNA, 1110 bp, Streptococcus pyogenes
atggctgaaaatataccgctacgagtccaatttaagcggatgaaagccgccgagtgggcaagtagtgatgtcgtcttactggagggtgagattggctttgagactgacactggttttgctaagtttggcgatggtcaaaacacttttagtaagcttaagtaccttactggtcccaaaggtcctaaaggagacactggtctccaaggtaaaactggaggaactggttctcggggccctgctggcaagcctggaacgacagattatgatcaactccaaaataaaccagatctaggtgcgtttgcacaaaaagaagaaactaatagtaaaatcaccaaattagaatcaagcaaagcagataaaaacgctgtttacttaaaagcagagtcaaatgcaaagctagacgaaaaattaaatctcaaaggcggcgtcatgacaggacaactacagtttaaacctaatagtggtattaaaccctcatcttccgtaggaggagcgattaacattgatatgtctaaatcggaaggtgctgctatggtgatgtatacaaataaagatactactgatggaccattgatgattttacgctctaacaaagatacgtttgatcagtcagttcaatttgtcgattataagggaacaacaaatgccgttaatattgtgatgcgtcagccaaccacccccaatttttcatcggcacttaatataaccagtgctaacgaaggcggtagtgcgatgcaaattagaggcgtcgaaaaagcattgggaacgctcaaaatcacacacgaaaacccaagcgttgacaaagaatacgatgaaaacgctgcagcgttatctattgatatcgttaaaaaacagaaaggcggaaaaggtactgctgctcaaggaatctacattaactcaacatcaggcacagctggtaaaatgctcagaatcagaaataaaaataaagacaaattttatgtaggtccagatggtgacttttggtcatgtgcaagttcaattgtggatggtaatctaacagttaaagatccaacatctggaaaacatgctgcgactaaagattacgtagatgaaaaaattgctgagttaaaaaaactcatactaaaaaaa

SEQ ID NO: 8046 - protein, 370 aa, Streptococcus pyogenes
MAENIPLRVQFKRMKAAEWASSDVVLLEGEIGFETDTGFAKFGDGQNTFSKLKYLTGPKGPKGDTGLQGKTGGTGSRGPAGKPGTTDYDQLQNKPDLGAFAQKEETNSKITKLESSKADKNAVYLKAESNAKLDEKLNLKGGVMTGQLQFKPNSGIKPSSSVGGAINIDMSKSEGAAMVMYTNKDTTDGPLMILRSNKDTFDQSVQFVDYKGTTNAVNIVMRQPTTPNFSSALNITSANEGGSAMQIRGVEKALGTLKITHENPSVDKEYDENAAALSIDIVKKQKGGKGTAAQGIYINSTSGTAGKMLRIRNKNKDKFYVGPDGDFWSCASSIVDGNLTVKDPTSGKHAATKDYVDEKIAELKKLILKK

SEQ ID NO: 8047 - DNA, 333 bp, Streptococcus pyogenes
ttgattgaagtaattatcaaaaaatatttagacgagcacttagatgtgccgtctttttttgaacatcaaaaagatgaacctgcacgattcatcatcttagaaaagactagtggggctaagcaaaatcatttgctaagttccacgtttgcttttcaaagttatgccgaatcgttgtatgaggcggctttacttaatgacaaagtaaagcaagtaattgagcagcttgatgtcttgccacaagtttctggtgtacatcttaacgctgactacaattttacagatacagcaactaagcgctatcgttatcaagctgtatttgatattaatcattat

SEQ ID NO: 8048 - protein, 111 aa, Streptococcus pyogenes
LIEVIIKKYLDEHLDVPSFFEHQKDEPARFIILEKTSGAKQNHLLSSTFAFQSYAESLYEAALLNDKVKQVIEQLDVLPQVSGVHLNADYNFTDTATKRYRYQAVFDINHY

SEQ ID NO: 8049 - DNA, 198 bp, Streptococcus pyogenes
atgttatacgttaacagtaagactggagctagtttttatagctccgtccctgtttgtggtggagattggactttggttgaacagcagacaggcgaaaaagcaaaaacagtagcagaaattaaacgtcagttagatgctgctgggataaaatatagctctaaagctaagaaacctgaattagaggcactcttgcctggt

SEQ ID NO: 8050 - protein, 66 aa, Streptococcus pyogenes
MLYVNSKTGASFYSSVPVCGGDWTLVEQQTGEKAKTVAEIKRQLDAAGIKYSSKAKKPELEALLPG

SEQ ID NO: 8051 - DNA, 144 bp, Streptococcus pyogenes
gtgcattgcttgcgcactggatttgttacacaacgaagccaaaaagaaagcaaagaaccagctgttaaaaaacgacatccgaaagggtgtttttttactgctaaaaaatctaccgaactgccgggaaagcaggagaaaggacgt

SEQ ID NO: 8052 - protein, 48 aa, Streptococcus pyogenes
VHCLRTGFVTQRSQKESKEPAVKKRHPKGCFFTAKKSTELPGKQEKGR

SEQ ID NO: 8053 - DNA, 264 bp, Streptococcus pyogenes
atgaataagcgaatcaaaaagaaacgtaaactcgaacgggctattgtgatgctggttgcggaaaatgctatgcaagcagaagcaattaaaaatcaaaacaaagaaatcatggagctaaaatcaatcgttcaacgaaacgctctggcaacaaacgaagagtttgcgtctgttaaagctgctactttagataaccaatcagctattgcagatattgcaattgacgttaactatattaagaaaaattacaagcgaaaatggggaaaa

SEQ ID NO: 8054 - protein, 88 aa, Streptococcus pyogenes
MNKRIKKKRKLERAIVMLVAENAMQAEAIKNQNKEIMELKSIVQRNALATNEEFASVKAATLDNQSAIADIAIDVNYIKKNYKRKWGK

SEQ ID NO: 8055 - DNA, 258 bp, Streptococcus pyogenes
ttggtccagatccagaaaacgcaatatattaagcacctagagcaatctggtgcttttcttatgcccaaaaaggagaaaaatatgaataaaatatcattaaatgtcgaaatgacttgggaaaacaaagacgaatttcaacaaatcatgaataaagtcaatgaaacaaaagaagcttacgaaaaagccttagaagctgcggaaaattttgtccctaaaatgtcgtgtgcaacaaagttaaataaaggagaaggcgatgaa

SEQ ID NO: 8056 - protein, 86 aa, Streptococcus pyogenes
LVQIQKTQYIKHLEQSGAFLMPKKEKNMNKISLNVEMTWENKDEFQQIMNKVNETKEAYEKALEAAENFVPKMSCATKLNKGEGDE

SEQ ID NO: 8057 - DNA, 231 bp, Streptococcus pyogenes
gtgataaatatggaaccaaaattacatcggcaactgcgtcaaaaatatgacgacgctgaaaaacaatatcttgaaaagtttggagaagactcgcttgatagagtatttttttgggagccagacgtttactttgatgagtggaaaaaggttctaccagatgcaacactggaattaaacaaagctattaatagcggggtggcgattggtccagatccagaaaacgcaatatat

SEQ ID NO: 8058 - protein, 77 aa, Streptococcus pyogenes
VINMEPKLHRQLRQKYDDAEKQYLEKFGEDSLDRVFFWEPDVYFDEWKKVLPDATLELNKAINSGVAIGPDPENAIY

SEQ ID NO: 8059 - DNA, 108 bp, Streptococcus pyogenes
ttgctaaccaagcaagcaacgagccaaagacaattggcaacagaaaccttcctcaaagtcgagactggtcatcttttgcatttaaaaagtgattttaggcaaatatat

SEQ ID NO: 8060 - protein, 36 aa, Streptococcus pyogenes
LLTKQATSQRQLATETFLKVETGHLLHLKSDFRQIY

SEQ ID NO: 8061 - DNA, 417 bp, Streptococcus pyogenes
gtgagcaaagctaaggcaattttaaaagacttacgcaatttagatttatatatcgctagtttaatcagacgtcgagataagattgaggcttcgttgctttctagccctaaatggtcgtctgataaggtgaatggtggtataaaacgtaagcaagatgatgtttacgtagagttgattgcaactgccaaagatattgaaaagaagactgctgaagctataagaaaacaaagagagcttcaaaacctgattgatagccttgaaaatacagacagtcaaacgattttgagcatggtctatattgataagatgactagatggcaagtgattgatgagctaaattgcagcgaaagcacctatttcagactgttaagagttgcaactaaggaattaaataatttgacagtaaatgacagcgat

SEQ ID NO: 8062 - protein, 139 aa, Streptococcus pyogenes
VSKAKAILKDLRNLDLYIASLIRRRDKIEASLLSSPKWSSDKVNGGIKRKQDDVYVELIATAKDIEKKTAEAIRKQRELQNLIDSLENTDSQTILSMVYIDKMTRWQVIDELNCSESTYFRLLRVATKELNNLTVNDSD

SEQ ID NO: 8063 - DNA, 633 bp, Streptococcus pyogenes
atgattaagatcgatgagatacatcgcatactaggcatcgacgaagtttataaagcacccaaacgacttacggacatactctttgataaagatagtcgtgaggatatatttagacagtttttgaaatatgaaacagatgtatcttacgactggtttatgcaatattttgaggaagaacaagctgaccgcaaaaataaaaagcaagactttactcctaaatcggttagtacactattatctaaaataataagtggtaatcaatactacgaggtagcagtcgggacgggtgggatacttatccaagcatggcaagaacaacgattaaatgacagtccatttacttatcgtccgagtaaatactggtatcacgtagaagagttatcggacaaagcagtaccgtttctactctttaatatgtctataagagggataaatggtgtggtggtgcatggcgactctttaacaagacaagttaaaaacatttattttttgcaaaatacaaaagacgacatgctgagttttagtgatattaacgttatgccaaggactcaagatattgagcgagaatttaatgtcaaagagtggattggtgatgggatagaacacattgaaaatccactaattgaatggata

SEQ ID NO: 8064 - protein, 211 aa, Streptococcus pyogenes
MIKIDEIHRILGIDEVYKAPKRLTDILFDKDSREDIFRQFLKYETDVSYDWFMQYFEEEQADRKNKKQDFTPKSVSTLLSKIISGNQYYEVAVGTGGILIQAWQEQRLNDSPFTYRPSKYWYHVEELSDKAVPFLLFNMSIRGINGVVVHGDSLTRQVKNIYFLQNTKDDMLSFSDINVMPRTQDIEREFNVKEWIGDGIEHIENPLIEWI

SEQ ID NO: 8065 - DNA, 510 bp, Streptococcus pyogenes
atgagcaatctagttttatcgttagacatctcaacatctggaacagggtgggccttatttaaaggctcagatcttatccagagtggtgtcttaaaacataagagtaaatcctactttgagcgcggccgctatatggctagtcaattaaggctaatccagtcacgagcattaaaaaaatacgattgctattttagtacaatcgcagtcgaaaaaaactcggttatgggacctaaccagcaatccatgcttaaaatcggtattgttacaggaattatcttaggaagattaatagctgataacgtcgtgtttatcaatgtatcaacgtggcgtaagtattggaagtttagctacaaagaccgaagcaagaagtccatgaaattacagtcaaaaataaaagtggagcaagaatttaataaatcggtcaaagacgacgaagcagacgctattttgattggctcatactatgtcaatcaaggctatcttgatgaattggagacacatgactactac

SEQ ID NO: 8066 - protein, 170 aa, Streptococcus pyogenes
MSNLVLSLDISTSGTGWALFKGSDLIQSGVLKHKSKSYFERGRYMASQLRLIQSRALKKYDCYFSTIAVEKNSVMGPNQQSMLKIGIVTGIILGRLIADNVVFINVSTWRKYWKFSYKDRSKKSMKLQSKIKVEQEFNKSVKDDEADAILIGSYYVNQGYLDELETHDYY

SEQ ID NO: 8067 - DNA, 411 bp, Streptococcus pyogenes
ttgctacactcgtccttgccaatgctcacacacaattttagggcgagtgtggattttaaaaaggtgaaaaatatggaacaaatcaaaattacaggaacaggaacagcactaattttagatagagtaaaccgaatctttgccatctctggcagtttgactatgcaatgggattttattagtgattttaaaaagattgacgacgaaccgtcacttgatgaagatggagagttattcgaaacagcctacgacctcattcttgaagctaaacccaaaactaaaatcaatctaacatcatcatattttgctaaagagtataagaaagacgcagacgaaatcataaaagtattctcgtttatcgaagataacaagagaaatatctttgaaacccttggcattcgcggggtgcttgaa

SEQ ID NO: 8068 - protein, 137 aa, Streptococcus pyogenes
LLHSSLPMLTHNFRASVDFKKVKNMEQIKITGTGTALILDRVNRIFAISGSLTMQWDFISDFKKIDDEPSLDEDGELFETAYDLILEAKPKTKINLTSSYFAKEYKKDADEIIKVFSFIEDNKRNIFETLGIRGVLE

SEQ ID NO: 8069 - DNA, 795 bp, Streptococcus pyogenes
atgactagtttagatttactcggaaaggattattatagtcgtgaatcagctatcagatactggtctattagtcagtacaagcgttttagagagtgcgaagcgagggggcttgctgaattacaagggaattggacagataccagagataacactgcgctgctcgtcgggaactatgtccactcttactttgagagtaaagaagctcatgaagaattcaaagcccaaaacggctctgaaatgatttcgaccagaggaacaactaaaggtcagctcaaaaaagactatttagtcgcagaacagatgattgaagcacttaaaaatgacagtaacttcatggccatataccaaggagaaaaagaagcagcaatcacaggatttcttggcgaggttgaattcaagggtaaaatcgactgcttgaatgttgaacgtggctattttgtagacatcaaaacaacaaaagggccgattgacgacacaatctggaatagagaagagcgtgtcagatggtttgaagcttatggatatattttgcagatggctgcttacaaaaccatgctagaagctaaatacaataagccgtttgaaccgattatttacgcagttactaaagagacaccaccagatacaagagccatcaggatccaaaatgtagatgctatgcagatagagttagatagcctagcacaaagcattaagcgattagatgacgttaaaaaaggcatagaaaagcctaagccttgtggaaaatgcgaatattgcagacaaaataaattgtctgtaagggtagagattttt

SEQ ID NO: 8070 - protein, 265 aa, Streptococcus pyogenes
MTSLDLLGKDYYSRESAIRYWSISQYKRFRECEARGLAELQGNWTDTRDNTALLVGNYVHSYFESKEAHEEFKAQNGSEMISTRGTTKGQLKKDYLVAEQMIEALKNDSNFMAIYQGEKEAAITGFLGEVEFKGKIDCLNVERGYFVDIKTTKGPIDDTIWNREERVRWFEAYGYILQMAAYKTMLEAKYNKPFEPIIYAVTKETPPDTRAIRIQNVDAMQIELDSLAQSIKRLDDVKKGIEKPKPCGKCEYCRQNKLSVRVEIF

SEQ ID NO: 8071 - DNA, 198 bp, Streptococcus pyogenes
atgattaaacttgtaaaaatcgaaggatattatattaatccagaatatgttgttggcgtttgggaaagatctgctttaaattttgacaatttagatgaaaaagtagtggttgttcaattcgttggagatagggaaagagaagagtttgtcttttgcgatacacctattgatgaagtaattaagaggttgctagatgac

SEQ ID NO: 8072 - protein, 66 aa, Streptococcus pyogenes
MIKLVKIEGYYINPEYVVGVWERSALNFDNLDEKVVVVQFVGDREREEFVFCDTPIDEVIKRLLDD

SEQ ID NO: 8073 - DNA, 987 bp, Streptococcus pyogenes
atgacaaatcaattagcacaaaacaaccacaacagcttttttaaatcgccagcagtaaaaaacaggattgagcaggttgtcggcgcacgagccgaacaatttacaactagcttattatcaatcatcagcaataataaccttctagccaaagcaacatctgagtcaattatgggagcggctatgaaagcagcagtgcttaatttaccaatcgagcctagtcttggttttgcttacgtggtgccgtacaaccgaaattacaaggatggaaatcgttggatcacagtaaacgaagcgcaatttcaaatcggatatagaggacttatacagctagctcaaagaagtggacaagtccgaaatattgaacacggaatcatatacgaagaggaattccttggttatgacaagattagagggcagttgaagctaacgggcgactacgttgactctggtgttgtaaaaggctactttgcaagtttagaactaatcagcggcttttacaagatgattttctggccgaaagaaaaagtgtacgaacatgccaaaaagtattctaaaacttttgataagaaaacaggagattttaaaccaggaacgccttgggcgacagaatttgatccaatggctatcaagacattactcaaggaattactgagcaagtatgcccctctttctgttgaaatgcaggatgctctagaagcggataacgcagattcaacgattgtcattccaaaagatgtcacaccacaagaaacaaacagccttgatgacttaatcggcacgcagaacgaaaaaaaggacgctcctagcaatttaaaagatgtaattaaagatttacattcagaaccagaaaaaacgctcacagacgaaaataagacggttttagaagacacctcttatccagcagatgagattcctgattttgaccaagaaacaggggaaattaaagctagcgaaggcaacttatttgataacctcggagacttaata

SEQ ID NO: 8074 - protein, 329 aa, Streptococcus pyogenes
MTNQLAQNNHNSFFKSPAVKNRIEQVVGARAEQFTTSLLSIISNNNLLAKATSESIMGAAMKAAVLNLPIEPSLGFAYVVPYNRNYKDGNRWITVNEAQFQIGYRGLIQLAQRSGQVRNIEHGIIYEEEFLGYDKIRGQLKLTGDYVDSGVVKGYFASLELISGFYKMIFWPKEKVYEHAKKYSKTFDKKTGDFKPGTPWATEFDPMAIKTLLKELLSKYAPLSVEMQDALEADNADSTIVIPKDVTPQETNSLDDLIGTQNEKKDAPSNLKDVIKDLHSEPEKTLTDENKTVLEDTSYPADEIPDFDQETGEIKASEGNLFDNLGDLI

SEQ ID NO: 8075 - DNA, 330 bp, Streptococcus pyogenes
atgaacatcaaagaaaaaattgtagtgctaagaaacactgaagacggaagttttttaaagagtttcaaaaacaaaaaagatgtacttgcttataatgtggaacttacagatagcattcaactggcatcatttttaccagaagaagcttacaacatacaaaaagaaaaaattgataatttggcagaaacgcttgggtgtgatgttgtagttatcgaagcatcatatgacctaaaatttattgatggcgaggatgttccagagttaacaaaagagcaaaaagttaaaagtatggtaaacggaatgtttgacgaaattttaagaggtagtatc

SEQ ID NO: 8076 - protein, 110 aa, Streptococcus pyogenes
MNIKEKIVVLRNTEDGSFLKSFKNKKDVLAYNVELTDSIQLASFLPEEAYNIQKEKIDNLAETLGCDVVVIEASYDLKFIDGEDVPELTKEQKVKSMVNGMFDEILRGSI

SEQ ID NO: 8077 - DNA, 204 bp, Streptococcus pyogenes
atgacaccagaacaagtagaaaaagcaaaaatcagagctaaacaagaacttgaaacgtttagcatataccttgatcaggcaattgatgatctcggtggagttctaacttcacgagaagtctttttagcagcgggaataacatatcttggcgcaggtcagacagatatacatgctgcagtcgagggattatgtgagcaaatccaa

SEQ ID NO: 8078 - protein, 68 aa, Streptococcus pyogenes
MTPEQVEKAKIRAKQELETFSIYLDQAIDDLGGVLTSREVFLAAGITYLGAGQTDIHAAVEGLCEQIQ

SEQ ID NO: 8079 - DNA, 183 bp, Streptococcus pyogenes
atgaacaaattagaattatttttgttagcaacaaccgttatcttagcggtcattgctagggtgcaacacgaagtcattaaaaaacacaattcgccagagaataagcggaaaatttttagggaagtagctttaaaaaacagcaaaggatggagcaagaagcgtgcaagaggaggggttgtcagc

SEQ ID NO: 8080 - protein, 61 aa, Streptococcus pyogenes
MNKLELFLLATTVILAVIARVQHEVIKKHNSPENKRKIFREVALKNSKGWSKKRARGGVVS

SEQ ID NO: 8081 - DNA, 309 bp, Streptococcus pyogenes
atgccaaaagcagaaattacttatagagcagttgatgttaatgaaacagcttctcatggtgattataaacacttgattcaacaatgggaggggttgacagttgctactgcaaagcagtgggcgacagaaatgcgtgatcatccagactttaaacagtttgtattaaatccaacgcatagaatcgtattcattgattacaaaggattcaaactgtttgtacagtggaaatctcgcaatcgttacaaaacaaaaaaagagacactgccagaaatgcttgaaaatattaaatttgaaaaaagagtaggagta

SEQ ID NO: 8082 - protein, 103 aa, Streptococcus pyogenes
MPKAEITYRAVDVNETASHGDYKHLIQQWEGLTVATAKQWATEMRDHPDFKQFVLNPTHRIVFIDYKGFKLFVQWKSRNRYKTKKETLPEMLENIKFEKRVGV

SEQ ID NO: 8083 - DNA, 516 bp, Streptococcus pyogenes
atggcaaaagtcatattccaagataactttctcttaatgggaacaaattatcatgaaaaagaagctaataaagttatggctgaaattggtaagaaatcaccatactgggataaggataaagattttatttctgactacataaaatcaaacttcaaggatatctacaagtattacagggtctcaacaaaagatgtagagattgtcagagaacctcttaatcgtcacgatccaaatgccataaaagtcatggtaaacaaaacttttgttggctactttccagcagacttagctaaacgattaaccccttatgtaaaaaaatctagtcattaccaaatggaagcaacccttactggtcgtggtggacaatacaaaacactcaaaaacgatttaaagaccgtggttactaaaaagaaagatataacttataagttacgattgactattttaaaagtagatagagtatcaaaaagtaaaaatgctggattattagagtcgatagcatcttggtttctcaac

SEQ ID NO: 8084 - protein, 172 aa, Streptococcus pyogenes
MAKVIFQDNFLLMGTNYHEKEANKVMAEIGKKSPYWDKDKDFISDYIKSNFKDIYKYYRVSTKDVEIVREPLNRHDPNAIKVMVNKTFVGYFPADLAKRLTPYVKKSSHYQMEATLTGRGGQYKTLKNDLKTVVTKKKDITYKLRLTILKVDRVSKSKNAGLLESIASWFLN

SEQ ID NO: 8085 - DNA, 297 bp, Streptococcus pyogenes
atgggcttttatatatgcaattatttaacagcgtctttaagagctttaccagctttgaaggctggaacttttgaagctgcaatttcaatttctgcaccagtttgtgggttacgacctttacgagctgcacgttcgcgtacttcgaagttaccaaaaccgatcaattgtactttttcaccttcagcaaggaaagcttcgattgtagaaaacacggcatcaactgctgctgctgaatcttttttagtcaattcagttgcttctgcaacctttgcgattaaatcttgtttgttagccatt

SEQ ID NO: 8086 - protein, 99 aa, Streptococcus pyogenes
MGFYICNYLTASLRALPALKAGTFEAAISISAPVCGLRPLRAARSRTSKLPKPINCTFSPSARKASIVENTASTAAAESFLVNSVASATFAIKSCLLAI

SEQ ID NO: 8087 - DNA, 939 bp, Streptococcus pyogenes
atgactagtaaaaaagcgtgtttatcaagcatcattgtgttagcaagtttaacgtgtggaaatgatactgttagtgccaatcatctctcagcaactggagataagtttgatgattgctcaacacttgttgaaaaagatgtggcccctaaagatgaacttgagatgttagcatggtcctcgtctcaaacaactgatgatgctgacagagactatgaagattttctcgatgatgattcttttatttctcaaaatgaaactgataagatgtttgagaatttaactgatgataggttattaaatgaattagatgaattagatgaagaaaatgaagaagatgaagaagatacaattgagccagagcaaaatgtaataatgcctagtgacgatgagctatttgatttaactgatgctgttgagacacgccttactgtttctagtgctccccatttagaggctgaattgccgaaaccacatttgaggagcctatcagatacagcactgcggtctggtgaaattagaggacatttagataacaaactggacgctttgtctgtaacagctacaaagttagcattaacgatggctcaaaaatttgatttgacaacgcatgtctattctataggtgaaagctttagtgaagtattagctgctcattatgaagacagaaaagcagaatcagctttttctaagaaaaagagatttcaccttcctattgctactccagatgttgttatagaggagttaaggcgcctagtctcttctattggaagttcaaaagaagatgtttcagttccttatagtcggaagctaggtatggcagttgcaaaaagaaaaatagccctgccacaaacgggagagaggttctcttattatccagttttacttggtttaatgatattaggattaacgccgattatgataccaaagaagataaataat

SEQ ID NO: 8088 - protein, 313 aa, Streptococcus pyogenes
MTSKKACLSSIIVLASLTCGNDTVSANHLSATGDKFDDCSTLVEKDVAPKDELEMLAWSSSQTTDDADRDYEDFLDDDSFISQNETDKMFENLTDDRLLNELDELDEENEEDEEDTIEPEQNVIMPSDDELFDLTDAVETRLTVSSAPHLEAELPKPHLRSLSDTALRSGEIRGHLDNKLDALSVTATKLALTMAQKFDLTTHVYSIGESFSEVLAAHYEDRKAESAFSKKKRFHLPIATPDVVIEELRRLVSSIGSSKEDVSVPYSRKLGMAVAKRKIALPQTGERFSYYPVLLGLMILGLTPIMIPKKINN

SEQ ID NO: 8089 - DNA, 96 bp, Streptococcus pyogenes
ttgactttatttagattatttgatactattcagttgtctcccttagagaaagcgatttcttgttttggagctgatttttaccatttggtcttagaa

SEQ ID NO: 8090 - protein, 32 aa, Streptococcus pyogenes
LTLFRLFDTIQLSPLEKAISCFGADFYHLVLE

SEQ ID NO: 8091 - DNA, 1440 bp, Streptococcus pyogenes
ttgcattatttgcatagaagaaagggatctgttatggtttcagtgatgtggtttcgtagagatttaaggattgatgatcaaaaagctttagctcatgctattgctagtcaatcaccaaccttatgtgtgtttcaatttaacaaggagcaattaaatctgctacatagtcggaatcaatctagttttattactagcgttttggcttttagaaagttattaaaatgtgaaggtattgacttatatctaatgtatggagacttaatgacctgttttgagcaattattgacacaattaaaagactggacagatgtgtattttaactatgatgaatctggatatggtcgtttacgtgatcaaaaagcagcacaatttttcaaaaaaaatgggattgctgttcatacctaccaagatcactatttacatggtagtcaagagatcattaaccaatcaggtcagccttataaagtttttacgccctactataggatttggcaaaattatccgaaagagactcctattaaagtagaactatcgcaaggcaggtggttaaatcttgagacaccagatgatgttttaaggactgttgagagttttaaagatgaaaaatatcaggatgttgcaacttttgatgaagcgtcaaaacaactaaatcgatttattcaagaccaattagcagcttatcacgctaatcgagattttccagcgcagctagggacgagtcggttgtctccttttttaagaataggagctattggcattcgcacggtatatcacgctgtgcgtcaagcaccaaatagtctagggcaagctacttttttaaaagaattagcttggagagacttttacaatatggtctatgtggcttatcctgatcagaaaactcagcctatccaaaaagccttttctcaaatcgaatgggttaataatcctgactggtttcagttgtggaaagaaggtaaaacgggttaccctattgtcgatgctgcaatgcttcagttacaaaagacaggatggatgcataatcgtttacgaatgatagtagcttcttttttaactaaagatcttttatgtgattggcgtttaggagagcagtattttcaacaacaactaattgattatgatgctgccagtaatatcggaggatggcagtgggctgcttccactggaacagatgctgttccttattttagaatatttaatcctgttactcaaggtaagcgctttgatcctaaaggcgagtttattaaagcgtatttgcctcaactagaacacgttccagagaagtatctccacgaaccgtggaagatgccaaaaaaccttcaagagagtgtgtcctgtattattggcacagactatcctcaaccaattgtcgatcatgctaaacaacgtgaacaagctattgcaaagtatgagtgggcaaaagaaaaagcaaaaatagaa

SEQ ID NO: 8092 - protein, 480 aa, Streptococcus pyogenes
LHYLHRRKGSVMVSVMWFRRDLRIDDQKALAHAIASQSPTLCVFQFNKEQLNLLHSRNQSSFITSVLAFRKLLKCEGIDLYLMYGDLMTCFEQLLTQLKDWTDVYFNYDESGYGRLRDQKAAQFFKKNGIAVHTYQDHYLHGSQEIINQSGQPYKVFTPYYRIWQNYPKETPIKVELSQGRWLNLETPDDVLRTVESFKDEKYQDVATFDEASKQLNRFIQDQLAAYHANRDFPAQLGTSRLSPFLRIGAIGIRTVYHAVRQAPNSLGQATFLKELAWRDFYNMVYVAYPDQKTQPIQKAFSQIEWVNNPDWFQLWKEGKTGYPIVDAAMLQLQKTGWMHNRLRMIVASFLTKDLLCDWRLGEQYFQQQLIDYDAASNIGGWQWAASTGTDAVPYFRIFNPVTQGKRFDPKGEFIKAYLPQLEHVPEKYLHEPWKMPKNLQESVSCIIGTDYPQPIVDHAKQREQAIAKYEWAKEKAKIE

SEQ ID NO: 8093 - DNA, 228 bp, Streptococcus pyogenes
atggaatcacatttggtgagaatcatcaatcgtttggagttgatggtgacagatggcggtaatctcaagcgaaattttgaacgcgatggtgttgttgttgcagaagttgccttttcaaatgatcctgaaaatggacctgttttcacattgcgtgatgttgaagcgcgtgagtcatattcctttgatagcattgacttgattgcaatggaaatctacgatttattatat

SEQ ID NO: 8094 - protein, 76 aa, Streptococcus pyogenes
MESHLVRIINRLELMVTDGGNLKRNFERDGVVVAEVAFSNDPENGPVFTLRDVEARESYSFDSIDLIAMEIYDLLY

SEQ ID NO: 8095 - DNA, 252 bp, Streptococcus pyogenes
atgatattaatactatctattcttcttcgtctgatcaaagtttacacttatttattgattgcttacgcattaatgtcatggtttcctggggcatatgattcaaaaattgggcgtttgattagtggtatcgttgaaccaattttaaaaccttttagagcatttaatttacaatttgccggtcttgacttcactatttttgtcgtcattattagtttgaattttttagctcaagttttggtccgtgtgtttatt

SEQ ID NO: 8096 - protein, 84 aa, Streptococcus pyogenes
MILILSILLRLIKVYTYLLIAYALMSWFPGAYDSKIGRLISGIVEPILKPFRAFNLQFAGLDFTIFVVIISLNFLAQVLVRVFI

SEQ ID NO: 8097 - DNA, 111 bp, Streptococcus pyogenes
ttggctgagactgctgataatagcgttcagaagtgccatgttttggatgcatttgtgaccttgtctgttcttgggatctcgcttgatgatcttgttgtacgtgattgtttc

SEQ ID NO: 8098 - protein, 37 aa, Streptococcus pyogenes
LAETADNSVQKCHVLDAFVTLSVLGISLDDLVVRDCF

SEQ ID NO: 8099 - DNA, 117 bp, Streptococcus pyogenes
atgtccaaaccagtaaaaaagccatttctagccattcacttgacctcacttactttccaaacttttgctattctaaaaactgctaaaaaacagaatcattcagaaaatattatacca

SEQ ID NO: 8100 - protein, 39 aa, Streptococcus pyogenes
MSKPVKKPFLAIHLTSLTFQTFAILKTAKKQNHSENIIP

SEQ ID NO: 8101 - DNA, 249 bp, Streptococcus pyogenes
atgttttaccttattatggctgtctcgattatatcttattatctatacatggctcctaaaagtgtccgtaacacccttgggatgattggtttagttggcttggttgctctgcttattgttttagcgggcttgagttttatcaaaatcatgcaaacccctcctgaattttttattgggatgggaatggtggcattgggctattttgctttaaaagatgtgcgtaaaatgaccaaaaaaccgagagttaaa

SEQ ID NO: 8102 - protein, 83 aa, Streptococcus pyogenes
MFYLIMAVSIISYYLYMAPKSVRNTLGMIGLVGLVALLIVLAGLSFIKIMQTPPEFFIGMGMVALGYFALKDVRKMTKKPRVK

SEQ ID NO: 8103 - DNA, 525 bp, Streptococcus pyogenes
atgacaaacacactcgttgaaaatatttatgcttcagtaactcacaatatttctaaaaaagaagcatcaaaaaatgaaaaaactaaagctgttttaaaccaagctgtcgctgacttatctgtggctgcatctattgtgcaccaagtacactggtatatgcgtggtccaggtttcttgtaccttcaccccaaaatggatgaattacttgatagcttgaatgctaatttagatgaaatgagcgagcgtttgatcactattggcggagcgccttattctaccctagctgagttttctaaacactctaaattggacgaagcaaaaggtacttacgataaaaccgttgctcagcatttagcaagattggtcgaagtttacctttacctcagcagcctttaccaagttggtttggatattaccgatgaagaaggcgatgctggaacaaacgatttgtttacagcagctaagacagaggctgaaaaaaccatttggatgctccaagcagagcgtggacaaggcccagcactc

SEQ ID NO: 8104 - protein, 175 aa, Streptococcus pyogenes
MTNTLVENIYASVTHNISKKEASKNEKTKAVLNQAVADLSVAASIVHQVHWYMRGPGFLYLHPKMDELLDSLNANLDEMSERLITIGGAPYSTLAEFSKHSKLDEAKGTYDKTVAQHLARLVEVYLYLSSLYQVGLDITDEEGDAGTNDLFTAAKTEAEKTIWMLQAERGQGPAL

SEQ ID NO: 8105 - DNA, 624 bp, Streptococcus pyogenes
atgatagctttttttagtatatgttcgggcatcttattgacccatcttttttactgtttactactttattttcctgataatggtcaagagcagctaagtaaacagactgtcattgtttgtgaccaactaacttttgccaaacgcgtttttcggcagttccaaaaccattttataactagccaaaaaatcttctttagcttagagataggtctaataattatcttatgggctagtatggtacattgggttagtgctagttactgttacttgttactcttttctttattatttagtttatttgattggcgttctcaagaatacccttttatcttgtggctttttagctttgtaagtctactcctgttttattcgatcaattatttatcattgatattactgctactaggtttattagctcatttaagacctttttcaattggagcaggcgattttttctaccttgctagcttagctttagtattggatctaacgtcgttgatttggctaattcaacttgctagtttagcaggtattactgcttgcttactattaggcatcaagcgcataccttttattccttatcttagttttggattattttggattgtgcttctagagcatttt

SEQ ID NO: 8106 - protein, 208 aa, Streptococcus pyogenes
MIAFFSICSGILLTHLFYCLLLYFPDNGQEQLSKQTVIVCDQLTFAKRVFRQFQNHFITSQKIFFSLEIGLIIILWASMVHWVSASYCYLLLFSLLFSLFDWRSQEYPFILWLFSFVSLLLFYSINYLSLILLLLGLLAHLRPFSIGAGDFFYLASLALVLDLTSLIWLIQLASLAGITACLLLGIKRIPFIPYLSFGLFWIVLLEHF

SEQ ID NO: 8107 - DNA, 96 bp, Streptococcus pyogenes
atggactttagtgggagtggcgtcactggatcagttgcaccgggtgcagcgccaaattttttggtccttttcttggaacagggcttctaccctgtc

SEQ ID NO: 8108 - protein, 32 aa, Streptococcus pyogenes
MDFSGSGVTGSVAPGAAPNFLVLFLEQGFYPV

SEQ ID NO: 8109 - DNA, 1032 bp, Streptococcus pyogenes
atgaagcgttatcccctactggtccagttgatttcgtatgtttttgtgatcgtaattgccctcattaccacgcttggtttgctttattaccagacgagttctcgtaatatcaggcaactaattgaacgtgatacccggcagagcattcggcaaagttcccaatttattgacgcttacatcaagcctcttaaagaaacaacttcggtgctggcgaaaaatacggaaattcaagcctttgctagtcaaattcatcaagaaaatgacaaacaggttcttcagctcatgaagatggttcttgcgaccaattccgatttacaagcagctgttctggtgactaaggatggtcgaacggtgtctaccaattctcagttgaccatgaaaacctccagtgacatgatggcagaaccctggtataaagcagccatagaccgtcaagccatgccaatcttaaccccagctcggcaattatccctttcttctaaaaaagaatgggtagtttctgtgacccaagaggtagtagatagggctgggcataatttaggtgtgctaagacttgatattgcatacccgaccattaaagcgtctttagatcagcttcagctaggccgccaaggctttgcctttattgtgaatgataagcatgaatttgtttaccatcccaaaaagagtgtttacagttcttctaaggagatggctgcgatgaaaccttatttagcgattcagaatggttacactaaggacaagacatcttttgtttaccaaaaactcattcctaacagtcaatggactttagtgggagtggcgtcactggatcagttgcaccgggtgcagcgccaaattttttggtccttttcttggaacagggcttctaccctgtctgatttgtggctttgcaactgtcttagtcttacgcagatggattcgtcccattcaacaattgcagcaagttattcttgctattcaaaaaggagatcgtcagttacgtgcccaagaaacgggttctccagaattgacagaccttgcccaacagtt

SEQ ID NO: 8110 - protein, 344 aa, Streptococcus pyogenes
MKRYPLLVQLISYVFVIVIALITTLGLLYYQTSSRNIRQLIERDTRQSIRQSSQFIDAYIKPLKETTSVLAKNTEIQAFASQIHQENDKQVLQLMKMVLATNSDLQAAVLVTKDGRTVSTNSQLTMKTSSDMMAEPWYKAAIDRQAMPILTPARQLSLSSKKEWVVSVTQEVVDRAGHNLGVLRLDIAYPTIKASLDQLQLGRQGFAFIVNDKHEFVYHPKKSVYSSSKEMAAMKPYLAIQNGYTKDKTSFVYQKLIPNSQWTLVGVASLDQLHRVQRQIFWSFSWNRASTLSDLWLCNCLSLTQMDSSHSTIAASYSCYSKRRSSVTCPRNGFSRIDRPCPTV

SEQ ID NO: 8111 - DNA, 621 bp, Streptococcus pyogenes
atgaaaaaaggactattagtaacaactggtttggcttgtctcgggctactaactgcttgctcaacccaagacaatatggctaaaaaggaaataactcaggacaagatgagcatggcagctaaaaagaaagataagatgtcaacatcaaaggacaagtccatgatggcagataaatcatctgataagaaaatgaccaatgatggtcctatggcgcctgatttcgaactcaaaggcatcgatggtaagacctatcgcttatcagagttcaaaggtaaaaaagtttatttgaaattttgggcctcttggtgttcaatctgtctatcaaccttggcagataccgaagacctggctaaaatgtcagataaagactatgtggtcctaacagttgtctcgccaggtcatcaaggggaaaaatcagaagcagactttaaaaaatggttccaaggaacagactataaggacttaccagtcttgttagatccggatggcaagctattggaagcttacggtgtcagatcttacccaacagaagttttcattggaagtgatggtgttcttgctaaaaaacacattggttatgccaaaaaatcagacatcaaaaagacccttaaaggtatacat

SEQ ID NO: 8112 - protein, 207 aa, Streptococcus pyogenes
MKKGLLVTTGLACLGLLTACSTQDNMAKKEITQDKMSMAAKKKDKMSTSKDKSMMADKSSDKKMTNDGPMAPDFELKGIDGKTYRLSEFKGKKVYLKFWASWCSICLSTLADTEDLAKMSDKDYVVLTVVSPGHQGEKSEADFKKWFQGTDYKDLPVLLDPDGKLLEAYGVRSYPTEVFIGSDGVLAKKHIGYAKKSDIKKTLKGIH

SEQ ID NO: 8113 - DNA, 708 bp, Streptococcus pyogenes
atgacactatcacttgtattaatggtatcggtttttggggcaggcttgttatcctttttctctccgtgtatctttccggtccttcctgtctatttaggcattttactggatgcagatgattcaaagacgattactatatttggtaaaaaactctattggtatggcattgtcaaaactttagcctttatttttggtctatctactatttttgtgattttaggttacggggctggttttttaggaaatatcctttatgcggtatggtttcggtacttactgggagccttggtcattatcttggggattcatcagatgggcctcattaccattaagagcttacaatttcaaaaatcactgactttccataataacaagaatcgcaacggtttgttcaatgcatttatccttggtttaacctttagctttggttggacgccttgtgtgggacctgttttgagttctgtcctagcattggtggcttcagggggaaatggtgcctggcaaggtggcgttttgatgattatttatactcttggattgggcattcctttcctactcatctcttttgcgtcaggcattgttttgaaacagtttaacaagctcaaaccccacatacttttactgaaaaaagtaggaggcgttctgattatagtcatgggaatcttgcttatgacaggaaccttaaataacttagcacaactttttgga

SEQ ID NO: 8114 - protein, 236 aa, Streptococcus pyogenes
MTLSLVLMVSVFGAGLLSFFSPCIFPVLPVYLGILLDADDSKTITIFGKKLYWYGIVKTLAFIFGLSTIFVILGYGAGFLGNILYAVWFRYLLGALVIILGIHQMGLITIKSLQFQKSLTFHNNKNRNGLFNAFILGLTFSFGWTPCVGPVLSSVLALVASGGNGAWQGGVLMIIYTLGLGIPFLLISFASGIVLKQFNKLKPHILLLKKVGGVLIIVMGILLMTGTLNNLAQLFG

SEQ ID NO: 8115 - DNA, 159 bp, Streptococcus pyogenes
gtgagacctgatgtaattggtgattttcgtgatatgctttttatttcaatccactcacccatgaagggtgagactgcgccaaatgacacagtttatagagaaacggatggcacacatagaggtgttttaagcctttttatctccatttcgcttcttttt

SEQ ID NO: 8116 - protein, 53 aa, Streptococcus pyogenes
VRPDVIGDFRDMLFISIHSPMKGETAPNDTVYRETDGTHRGVLSLFISISLLF

SEQ ID NO: 8117 - DNA, 291 bp, Streptococcus pyogenes
atgatggttttagtcacttatgatgtaaatacggaaacacctgctggtagaaaaagattgcgtcatgttgccaaactctgtgtggactatgggcaacgtgttcaaaattctgtttttgaatgttctgtgacacccgcagaatttgtggatataaagcaccgcttaacacaaatcattgatgagaaaactgatagtattcgcttttatttattggggaaaaattggcagaggcgtgtggaaacacttggtcgctcagacagctatgacccagataaaggtgtcttattattg

SEQ ID NO: 8118 - protein, 97 aa, Streptococcus pyogenes
MMVLVTYDVNTETPAGRKRLRHVAKLCVDYGQRVQNSVFECSVTPAEFVDIKHRLTQIIDEKTDSIRFYLLGKNWQRRVETLGRSDSYDPDKGVLLL

SEQ ID NO: 8119 - DNA, 1023 bp, Streptococcus pyogenes
atgaagaagttgctaaataccttgtatttgacgcaagaagatttttatgtcactaaagagggcgataacattgttatcaagcaagaaggtaaggttctcaaacggtttccgtttcggattattgacggtattgtctgtttttcttatttgggtgtgtcgtctgctttggtgaagttatgtacggagaatcagattaatttatcgtttcatacaccacaagggcgtttttgtggtcgctatattggttcaaccaatgggaatgtgttgttgcgtagagaacattatcgtttatctgatcgtgaggaatctttggaatacgcaaagcggtttattttggctaaaatttccaactcaaggaaatacttgctacgctttaaacgagatcatcgtcaacagattgataccaagctttttgaggctgttaatgacgaattgatatgggctttagagatggttcaggcagcagataataaagactctttaagagggattgaaggccaagctgctaatcagtattttcgcatatttaatgacctggtgttgacggacaaaaaaacgttttacttccaaggtcggagtaaacgaccacccttagattgtgttaatgccctcttgtcttttggttacagtttactgacctttgaatgtcaatctgccttggaagctgtcggattagacagttacgttggtttctttcacacggatcgtcctgggcgtgctagtttagcgcttgatttagttgaagagttccgctcatatattgtagatcgttttgtcttttcattaattaataaaggacaacttcagaaaaaacactttgaggttaaagaaaatggtagtattttattgacggaaaatggcagagctatttttattgatttgtggcagaagcgtaagcatactgaggtagaacatccttttacaaaagagaaagtaaaacttatgttattaccctatgtacaagcgcagcttttagctaaggctatacgaggagatttagaaagctatccaccttttatggtt

SEQ ID NO: 8120 - protein, 341 aa, Streptococcus pyogenes
MKKLLNTLYLTQEDFYVTKEGDNIVIKQEGKVLKRFPFRIIDGIVCFSYLGVSSALVKLCTENQINLSFHTPQGRFCGRYIGSTNGNVLLRREHYRLSDREESLEYAKRFILAKISNSRKYLLRFKRDHRQQIDTKLFEAVNDELIWALEMVQAADNKDSLRGIEGQAANQYFRIFNDLVLTDKKTFYFQGRSKRPPLDCVNALLSFGYSLLTFECQSALEAVGLDSYVGFFHTDRPGRASLALDLVEEFRSYIVDRFVFSLINKGQLQKKHFEVKENGSILLTENGRAIFIDLWQKRKHTEVEHPFTKEKVKLMLLPYVQAQLLAKAIRGDLESYPPFMV

SEQ ID NO: 8121 - DNA, 672 bp, Streptococcus pyogenes
atggtctatgccgaagatgattatttaatgctgtcaggtattcagcatttccaattttgtaaacgtcaatgggcgttgatccatattgagcaacaatggcttgataatgaagcgacagcgcatggacaggttttacatactaaagcagataacccttacattaaagaaaaacgaaaagagcttttggtctcacgtgctatgcccatttcttctgcagaacttggactttcaggaattatggatgttgtggaattttataaagatgatcaaggtgtgtctttgaggggaaaacgtgggaaatggttaccaaaagttgtggaatacaagcgcggaaaacctaaaaaagataccagagatattgtccagttggtggctcagaccatgtgtttagaagaaacgctagactgcgacattaacgaaggttgtctttattaccatagtgtcaatcaaagagtgattgttcctatgacatcagctttgcgtcaagaagtgaaggaattagccgcagagatgcatgaggtttatcagagtcaaatgctacctaaagcagcttattttaaaaactgtcagctttgttctttagtcgatatttgtaagcccaggttgagtaaaaaaacaaggagtgtgtcgcgttacatcaatgaggctatgaccagtgaggagatggaccta

SEQ ID NO: 8122 - protein, 224 aa, Streptococcus pyogenes
MVYAEDDYLMLSGIQHFQFCKRQWALIHIEQQWLDNEATAHGQVLHTKADNPYIKEKRKELLVSRAMPISSAELGLSGIMDVVEFYKDDQGVSLRGKRGKWLPKVVEYKRGKPKKDTRDIVQLVAQTMCLEETLDCDINEGCLYYHSVNQRVIVPMTSALRQEVKELAAEMHEVYQSQMLPKAAYFKNCQLCSLVDICKPRLSKKTRSVSRYINEAMTSEEMDL

SEQ ID NO: 8123 - DNA, 861 bp, Streptococcus pyogenes
gtgaggagtaaaaagatgttggaacacaaaattgattttatggtaactcttgaagtgaaagaagcaaatgcaaatggtgatcccttaaatggaaacatgcctcgtacagatgccaaaggatatggtgtgatgagtgatgtctccattaaacgtaagattcgtaatcgtttgcaagatatggggaagtctatttttgtgcaagctaatgagcgtattgaagatgattttcgttcactggaaaaacgcttttcgcaacattttacagctaagacacctgacaaagaaattgaagaaaaagcaaatgcattatggtttgatgttcgtgcttttggacaagtttttacttatctgaaaaaatcaattggggtgcgtggaccagtttccatcagtatggctaagtccttggagccaattgtcatttccagccttcaaattacgcgtagtaccaatggtatggaagctaagaataatagtggccgctcttctgatacgatggggacaaaacattttgtagattatggtgtgtatgtacttaaaggttctatcaatgcttattttgctgaaaagactggtttttctcaggaagatgctgaggctattaaagaagttttggttagcttgtttgaaaatgatgcgtcgtctgcacgtccggaaggctctatgcgagtttgtgaagtcttttggtttacgcattcaagcaaattgggaaatgtttcaagtgcgcgtgtctttgacttgttagagtatcatcaatcaatagaagaaaaaagcacttatgacgcttatcagattcatctaaatcaagaaaaattggctaaatatgaagcgaaagggttaacgcttgaaatcctagaaggactc

SEQ ID NO: 8124 - protein, 287 aa, Streptococcus pyogenes
VRSKKMLEHKIDFMVTLEVKEANANGDPLNGNMPRTDAKGYGVMSDVSIKRKIRNRLQDMGKSIFVQANERIEDDFRSLEKRFSQHFTAKTPDKEIEEKANALWFDVRAFGQVFTYLKKSIGVRGPVSISMAKSLEPIVISSLQITRSTNGMEAKNNSGRSSDTMGTKHFVDYGVYVLKGSINAYFAEKTGFSQEDAEAIKEVLVSLFENDASSARPEGSMRVCEVFWFTHSSKLGNVSSARVFDLLEYHQSIEEKSTYDAYQIHLNQEKLAKYEAKGLTLEILEGL

SEQ ID NO: 8125 - DNA, 1893 bp, Streptococcus pyogenes
atggatttttttacttctctcttgaagacttatgaaaaagcagagctagcagacttggttgatcatcaaaaaagaaataatgagccggttttactgccgatttatcatacgagtttaaagtcaaatggtaaaaatatcatttcagtgaaacttgacaaagatggccagtttcacaaggcagaatttatggcagataagcaaatgattatttttcctgtaacggctgattctgttgctaggtcaggtagtcatcctgcaccgcatcccctagtcgataaatttgcttattatagtgctgaaatggggcagattcagtatgattcttttcataagcaactgaataactggattgattattgtgaggagggtgatgtcaagaaatttttaacctttgttcagcagttcattttgaagccagaatttctaacattgattcttgattctttaattggtcctgattatcaacataatcaattaaaagtcacattttgtgatgccactggaaaagaaaaattaattgatttatcagcttgctttttagaattttcaattgatcagttccagggctttaaaaatgaatcggtttcgacatttaaagccttacaccaatcctatatttcttttgttgaagccaatcgtgaaaatctcggtatttgtaatattagtggacgagaggaacagcttaccgataagcatagaggtttgatggggaatgctaaaatcatctctgttagtaataaaagagaagcttataaaggacgttttagagaacgcgaagacgtttttagtgttggctatgaaacttccgaaaagattcatttaatgctcaagtaccttttagaaaataaaaataccagtacttggttagggtcttctcaatatttaatcaactggttcagcgatgatttaacaaatgatagtcggttggatattgtatcaccaatctttgatgatggacttgaagaagatgatgatgacgatacgcctcctgttataacattagcaactgaagacaataaaagaattggtaaatcattcatcaagggacaaaaattatttgctaatgatgccacttactacgttgctattttgaataaaaccagcaatgggcggattgctttaaaatattttcgtcagcttcaagcgtcccaattactcaccaatcttaacaagtggcaggaaacatacagttgggagtcgcgatctaagtttgggaaaagtcgcttaagaacccctacttttcatgacatccttaatgtgtcctacggggttgatagggatcgcttccttgaattagataatgataacttcaaaagtgatcaaattcaaaagttagtggcaagtttgattgatggtaaaccgatgccacagtccattgtcaaaaagttaggtaacaatgttaaagaacgacatcgttaccgtaagcactggtatcaagttgagcaggtctgcttagcaattttacacaaacaaaatggggaggaattttcaccgatgctagatcataccaatcaaaatcgttcctatctttttggacgattattagcaatttttgaattaatcgagaccttgcgttatggcttggatggaaacaataacgaccgtattaccaatgctgaacgttattggacagcctatactggacaaccaacaaaattgatgatgttattggaaaataaaattaagccttacgaagaaccattgaaattaaatcgtcgtggcagttggatgaaattagaaaaagaaaaagaagagattttagaactgttaaatcctctgttagaaacagaaacaatggaaaaacccttagattaccgctttatttttgggtattatgctgagaaaaactattactatacaaaacaaaacacggaagtaacagaaagtgaggag

SEQ ID NO: 8126 - protein, 631 aa, Streptococcus pyogenes
MDFFTSLLKTYEKAELADLVDHQKRNNEPVLLPIYHTSLKSNGKNIISVKLDKDGQFHKAEFMADKQMIIFPVTADSVARSGSHPAPHPLVDKFAYYSAEMGQIQYDSFHKQLNNWIDYCEEGDVKKFLTFVQQFILKPEFLTLILDSLIGPDYQHNQLKVTFCDATGKEKLIDLSACFLEFSIDQFQGFKNESVSTFKALHQSYISFVEANRENLGICNISGREEQLTDKHRGLMGNAKIISVSNKREAYKGRFREREDVFSVGYETSEKIHLMLKYLLENKNTSTWLGSSQYLINWFSDDLTNDSRLDIVSPIFDDGLEEDDDDDTPPVITLATEDNKRIGKSFIKGQKLFANDATYYVAILNKTSNGRIALKYFRQLQASQLLTNLNKWQETYSWESRSKFGKSRLRTPTFHDILNVSYGVDRDRFLELDNDNFKSDQIQKLVASLIDGKPMPQSIVKKLGNNVKERHRYRKHWYQVEQVCLAILHKQNGEEFSPMLDHTNQNRSYLFGRLLAIFELIETLRYGLDGNNNDRITNAERYWTAYTGQPTKLMMLLENKIKPYEEPLKLNRRGSWMKLEKEKEEILELLNPLLETETMEKPLDYRFIFGYYAEKNYYYTKQNTEVTESEE

SEQ ID NO: 8127 - DNA, 726 bp, Streptococcus pyogenes
ttgtacagatctagagacttctacgtgagagtaagtggtcagcgagctctttttacaaatccagccacaaaagggggatcggaacgctcatcctattcggttccgactagacaggcactgaatggtatcgttgatgccatctattataagccgacctttactaatatcgtcacagaggttaaggttattaaccagattcaaaccgaattacagggtgtcagggctctgttacatgattatagtgcagatttaagttatgtatcctatttgagtgatgttgtttatctgatcaagtttcattttgtttggaatgaagatagaaaagatttgaactcagatagacttccagctaaacatgaagccattatggagcgttctattcgtaaagggggacgtcgagatgtgtttttgggtacaagagaatgtttagggcttgtagatgatatcagccaagaagagtatgagactactgtgtcgtattataatggtgtcaatatcgacttgggaatcatgttccattcctttgcctatccgaaggacaaaaagacaccattaaaatcatactttacaaagactgtgatgaaaaatggagtcattacgtttaaagcacagtctgaatgcgatattgttaacacgctttctagttatgcttttaaagcaccagaggagataaaatcggttaacgatgaatgcatggagtatgatgccatggagaaaggagaaaac

SEQ ID NO: 8128 - protein, 242 aa, Streptococcus pyogenes
LYRSRDFYVRVSGQRALFTNPATKGGSERSSYSVPTRQALNGIVDAIYYKPTFTNIVTEVKVINQIQTELQGVRALLHDYSADLSYVSYLSDVVYLIKFHFVWNEDRKDLNSDRLPAKHEAIMERSIRKGGRRDVFLGTRECLGLVDDISQEEYETTVSYYNGVNIDLGIMFHSFAYPKDKKTPLKSYFTKTVMKNGVITFKAQSECDIVNTLSSYAFKAPEEIKSVNDECMEYDAMEKGEN

SEQ ID NO: 8129 - DNA, 2406 bp, Streptococcus pyogenes
atgagaatgattttagcacactatgactgtaaaaaagataaaaagcaatctttagatgagcatttatggcatgtggcctgttctagtcgacaggaagcatctataattggtcaaggagatgtgctttttttaattggtctttaccacgacctgggcaaagctgatcgaacctttcaagataaattattaaataatccaaatcggcatgttgatcactcttatgcaggggcaaaatacttatgttctattattgggcctcatctaaaaaaccgaggggttgataaaaatgagagaatgacattcaacgaaatggtggggtatgtcatctctgctcatcatgggatgtatgatttatgctactattttgacgatgctgaatattatggctttaataagtttaaaaatcgtatcaatagagacttagatggttatcactatcatgaagatattaaagggtacgctctaaaattagaaaaaaaattatgtgattatggctacaaagatttaagggagcttattgataaagcttttgataattaccaacaagccatgtcttccttaaactggcaagataagagtgagtgggattattatcagtcttgtatggtgagactttacttgtcactcttaaaaaacgctgatattttggacacagtaaatgcctatggccttaagataagtcctatggataaaacagagcgatcctttctaaaacactcctatttagcggccattgaacaaaaatatgctagctttggacagccaaacaatcagttgaacactattcggacagaaatcgctgagcgtgttaaagaaagaggtaaacgagattccaaggggatttatcgcttagatttaccgacaggagctggcaagactaatcttagtatgcgttatgcgtttcaccaattagttcatcacgacaaatcaaggtttttttacataactccctttctttcggttcttgagcaaaatgcttccgaaattagaaaagttacaggtgaccttggcgttctagaacaccattccaatgtggtgaaacaggctaatgaagatgatgatgataaggacagtttattgtcagcttatcttagtgatagctgggacagtcaagtagtcttgacttctatggttcaatttttccaaacacttttcaaaacaaaatcagctaatctgagacgtttttcaagtttgattaatagtgttgtgattctagatgaagttcaatccctgcctattgaagtcaccactttgtttaatttaacgatgaattttttaaataaagttatggatacaaccatcgttctttgcacagcgacacaacctgcttatgattcttcagagattgaccatcgtatctgttatggagggaacttgggagaattagctgaaatagttgagttaacgattgaagaaaaacagattttttcaaggacagagcttagaaaatttgatgatagtgatcagaaagttcacttgactgatgttattaaccttattctaggtgaggaaaactcagttcttgctatttttaatacgaaaaaaacggttcataactgctatactatgctaaaagacatgactgatagaccggtctatcagctttcgacaaatatgtgtgcgcagcatagacttgacttgattgctaagatcaaaacggagttacaaaataatatccctattatttgtattagcacgcaattaattgaagcaggtgtagatgttgattttcatcgcgtcattcgttcctactcagggattgattctattgttcaggctgctggacggtgtaaccgagaaggcaaacgagataaagggcaagtcactcttgtcaatctgaccaatgaagaggaaaatatttctaggctgacagaaataaaaactaaaaaagaagccacagaatctattcttcataagattgggtctccaattgatatctcaactttaaaccgtgacttttttgagtattattatgccaataatcagggactgatggattatcctttggaagacaacctatcaatctacgactatttaagccttaatatttatcagacggcaaataaaaagttcaaaggtaagttaaaacaagcttttaaaacagcaggagccaaaatgaacctcatcaataatgatatgataggaattctcgtaccttatggcgaagctgagaaaaaattggcttatttagaagaattaggtgtgtcacattttttatcagcaaaagattatcaaacgataaaatcattactaaaagagttacaaccttttacggttaatgtccgcgagaacgatcctctctttgagacaacaaaatcttatctaaatggtcagattctggttttgacgtcggagtattatgacacggaaagaggagttaaatacgattcagctagcttttacttc

SEQ ID NO: 8130 - protein, 802 aa, Streptococcus pyogenes
MRMILAHYDCKKDKKQSLDEHLWHVACSSRQEASIIGQGDVLFLIGLYHDLGKADRTFQDKLLNNPNRHVDHSYAGAKYLCSIIGPHLKNRGVDKNERMTFNEMVGYVISAHHGMYDLCYYFDDAEYYGFNKFKNRINRDLDGYHYHEDIKGYALKLEKKLCDYGYKDLRELIDKAFDNYQQAMSSLNWQDKSEWDYYQSCMVRLYLSLLKNADILDTVNAYGLKISPMDKTERSFLKHSYLAAIEQKYASFGQPNNQLNTIRTEIAERVKERGKRDSKGIYRLDLPTGAGKTNLSMRYAFHQLVHHDKSRFFYITPFLSVLEQNASEIRKVTGDLGVLEHHSNVVKQANEDDDDKDSLLSAYLSDSWDSQVVLTSMVQFFQTLFKTKSANLRRFSSLINSVVILDEVQSLPIEVTTLFNLTMNFLNKVMDTTIVLCTATQPAYDSSEIDHRICYGGNLGELAEIVELTIEEKQIFSRTELRKFDDSDQKVHLTDVINLILGEENSVLAIFNTKKTVHNCYTMLKDMTDRPVYQLSTNMCAQHRLDLIAKIKTELQNNIPIICISTQLIEAGVDVDFHRVIRSYSGIDSIVQAAGRCNREGKRDKGQVTLVNLTNEEENISRLTEIKTKKEATESILHKIGSPIDISTLNRDFFEYYYANNQGLMDYPLEDNLSIYDYLSLNIYQTANKKFKGKLKQAFKTAGAKMNLINNDMIGILVPYGEAEKKLAYLEELGVSHFLSAKDYQTIKSLLKELQPFTVNVRENDPLFETTKSYLNGQILVLTSEYYDTERGVKYDSASFYF

SEQ ID NO: 8131 - DNA, 120 bp, Streptococcus pyogenes
atgcttggcttcctctttctgaaattatctttaccattataccataaggcaggcctcttgtgccatgttattaataactggtaccctcattttgatgataaacaattaaggaaatatttt

SEQ ID NO: 8132 - protein, 40 aa, Streptococcus pyogenes
MLGFLFLKLSLPLYHKAGLLCHVINNWYPHFDDKQLRKYF

SEQ ID NO: 8133 - DNA, 90 bp, Streptococcus pyogenes
gtgaattctaaaataaaccaagctaaagggcttaatctggagatgagaaagccaagctttaaaattcgtattgtcatcgctttgaatacg

SEQ ID NO: 8134 - protein, 30 aa, Streptococcus pyogenes
VNSKINQAKGLNLEMRKPSFKIRIVIALNT

SEQ ID NO: 8135 - DNA, 156 bp, Streptococcus pyogenes
ttgtcaactgtattgggtggcctatggaaaagcaaaagagaaggtgacgctcatcttctctttttacgtattcaaagcgatgacaatacgaattttaaagcttggctttctcatctccagattaagccctttagcttggtttattttagaattcac

SEQ ID NO: 8136 - protein, 52 aa, Streptococcus pyogenes
LSTVLGGLWKSKREGDAHLLFLRIQSDDNTNFKAWLSHLQIKPFSLVYFRIH

SEQ ID NO: 8137 - DNA, 336 bp, Streptococcus pyogenes
atgtcttatatcaataatattgagcacgcgaaggttcttgatttgacgcaagaagtaatgattgagcaagatcaaatgttaagtagaacactagtccaaaggcaagacctaggaataacagttttttccttagataagggccaagaaattgggcgacactcatcaccaggagatgccatggttactatcttaagtggcttagcagaaatcaccattgatcaagagacctaccgggttgctgaaggtcaaaccattgtgatgccagctgggattcctcatgccttatatgcagtagaagcctttcaaatgcttttagtagtagtaaaaccggaggct

SEQ ID NO: 8138 - protein, 112 aa, Streptococcus pyogenes
MSYINNIEHAKVLDLTQEVMIEQDQMLSRTLVQRQDLGITVFSLDKGQEIGRHSSPGDAMVTILSGLAEITIDQETYRVAEGQTIVMPAGIPHALYAVEAFQMLLVVVKPEA

SEQ ID NO: 8139 - DNA, 108 bp, Streptococcus pyogenes
ttgaacttttccttttataagagcttcttttctaaaaaaacggtaggttatctggcagacctcaaaggaactatgacttgtatcacgttagggataaggctcttcaaa

SEQ ID NO: 8140 - protein, 36 aa, Streptococcus pyogenes
LNFSFYKSFFSKKTVGYLADLKGTMTCITLGIRLFK

SEQ ID NO: 8141 - DNA, 105 bp, Streptococcus pyogenes
ttgtatcacgttagggataaggctcttcaaataagctttttgctcttaaaaacagctctcgcaaaaagaattttagcagcccatgatgactgctccatctcttat

SEQ ID NO: 8142 - protein, 35 aa, Streptococcus pyogenes
LYHVRDKALQISFLLLKTALAKRILAAHDDCSISY

SEQ ID NO: 8143 - DNA, 99 bp, Streptococcus pyogenes
gtggaaaaaacggatcatcaaataagtggaagttataaagggagaaaaattaatgtcaataatgttactactcttagtaaagcggtttccaaaagccta

SEQ ID NO: 8144 - protein, 33 aa, Streptococcus pyogenes
VEKTDHQISGSYKGRKINVNNVTTLSKAVSKSL

SEQ ID NO: 8145 - DNA, 330 bp, Streptococcus pyogenes
atgcacatgggtgcttggaatactggtaacaataaaatcctttacactcaagaatctgttactgacgacatgattgctaaacgtgaccaatcaatcaaggatgctaaagaatctccaatccttggtttcactgttgacacaaaagttatcaaaacggaattgtcaaatatttcaaatgtcatgaaccgatataaagcaagtatcaatactggtacagtggatcctgacgaagcccttccaaaacttcttgcagacctcaaaggtgctggttgggacaaggtgcaaaaagaagttcaaaaacaattggacgactttgtagctaaagacaag

SEQ ID NO: 8146 - protein, 110 aa, Streptococcus pyogenes
MHMGAWNTGNNKILYTQESVTDDMIAKRDQSIKDAKESPILGFTVDTKVIKTELSNISNVMNRYKASINTGTVDPDEALPKLLADLKGAGWDKVQKEVQKQLDDFVAKDK

SEQ ID NO: 8147 - DNA, 1140 bp, Streptococcus pyogenes
atgaaaaaatggcaaaaaatcgtgtgtgtgactggaactgtgcttgcaacgtctaatttagcagcctgcgaaagcaagtcagcatcaaaagatagtgatgtcaaattattgatgtaccaagttggtgacaaacctgataacttcgatgaattgatgacaattgctaacaagcgcatcaaagaaaaaacaggtgcaacggttgaccttcaatacatcggttggggggactgggatgataaaatgagtaccatcattgcctctggtgaaaactacgacattgcttttgccaataattatgtggtcaatgcacaaaaaggtgcttttgctgatttgacaacgttaatgccaaaatacgctaagaaaacgtataaaaacttagacccagcctatattaaaggaaatactattgacggtaaactctatgccttcccagtagatgccaacgtttatgcccaacagatgctttctttcaataaagaactagtggacaaatatggccttgacatttcaaacattaagtcctatgcagatgctgaaaatgtcttgaaacaattccacgaaaaagaaccaaatacagcagcttttgctattggtcaagtctttagtatgtcaggtgactatgactacccattaaccaaaacccaaccctttgctgtgaaaattgatgaaggcaagccaaccatcattaatcagtatgaagatgagtcctttaaaaacaatctccgcttgatgcacaaatggtataaagaaggtttgattccaacagatgcagcgaccaatacagaaggttatccccttgaaggaaacacttggtttatgcgtgaagaaacccaaggtcctatggactatggcgatactatcttgaccaatgctgcaggaaaagacatcgtgtctcgtccattgactaaaccgctaaaaaccacatcacaagcacaaatggcaaactttgtggtatcaagcgtatctaaaaacaaagaaaaagcagttgaagtcctttctcttcttaatagcgatcccgaattgttaaatgggcttgtttatggtgtcgaaggcaaagcttgggaaaaaattggcgacaagaaaatcaaactgctcgatggctatcaacctaaaaatgcacatgggtgcttggaatactgg

SEQ ID NO: 8148 - protein, 380 aa, Streptococcus pyogenes
MKKWQKIVCVTGTVLATSNLAACESKSASKDSDVKLLMYQVGDKPDNFDELMTIANKRIKEKTGATVDLQYIGWGDWDDKMSTIIASGENYDIAFANNYVVNAQKGAFADLTTLMPKYAKKTYKNLDPAYIKGNTIDGKLYAFPVDANVYAQQMLSFNKELVDKYGLDISNIKSYADAENVLKQFHEKEPNTAAFAIGQVFSMSGDYDYPLTKTQPFAVKIDEGKPTIINQYEDESFKNNLRLMHKWYKEGLIPTDAATNTEGYPLEGNTWFMREETQGPMDYGDTILTNAAGKDIVSRPLTKPLKTTSQAQMANFVVSSVSKNKEKAVEVLSLLNSDPELLNGLVYGVEGKAWEKIGDKKIKLLDGYQPKNAHGCLEYW

SEQ ID NO: 8149 - DNA, 120 bp, Streptococcus pyogenes
atgcctggtccctttgttgatgtcattgttgctgacgcttctgttaaaggaattggtcatcagttaatgctcgagctattagaagctatgctagttatcgccaataagcaaagcctcact

SEQ ID NO: 8150 - protein, 40 aa, Streptococcus pyogenes
MPGPFVDVIVADASVKGIGHQLMLELLEAMLVIANKQSLT

SEQ ID NO: 8151 - DNA, 1653 bp, Streptococcus pyogenes
atgacaagaggagactatcttgtctttgacacgccattgacttgccgatttattggccgttttttccgctttgaaaatcaaaaagccctgctggcagaattggcaacgtcaaagtattttcagtggattgaagaaggccaagcagaggtgacgatgaaacacttttttaaccgtcagctggctaaggatgcctttaccctgaagatttcagaagataaggaaatcattattgaaagccaaaaccttagaggttttcgttacgcccaagaagctttgcttaaagtcatgaccttcaaaggggataaactttatttgcccattgtttctgtcaagcacagcccttcttttgctatgcgggggataattgaaggcttttacggaacaccgtggacacgagaagagcggttagattgcctgcgttttattggaaataaaaggatgaatacttacatgtatgctcctaaagatgatgattaccaacgaaaactgtggcgcgatctttatcctgaggattgggtgacttatttcaaagagctacttgcagtagccaaggaagaagggcttgatttttggtatatgattagtccggggcttgattttgattataccaaggaagctgactatcagttgctctatcaaaaattgcaacaacttctagcgttaggtgtttgtcattttgggcttttgctggatgatattgactaccaaattgtagatgctgttgagagacgattcaaaaagactgcctatgcccaggcccacttggcaactgaggttcatcactttttaaaccaacaacatgcggcgccagaattggtgatctgtccgacagaatacgacaaccaccatgattctatctatttgcaagagctgtcagaaaggattcctaaagaagtcgcctttttctggacaggcccaagcacgctagcgagtcaaatctcgcaagcagatattgaaactatggcagcagtatatcaacggcctatcattatttgggacaatattcctgttaatgattatcaaaaagatccagaacgtctctttttaaccccttttgccaatcgctcgccatttttatgccagccagactatcaggtcaaggggattgtttctaaccctatgattagttgggaattatctaagcttaccttgacagatatgagccattatctgtgggatgctaaccgttatcagcctagtcattcttggctagaaaccttaacagactatacagaagatactgaattagccttagctttacaggcatttgcttggcataatggcaatcgtcatctgcacagggaccttccttttgaagtggaagaagctctcctggctaaggatgtatcaacgttatcagcttgggtagctgaattggtcgaacgtgtcaatacgttgagaaagctagataagccagcgtttcaacaagctattgctccttggtttgaacgggtggccaaagaccaagatttttggcaggctatgttaaatcaggagcctcagttggaaacactctatgctgacttacaagaagataaacaccgtattggaagtgacattccaagtcgttactatcgcatctactatcaacagcaagataaactaacagctaatcaaggtcaagttacccaagcaagaccggaagactatgct

SEQ ID NO: 8152 - protein, 551 aa, Streptococcus pyogenes
MTRGDYLVFDTPLTCRFIGRFFRFENQKALLAELATSKYFQWIEEGQAEVTMKHFFNRQLAKDAFTLKISEDKEIIIESQNLRGFRYAQEALLKVMTFKGDKLYLPIVSVKHSPSFAMRGIIEGFYGTPWTREERLDCLRFIGNKRMNTYMYAPKDDDYQRKLWRDLYPEDWVTYFKELLAVAKEEGLDFWYMISPGLDFDYTKEADYQLLYQKLQQLLALGVCHFGLLLDDIDYQIVDAVERRFKKTAYAQAHLATEVHHFLNQQHAAPELVICPTEYDNHHDSIYLQELSERIPKEVAFFWTGPSTLASQISQADIETMAAVYQRPIIIWDNIPVNDYQKDPERLFLTPFANRSPFLCQPDYQVKGIVSNPMISWELSKLTLTDMSHYLWDANRYQPSHSWLETLTDYTEDTELALALQAFAWHNGNRHLHRDLPFEVEEALLAKDVSTLSAWVAELVERVNTLRKLDKPAFQQAIAPWFERVAKDQDFWQAMLNQEPQLETLYADLQEDKHRIGSDIPSRYYRIYYQQQDKLTANQGQVTQARPEDYA

SEQ ID NO: 8153 - DNA, 99 bp, Streptococcus pyogenes
atgagctggttagctcaggtaaaggagaccagaaatgaccatttatcacgccttaaaggattatcaagaagtcatgacaagaggagactatcttgtctt

SEQ ID NO: 8154 - protein, 33 aa, Streptococcus pyogenes
MSWLAQVKETRNDHLSRLKGLSRSHDKRRLSCL

SEQ ID NO: 8155 - DNA, 1311 bp, Streptococcus pyogenes
atgatatatcattttggaggatatgacatgacacgaccaatcccaactagcgtcagccaatttatggccaaggtggaaagcctttgtggagaccaacaccctgattgggctcttaatttcaaaaccagctttaccaataccttagagacaaccctaaaaacctacgaagatggcactagctttcttttaactggcgatattcctgccatgtggttacgtgattccactgcgcaaatgaaaccttacctcttcctcgccaaggaagatgaagaaattagaaagattattgccggtctggtcaaacgccaattccgctacatttgtatcgatccctatgccaatgccttcaacgaagaagctaacgaaaaaggacaccaaacagatcatacccaaatgaacccttggatttgggaacgcaaatatgagattgattgcctttgctaccctattcaactggcttatctgctctatcgtgaaacaggaagcaccgatcagtttaatgacgattttcatcgtggggtagaactcattcttgacctatggacagttgagcaagaccacgcccagtccccttacttgtttgaacgcgatacttggcgcaaagaagataccctaacacatgctggaaaaggaagtcctgtcgcaccaacagggatgacctggtcaggctttagaccaagtgatgatgcttgtcaatatggttacctcattccttcaaatatgtttgcagtggttgtgctttcctatctagaagatttatataacaacctttttcacaatgaaccagtagctactcgtgccaagcagctgaaagaagctattcaatcgggtattgcagaccatgcccttgttcaaaacagcaagggagaaaccatttacgcttatgaagtggatggtctgggacagttttccatcatggatgatgctaatattccaagcctccttgctgcaccttaccttggtttttgcactaaagatgaccctatctatctggcaacgcgccgcaccattctcagccaagaaaacccttattattatcagggaaatgcagcagcaggcatcggttcttcccatacaccagaaaattatatctggcatatcgcccttgccttacaaggattgaccgctcttgaccaagacagtaaaaaagagatgcttgatttgcttgtggcaacagatgctggtacccacttaatgcacgagggtttcgatgtcaatgatccttatcaatacactcgtgagtggttctcttgggctaacatgatgttctgtgaactacttcttgactatctgggctttagtattgctcct

SEQ ID NO: 8156 - protein, 437 aa, Streptococcus pyogenes
MIYHFGGYDMTRPIPTSVSQFMAKVESLCGDQHPDWALNFKTSFTNTLETTLKTYEDGTSFLLTGDIPAMWLRDSTAQMKPYLFLAKEDEEIRKIIAGLVKRQFRYICIDPYANAFNEEANEKGHQTDHTQMNPWIWERKYEIDCLCYPIQLAYLLYRETGSTDQFNDDFHRGVELILDLWTVEQDHAQSPYLFERDTWRKEDTLTHAGKGSPVAPTGMTWSGFRPSDDACQYGYLIPSNMFAVVVLSYLEDLYNNLFHNEPVATRAKQLKEAIQSGIADHALVQNSKGETIYAYEVDGLGQFSIMDDANIPSLLAAPYLGFCTKDDPIYLATRRTILSQENPYYYQGNAAAGIGSSHTPENYIWHIALALQGLTALDQDSKKEMLDLLVATDAGTHLMHEGFDVNDPYQYTREWFSWANMMFCELLLDYLGFSIAP

SEQ ID NO: 8157 - DNA, 2703 bp, Streptococcus pyogenes
atggcaactaaaaaagtacatattatttcacacagtcactgggatcgcgagtggtacatggcttacgaacaacaccacatgcgtctgattaacttaatagatgacctgttagaagtttttcaaacggatcctgattttcatagttttcatttggatgggcaaaccattatcctagatgattatttaaaagtacgccccgaacgagaacctgagattagacaagccattgcttcgggaaaactccgtatcggacctttctatatcttacaggacgattttttgaccagcagtgaatccaatgtgcgcaatatgctgattggtaaggaagattgtgacagatggggcgctagtgtgccacttggttattttcctgatacctttggaaatatgggacaaacaccacagctgatgttaaaagccggcctacaagctgctgcctttggtcgtggcattcgtccaactggatttaacaatcaggtggataccagtgaaaaatacagctcccaattctctgaaatcagttggcaaggcccagataacagtcgtattcttggactcctcttcgccaactggtacagcaatggcaatgagatcccgacaacagaagctgaggcgcgtcttttttgggataaaaaacttgctgatgccgaacgcttcgcctcaaccaagcaccttctgatgatgaacgggtgtgatcatcaacccgtacaacttgatgtcaccaaggcaatcgccttagccaaccaactctatcctgactacgaatttgtgcattcctgctttgaagattacttggctgatctcgcagatgatttaccagagaacctttcaaccgtccaaggagagattaccagtcaagaaaccgatggctggtataccctagctaacacggcttctgctcgtatttacctcaaacaggctaataccagagtctctcgccaactcgaaaacatcaccgaacccttagcagcaatggcttatgaggtaacaagtacctaccctcacgaccaactgcgttacgcttggaaaaccctcatgcaaaatcaccctcatgattctatctgtggttgtagtgttgatagcgttcatcgggaaatgatgacgcgctttgaaaaagcctatgaagtcggacactatttagcaaaagaagctgctaagcaaattgctgacgccattgataccagggattttccaatggatagccaacccttcgtcttatttaataccagcggccattccaaaacaagtgttgctgagctcagcctgacctggaaaaaatatcattttggccaacgctttcctaaagaggtttaccaagaagctcaagaatatttggcaagactctcccaatctttccaaattattgacactagtggacaagtgagacccgaagcagaaattttaggcacaagcatcgcttttgactacgatttgcccaagagatccttccgcgaaccttatttcgccatcaaagtgagattacggctaccaataactctcccagccatgtcttggaaaaccttagcattaaagctaggaaatgaaacaactccttcagaaaccgtttccctctacgatgacagtaatcagtgccttgaaaatgggtttctaaaagttatgatacaaaccgatggtcgtctaaccatcaccgataaacaatctggactaatctatcaagacctgttgcggtttgaagattgtggcgatattggaaatgaatatatttctcgccagccaaatcatgaccaacctttctatgcggatcaagggaccatcaagcttaacatcattagcaacaccgctcaagttgctgaacttgaaatccagcaaacctttgccattcctatctccgcagataagctcttacaggctgagatggaggctgtcattgacatcacagaacgccaagcaagacgttcacaagaaaaggctgagctaaccttaacaacccttatccgcatggagaaaaataatcctcgcctccaattcaccacacgttttgataaccaaatgactaatcatcgcttgcgcgtcctattcccaacgcaccttaaaacagaccatcatctagctgacagtatttttgaaactgtcaaacgtccaaatcatccagatgccaccttttggaagaatccaagtaacccacagcaccaagaatgctttgtgagtctctttgatggtgaaaatggagtcactattggtaactatggcctcaacgaatatgagatcttaccagataccaacaccattgccatcactctcttacgttctgttggcgaaatgggcgactggggttacttcccaacacctgaagcccagtgtcttggcaaacacagcctttcttatagttttgaaagcatcactaagcaaacacaatttgccagctactggcgagctcaagaaggccaagtccctgttattaccacacaaacaaaccaacacgagggaacattagccgcagaatatagctatttgacgggtacaaacgaccaagttgccctcacagctttcaaacgtcgcttagcagacaatgcccttatcacgcgcagctataatctctcaaacgataaaacttgtgactttagcctaagcctgccaaactacaatgccaaggtcactaatttgttagaaaaagacagcaagcaaagcacacccagccaacttggcaaagcggaaattttaactctagcttggaagaaacaa

SEQ ID NO: 8158 - protein, 901 aa, Streptococcus pyogenes
MATKKVHIISHSHWDREWYMAYEQHHMRLINLIDDLLEVFQTDPDFHSFHLDGQTIILDDYLKVRPEREPEIRQAIASGKLRIGPFYILQDDFLTSSESNVRNMLIGKEDCDRWGASVPLGYFPDTFGNMGQTPQLMLKAGLQAAAFGRGIRPTGFNNQVDTSEKYSSQFSEISWQGPDNSRILGLLFANWYSNGNEIPTTEAEARLFWDKKLADAERFASTKHLLMMNGCDHQPVQLDVTKAIALANQLYPDYEFVHSCFEDYLADLADDLPENLSTVQGEITSQETDGWYTLANTASARIYLKQANTRVSRQLENITEPLAAMAYEVTSTYPHDQLRYAWKTLMQNHPHDSICGCSVDSVHREMMTRFEKAYEVGHYLAKEAAKQIADAIDTRDFPMDSQPFVLFNTSGHSKTSVAELSLTWKKYHFGQRFPKEVYQEAQEYLARLSQSFQIIDTSGQVRPEAEILGTSIAFDYDLPKRSFREPYFAIKVRLRLPITLPAMSWKTLALKLGNETTPSETVSLYDDSNQCLENGFLKVMIQTDGRLTITDKQSGLIYQDLLRFEDCGDIGNEYISRQPNHDQPFYADQGTIKLNIISNTAQVAELEIQQTFAIPISADKLLQAEMEAVIDITERQARRSQEKAELTLTTLIRMEKNNPRLQFTTRFDNQMTNHRLRVLFPTHLKTDHHLADSIFETVKRPNHPDATFWKNPSNPQHQECFVSLFDGENGVTIGNYGLNEYEILPDTNTIAITLLRSVGEMGDWGYFPTPEAQCLGKHSLSYSFESITKQTQFASYWRAQEGQVPVITTQTNQHEGTLAAEYSYLTGTNDQVALTAFKRRLADNALITRSYNLSNDKTCDFSLSLPNYNAKVTNLLEKDSKQSTPSQLGKAEILTLAWKKQ

SEQ ID NO: 8159 - DNA, 1353 bp, Streptococcus pyogenes
atgttagaagattttcttcaatttttaggatttatatttttagatattattgaaattatgttaacgttaaagctttttagctttgtaagtgcaattccgcttcgcctgaaaaatattttttatttatcacttagtatggttttgtttcaagtagttttttgggctttctttccagaccatttcattcttgatgttgtgatgttggctcagtttcttttctttgcgcttatagccctatactatggtaaatcaataaaagctaagtttttaatgttttatgccttttttccactagtgtctattagtttggttaagcgatttattgtattttttgttatgccattgtttggtatgccttattcagttgttaaacataatacactactgatttacagcattacttgttttagtatttttttgatttatcgctgcattcaagtttttcatttcgatttttcaacctggcgccaatattttcaatcacatagagctagtaaactattagtgtttactaactcttcgatggctctatattacttgtgtgtccaagggatagatgtgatgtcgccttctttatcaggacttgctacaacgactgctcgttcaatcatagtgctcttttatttcattttgtttcttactttattaattcatttagagcgttatgtaaaacaaaactctattgaggcaattgtgcaacaaaaagaatatcgtgagctgattaattatagtcagcaccttggattgctgtatcaagatattcaagagcttaggcggctattaactaccgtgtctagtcgtcttaagattggaatcgaacaaaatgatatctctattgtgagacttacttatgaaggtatcttgaatgctgaaaagaataatgctaaagatgacagacttgatttaacttgtttagataaattacaagttgaagcaatcagacatattgttttagctaaattaattgaggcaaaaaataagaagcttaaggttgaggtatcgatccctaattgtattgcaacgttttttctagaagtagtagatttcactaagctattgtcatttttgttagataatgctatagaaatgagtttggagacaaagcaaccttgcttatcaatagcatttctggatcaaaaccataaacttgtcatagtcattcaaagcagtactaaacaaggacaagatgatagtcaaagcgtgtttgctataccggctttgaaaaaaagagatgactggcaatttgacttaaggaatgtcacgaccattttaaatcgttatgactatctcacaattagctcgcagattcatgatggcattttaacccagttaatagaaatagctaagcctgac

SEQ ID NO: 8160 - protein, 451 aa, Streptococcus pyogenes
MLEDFLQFLGFIFLDIIEIMLTLKLFSFVSAIPLRLKNIFYLSLSMVLFQVVFWAFFPDHFILDVVMLAQFLFFALIALYYGKSIKAKFLMFYAFFPLVSISLVKRFIVFFVMPLFGMPYSVVKHNTLLIYSITCFSIFLIYRCIQVFHFDFSTWRQYFQSHRASKLLVFTNSSMALYYLCVQGIDVMSPSLSGLATTTARSIIVLFYFILFLTLLIHLERYVKQNSIEAIVQQKEYRELINYSQHLGLLYQDIQELRRLLTTVSSRLKIGIEQNDISIVRLTYEGILNAEKNNAKDDRLDLTCLDKLQVEAIRHIVLAKLIEAKNKKLKVEVSIPNCIATFFLEVVDFTKLLSFLLDNAIEMSLETKQPCLSIAFLDQNHKLVIVIQSSTKQGQDDSQSVFAIPALKKRDDWQFDLRNVTTILNRYDYLTISSQIHDGILTQLIEIAKPD

SEQ ID NO: 8161 - DNA, 147 bp, Streptococcus pyogenes
gtgcttaaggcagcgactttctttggaattccatgccttatttttgagatcctaggctcaaaaatgccaagtggcgtcaacattaacattgacgccacttttaccacaacgaaaaacatctgttttggctcactccacacgcagaaa

SEQ ID NO: 8162 - protein, 49 aa, Streptococcus pyogenes
VLKAATFFGIPCLIFEILGSKMPSGVNINIDATFTTTKNICFGSLHTQK

SEQ ID NO: 8163 - DNA, 276 bp, Streptococcus pyogenes
ttggcacttgatgttgtaaccaaaactgacaagacacctcttttaggtagaattttatcaaagtatgtaggacgcttgacgtcgtgtattgaaaatgaaaccactaaaataaggaatcattcaagacaaaacgataccatcggcctcaatcatcttcttggaaacttgaaaaccgtccataaccctgagattatccttaaaacgattaatgtctattctcgtcgtcttcaggttttttcgcagataatggctacgcttatactcggtttaatcctt

SEQ ID NO: 8164 - protein, 92 aa, Streptococcus pyogenes
LALDVVTKTDKTPLLGRILSKYVGRLTSCIENETTKIRNHSRQNDTIGLNHLLGNLKTVHNPEIILKTINVYSRRLQVFSQIMATLILGLIL

SEQ ID NO: 8165 - DNA, 93 bp, Streptococcus pyogenes
ttgtatcctttgttttcccattttagacaatctcgacaagctattatatctgagtttgcacaacatgtcgcacaaacactttttcctatcttt

SEQ ID NO: 8166 - protein, 31 aa, Streptococcus pyogenes
LYPLFSHFRQSRQAIISEFAQHVAQTLFPIF

SEQ ID NO: 8167 - DNA, 96 bp, Streptococcus pyogenes
gtgttgctacctggtgcagtactatcatttattgaagaactgtttgaacttgacgttgaactcgatgagctactagaagagtgtgtttcttctgga

SEQ ID NO: 8168 - protein, 32 aa, Streptococcus pyogenes
VLLPGAVLSFIEELFELDVELDELLEECVSSG

SEQ ID NO: 8169 - DNA, 168 bp, Streptococcus pyogenes
atgacacaagtagatgttaaatgctattgccaactctatcaaaaaaatttatatgcttataaaaattctatatttttatttttagcgttttcttgttatcttagagacatggaaagcgcttttctaaaactgaaaggatgtttattttatgaaaaacatagttatcgt

SEQ ID NO: 8170 - protein, 56 aa, Streptococcus pyogenes
MTQVDVKCYCQLYQKNLYAYKNSIFLFLAFSCYLRDMESAFLKLKGCLFYEKHSYR

SEQ ID NO: 8171 - DNA, 660 bp, Streptococcus pyogenes
ttggtagaaaaaatgtgtaaagaaatcacaataaaagaagcggtagctcacgttaaagatggtgataccattatggttggtggcttcatgacaaatggcacaccagaaaaattaattgatgcacttgtggaaaaaggtgtcaaagacctcactttaatctgtaacgatgccggttttcctgacaaaggcgttggtaagatggttgccaataaacagttttcaactattattgcatcacatatcggtctcaaccgtgaagcaggccgacaaatgactgagggcgagactgtaattgatcttgtacctcagggaacattagctgagcgcatccgcagtggcggttttgggctaggcggtttcttaacacctactggaataggaaccgaagttgccaaaggaaaagaagtcattactattgacggcaaagactaccttcttgaaaaacctttgaaagctgatgtcgcacttatttttgctaacaaggcagataaaaatggcaatttgcaatacgcaggttctgaaaataactttaatcatgtgatggctgctaatgcgaaaaccaccattgttgaagcaagagaaattgttgacgtggggcaaatggatcctaattttgtccatactcctggcatttttgttaactacttagtgaaaggagcc

SEQ ID NO: 8172 - protein, 220 aa, Streptococcus pyogenes
LVEKMCKEITIKEAVAHVKDGDTIMVGGFMTNGTPEKLIDALVEKGVKDLTLICNDAGFPDKGVGKMVANKQFSTIIASHIGLNREAGRQMTEGETVIDLVPQGTLAERIRSGGFGLGGFLTPTGIGTEVAKGKEVITIDGKDYLLEKPLKADVALIFANKADKNGNLQYAGSENNFNHVMAANAKTTIVEAREIVDVGQMDPNFVHTPGIFVNYLVKGA

SEQ ID NO: 8173 - DNA, 657 bp, Streptococcus pyogenes
atgggaacatcaactactgttctttcaaaagaagagattcaaacacgtattgctaagcgcgttgcacaagaattagaacacaatacactggtcaacttaggcataggtttgccaacaaaagtagccaactatattcctgaaggtgtaaccattaccctgcagtccgaaaatggttttgtcggtctcactggattaacagatgatcactacgatcctactattgttaatgctggtgggcaacctgttagtattgctcctggaggggctttcttcgatagctcaacttcctttggtattattcgaggcggccatgtggccgcaaccgtcttaggtgccttacaagttgataaagaagctagcattgctaattacctgattcctggaaaaatggttcctgggatgggaggggccatggacttattggtaggtgctaaaaaagtcattgttgcaatggagcataccaataaaggcaaagcaaaaattttagacaaatgcacccttcctctgactgctcaaaatgttgttaacctaatcattactgaaatgggagtctttgaatatcaagatgaaggtctatgcgcccttgaaattaacccagattacacctttgaagacgtgcaaaacgttaccgaagttaccctaattgataaaacaaac

SEQ ID NO: 8174 - protein, 219 aa, Streptococcus pyogenes
MGTSTTVLSKEEIQTRIAKRVAQELEHNTLVNLGIGLPTKVANYIPEGVTITLQSENGFVGLTGLTDDHYDPTIVNAGGQPVSIAPGGAFFDSSTSFGIIRGGHVAATVLGALQVDKEASIANYLIPGKMVPGMGGAMDLLVGAKKVIVAMEHTNKGKAKILDKCTLPLTAQNVVNLIITEMGVFEYQDEGLCALEINPDYTFEDVQNVTEVTLIDKTN

SEQ ID NO: 8175 - DNA, 105 bp, Streptococcus pyogenes
atggaacgcggtaaacccctcaagctagcaacccaaactttggtaggggcatgggatagttggaaacgaacaagctatcctgactgtcaacagacggtagacaga

SEQ ID NO: 8176 - protein, 35 aa, Streptococcus pyogenes
MERGKPLKLATQTLVGAWDSWKRTSYPDCQQTVDR

SEQ ID NO: 8177 - DNA, 222 bp, Streptococcus pyogenes
atgttagtagaaatctttagcctttatgtaaaaggtctcattctctcaagccttactatgattttaatttgtttaatatggactttatggcgagcaaaaaccaaaagagataaaacattgattgaaagacaagcttttctttatgagatgctaatggttgctattttaaccatcccaattttatcgtttgcttttatgagtattttggttgtcataaaatcc

SEQ ID NO: 8178 - protein, 74 aa, Streptococcus pyogenes
MLVEIFSLYVKGLILSSLTMILICLIWTLWRAKTKRDKTLIERQAFLYEMLMVAILTIPILSFAFMSILVVIKS

SEQ ID NO: 8179 - DNA, 147 bp, Streptococcus pyogenes
atgttttacctcgttttcttccatattatatcattattgttagagacaagcaaaaggagtgggacaacactcgcaaaatcagcatttgtgggtcatctccactctcttattgatgatgttaatcaaaatgctattggtgactattct

SEQ ID NO: 8180 - protein, 49 aa, Streptococcus pyogenes
MFYLVFFHIISLLLETSKRSGTTLAKSAFVGHLHSLIDDVNQNAIGDYS

SEQ ID NO: 8181 - DNA, 111 bp, Streptococcus pyogenes
atgtttttaacccttattgcagcaatcatatcctttatggtatccgctttcacaatgcccttattttatcaaattctatcaattgaaaaaaattggtgggcaacaaatgca

SEQ ID NO: 8182 - protein, 37 aa, Streptococcus pyogenes
MFLTLIAAIISFMVSAFTMPLFYQILSIEKNWWATNA

SEQ ID NO: 8183 - DNA, 105 bp, Streptococcus pyogenes
gtgattaaggaagctaaaaatcttttacaagcagttgaaactctagaggcagtggctaagtcagtgcttgctaagttggctgatagcgaacaaaaagaacaagat

SEQ ID NO: 8184 - protein, 35 aa, Streptococcus pyogenes
VIKEAKNLLQAVETLEAVAKSVLAKLADSEQKEQD

SEQ ID NO: 8185 - DNA, 138 bp, Streptococcus pyogenes
ttgaccttgctcattatttcgacgtttgatccagctaaccagcataccatctccaaaaaaaaacaaaatagccccaatttcggacaattttcaattccaaatgaatcacctgaatctgatgtaaaagttcttctaaag

SEQ ID NO: 8186 - protein, 46 aa, Streptococcus pyogenes
LTLLIISTFDPANQHTISKKKQNSPNFGQFSIPNESPESDVKVLLK

SEQ ID NO: 8187 - DNA, 138 bp, Streptococcus pyogenes
atgactaatgaaagagaaaaagaagaagcaaaggttactttagaagaacttttacatcagattcaggtgattcatttggaattgaaaattgtccgaaattggggctattttgtttttttttggagatggtatgctggt

SEQ ID NO: 8188 - protein, 46 aa, Streptococcus pyogenes
MTNEREKEEAKVTLEELLHQIQVIHLELKIVRNWGYFVFFWRWYAG

SEQ ID NO: 8189 - DNA, 144 bp, Streptococcus pyogenes
ttgttgggtcttttgattttctttgataagaaagattacctcgttagaaatgaggagacgtggttgtcatcagtggatttttcaagttcatctagtgggataagctacctatcttatcagcttttttttagctttaaaaattct

SEQ ID NO: 8190 - protein, 48 aa, Streptococcus pyogenes
LLGLLIFFDKKDYLVRNEETWLSSVDFSSSSSGISYLSYQLFFSFKNS

SEQ ID NO: 8191 - DNA, 102 bp, Streptococcus pyogenes
ttgacaatcgtttttttgtcatcagtaaaatacctgacgatgttactagcatgtattacaggtctaggcaccaaaaaaccgcattttgatgctcctaaatca

SEQ ID NO: 8192 - protein, 34 aa, Streptococcus pyogenes
LTIVFLSSVKYLTMLLACITGLGTKKPHFDAPKS

SEQ ID NO: 8193 - DNA, 480 bp, Streptococcus pyogenes
ttgaagaaatcgataacaaatgaaaaagccatattagcccaaggaggacaggaatttggtgctcagaacacgaaatttttgacgttacttcacattatgatttatgtgtttgcggtgattgaagcgctgcttaaacaaattaagtttgatggcattagttttttaggtcttttgttgatgttattatcagtagctgttttatatgaagtgacacgtatcttaggtgacatttggactgtaaaattgatgttagcaaaagaccacaaatatgtggatcactggttgttcaaaacgattaaacatcctaactactttttaaatatcgcccctgagctggtgggcatagccttactttgccatgctaaaattacggctatgcttcttttcccatgctacattgtagtaatatatttacgtattcgagaagaaaacaagctattagcggaagtgattattccaaacggtactcgaacaaaacct

SEQ ID NO: 8194 - protein, 160 aa, Streptococcus pyogenes
LKKSITNEKAILAQGGQEFGAQNTKFLTLLHIMIYVFAVIEALLKQIKFDGISFLGLLLMLLSVAVLYEVTRILGDIWTVKLMLAKDHKYVDHWLFKTIKHPNYFLNIAPELVGIALLCHAKITAMLLFPCYIVVIYLRIREENKLLAEVIIPNGTRTKP

SEQ ID NO: 8195 - DNA, 108 bp, Streptococcus pyogenes
gtgaaagaaactattattgaaaataaggagccgtattgtgaccatctttttagtgatgttagctatgtttactattcgtttagtatttttgaagaaatcgataacaaa

SEQ ID NO: 8196 - protein, 36 aa, Streptococcus pyogenes
VKETIIENKEPYCDHLFSDVSYVYYSFSIFEEIDNK

SEQ ID NO: 8197 - DNA, 1647 bp, Streptococcus pyogenes
ttgagcgaggacaatattgtgtcagtaaattggcaagacattgcatttcatttctttggaggcttaggtctctttcttttcagtatcaagtatatgggagatggtctgcaacaagcagcaggagataaactaaggtattacattgataaatacaccagtaatcccttttttggtatcttagtcggaattgccatgtctgccttaattcagtccagttcaggcgtaactgtaattacggttggtttggtttctgcgggtttgctaaatttgcgacaagccattggaattgttatgggggctaatattggaacgactatcacttcgtttttaattggttttaaactaggagattacgccttgcccatgatttttattggtgcagcctgtcttttctttacctctaataaaaagctcaacaattttgggcgtatcatttttggtgtcggaggaattttcttctcgctgaacctaatgggagatgccatggatcctttgaaatctgtgtcagcctttcaaaattatttagcgacattaggtgataaacccttccaaggtgtctttatcggaacggctttgaccatgttgattcagtcatcggcagccattatcgggattttacagggactgttttcaggcggtcttttgaccttacagggggctattcctattttgttaggctcaaatataggaacctgcattacagctgtcttagcagctataggttcaaatattgctgctaaacgtgtggcagcagctcatgtgttatttaatttgatcggtacaattatttttatgattatcctagtcccattcacatcattgatgttatggctacaatcaaagttgagtttaacgcctgagatgactatcgctttttctcacggttcttttaatatcactaataccatcttattaattcctttcattagtctactagctatgattgtgactagactcattccaggagaagatgaagtggtcaaatacgaagccctttatttagatcgcttacttattacccaagccccttctatcgcactaggaaatgcccacaaggaattggttcatttagcctcttatgcgattcaagcttttgaagcttcttacagttatattatgacagctgacggtaaatttggggaaaaggtcaagcgttatgaaagagcagttgataccatcgatgaggagttaaccacttatttggttgatatttctaacgaagccctcagcccaagtgaaaatgaagtcttggctggtattcttgactcttcacgtgatttggaaagaattggagatcattctgagtctttaggcattctaattgaaggcatcatatctaaacaaattggtttttcaatatctgctcgtcaagaattgacagagatgtatcaattgacgcattgtttaacactggatgccattagagctatcgttgatagtgatacagacttggcgcaaactattgtgactcgccataaagaaattgaagaaaaagagcgacgattacgtaaaacccacattaagcgcttgaattgtggagaatgtacggcacaagcaggtattaattttattgatattatttcccactatacccgcatcacagatcatgccttgaatttagcagagaaagtactttcacaccagctt

SEQ ID NO: 8198 - protein, 549 aa, Streptococcus pyogenes
LSEDNIVSVNWQDIAFHFFGGLGLFLFSIKYMGDGLQQAAGDKLRYYIDKYTSNPFFGILVGIAMSALIQSSSGVTVITVGLVSAGLLNLRQAIGIVMGANIGTTITSFLIGFKLGDYALPMIFIGAACLFFTSNKKLNNFGRIIFGVGGIFFSLNLMGDAMDPLKSVSAFQNYLATLGDKPFQGVFIGTALTMLIQSSAAIIGILQGLFSGGLLTLQGAIPILLGSNIGTCITAVLAAIGSNIAAKRVAAAHVLFNLIGTIIFMIILVPFTSLMLWLQSKLSLTPEMTIAFSHGSFNITNTILLIPFISLLAMIVTRLIPGEDEVVKYEALYLDRLLITQAPSIALGNAHKELVHLASYAIQAFEASYSYIMTADGKFGEKVKRYERAVDTIDEELTTYLVDISNEALSPSENEVLAGILDSSRDLERIGDHSESLGILIEGIISKQIGFSISARQELTEMYQLTHCLTLDAIRAIVDSDTDLAQTIVTRHKEIEEKERRLRKTHIKRLNCGECTAQAGINFIDIISHYTRITDHALNLAEKVLSHQL

SEQ ID NO: 8199 - DNA, 165 bp, Streptococcus pyogenes
atgatattgtttcatcgtagccatattatacctctaattaaacgaaatgaaaagatttgtgcaaaaacaaatgatgtaaaatatcggaaaagcctaacaccttatcaaaccaataatatgcaaatgttgacatcggtatacacagaaacgcttaaaaaaaccttg

SEQ ID NO: 8200 - protein, 55 aa, Streptococcus pyogenes
MILFHRSHIIPLIKRNEKICAKTNDVKYRKSLTPYQTNNMQMLTSVYTETLKKTL

SEQ ID NO: 8201 - DNA, 117 bp, Streptococcus pyogenes
ttgtttgaatcttttgtagcaaggatgaaaatgggttttatccttgcttttttatccttacattttatctttttctacttattttttaaaggaaaacgtggtaaactaaaagaagac

SEQ ID NO: 8202 - protein, 39 aa, Streptococcus pyogenes
LFESFVARMKMGFILAFLSLHFIFFYLFFKGKRGKLKED

SEQ ID NO: 8203 - DNA, 96 bp, Streptococcus pyogenes
ttgtggtcactcataaagactctgacgttagcaggtgtgttccgagcaaaacaaaaacacctctctgggggcaaatcacttttgccagaaggtgtt

SEQ ID NO: 8204 - protein, 32 aa, Streptococcus pyogenes
LWSLIKTLTLAGVFRAKQKHLSGGKSLLPEGV

SEQ ID NO: 8205 - DNA, 153 bp, Streptococcus pyogenes
ttgactgttttttcaattgttagagcacaagaggcacaactcattccctccactaaaaatatctctttagccattaatacgtctcctttctctgacagtggcactgcccaggcagacaattacacggcacctcaagaactgcattttcttttt

SEQ ID NO: 8206 - protein, 51 aa, Streptococcus pyogenes
LTVFSIVRAQEAQLIPSTKNISLAINTSPFSDSGTAQADNYTAPQELHFLF

SEQ ID NO: 8207 - DNA, 159 bp, Streptococcus pyogenes
ttgatattagcaggaggaactaatgatccagaccctgatgagctagactcatcagctgctaaagcatctgatgaagaagacggcgtagctggcctatggcttgaagcagtagagtcctggtctgtactagcactctggccggtatctactccacttgaa

SEQ ID NO: 8208 - protein, 53 aa, Streptococcus pyogenes
LILAGGTNDPDPDELDSSAAKASDEEDGVAGLWLEAVESWSVLALWPVSTPLE

SEQ ID NO: 8209 - DNA, 96 bp, Streptococcus pyogenes
ttgacaatcaaattatatcaaaggtcaaagtattttgcaagcaatagctgtcttacttaccttgaaaatttggtcggcgcctttctccaaaagcta

SEQ ID NO: 8210 - protein, 32 aa, Streptococcus pyogenes
LTIKLYQRSKYFASNSCLTYLENLVGAFLQKL

SEQ ID NO: 8211 - DNA, 117 bp, Streptococcus pyogenes
ttgtttcagctatttttggaaaaaggtattaaaaaaaggctgcatggaagtttccaagcagcctttttgcaacataaaatgtcttatctttttattggttgcatcctcattataaga

SEQ ID NO: 8212 - protein, 39 aa, Streptococcus pyogenes
LFQLFLEKGIKKRLHGSFQAAFLQHKMSYLFIGCILIIR

SEQ ID NO: 8213 - DNA, 213 bp, Streptococcus pyogenes
ttgatagttgctgatagcaataagttaaagtattttgtctctgaaaaaaaggcggtcggtctttcacaggctgcctttttgtatgtcatgttagtgaccgcctataaaaagaccatcatctatgctaaaataagactgacaggtattgctttagaaccttcaggagtttctgacgggtatttaatgaactatcacgtttgtctacactattat

SEQ ID NO: 8214 - protein, 71 aa, Streptococcus pyogenes
LIVADSNKLKYFVSEKKAVGLSQAAFLYVMLVTAYKKTIIYAKIRLTGIALEPSGVSDGYLMNYHVCLHYY

SEQ ID NO: 8215 - DNA, 306 bp, Streptococcus pyogenes
atggttgttgtaatggcgacaccttcggtatcaacttcgttcagcaattcaaccatatcaacgattttggataaggtcgttgcaaaggttgttgtctcactttctgaaaatgataattttgatagcttcgcgacatggcgaacttcttcttcagaaattttcatgatttctcccatccaagatgatcagaagtattccaattccaaagaacagccctgctattctccaaaggtagcggaaaaactcctcacatcatttttacatagtctcaattattatatcacaattgctcccatttaccatagg

SEQ ID NO: 8216 - protein, 102 aa, Streptococcus pyogenes
MVVVMATPSVSTSFSNSTISTILDKVVAKVVVSLSENDNFDSFATWRTSSSEIFMISPIQDDQKYSNSKEQPCYSPKVAEKLLTSFLHSLNYYITIAPIYHR

SEQ ID NO: 8217 - DNA, 162 bp, Streptococcus pyogenes
ttgaattatttgcgctttcattataacaaagctaactcgcttttgcaaggaattatcagaaaattttctattcttactacaattccaactattgatgccttattatcacttcatttaaaggagataagcactagcttgttagagcatagggtcacattcttt

SEQ ID NO: 8218 - protein, 54 aa, Streptococcus pyogenes
LNYLRFHYNKANSLLQGIIRKFSILTTIPTIDALLSLHLKEISTSLLEHRVTFF

SEQ ID NO: 8219 - DNA, 702 bp, Streptococcus pyogenes
atgatttcctatcttaaagcagatttatttcggatacgccaagagcgtttagctctattttcttgtatgctacttgttgtcattgctgttggtgtagcctatagttttcgcaagacacctaaccaagtcatcatgatacaaatcattaatattattactgattttgtgacgcttttctttttaacaccagcccgtatcttttttagtgatgactataactaccgtacgattaataatgttgtggtcaaacaacaaaatcgtactttaattataatctataaactgctagttagttttggcttatctcttttatttattagtttaacttatcttcttagtgctttagcatttcatttatttactggtcaagcatactatggaatagtcatagatcggatgattaaacaactgcctttttatattgctattattgctttgtgtcaatttttgtttaatatacttcgtaaaacttatcagtcaatcacagcttatatactttatgtccttctttttgataaagtatctgctactttagcaaaccatttttttaagttagatattagcccagttttgatgtttaaacacctatccttgtctcttggtgataaacacctttctagtactagcatattagtggcctttggtttaactctttgttatcttttaggcaatgtctttcttttttccaaacgagaactaaaa

SEQ ID NO: 8220 - protein, 234 aa, Streptococcus pyogenes
MISYLKADLFRIRQERLALFSCMLLVVIAVGVAYSFRKTPNQVIMIQIINIITDFVTLFFLTPARIFFSDDYNYRTINNVVVKQQNRTLIIIYKLLVSFGLSLLFISLTYLLSALAFHLFTGQAYYGIVIDRMIKQLPFYIAIIALCQFLFNILRKTYQSITAYILYVLLFDKVSATLANHFFKLDISPVLMFKHLSLSLGDKHLSSTSILVAFGLTLCYLLGNVFLFSKRELK

SEQ ID NO: 8221 - DNA, 678 bp, Streptococcus pyogenes
atgaggcttgatgttcgcaccaaactgcttttgttggtacttgccaatgcctgcttcttttttcgtgttgatggctttttagaatttataattgttatttttctcttattacttttgtctgctttaaataagaaaaagctagcgttcaagttggcggttgtttatctgttaatgatcggtctatctgtaatcccgctatcgattttcccttcttatcttgaccacttattgagttttgtctcaatagcaggaaggttagttttcccttctttactagcaggtttaattactattaagacaactaccatctacgaattggttcatggattacgcaaatggcgtttcccagaagtctggctattgaccttggccgttatgtgccgtttcataccaatgattagacaagaatgttgtgttattcatcgctctttaaaaatcagggggattattttaacaaaatggtctattttgatcagacctaaacaatacttggagtatttaatggttccattgcttttatctttgataagaagtagccaagaactaactatcgctagtctaactaaagggctagcagtcaacaaaggcaccagtgaatgctttagctcacacttaacatggaaagattggggggtgcagatttggattactgttatcataatcatcacgatactgcaa

SEQ ID NO: 8222 - protein, 226 aa, Streptococcus pyogenes
MRLDVRTKLLLLVLANACFFFRVDGFLEFIIVIFLLLLLSALNKKKLAFKLAVVYLLMIGLSVIPLSIFPSYLDHLLSFVSIAGRLVFPSLLAGLITIKTTTIYELVHGLRKWRFPEVWLLTLAVMCRFIPMIRQECCVIHRSLKIRGIILTKWSILIRPKQYLEYLMVPLLLSLIRSSQELTIASLTKGLAVNKGTSECFSSHLTWKDWGVQIWITVIIIITILQ

SEQ ID NO: 8223 - DNA, 591 bp, Streptococcus pyogenes
atgaaacagttaacaataaaagatattatgataacaggcgcatttgccgcgctctactttatttgtgttggtctaggcacgtttattaacatcttttttgatcgctcaggaaatatgttatatgcccctgcctttgcagctttactggggggaacaatttattttcttttgattgctaaattgcaaacatttgggccaataacattattaggattgatgatgggaggttttttcttccttagtggtcacttttttgccgcgatgtttcccagcattattttcggtttaatagcggatattattgcgtctttaggaaaatacaagtcaaggttttttaatgacctatcttatatggtttttgcttttgtcaatagtggccctattttgctgatgtggttgttgaaagatgcctatgttgaaagtttgttagcccgcggtaaaagtatgacctatgtcaatcgcattatgtatgattttagtttagggcatgttatttggtttgtaggaattgttcttgcaggagccttattagggtcagtttttgcacattatttactaaagaaacattttatcaaatcaggattgttatca

SEQ ID NO: 8224 - protein, 197 aa, Streptococcus pyogenes
MKQLTIKDIMITGAFAALYFICVGLGTFINIFFDRSGNMLYAPAFAALLGGTIYFLLIAKLQTFGPITLLGLMMGGFFFLSGHFFAAMFPSIIFGLIADIIASLGKYKSRFFNDLSYMVFAFVNSGPILLMWLLKDAYVESLLARGKSMTYVNRIMYDFSLGHVIWFVGIVLAGALLGSVFAHYLLKKHFIKSGLLS

SEQ ID NO: 8225 - DNA, 873 bp, Streptococcus pyogenes
atgacaaaggtagtaataaagcaattgttgcaggtaatagtagtgttcatgataagtttatcgacaatgacaaatcttgtgtatgcagataaaggtcaaatttatggatgtattattcaaagaaattatcgtcatccgatatctgggcagatagaagatagcggaggggagcattcctttgatattggtcaaggtatggttgaaggaactgtctatagtgatgccatgctagaagtatctgatgctggaaagatcgttcttacttttcgtatgagcttagctgattattcgggcaattatcagttctggatacaacctggaggaactggaagctttcaggcagttgattacaatatcacccaaaaaggtactgataccaatgggacaacactagatattgctattagtttgcctactgtaaatagtatcattcgaggcagcatgtttgttgaacctatgggcagagaagtggtcttttacctgtcagcttcagagttaatacaaaagtattcaggtaatatgttggcccagcttgttactgaaacagacaattctcaaaatcaagaagtaaaagacagtcaaaagcctgttgatacaaaactaggagaaagtcaagatgagtctcacacaggtgctatgataactcagaataagcctaaagccaactcatcaaataacaagagtctatcagataaaaaaattcttccttctaagatgggcttaacgacttctttagagttaaaaaaagaagataagtttcggtctaaaaaagacttatcaatcatgatttactactttccaactttttttctgatgttaggagggtttgctgtatgggtttggaaaaagaggaaaaaaaatgataaaacgatg

SEQ ID NO: 8226 - protein, 291 aa, Streptococcus pyogenes
MTKVVIKQLLQVIVVFMISLSTMTNLVYADKGQIYGCIIQRNYRHPISGQIEDSGGEHSFDIGQGMVEGTVYSDAMLEVSDAGKIVLTFRMSLADYSGNYQFWIQPGGTGSFQAVDYNITQKGTDTNGTTLDIAISLPTVNSIIRGSMFVEPMGREVVFYLSASELIQKYSGNMLAQLVTETDNSQNQEVKDSQKPVDTKLGESQDESHTGAMITQNKPKANSSNNKSLSDKKILPSKMGLTTSLELKKEDKFRSKKDLSIMIYYFPTFFLMLGGFAVWVWKKRKKNDKTM

SEQ ID NO: 8227 - DNA, 3720 bp, Streptococcus pyogenes
gtgacaacagtagctttaactcaggataatcgacttttagttgaagagataggcccttacgctagtcaatcagctggaaaagagtattataaacatattgaaaagattattgttgataatgatgtctatgaaaaaagcctggagggcgagcgaacctttgatattaactaccaagggattaagatcaatgctgaccttattaaagacggtaagcatgaattgactattgttaataaaaaagatggtgatatcctaattacctttattaaaaagggcgataaagtgacctttatttcagctcaaaaattaggaacaacagatcatcaggattcattaaaaaaagatgtgctcagtgataaaacagtgccacaaaaccaaggcacacaaaaagttgttaaatctgggaaaaatactgctaacttgtcattaataacaaaattgagtcaagaagatggtgcaattttatttccagaaattgatcgttattctgataacaaacagataaaagcattgactcagcaaatcacaaaggttacagtcaatggtacagtttataaagatcttatttcagattctgtaaaagatactaatggctgggtctcgaatatgacagggcttcatcttggaacaaaagctttcaaagatggagaaaatacaatcgtgatatcctcaaaaggatttgaagacgttactattaccgttaccaagaaagatggtcaaatccattttgtatctgccaaacaaaaacaacatgtgactgctgaagacagacaatcaacaaagttggatgtcaccactttggaaaaagctatcaaagaagcggatgcgattattgctaaagaaagcaacaaagacgcggtcaaagatctggctgagaaacttcaagtcatcaaggattcttacaaagaaatcaaagatagtaagctactcgccgatactcatcgactgttaaaagataccatcgagtcttatcaagcaggtgaggtttctattaacaatctcacagaaggaacctatacgctaaactttaaagctaataaagaaaactcagaagagtcctccatgcttcaaggtgcttttgataaaagagccaaattagtggttaaagcagatggtacaatggaaatttccatgcttaatactgctttgggacaatttttgattgacttttctattgaaagcaaagggacctacccagcagcagtgcgtaaacaagttggccaaaaagatatcaatggtagctatattcgaagcgaatttaccatgcctattgatgatttggataaattacacaaaggtgctgttttggtatcagccatgggaggtcaagaaagtgatttaaaccactatgacaaatacaccaaacttgacatgacctttagtaagaccgttaccaaaggctggagtggttatcaggtagaaactgatgataaagaaaaaggggttgggactgaacgtcttgaaaaagttttagttaaacttggcaaagatttagacggcgatggtaaattatcaaaaacggaattagaacagattcgaggcgagttgcgtctagaccattacgagttaactgatatttctttattgaaacatgctaaaaatattacagaactacatctggatggaaaccaaattacggaaattccaaaagagttatttagtcaaatgaagcaacttcgatttcttaacttaagaagtaatcatttaacttatctagacaaagatacatttaaaagcaatgctcaattaagagaactctacttatcaagtaactttattcactctcttgaaggaggactattccagtcgcttcatcacctggagcaacttgatctttccaagaatcgtattggccgactttgtgataacccatttgaaggattgtctcgtctgacttcattaggtttcgcagaaaatagtcttgaggagatacctgaaaaagcgctagagcctctaacatcacttaattttatcgacttatctcaaaataatttagcactactgccaaaaacaatagaaaaattgcgcgccttaagcactattgtggcaagtagaaatcatattactcgtattgataatatttcatttaaaaatcttcctaaattatctgtactcgatttatcaactaatgaaatttcaaatcttccaaatggtatatttaaacagaataaccaattaacaaaacttgattttttcaataacttgcttactcaggttgaagaatcagtatttccagatgttgaaacgcttaatttagatgtgaagttcaatcagataaaaagtgtgagtccaaaagtaagagctcttatcggacaacacaaactgactccacaaaaacatattgcaaaacttgaagcttccttagatggcgaaaaaataaaatatcatcaagctttcagtcttttagatttgtattattgggagcaaaaaacaaattctgccattgataaagaactagtgtctgttgaagaatatcaacaattgttacaagaaaaaggttcagatacggtttctttacttaatgatatgcaagtcgattggagtattgtgattcagttgcaaaaaaaagcttccaatggacagtatgtgacggttgacgaaaagcttctctcaaatgatccgaaagatgacttaacgggagagttttctttaaaagatccaggtacatatcggattcgcaaagctttaataacaaagaaatttgctactcaaaaagaacatatctatttgacatctaatgatatccttgtggcgaaaggaccacattcacatcagaaagatttagttgagaacggccttagagcattaaatcaaaaacaattgcgtgatggtatttactatttaaatgccagcatgttaaaaactgacttagcatctgagtccatgtcaaacaaggctattaatcatcgagtgactttggtagttaaaaaaggtgtttcctatttagaagttgagtttagaggtataaaggttggtaaaatgttaggctaccttggtgaattgagctatttcgtagatggttaccaaagagatttagctggtaaaccagttggtcgaacaaaaaaggcagaggttgtgtcttatttcacggatgtaactggcctaccattggcagatcgttatggaaaaaactatccaaaagtgctgcgtatgaaattgattgaacaagcgaagaaagacggacttgtgccattacaggtctttgtgcctatcatggatgccatttcaaaagggtctggccttcaaaccgtttttatgcgtttagactgggcaagccttacaacagagaaggcaaaggttgtcaaagaaactaataatccacaagaaaatagccatctaacttcaacagatcagttgaaaggacctcaaaatcgtcaacaagaaaaaacacctacaagtcctccttcagcagctactggtattgctaacttaactgatctcctggctaaaaaagcaaccggccaatcaactcaagaaacttctaagacagatgatactgataaggcagagaaattgaagcagttagtgcgtgaccatcaaacatcaattgaaggtaaaacagcaaaagatactaagactaaaaaatctgataagaaacatcgttccaatcaacaatcaaatggtgaagaaagtagctctcgttatcacttaattgcaggtctatctagctttatgatcgtagctctgggattcattattggtcgaaagacattatttaaa

SEQ ID NO: 8228 - protein, 1240 aa, Streptococcus pyogenes
VTTVALTQDNRLLVEEIGPYASQSAGKEYYKHIEKIIVDNDVYEKSLEGERTFDINYQGIKINADLIKDGKHELTIVNKKDGDILITFIKKGDKVTFISAQKLGTTDHQDSLKKDVLSDKTVPQNQGTQKVVKSGKNTANLSLITKLSQEDGAILFPEIDRYSDNKQIKALTQQITKVTVNGTVYKDLISDSVKDTNGWVSNMTGLHLGTKAFKDGENTIVISSKGFEDVTITVTKKDGQIHFVSAKQKQHVTAEDRQSTKLDVTTLEKAIKEADAIIAKESNKDAVKDLAEKLQVIKDSYKEIKDSKLLADTHRLLKDTIESYQAGEVSINNLTEGTYTLNFKANKENSEESSMLQGAFDKRAKLVVKADGTMEISMLNTALGQFLIDFSIESKGTYPAAVRKQVGQKDINGSYIRSEFTMPIDDLDKLHKGAVLVSAMGGQESDLNHYDKYTKLDMTFSKTVTKGWSGYQVETDDKEKGVGTERLEKVLVKLGKDLDGDGKLSKTELEQIRGELRLDHYELTDISLLKHAKNITELHLDGNQITEIPKELFSQMKQLRFLNLRSNHLTYLDKDTFKSNAQLRELYLSSNFIHSLEGGLFQSLHHLEQLDLSKNRIGRLCDNPFEGLSRLTSLGFAENSLEEIPEKALEPLTSLNFIDLSQNNLALLPKTIEKLRALSTIVASRNHITRIDNISFKNLPKLSVLDLSTNEISNLPNGIFKQNNQLTKLDFFNNLLTQVEESVFPDVETLNLDVKFNQIKSVSPKVRALIGQHKLTPQKHIAKLEASLDGEKIKYHQAFSLLDLYYWEQKTNSAIDKELVSVEEYQQLLQEKGSDTVSLLNDMQVDWSIVIQLQKKASNGQYVTVDEKLLSNDPKDDLTGEFSLKDPGTYRIRKALITKKFATQKEHIYLTSNDILVAKGPHSHQKDLVENGLRALNQKQLRDGIYYLNASMLKTDLASESMSNKAINHRVTLVVKKGVSYLEVEFRGIKVGKMLGYLGELSYFVDGYQRDLAGKPVGRTKKAEVVSYFTDVTGLPLADRYGKNYPKVLRMKLIEQAKKDGLVPLQVFVPIMDAISKGSGLQTVFMRLDWASLTTEKAKVVKETNNPQENSHLTSTDQLKGPQNRQQEKTPTSPPSAATGIANLTDLLAKKATGQSTQETSKTDDTDKAEKLKQLVRDHQTSIEGKTAKDTKTKKSDKKHRSNQQSNGEESSSRYHLIAGLSSFMIVALGFIIGRKTLFK

SEQ ID NO: 8229 - DNA, 141 bp, Streptococcus pyogenes
ttgattgaaaatgaaaaaaatcagcaaatgtgcgtttgtggcaatatctgcccttgttctcattcaggctactcaaactgtaaaatcacaagagcctttagttcagtcacaactcgtgacaacagtagctttaactcagga

SEQ ID NO: 8230 - protein, 47 aa, Streptococcus pyogenes
LIENEKNQQMCVCGNICPCSHSGYSNCKITRAFSSVTTRDNSSFNSG

SEQ ID NO: 8231 - DNA, 129 bp, Streptococcus pyogenes
gtgttaggagacaacatgagatgtcactactgcatattcatcacaataaaaaaagacaatagccctaatcgtgctattgtctcaaaatcatttattgacttgaaactttatcgtgttacaccaacagtt

SEQ ID NO: 8232 - protein, 43 aa, Streptococcus pyogenes
VLGDNMRCHYCIFITIKKDNSPNRAIVSKSFIDLKLYRVTPTV

SEQ ID NO: 8233 - DNA, 90 bp, Streptococcus pyogenes
atgagaaaaaaggataaaattatgactctctgtttctctgataactttacccacgccaaacgcatgaagaaacttttgttttcagaaaac

SEQ ID NO: 8234 - protein, 30 aa, Streptococcus pyogenes
MRKKDKIMTLCFSDNFTHAKRMKKLLFSEN

SEQ ID NO: 8235 - DNA, 93 bp, Streptococcus pyogenes
ttgttcttttttatctttatgatgacacaggctcttatcaagacagccatgtctcacggacaagcgccactttctggtagtctaacgattatt

SEQ ID NO: 8236 - protein, 31 aa, Streptococcus pyogenes
LFFFIFMMTQALIKTAMSHGQAPLSGSLTII

SEQ ID NO: 8237 - DNA, 3039 bp, Streptococcus pyogenes
atggtatatcaactgggaagccatgacttagtaccaaaaataaggagtgtccaaatggataaacatttgttggtaaaaagaacactagggtgtgtttgtgctgcaacgttgatgggagctgccttagcgacccaccatgattcactcaatactgtaaaagcggaggagaagactgttcaggttcagaaaggattaccttctatcgatagcttgcattatctgtcagagaatagcaaaaaagaatttaaagaagaactctcaaaagcggggcaagaatctcaaaaggtcaaagagatattagcaaaagctcagcaggcagataaacaagctcaagaacttgccaaaatgaaaattcctgagaaaataccgatgaaaccgttacatggttctctctacggtggttactttagaacttggcatgacaaaacatcagatccaacagaaaaagacaaagttaactcgatgggagagcttcctaaagaagtagatctagcctttattttccacgattggacaaaagattatagccttttttggaaagaattggccaccaaacatgtgccaaagttaaacaagcaagggacacgtgtcattcgtaccattccatggcgtttcctagctgggggtgataacagtggtattgcagaagataccagtaaatacccaaatacaccagagggaaataaagctttagccaaagctattgttgatgaatatgtttataaatacaaccttgatggcttagatgtggatgttgaacatgatagtattccaaaagttgacaaaaaagaagatacagcaggcgtagaacgctctattcaagtgtttgaagaaattgggaaattaattggaccaaaaggtgttgataaatcgcggttatttattatggatagcacctacatggctgataaaaacccattgattgagcgaggagctccttatattaatttattactggtacaggtctatggttcacaaggagagaaaggtggttgggagcctgtttctaatcgacctgaaaaaacaatggaagaacgatggcaaggttatagcaagtatattcgtcctgaacaatacatgattggtttttctttctatgaggaaaatgctcaagaagggaatctttggtatgatattaattctcgcaaggacgaggacaaagcaaatggaattaacactgacataactggaacgcgtgccgaacggtatgcaaggtggcaacctaagacaggtggggttaagggaggtatcttctcctacgctattgaccgagatggtgtagctcatcaacctaaaaaatatgctaaacagaaagagtttaaggacgcaactgataacatcttccactcagattatagtgtctccaaggcattaaagacagttatgctaaaagataagtcgtatgatctgattgatgagaaagatttcccagataaggctttgcgagaagctgtgatggcgcaggttggaaccagaaaaggtgatttggaacgtttcaatggcacattacgattggataatccagcgattcaaagtttagaaggtctaaataaatttaaaaaattagctcaattagacttgattggcttatctcgcattacaaagctcgaccgttctgttttacccgctaatatgaagccaggcaaagataccttggaaacagttcttgaaacctataaaaaggataacaaagaagaacctgctactatcccaccagtatctttgaaggtttctggtttaactggtctgaaagaattagatttgtcaggttttgaccgtgaaaccttggctggtcttgatgccgctactctaacgtctttagaaaaagttgatatttctggcaacaaacttgatttggctccaggaacagaaaatcgacaaatttttgatactatgctatcaactatcagcaatcatgttggaagcaatgaacaaacagtgaaatttgacaagcaaaaaccaactgggcattacccagatacctatgggaaaactagtctgcgcttaccagtggcaaatgaaaaagttgatttgcaaagccagcttttgtttgggactgtgacaaatcaaggaaccctaatcaatagcgaagcagactataaggcttaccaaaatcataaaattgctggacgtagctttgttgattcaaactatcattacaataactttaaagtttcttatgagaactataccgttaaagtaactgattccacattgggaaccactactgacaaaacgctagcaactgataaagaagagacctataaggttgacttctttagcccagcagataagacaaaagctgttcatactgctaaagtgattgttggtgacgaaaaaaccatgatggttaatttggcagaaggcgcaacagttattggaggaagtgctgatcctgtaaatgcaagaaaggtatttgatgggcaactgggcagtgagactgataatatctctttaggatgggattctaagcaaagtattatatttaaattgaaagaagatggattaataaagcattggcgtttcttcaatgattcagcccgaaatcctgagacaaccaataaacctattcaggaagcaagtctacaaatttttaatatcaaagattataatctagataatttgttggaaaatcccaataaatttgatgatgaaaaatattggattactgtagatacttacagtgcacaaggagagagagctactgcattcagtaatacattaaataatattactagtaaatattggcgagttgtctttgatactaaaggagatagatatagttcgccagtagtccctgaactccaaattttaggttatccgttacctaacgccgacactatcatgaaaacagtaactactgctaaagagttatctcaacaaaaagataagttttctcaaaagatgcttgatgagttaaaaataaaagagatggctttagaaacttctttgaacagtaagatttttgatgtaactgctattaatgctaatgctggagttttgaaagattgtattgagaaaaggcagctgctaaaaaaa

SEQ ID NO: 8238 - protein, 1013 aa, Streptococcus pyogenes
MVYQLGSHDLVPKIRSVQMDKHLLVKRTLGCVCAATLMGAALATHHDSLNTVKAEEKTVQVQKGLPSIDSLHYLSENSKKEFKEELSKAGQESQKVKEILAKAQQADKQAQELAKMKIPEKIPMKPLHGSLYGGYFRTWHDKTSDPTEKDKVNSMGELPKEVDLAFIFHDWTKDYSLFWKELATKHVPKLNKQGTRVIRTIPWRFLAGGDNSGIAEDTSKYPNTPEGNKALAKAIVDEYVYKYNLDGLDVDVEHDSIPKVDKKEDTAGVERSIQVFEEIGKLIGPKGVDKSRLFIMDSTYMADKNPLIERGAPYINLLLVQVYGSQGEKGGWEPVSNRPEKTMEERWQGYSKYIRPEQYMIGFSFYEENAQEGNLWYDINSRKDEDKANGINTDITGTRAERYARWQPKTGGVKGGIFSYAIDRDGVAHQPKKYAKQKEFKDATDNIFHSDYSVSKALKTVMLKDKSYDLIDEKDFPDKALREAVMAQVGTRKGDLERFNGTLRLDNPAIQSLEGLNKFKKLAQLDLIGLSRITKLDRSVLPANMKPGKDTLETVLETYKKDNKEEPATIPPVSLKVSGLTGLKELDLSGFDRETLAGLDAATLTSLEKVDISGNKLDLAPGTENRQIFDTMLSTISNHVGSNEQTVKFDKQKPTGHYPDTYGKTSLRLPVANEKVDLQSQLLFGTVTNQGTLINSEADYKAYQNHKIAGRSFVDSNYHYNNFKVSYENYTVKVTDSTLGTTTDKTLATDKEETYKVDFFSPADKTKAVHTAKVIVGDEKTMMVNLAEGATVIGGSADPVNARKVFDGQLGSETDNISLGWDSKQSIIFKLKEDGLIKHWRFFNDSARNPETTNKPIQEASLQIFNIKDYNLDNLLENPNKFDDEKYWITVDTYSAQGERATAFSNTLNNITSKYWRVVFDTKGDRYSSPVVPELQILGYPLPNADTIMKTVTTAKELSQQKDKFSQKMLDELKIKEMALETSLNSKIFDVTAINANAGVLKDCIEKRQLLKK

SEQ ID NO: 8239 - DNA, 93 bp, Streptococcus pyogenes
ttgagaatttttcagaaaatccttgagaagactttattatcaaggtttgatgtcaatctctaccagttaatcatcaaaaaggagggcttgtca

SEQ ID NO: 8240 - protein, 31 aa, Streptococcus pyogenes
LRIFQKILEKTLLSRFDVNLYQLIIKKEGLS

SEQ ID NO: 8241 - DNA, 237 bp, Streptococcus pyogenes
atggctcaacaacgtcgtggcggattcaaacgccgtaaaaaagttgacttcatcgcagctaacaaaattgaatatgttgattacaaagatactgagcttcttagccgtttcgtttcagaacgtggaaaaattcttcctcgtcgtgtaacaggaacttcagctaaaaaccaacgtaaagtaacaacagcaatcaaacgtgctcgcgttatggctcttatgccttacgtaaacgaagac

SEQ ID NO: 8242 - protein, 79 aa, Streptococcus pyogenes
MAQQRRGGFKRRKKVDFIAANKIEYVDYKDTELLSRFVSERGKILPRRVTGTSAKNQRKVTTAIKRARVMALMPYVNED

SEQ ID NO: 8243 - DNA, 291 bp, Streptococcus pyogenes
atgttccagaaattaaagaatcttattgatcggtattcgtggttcgtttttataatgatgattcttgtgttatttcttaactatatttatccatttgatccttctttgagcggactacagttggaatggctgatcatgacgcaagtttttcctggattaggtatcgtatgtgccatggttgctattatttttaaaaagtttaacctttttgttttggccctaattttatattttgcactttggttaaaacttttccttgctttttcttttttcacctattttttaggagtc

SEQ ID NO: 8244 - protein, 97 aa, Streptococcus pyogenes
MFQKLKNLIDRYSWFVFIMMILVLFLNYIYPFDPSLSGLQLEWLIMTQVFPGLGIVCAMVAIIFKKFNLFVLALILYFALWLKLFLAFSFFTYFLGV

SEQ ID NO: 8245 - DNA, 501 bp, Streptococcus pyogenes
atgatggaatcatatgaacacttttatgccaaactatctcaaccttttagaaaaaccccacagttaataattcttttaaatgttttactaaaaataatcacaggagtgatgtacatactttatccatcttttctgatatttacgctttggcaagggatgacatttcaattatggttaaggttattaattattcctgctgttggctttatagctttgtcttacattaggaaacgctttgattttccacgaccgtatgaaaaatggaatattaaacctttaattgataaggatacaaagggaaggtcaatgcctagcagacatgttttttcagctacgatgattagtatgtgtttgttacgatattatgtttactttggaatagtttgtttaatattatcggctttattggcaatttgccgtgtgatagcaggtattcactatcctaaggatgttattgtaggttaccttattggcttgatgttagggctttgtttattgatt

SEQ ID NO: 8246 - protein, 167 aa, Streptococcus pyogenes
MMESYEHFYAKLSQPFRKTPQLIILLNVLLKIITGVMYILYPSFLIFTLWQGMTFQLWLRLLIIPAVGFIALSYIRKRFDFPRPYEKWNIKPLIDKDTKGRSMPSRHVFSATMISMCLLRYYVYFGIVCLILSALLAICRVIAGIHYPKDVIVGYLIGLMLGLCLLI

SEQ ID NO: 8247 - DNA, 117 bp, Streptococcus pyogenes
gtggacaaaatgtttgagtggcggactagcgtttctagtatcgcttctttttttgaacatgttactgtctatttttgcaacggtccctatgccttttttacagcactatttgcactc

SEQ ID NO: 8248 - protein, 39 aa, Streptococcus pyogenes
VDKMFEWRTSVSSIASFFEHVTVYFCNGPYAFFTALFAL

SEQ ID NO: 8249 - DNA, 105 bp, Streptococcus pyogenes
ttgttgaaacagtcacaaactgtattagaatgtatttttttggctttagatagcctaaaaggtataatagagaaaggagggacttatgcttatttttccactgat

SEQ ID NO: 8250 - protein, 35 aa, Streptococcus pyogenes
LLKQSQTVLECIFLALDSLKGIIEKGGTYAYFSTD

SEQ ID NO: 8251 - DNA, 90 bp, Streptococcus pyogenes
atgtatctaaacgtgcttaatccaattgtacctactaaaaataaggccacattttctctttcacgaatggcttttgcgagtcatttttat

SEQ ID NO: 8252 - protein, 30 aa, Streptococcus pyogenes
MYLNVLNPIVPTKNKATFSLSRMAFASHFY

SEQ ID NO: 8253 - DNA, 96 bp, Streptococcus pyogenes
gtgaccaaatcaactttaaaagagttaagaacaacaaagaaaatgacacagcaggaattgttctcacttaacaggtatttctgtcagaacgattgc

SEQ ID NO: 8254 - protein, 32 aa, Streptococcus pyogenes
VTKSTLKELRTTKKMTQQELFSLNRYFCQNDC

SEQ ID NO: 8255 - DNA, 186 bp, Streptococcus pyogenes
atggctaaagtatgttattttacaggacgtaaaaccgtttctggaaacaaccgttcacacgcgatgaaccaaacaaaacgtacagttaaaccaaaccttcaaaaagttactatccttgttgatggtaaacctaaaaaagtttgggcttctgctcgtgcgcttaaatctggtaaagtagaacgcatc

SEQ ID NO: 8256 - protein, 62 aa, Streptococcus pyogenes
MAKVCYFTGRKTVSGNNRSHAMNQTKRTVKPNLQKVTILVDGKPKKVWASARALKSGKVERI

SEQ ID NO: 8257 - DNA, 117 bp, Streptococcus pyogenes
atgactgaaaaagaaagtgctaacctaaaaatatcacgtttttctttttctaatgctatttttatagaaaagatccctttaatagctagtaatctttatcagtatctgccagccaag

SEQ ID NO: 8258 - protein, 39 aa, Streptococcus pyogenes
MTEKESANLKISRFSFSNAIFIEKIPLIASNLYQYLPAK

SEQ ID NO: 8259 - DNA, 2976 bp, Streptococcus pyogenes
atgggaaatcaaactaaaacggaacttgaacttgaaaaagagttgatccatctcttagaaacaggtgaaagtcaatggacatatcgtaaagaattaaaaactgaagatgctttatgggataatttctttaagatcttagcgcaaaataacacgcaatatctgaacgaggagcctttaacagctagtgaaaaagagcagattaagaatcaacttaactttgtcaattactatgaagcggctaaatggttagctggtgaaaacggcattgctaaagtacaagtgcaacgcgaagatgcaaaactaggaacgattcgtttagaagtcgttaaagcagacaatgtggctggtggaacttctgtttatgagattgccaatcaagttgctttctctggttctcgtgatagacgaggtgatgtgacacttctcatcaatggcttacctatgatccaaattgaattaaaatctcagaatcatcaatgcattgaagcttttaaccaagtcaaaaagtatgataaagaaggccagtttagaggtatcttttcaaccttacaaatgtttgtggtctcaaataaaacagatacaaggtatatcgctgcagctaaagaaaataaattaaaccctaacttcttgacccaatgggtagatcaaaacaacaaaccacaaaaagatctctttgcctttgccaaagaagtcctatctatccctcgtgctcaccaaatggtcatgacttactctgtcattgatgatgataaaaaagcactaattctccttcgtccttatcagattcatgcaatcgaagccgtcgctgaagcgagtcgtcaccgcaagtctggctatatctggcacacaacaggttctggaaaaaccttaacttcctataaagtggctcgcaatatccttcaaataccggccgttgaaaaatccatctttgtcattgaccgaaaggatttagataatcagaccgcttctgcttttcaatcctatgcgcaaaatgatatctttgatgtcgatgagacagaagatacgagacaactcatcaaaaatttagaatccagcgatcgtcgtgttgtggtcaccaccattcaaaaactcaatgccatgatcagtcagatggaaagttatgacactccaaaattcaagaaactaaaagagcgtcttgcacacttaaatgttgtctttgttgtggacgaatgccaccgtgctgtcacgccagaacgtcaacgttatctcacgaatacttttcgtaacagtcgctggtatggctttaccggcactcctatctttgtggaaaataagcgtgctcaattaggtgatttagcccaaacaacggaacagcaatacggcaaatgtctccatcaatacaccgttaaagaagccattcatgataaagcggttctaggctttcaagttgagtataagacaaccattcctgatatgcctgaagacagtattccggaagaagcttatgatcatgaagaacatatgttagctgtcttagatagtatcattaatcaatcacgcaagaaacttggttttaataatggaattggtcagacattcgaaggtttactaaccgttaagagtattgctcgtgcccaagcctattatgatctgatgaagaaagttaaggctggtgaaacggatttagtcatttctaagaaggtcaaagaaaaactaccagactttccaaaggtagctattacttattctatcactgaaaatgacaatgcgtctatcagccgacaagataaaatgaccaaaaatctagaagactataatcacctctttggcactaactttaccatcgataacttacaaggctataacagagatttaaatgatcgcttagcccgtaaaaaagataaattcaaagaccgtcatgaacaattagacctcgtgattgtggttgaccgtctcttaacaggttttgatgcgccttgtttatcaacgatctttattgatcgccagcctatgaaacctcagcacattattcaagctttctcacgaaccaaccgtatctttgaaagtagaaaacattacggtcaggttgtgactttccaaacaccacttcgttttaaagaagctgtcgacaaagcgcttagcctctactctaatgggggtgaaaacgacgttttggccccttcttgggaagaagaaaaagcaagattctttgaaaaagtaacagtattaaaaaatatagttcctgatccagacgctttcccaactattgagagcgcacagacagcttttctcaaacaatacgccaaagcctttcaagcgtttgataaactctttgcatctgtacaggtctatagtgattttaatgaaacactgttgagtgaggttgggttatcagatgaagtgattgatacttataaaggcacttaccaaaatgtcattgcagaaatacgaaagcgaagagaagatgacgaagccatcccagagatcaatatcgactatgagctagaaagtgttcagatggatgatatcaactatcactatatcttgaccttaattcaagcctttgtcgatcaagaacaagaagctcttcaagaaaggctcaatgacaatcctatggatcaatacatccaagatttggcaaaatcaaaccctgctatggctgactcactagctgagttatggcaagatatccaaaaagaacccaaagcctatgaagggaaaagcattgtttatgagttagataacctcattggtgataagatccaaagggccatcaaacactttgcggaccaatggaaggcagatcctgacaaattagcctttgtggcgactaattatcatagtgctaactctaccaaacaagtgggcatgtcaaccttaaaagaatccctagactaccaagcctataaagaaaaacaaggtgattctgccatgaataaactcaaatacaagagccaatttgaacgggagttagttcaattcattagagatcaaatccaacccttaaaagggcac

SEQ ID NO: 8260 - protein, 992 aa, Streptococcus pyogenes
MGNQTKTELELEKELIHLLETGESQWTYRKELKTEDALWDNFFKILAQNNTQYLNEEPLTASEKEQIKNQLNFVNYYEAAKWLAGENGIAKVQVQREDAKLGTIRLEVVKADNVAGGTSVYEIANQVAFSGSRDRRGDVTLLINGLPMIQIELKSQNHQCIEAFNQVKKYDKEGQFRGIFSTLQMFVVSNKTDTRYIAAAKENKLNPNFLTQWVDQNNKPQKDLFAFAKEVLSIPRAHQMVMTYSVIDDDKKALILLRPYQIHAIEAVAEASRHRKSGYIWHTTGSGKTLTSYKVARNILQIPAVEKSIFVIDRKDLDNQTASAFQSYAQNDIFDVDETEDTRQLIKNLESSDRRVVVTTIQKLNAMISQMESYDTPKFKKLKERLAHLNVVFVVDECHRAVTPERQRYLTNTFRNSRWYGFTGTPIFVENKRAQLGDLAQTTEQQYGKCLHQYTVKEAIHDKAVLGFQVEYKTTIPDMPEDSIPEEAYDHEEHMLAVLDSIINQSRKKLGFNNGIGQTFEGLLTVKSIARAQAYYDLMKKVKAGETDLVISKKVKEKLPDFPKVAITYSITENDNASISRQDKMTKNLEDYNHLFGTNFTIDNLQGYNRDLNDRLARKKDKFKDRHEQLDLVIVVDRLLTGFDAPCLSTIFIDRQPMKPQHIIQAFSRTNRIFESRKHYGQVVTFQTPLRFKEAVDKALSLYSNGGENDVLAPSWEEEKARFFEKVTVLKNIVPDPDAFPTIESAQTAFLKQYAKAFQAFDKLFASVQVYSDFNETLLSEVGLSDEVIDTYKGTYQNVIAEIRKRREDDEAIPEINIDYELESVQMDDINYHYILTLIQAFVDQEQEALQERLNDNPMDQYIQDLAKSNPAMADSLAELWQDIQKEPKAYEGKSIVYELDNLIGDKIQRAIKHFADQWKADPDKLAFVATNYHSANSTKQVGMSTLKESLDYQAYKEKQGDSAMNKLKYKSQFERELVQFIRDQIQPLKGH

SEQ ID NO: 8261 - DNA, 1197 bp, Streptococcus pyogenes
atgacaaaatctaaacagcctcaatatcgctttgacggttttgaaggggagtgggaagaaaaagaactaggggatattgttcaaattacaatgggccaatctccatcaagtcaaaattatactacaaacccttctgattatattctagtacaaggaaatgccgatataaaaaatggatatgtttttccgcgtgtctggacaacacaaattacaaaacaagctgacaaaggtgatattattcttagtgttagggctccagttggtgatgttggaaagacaaattatcatgttattattgggcgtggagttgctgctataaaaggtaatgaatttatctttcaaatattaaaatacttgaaagaaattggttattggaaaagaattagtacaggttcaacttttgatagcattagctctagtgatatcaaatatgctaaaattcaaattccctccctccctgaacaagaagccattggcgaacttttccaaatggttgatcaattgattcagttgcaggatcaaaagctagcaacccttaaagaacaaaagcaaaccttcctcaggaaaatgttcccagctcaaggacaaaaagtccctgaaatccgtttacaaggttttaaaggagagtgggaagagaagaaattgagggaagtatctactcatagaagtggaacggcaattgaaaaatattttgattcggaaggtgaatttaaagtcatttcaataggtagttatggaactaataacctctatgtagaccaaaatattagagcagtctcaaatgaacttactaattctaaattagttgcctccggtgaattaacaatggtactcaatgataagacagcgaatggggcaataatcggaagatgtctacttattacagaaaataataaatacgttgttaatcaaagaacagaaattattagaccagatattaatatttcctcttactatcttttccattatttaaatggcgaatttcgtaatggtatcattaaaattgctcaaggtggcactcaaatctatgtaaattattcatctgttgaacaattaaagataaatatacctacattaaaagaacaagaagccattggtaatttcttccaaactttagaccaacaaattgctcaatctgaagaaaaactaacagaactcaaagcactcaaacaaacattactcaatcgtttattcgta

SEQ ID NO: 8262 - protein, 399 aa, Streptococcus pyogenes
MTKSKQPQYRFDGFEGEWEEKELGDIVQITMGQSPSSQNYTTNPSDYILVQGNADIKNGYVFPRVWTTQITKQADKGDIILSVRAPVGDVGKTNYHVIIGRGVAAIKGNEFIFQILKYLKEIGYWKRISTGSTFDSISSSDIKYAKIQIPSLPEQEAIGELFQMVDQLIQLQDQKLATLKEQKQTFLRKMFPAQGQKVPEIRLQGFKGEWEEKKLREVSTHRSGTAIEKYFDSEGEFKVISIGSYGTNNLYVDQNIRAVSNELTNSKLVASGELTMVLNDKTANGAIIGRCLLITENNKYVVNQRTEIIRPDINISSYYLFHYLNGEFRNGIIKIAQGGTQIYVNYSSVEQLKINIPTLKEQEAIGNFFQTLDQQIAQSEEKLTELKALKQTLLNRLFV

SEQ ID NO: 8263 - DNA, 1578 bp, Streptococcus pyogenes
atggcagagaaaacaacttcactccgtcaagcactatggcattcggccgaccaattacgtggccaaatggatgccaatgactataaaaactatcttcttggacttattttttacaaacacttatctgataaattactcttggctgtttgtgataatctagaaaaacacttcaatacctttacagaggctcaaaaaatctttgaagatgcttatcaagatgaaggcctaaaagatgacctcatttctgttgttactggtgatttaggttactttatcgaaccgacactgacctttgaaaaactcatccaagatgtttatcacaatactttccaattagaatcattagctcaaggttttcgcgatattgaacaaagtggtgaagactttgaaaacttatttgaagatattgacctctactctaaaaaattaggctctactcctcaaaaacaaaatcaaaccatttctaatgtcatgaaaacattaaatgaaattgactttgaggcagtagatggggatactttaggtgatgcttatgagtacttgattggtgaatttgccagtgaatcaggaaaaaaagcaggtgagttctataccccacaagctgtctctcacttaatgactcagattgtctttttaggtcgtgaagatcaaaaaggaatgaccctctatgaccctgctatgggatctggatcactccttttaaatgctaagaaatatagtaaccaatccgataccgtttcttactatggtcaagaaatcaatacttctacttataacttggctcgtatgaacatgatgcttcatggcgttgccatcgagaaccaacacttaagtaacgctgataccttggatgcagactggccaacagatgaaccaatcaactttgatggggtgttgatgaacccaccttattctttgaaatggtcagcgactgctggtttcttaacggatccacggttttcaagttatggtgtattagcaccaaaatcaaaagccgattttgcctttttacttcatggtttctatcatttaaaaaatacaggaactatggcgattgtcttaccacacggtgtccttttccgtggagctgcagaaggcaagattcgccaaaaactactcgaacaaggggctatcgataccattatcggactcccatcaaatatcttttataatacaagcatccctacgactattatcatattaaagaagaacagaaccaacaaagatgtcttctttatcgatgcttcaaaagagtttgataagggtaaaaatcaaaacacaatgacagataaccatatcaaaaagatccttgatgcttataagagtcgtgataattctgataagttttcatatttagcctcatttgatgaaatcattgaaaatgactataacttaaatatcccacgctatgttgatacctttgaggaagtcccagttaaaccactgccagaattagctaaacagctcagtgacattgatcaagaaattgccaaaacaaatgccaaactagatcaactcatgaaacaactagtcggaacaaccaaagaagcacaagacgaattggatacttttagaaac

SEQ ID NO: 8264 - protein, 526 aa, Streptococcus pyogenes
MAEKTTSLRQALWHSADQLRGQMDANDYKNYLLGLIFYKHLSDKLLLAVCDNLEKHFNTFTEAQKIFEDAYQDEGLKDDLISVVTGDLGYFIEPTLTFEKLIQDVYHNTFQLESLAQGFRDIEQSGEDFENLFEDIDLYSKKLGSTPQKQNQTISNVMKTLNEIDFEAVDGDTLGDAYEYLIGEFASESGKKAGEFYTPQAVSHLMTQIVFLGREDQKGMTLYDPAMGSGSLLLNAKKYSNQSDTVSYYGQEINTSTYNLARMNMMLHGVAIENQHLSNADTLDADWPTDEPINFDGVLMNPPYSLKWSATAGFLTDPRFSSYGVLAPKSKADFAFLLHGFYHLKNTGTMAIVLPHGVLFRGAAEGKIRQKLLEQGAIDTIIGLPSNIFYNTSIPTTIIILKKNRTNKDVFFIDASKEFDKGKNQNTMTDNHIKKILDAYKSRDNSDKFSYLASFDEIIENDYNLNIPRYVDTFEEVPVKPLPELAKQLSDIDQEIAKTNAKLDQLMKQLVGTTKEAQDELDTFRN

SEQ ID NO: 8265 - DNA, 669 bp, Streptococcus pyogenes
atgataagaataaaaaacataacaaagagtaagttctttgggactgcaataatcttgttgcaacaattaatagccttgttaattttggtctataatcgagagaacctgtctcttcttttctctgaaaaagtagctcttgtaatgacccttattgatacagcttttatttggctggcaacaatattacgccaaaaacaaggtgatatttttaaaaggattatttctatcatctccttaacaatttggcaatacttagtatctgtgctgacaagaggaactcctctctttttaagcagtggactacagattatattgctctattgttataccgttgagattactaatttaatattatatgggcacaaacaatttaaagataagttagataagggcttgttaataattatttttgtttctataactagcctttttgttaatagaattttatttaattttttattcctgatggtttttactattttacacctgtatccgttactagttatagtgctatattataggtcctttaggcaacaaatatcagttgttagacgttcattgatactattttctttacttttgctggtaatacttggtagtgaactttatggagaaatgctagatgttaatcaagcctttaataatttgggatggtatctgtttccctta

SEQ ID NO: 8266 - protein, 223 aa, Streptococcus pyogenes
MIRIKNITKSKFFGTAIILLQQLIALLILVYNRENLSLLFSEKVALVMTLIDTAFIWLATILRQKQGDIFKRIISIISLTIWQYLVSVLTRGTPLFLSSGLQIILLYCYTVEITNLILYGHKQFKDKLDKGLLIIIFVSITSLFVNRILFNFLFLMVFTILHLYPLLVIVLYYRSFRQQISVVRRSLILFSLLLLVILGSELYGEMLDVNQAFNNLGWYLFPL

SEQ ID NO: 8267 - DNA, 1623 bp, Streptococcus pyogenes
atgataaaaagaaatgaattaaagttagagtatcagcaacatcagttttacgaatactttaactcaatttttgactatgacatattagatacttctattagagaaaccagtgaagtgttaaggaaaaagacacataagttattttatagtgagtttgaaaatcagttatttgaaacgatcatgttcctttcgatgaaaacactagttttagatataaatcatttttccaaggaaattgaaaataagtcagaggcatatgagcagtatatacagcagataagagaagaaaacggaataaatcatttttttgacaggtatccgtatttgctaaaacaaattaataaagaagtaggactgatagaggaatcatattctttattatttgatagatttttagaagacttatctgagataaagtcgtgctttaacattagtgagcccctaagcaatgttgccttttcacttggtgacagtcactctaaaaagcaaacagtcgttaaaattgcgtttaaagagaaatctgtttactacaagcctaaaagttatcattcacacagtatcttgttagaacttactagtttattgaaatctagtaatataccctcattcagtcttcctaaaagcttagttaaagcagattattgttggcaacttggtgtagcttatacaagttccaataaagatgaagtagcgaaaatttactttaagtatggtgttttagcagcattttctgaaatattttctattacggacttacatatggaaaatgtgattgtttcaggcggagatttatatttaattgacgttgaaacattttttcaaagaaagttgaatgtacaaaatcagaattttgaagggattactgtagacacctatcagagaatttatgagacatcactttcaaacggtttatttcctgtacaatttgagaaaaacagcgctcctaacgtttctggaataagtcgaaaaggtggaaaaagacaaaaaggaaaatatgaactgatcaataaaaatcgtggagatctgaagttagtaaaagttgactattttcaagaagatcggttcaatattcccacattaaatgggaaagtggtagagcctcttgactatgctaatgagatcatttcaggatttagagagtgctacatatttcttctatcacaacgttcaaagattaaagaaatagtagaaggttttccagaattgaaaagcagagtcccatttcgaaatacttccgactatggaaaatttttgcaagcttctacgaatccaaaatatcttttctcagaaaaaaagaggaagaatttattttcgatactatatgagacaaaacatattgaacattttattgttgataatgaaattaaagatttgatgaatggtgatattccttacttttcaatggataccagaggaaacgtctataattctgtagggacattaattggaaatctaggagatacaacctcgttatttgatagtataactattttgaacgatgaaagattgaagttcacttgtgaattgcttgaaatagtcttgaaaaaaccgattaagcattgggagagggaaaagggcaaatcttatcagtttttatcaatctcctcagaacattaccttctc

SEQ ID NO: 8268 - protein, 541 aa, Streptococcus pyogenes
MIKRNELKLEYQQHQFYEYFNSIFDYDILDTSIRETSEVLRKKTHKLFYSEFENQLFETIMFLSMKTLVLDINHFSKEIENKSEAYEQYIQQIREENGINHFFDRYPYLLKQINKEVGLIEESYSLLFDRFLEDLSEIKSCFNISEPLSNVAFSLGDSHSKKQTVVKIAFKEKSVYYKPKSYHSHSILLELTSLLKSSNIPSFSLPKSLVKADYCWQLGVAYTSSNKDEVAKIYFKYGVLAAFSEIFSITDLHMENVIVSGGDLYLIDVETFFQRKLNVQNQNFEGITVDTYQRIYETSLSNGLFPVQFEKNSAPNVSGISRKGGKRQKGKYELINKNRGDLKLVKVDYFQEDRFNIPTLNGKVVEPLDYANEIISGFRECYIFLLSQRSKIKEIVEGFPELKSRVPFRNTSDYGKFLQASTNPKYLFSEKKRKNLFSILYETKHIEHFIVDNEIKDLMNGDIPYFSMDTRGNVYNSVGTLIGNLGDTTSLFDSITILNDERLKFTCELLEIVLKKPIKHWEREKGKSYQFLSISSEHYLL

SEQ ID NO: 8269 - DNA, 153 bp, Streptococcus pyogenes
atgagttttatgaaaaattcaaaggatattttgactaatgctatcgaagaagtttctgaaaaagaacttatggaagtagctggtggtaaaaaaggttccggttggtttgcaactattactgatgactgtccgaactcagtatttgtttgttgt

SEQ ID NO: 8270 - protein, 51 aa, Streptococcus pyogenes
MSFMKNSKDILTNAIEEVSEKELMEVAGGKKGSGWFATITDDCPNSVFVCC

SEQ ID NO: 8271 - DNA, 93 bp, Streptococcus pyogenes
ttgatgacagtaatggcaaccattctagaggtgaaatatatagctgtctgcctatttccacgttattcatcagaaaaaggaacagtacaagac

SEQ ID NO: 8272 - protein, 31 aa, Streptococcus pyogenes
LMTVMATILEVKYIAVCLFPRYSSEKGTVQD

SEQ ID NO: 8273 - DNA, 183 bp, Streptococcus pyogenes
ttgaaccgtccaatagttttctattcgtgtctttttccgctttggcataatgatttcagccatagggttatgcttgagcagtttcatcttgatggcaaaatcaaagaccttttcagtgtaggacttgatttgcttgatattcttaaaggtctttgctttatcggtgatgaagttctagcagtc

SEQ ID NO: 8274 - protein, 61 aa, Streptococcus pyogenes
LNRPIVFYSCLFPLWHNDFSHRVMLEQFHLDGKIKDLFSVGLDLLDILKGLCFIGDEVLAV

SEQ ID NO: 8275 - DNA, 537 bp, Streptococcus pyogenes
atgtcatataaagatttaaaggagaaacgaatcatgtttgatagcaaacaaaatctcgctaagtcacaatggggtttcattgtcataacagcagtgatggatctagttgtgatagtagcaacattactggctaagaccagttttcaacgttacttagttggaggcgtagcttttgtattgactagctttctcatattgttggtatgggggctaaagacagcgaaaaagctccaaacgagactagacagcaaggaagtactagattctaaggtaagggacgatcagaagttgcccaaatatgatgaacgccaaaaacagattcttctcaaaggatacactattgggttttggtttatgattgtggttatctggctgtcactctttattagccgattcacagagggactggtatctgcaagcttcctctttacattggctctttggggagggttggcagttcaaacgacatattgtaaccttagtatgggagctagtattttctatcgtcattatctggatgctaaagaggcagatgaa

SEQ ID NO: 8276 - protein, 179 aa, Streptococcus pyogenes
MSYKDLKEKRIMFDSKQNLAKSQWGFIVITAVMDLVVIVATLLAKTSFQRYLVGGVAFVLTSFLILLVWGLKTAKKLQTRLDSKEVLDSKVRDDQKLPKYDERQKQILLKGYTIGFWFMIVVIWLSLFISRFTEGLVSASFLFTLALWGGLAVQTTYCNLSMGASIFYRHYLDAKEADE

SEQ ID NO: 8277 - DNA, 795 bp, Streptococcus pyogenes
atgacaactatgcaaaaaacaattagcttattatcactagctttacttattggtttgctggggacttctggcaaagccatatctgtgtatgcacaagatcagcacactgataatgttatagctgaatcaactattagtcaggtcagtgttgaagccagtatgcgtggaacagaaccttatattgatgctacagtcaccacagatcaacctgtcagacaaccaactcaggcaacgataacacttaaagacgctagtgataatactattaatagttgggtatatactatggcagcgcaacagcgtcgttttacagcttggtttgatttaactggacaaaagagtggtgactatcatgtaactgtcaccgttcatactcaagaaaaggcagtaactggtcaatcaggaactgttcattttgatcaaaacaaagctagaaaaacaccaactaatatgcaacaaaaggatacttctaaagcaatgacgaattcagtcgatgtagacacaaaagctcaaacaaatcaatcagctaaccaagaaatagattctacttcaaatcctttcagatcagctactaatcatcgatcaacttccttaaagcgatctactaaaaatgagaaacttacaccaactgctagtaatagccaaaaaaacggtagcaacaagacaaaaatgctagtggacaaagaggaagtaaaacctacttcaaaaagaggattcccttgggtcttattaggtctagtagtcagtttagctgcaggtttatttatagctattcaaaaagtatctagacgaaaa

SEQ ID NO: 8278 - protein, 265 aa, Streptococcus pyogenes
MTTMQKTISLLSLALLIGLLGTSGKAISVYAQDQHTDNVIAESTISQVSVEASMRGTEPYIDATVTTDQPVRQPTQATITLKDASDNTINSWVYTMAAQQRRFTAWFDLTGQKSGDYHVTVTVHTQEKAVTGQSGTVHFDQNKARKTPTNMQQKDTSKAMTNSVDVDTKAQTNQSANQEIDSTSNPFRSATNHRSTSLKRSTKNEKLTPTASNSQKNGSNKTKMLVDKEEVKPTSKRGFPWVLLGLVVSLAAGLFIAIQKVSRRK

SEQ ID NO: 8279 - DNA, 228 bp, Streptococcus pyogenes
atgaataaaataagagttgggctgtatgtcattatgagtttgtctattcttgtttctagtattacactggtggctagtctaatctttttactgagacaagacatggttaaagcgattatatacttcattttgaccctattttggttaataggtttggttattaatattaaattgttgaaaaggtggaacagcatttcagaaaaagacttaggatatcaagatgacaac

SEQ ID NO: 8280 - protein, 76 aa, Streptococcus pyogenes
MNKIRVGLYVIMSLSILVSSITLVASLIFLLRQDMVKAIIYFILTLFWLIGLVINIKLLKRWNSISEKDLGYQDDN

SEQ ID NO: 8281 - DNA, 159 bp, Streptococcus pyogenes
gtggatttcggtgttttagggattttactgggccgcttaggaacgtcgattggtcaaatcggtatttacttggtggttgctgtgcttgctattgtattggtgcttccaaactttctgtcaaaatctcaagaagccatcaataatgtttcagtagaaatc

SEQ ID NO: 8282 - protein, 53 aa, Streptococcus pyogenes
VDFGVLGILLGRLGTSIGQIGIYLVVAVLAIVLVLPNFLSKSQEAINNVSVEI

SEQ ID NO: 8283 - DNA, 96 bp, Streptococcus pyogenes
ttgaccaataactggtccaccatcgtttcaacagctggcgaagctaaaggaaaagtatccactgcttcagcccttacgttccgtgaaaatggtcga

SEQ ID NO: 8284 - protein, 32 aa, Streptococcus pyogenes
LTNNWSTIVSTAGEAKGKVSTASALTFRENGR

SEQ ID NO: 8285 - DNA, 93 bp, Streptococcus pyogenes
gtgatgaggtatcttttgttgtatcatgaagaaaaagggaatcaattcccagatttgcctatttttgaccaccttttgaggaacttgttacaa

SEQ ID NO: 8286 - protein, 31 aa, Streptococcus pyogenes
VMRYLLLYHEEKGNQFPDLPIFDHLLRNLLQ

SEQ ID NO: 8287 - DNA, 141 bp, Streptococcus pyogenes
ttggacttcgtcgttaatttcaagtttaaaaagtcctctgcttatgcagtgggctttttcatttttgacatgttgtttgttaacttacacatttggctagaatggtctaagactgtttttttagcagttgatgattttatt

SEQ ID NO: 8288 - protein, 47 aa, Streptococcus pyogenes
LDFVVNFKFKKSSAYAVGFFIFDMLFVNLHIWLEWSKTVFLAVDDFI

SEQ ID NO: 8289 - DNA, 153 bp, Streptococcus pyogenes
atgactatgctaggttaccgcttatcagctgaagtgcggggatcagccatcttacctcttttagctggttatcttattaggcaagcaatcgcacaggtttattctgatttaaaaacagcctcttggctatttggccttgctagttctgttgct

SEQ ID NO: 8290 - protein, 51 aa, Streptococcus pyogenes
MTMLGYRLSAEVRGSAILPLLAGYLIRQAIAQVYSDLKTASWLFGLASSVA

SEQ ID NO: 8291 - DNA, 105 bp, Streptococcus pyogenes
gtgccattgaaagccattaaggcggggaaagtttggatgaaatatgccaaacttttttgttttgatccctggattgaaacagttattctgatgctaacaggttca

SEQ ID NO: 8292 - protein, 35 aa, Streptococcus pyogenes
VPLKAIKAGKVWMKYAKLFCFDPWIETVILMLTGS

SEQ ID NO: 8293 - DNA, 102 bp, Streptococcus pyogenes
atgccaccagtggttgttcattattcttctcctattaatcattcattcatcttttattttaacgttttttctctttttgtgcaatcgtttgcgcaaataaca

SEQ ID NO: 8294 - protein, 34 aa, Streptococcus pyogenes
MPPVVVHYSSPINHSFIFYFNVFSLFVQSFAQIT

SEQ ID NO: 8295 - DNA, 141 bp, Streptococcus pyogenes
atgatagatcgttcagcttgttttggctcctgtgaccggcctgtgtttacatggttttcttgttttatgggtctttacgacttgactagccctgctattgtgcaagttgcccaaagaagtttggtcgctttgtctctgttt

SEQ ID NO: 8296 - protein, 47 aa, Streptococcus pyogenes
MIDRSACFGSCDRPVFTWFSCFMGLYDLTSPAIVQVAQRSLVALSLF

SEQ ID NO: 8297 - DNA, 1320 bp, Streptococcus pyogenes
atgaaaaattacttatctattggagtgattgcactgctgtttgcattaacatttggaacagtcaagtcggtccaagctattgctgggtatggatggctaccagaccgtccacctatcaataacagccagttagttgttagtatggccggtatcgttgaaggtaccgataaaaaagtttttataaatttttttgaaatcgatctaacatcacaacctgctcacggaggaaagacagagcagggcttaagtccaaaatcaaaaccatttgctacagataatggcgcaatgccacataaacttgaaaaagctgacttattaaaagctattcaaaaacagctgatcgctaacgttcacagtaacgacggctactttgaggtcattgattttgcaagcgatgcaaccattactgatcgaaacggcaaggtctactttgctgacaaagatggttcggtaaccttgccgacccaacctgtccaagaatttttgttaaagggacatgtgcgcgttagaccatataaagaaaaaccagtacaaaatcaagcaaaatctgttgatgtagaatatactgtacagtttactcctttaaaccctgatgacgatttcagaccagggctcaaagatactaagctattgaaaacactagctatcggtgacaccatcacatctcaagaattactagctcaagcacaaagcattttaaacaaaacccacccaggctatacgatttatgaacgtgactcctcaatcgtcactcatgacaatgacattttccgtacgattttaccaatggatcaagagtttacttaccatgtcaaaaatcgggaacaagcttatgagatcaatcctaaaacaggtattaaagaaaaaacgaacaacactgatctggtctctgagaaatattacgtccttaaacaaggggaaaagccgtatgatccctttgatcgcagtcacttgaaactgttcaccatcaaatacgttgatgtcaacaccaacgaattgctaaaaagcgagcagctcttaacagctagcgaacgtaacttagacttcagagatttatacgatcctcgtgataaggctaaactactctacaacaatctcgatgcttttgatatcatggactataccttaactggaaaagtagaggataatcacgataagaataatcgtgtcgttacagtttatatgggcaagcgccctaaaggggcaaagggtagctatcatttagcttatgataaagatctctataccgaagaagaacgaaaagcttacagctacctgcgtgatacagggacacctatacctgataaccctaaagacaaa

SEQ ID NO: 8298 - protein, 440 aa, Streptococcus pyogenes
MKNYLSIGVIALLFALTFGTVKSVQAIAGYGWLPDRPPINNSQLVVSMAGIVEGTDKKVFINFFEIDLTSQPAHGGKTEQGLSPKSKPFATDNGAMPHKLEKADLLKAIQKQLIANVHSNDGYFEVIDFASDATITDRNGKVYFADKDGSVTLPTQPVQEFLLKGHVRVRPYKEKPVQNQAKSVDVEYTVQFTPLNPDDDFRPGLKDTKLLKTLAIGDTITSQELLAQAQSILNKTHPGYTIYERDSSIVTHDNDIFRTILPMDQEFTYHVKNREQAYEINPKTGIKEKTNNTDLVSEKYYVLKQGEKPYDPFDRSHLKLFTIKYVDVNTNELLKSEQLLTASERNLDFRDLYDPRDKAKLLYNNLDAFDIMDYTLTGKVEDNHDKNNRVVTVYMGKRPKGAKGSYHLAYDKDLYTEEERKAYSYLRDTGTPIPDNPKDK

SEQ ID NO: 8299 - DNA, 96 bp, Streptococcus pyogenes
ttgggatctctcaggcgtgagcatgataccaaaggcctgctcccgaccaaaaatagagagaaccaaggggctctctctattatgtttgcttatcag

SEQ ID NO: 8300 - protein, 32 aa, Streptococcus pyogenes
LGSLRREHDTKGLLPTKNRENQGALSIMFAYQ

SEQ ID NO: 8301 - DNA, 537 bp, Streptococcus pyogenes
ttgcttgtcagaagaggatttgttccatcatttatccccgcagtaattttttatggtatgataccaattaaagcgcttaagattaaggtggagactgttatgaaaataattgagtacaaaggaaattacagagatgacctcatttttatggtcttggaagcaaaaaatgccttaaggagaattcccagcattaacccggatcttttgacaattgaaacaagttatttggaaaaagaggattgtttttggctagcggtcaatgaagaaagtcgtgttattggctcaatcgcttattcttctattcccaaaacaaatgaggtcttcttgcaccgtctcttcatcaaaccaagcttaaaacatcaaggcattggcagtcaacttctggcgtttgcagaagattatctaaggaaaatcggcaagagtcatgttcgtatccacttaggtcaacctaaagaacaatggtttgaatcttatcggttttatcctaaacatggttatcaattctatgatgacacgcatctcatcaagaaactaatc

SEQ ID NO: 8302 - protein, 179 aa, Streptococcus pyogenes
LLVRRGFVPSFIPAVIFYGMIPIKALKIKVETVMKIIEYKGNYRDDLIFMVLEAKNALRRIPSINPDLLTIETSYLEKEDCFWLAVNEESRVIGSIAYSSIPKTNEVFLHRLFIKPSLKHQGIGSQLLAFAEDYLRKIGKSHVRIHLGQPKEQWFESYRFYPKHGYQFYDDTHLIKKLI

SEQ ID NO: 8303 - DNA, 93 bp, Streptococcus pyogenes
ttgagacatgatactaaaagtggattgacgcttttaattaagccgattagttatgaaacaagcaaaaaagcctttaaacaaaggctttcagtc

SEQ ID NO: 8304 - protein, 31 aa, Streptococcus pyogenes
LRHDTKSGLTLLIKPISYETSKKAFKQRLSV

SEQ ID NO: 8305 - DNA, 774 bp, Streptococcus pyogenes
ttgttaatgattatttcttttgaaagtgttatattaaaacataataaaataataactcctgaaaagaggctatttatgaaaaaaacaaaacttattttttcttttacttcaatattcattgcaataatttctcgtcctgtgtttggattagaagtagataataattcccttctaaggaatatctatagtacgattgtatatgaatattcagatacagtaattgattttaaaaccagtcataacttagtgactaagaaacttgatgttagagatgctagagatttttttattaactccgaaatggatgaatatgcagccaatgattttaaagatggagataaaatagctatgttctccgtcccatttgattggaactacttgtcagaaggaaaagtcatagcatatacctatggtggaatgacgccttatcaagaagaaccaatgtctaaaaatatccctgttaatttatggattaatagaaagcagattcctgtcccctataatcaaatatcaactaacaaaacaacagttacagctcaagaaattgatctaaaggttagaaaatttttaatatcacaacatcaattatattcttctggttctagctacaaaagtggtaaattagtttttcatacaaatgataattcagataaatattctctcgatcttttctatgtaggatatagagataaagaaagtatttttaaagtatacaaagacaataaatctttcaatatagataaaattgggcatttagatatagaaattgactcc

SEQ ID NO: 8306 - protein, 258 aa, Streptococcus pyogenes
LLMIISFESVILKHNKIITPEKRLFMKKTKLIFSFTSIFIAIISRPVFGLEVDNNSLLRNIYSTIVYEYSDTVIDFKTSHNLVTKKLDVRDARDFFINSEMDEYAANDFKDGDKIAMFSVPFDWNYLSEGKVIAYTYGGMTPYQEEPMSKNIPVNLWINRKQIPVPYNQISTNKTTVTAQEIDLKVRKFLISQHQLYSSGSSYKSGKLVFHTNDNSDKYSLDLFYVGYRDKESIFKVYKDNKSFNIDKIGHLDIEIDS

SEQ ID NO: 8307 - DNA, 264 bp, Streptococcus pyogenes
atgacttattttagattaaaaaaagaattaaactggtcactaagaaataaaggaattgtagtttacgaagggaatcaaaaacttcagatagccattaatacaggtgaaaataacagtgaaaaagtcttttttgatactttttttgaggtggttcgggcggcagcgactttctccacagcaaaaaacatctgttttggtcttggcttacttcgttcgcagaaacaggaaatcgggtatcacattagcagagtagttcatgttttt

SEQ ID NO: 8308 - protein, 88 aa, Streptococcus pyogenes
MTYFRLKKELNWSLRNKGIVVYEGNQKLQIAINTGENNSEKVFFDTFFEVVRAAATFSTAKNICFGLGLLRSQKQEIGYHISRVVHVF

SEQ ID NO: 8309 - DNA, 111 bp, Streptococcus pyogenes
atgctttgtcaatggcaactaccatcttttatcacagcaactgaagagataagcaaaagacaattgttgacagctatttgtcctaacttctttttgatgaggcagcacatc

SEQ ID NO: 8310 - protein, 37 aa, Streptococcus pyogenes
MLCQWQLPSFITATEEISKRQLLTAICPNFFLMRQHI

SEQ ID NO: 8311 - DNA, 1203 bp, Streptococcus pyogenes
atgttacacaaagaaaaacctgattataaccgcaatcagtacggtttctatacccttgaccagttagtgcctgatgaacatttcctgcgccaagtggaagctgtgattgacttcgacttcatctatgacctagtagaagacacctattcgtctgataatggtcgccctagccttgatcctgtcatgttggttaaaatccctctgattcagtgcttttatggcattcgttccatgcgtcagaccatcaaggatattgaagtgaatactgcctatcgctggtttttaggtttgactttggatgacaaggtgccacatttcacaacctatggcaaaaattattcccgtcgctttcaagaaaaaggcttgattgagtccatttttacgcatattgttgggctatgtatcaatacaggcctgattgacccgacggagattttcatagatgggactcatattaaggctgcggctaataatcgcaagttcatcaaccgagaggtggaaaaacaagccaagttcatgagtgaacagctagaaatcgaaatcaatcgggatagggagaagcatggaaaaaagccgctagggcccgccaaagagctagagcccgtcgctaagaaaatctccacaaccgatccagaaagtggctggtttcacaaaggtgatcataaggaagtcttcgcttattctgctcaggtggcttgtgacaagtatggatgggcgcttgcttatagtgttgaggctggcaatatccatgatagtcaggcttttcctgcactttttgccaagcttgaacccttgaaaccacagtttattattgcggattccggctataacgttcccagcattgccaagtttctgattgataaggagatcactcctgtccttccttacacacgaccaagaggaaagaaagaccttctacgtccgaaagaattgatttatgatgagcactttgattgtgtcatctgccctgaacatcaagccttgacctaccgcactacgaccagagaaggctaccgagaatacaaaagtgaccctgtaatttgtgccaattgtcccctgttatctgtatgtacgaccagtaagaactaccaaaaagttgtcacacggcatatttggaaagactatttggcacagccaaggaataccacaatctctgctatacgagagagaaaggcaagtccaaaatggaagatacggttggac

SEQ ID NO: 8312 - protein, 401 aa, Streptococcus pyogenes
MLHKEKPDYNRNQYGFYTLDQLVPDEHFLRQVEAVIDFDFIYDLVEDTYSSDNGRPSLDPVMLVKIPLIQCFYGIRSMRQTIKDIEVNTAYRWFLGLTLDDKVPHFTTYGKNYSRRFQEKGLIESIFTHIVGLCINTGLIDPTEIFIDGTHIKAAANNRKFINREVEKQAKFMSEQLEIEINRDREKHGKKPLGPAKELEPVAKKISTTDPESGWFHKGDHKEVFAYSAQVACDKYGWALAYSVEAGNIHDSQAFPALFAKLEPLKPQFIIADSGYNVPSIAKFLIDKEITPVLPYTRPRGKKDLLRPKELIYDEHFDCVICPEHQALTYRTTTREGYREYKSDPVICANCPLLSVCTTSKNYQKVVTRHIWKDYLAQPRNTTISAIRERKASPKWKIRLD

SEQ ID NO: 8313 - DNA, 252 bp, Streptococcus pyogenes
ttggaaagactatttggcacagccaaggaataccacaatctctgctatacgagagagaaaggcaagtccaaaatggaagatacggttggactgactttggcatgcttaaatctcaaaaaactggtcaaaaggatggcgggagagcctttttattttgttcagatgaggtggtttaagcacggaaacagccatttttatctaaaaacactaaaaaagacaaacaccaaatcgatgtttgtcttcaatctgttc

SEQ ID NO: 8314 - protein, 84 aa, Streptococcus pyogenes
LERLFGTAKEYHNLCYTREKGKSKMEDTVGLTLACLNLKKLVKRMAGEPFYFVQMRWFKHGNSHFYLKTLKKTNTKSMFVFNLF

SEQ ID NO: 8315 - DNA, 924 bp, Streptococcus pyogenes
atgaatattagaaataagattgaaaatagtaaaacactactatttacatcccttgtagccgtggctctactaggagctacacaaccagtttcagccgaaacgtatacatcacgcaattttgactggtctggagatgactggtctggagatgactggcctgaagatgactggtctggagatggtttgtctaaatatgaccggtctggagttggtttgtctcaatatggctggtctaaatatggctggtctagcgataaagaagaatggcctgaagattggcctgaagatgactggtctagcgataaaaaagatgagacagaagataaaacgagaccaccatatggagaagcattaggtacagggtatgaaaaacgtgatgattggggaggacctggtacggtggcaactgacccttacactccaccatatggaggagcattaggtacagggtatgaaaaacgtgatgattggggaggacctggtacggtggcaactgacccttacactccaccatatggaggagcattaggtacagggtatgaaaaacgtgatgattggagaggacctggacatattcctaaacctgagaacgaacaatcaccaaacccacttcatattcctgaacctcctcagattgagtggcctcagtggaatggctttgatggattatcatttggcccctctgattggggccaatctgaggacacccctccaagtgaacctcgtgtgccagaaaaaccgcaacatactcctcaaaaaaatccacaagaatcagattttgatagagggttttcagctggcttgaaagcaaaaaactcaggtagaggtattgattttgaaggtttccagtatggtggctggtcagacgaatataaaaaaggttacatgcaagccttcggtacaccatatacaccatcagcaacg

SEQ ID NO: 8316 - protein, 308 aa, Streptococcus pyogenes
MNIRNKIENSKTLLFTSLVAVALLGATQPVSAETYTSRNFDWSGDDWSGDDWPEDDWSGDGLSKYDRSGVGLSQYGWSKYGWSSDKEEWPEDWPEDDWSSDKKDETEDKTRPPYGEALGTGYEKRDDWGGPGTVATDPYTPPYGGALGTGYEKRDDWGGPGTVATDPYTPPYGGALGTGYEKRDDWRGPGHIPKPENEQSPNPLHIPEPPQIEWPQWNGFDGLSFGPSDWGQSEDTPPSEPRVPEKPQHTPQKNPQESDFDRGFSAGLKAKNSGRGIDFEGFQYGGWSDEYKKGYMQAFGTPYTPSAT

SEQ ID NO: 8317 - DNA, 246 bp, Streptococcus pyogenes
gtgttatttttagccatttttatgctccttatgctatcattttttaggaagaaaccctcattttcagggtttaactctaataattctattgtaaataataaaagccaaaaggtaaagaccagcttttttagcttttgccacctttttgacctaaatgctattaatgatgaatctgtttttgagttgctacagttaggctgtctaagttgtggaggggggggcatgcaacttgttggggggagtggg

SEQ ID NO: 8318 - protein, 82 aa, Streptococcus pyogenes
VLFLAIFMLLMLSFFRKKPSFSGFNSNNSIVNNKSQKVKTSFFSFCHLFDLNAINDESVFELLQLGCLSCGGGGMQLVGGSG

SEQ ID NO: 8319 - DNA, 192 bp, Streptococcus pyogenes
ttgactgttatggtacaaccattaaaaattctatcatacttcagtcaatttacaccaacattagctcttgaaaacgtttctacgatgttttttatgaactggttaacttgtcttttttcgttggctattttgagaaaacagggctttgggttctattttgcttttaattttagccatgtgactctcacatca

SEQ ID NO: 8320 - protein, 64 aa, Streptococcus pyogenes
LTVMVQPLKILSYFSQFTPTLALENVSTMFFMNWLTCLFSLAILRKQGFGFYFAFNFSHVTLTS

SEQ ID NO: 8321 - DNA, 90 bp, Streptococcus pyogenes
gtgtttggctttttgatgacatcatggctctcaaaagaccaaaaaacttccaataacttagctcgtgctctaaattattggaagattatt

SEQ ID NO: 8322 - protein, 30 aa, Streptococcus pyogenes
VFGFLMTSWLSKDQKTSNNLARALNYWKII

SEQ ID NO: 8323 - DNA, 249 bp, Streptococcus pyogenes
atgataaagaaagtgaccaccccgagtcaaaaaacaaaaaaacgtgttcgtaatggctacctcctaaaactaggtacagcctgtttactcttaagtatactcagttatggcattggtcttttgggccagcctagcatggaaaatacgtttatgggaatagcgagtgttgccatgttaggaagtgtctgtttctttattatctttgctctaaaccgtatctttgacgcattagaggacaatttgcgagat

SEQ ID NO: 8324 - protein, 83 aa, Streptococcus pyogenes
MIKKVTTPSQKTKKRVRNGYLLKLGTACLLLSILSYGIGLLGQPSMENTFMGIASVAMLGSVCFFIIFALNRIFDALEDNLRD

SEQ ID NO: 8325 - DNA, 402 bp, Streptococcus pyogenes
atgacaggacaaaaaaagctagccaatctcaaaaaaacagataaaaaacagataatcgttagaaaaacagtagatgcgtctgttaaactaaaggtatcaaaacaaaaggagcatttcatcatgaaattcaaaaaagtattagtcattcctgcattagcattagcagcaacatgctttttaacagcttgtggcacaaaaaaagattctaaaaaagaagaagttaaagaaatcaaaatgtctgacatcaaagacgacgcagttagcaaaaaaacaaaagtggttgatggcgaagaagttacagaatacaccacaaaagatggaaacgtgattcagattcctgcaggaaacgaagaaggcatggaatcaaaagatgctggtggatcaggcgctcctgctaaaaac

SEQ ID NO: 8326 - protein, 134 aa, Streptococcus pyogenes
MTGQKKLANLKKTDKKQIIVRKTVDASVKLKVSKQKEHFIMKFKKVLVIPALALAATCFLTACGTKKDSKKEEVKEIKMSDIKDDAVSKKTKVVDGEEVTEYTTKDGNVIQIPAGNEEGMESKDAGGSGAPAKN

SEQ ID NO: 8327 - DNA, 234 bp, Streptococcus pyogenes
atgacccatcgtttttttctcacccctctttcaaccctctggcgccgtctgagaccaaagcgttactccaaaaaagttttggctgatgagcctactagctatcagccaccggcagctcatggcccgtgcgacgatattcatcagttgcttgaggacaagagcttatcagacgattatctgattgctacttctgcgatgagacacctctggtactgggggtatagtcagattggg

SEQ ID NO: 8328 - protein, 78 aa, Streptococcus pyogenes
MTHRFFLTPLSTLWRRLRPKRYSKKVLADEPTSYQPPAAHGPCDDIHQLLEDKSLSDDYLIATSAMRHLWYWGYSQIG

SEQ ID NO: 8329 - DNA, 93 bp, Streptococcus pyogenes
ttgaaaaggggagtgatggctagggctgtctttttaagcaaccttagggaaataaactggcaaccctctatttttgggcaggttgtttttggt

SEQ ID NO: 8330 - protein, 31 aa, Streptococcus pyogenes
LKRGVMARAVFLSNLREINWQPSIFGQVVFG

SEQ ID NO: 8331 - DNA, 303 bp, Streptococcus pyogenes
atggaaatgcatttcgttagaacagaacctgaggcacgccgcatagctgaaaccttttgtgccgaaaacacacaaacaaaaacccctatgcgcgtgcagcagttaagctatccatcagacacagatcactcaggtggtgagctatacatctatgctttgtctcctgctggatttatcatcgtatcaggagacaccagagcgcacaccattttaggctattcttttgataataacctagacctcaaccatgataatgtcaggagtatgatagaagcttaccaaaaacaaatcaactctttggat

SEQ ID NO: 8332 - protein, 101 aa, Streptococcus pyogenes
MEMHFVRTEPEARRIAETFCAENTQTKTPMRVQQLSYPSDTDHSGGELYIYALSPAGFIIVSGDTRAHTILGYSFDNNLDLNHDNVRSMIEAYQKQINSLD

SEQ ID NO: 8333 - DNA, 1194 bp, Streptococcus pyogenes
atgaataaaaagaaattaggtgtcagattattaagtcttttagcattaggtggatttgttcttgctaacccagtatttgccgatcaaaactttgctcgtaacgaaaaagaagcaaaagatagcgctatcacatttatccaaaaatcagcagctatcaaagcaggtgcacgaagcgcagaagatattaagcttgacaaagttaacttaggtggagaactttctggctctaatatgtatgtttacaatatttctactggaggatttgttatcgtttcaggagataaacgttctccagaaattctaggatactctaccagcggatcatttgacgctaacggtaaagaaaacattgcttccttcatggaaagttatgtcgaacaaatcaaagaaaacaaaaaattagacactacttatgctggtaccgctgagattaaacaaccagttgttaaatctctccttgattcaaaaggcattcattacaatcaaggtaacccttacaacctattgacacctgttattgaaaaagtaaaaccaggtgaacaatcttttgtaggtcaacatgcagctacaggatgtgttgctactgcaactgctcaaattatgaaatatcataattaccctaacaaagggttgaaagactacacttacacactaagctcaaataacccatatttcaaccatcctaagaacttgtttgcagctatctctactagacaatacaactggaacaacatcttacctacttatagcggaagagaatctaacgttcaaaaaatggcgatttcagaattgatggctgatgttggtatttcagtagacatggattatggtccatctagtggttctgcaggtagctctcgtgttcaaagagccttgaaagaaaactttggctacaaccaatctgttcaccaaatcaaccgtggcgactttagcaaacaagattgggaagcacaaattgacaaagaattatctcaaaaccaaccagtatactaccaaggtgtcggtaaagtaggcggacatgcctttgttatcgatggtgctgacggacgtaacttctaccatgttaactggggttggggtggagtctctgacggcttcttccgtcttgacgcactaaacccttcagctcttggtactggtggcggcgcaggcggcttcaacggttaccaaagtgctgttgtaggcatcaaacct

SEQ ID NO: 8334 - protein, 398 aa, Streptococcus pyogenes
MNKKKLGVRLLSLLALGGFVLANPVFADQNFARNEKEAKDSAITFIQKSAAIKAGARSAEDIKLDKVNLGGELSGSNMYVYNISTGGFVIVSGDKRSPEILGYSTSGSFDANGKENIASFMESYVEQIKENKKLDTTYAGTAEIKQPVVKSLLDSKGIHYNQGNPYNLLTPVIEKVKPGEQSFVGQHAATGCVATATAQIMKYHNYPNKGLKDYTYTLSSNNPYFNHPKNLFAAISTRQYNWNNILPTYSGRESNVQKMAISELMADVGISVDMDYGPSSGSAGSSRVQRALKENFGYNQSVHQINRGDFSKQDWEAQIDKELSQNQPVYYQGVGKVGGHAFVIDGADGRNFYHVNWGWGGVSDGFFRLDALNPSALGTGGGAGGFNGYQSAVVGIKP

SEQ ID NO: 8335 - DNA, 168 bp, Streptococcus pyogenes
atggacaacccaaaaaaagacaaaggactttcacttggtgttgtggaccctatcacgatccttatcacagaatcagttattaacaaaatgagaacggtcccatatcatctaaaaaaactgtcaagcacaacctattgtttgctagctgatcttgcctatcagtctgcc

SEQ ID NO: 8336 - protein, 56 aa, Streptococcus pyogenes
MDNPKKDKGLSLGVVDPITILITESVINKMRTVPYHLKKLSSTTYCLLADLAYQSA

SEQ ID NO: 8337 - DNA, 129 bp, Streptococcus pyogenes
atgctcatttcagttgacaagaaacttaaaaatactgataatataaacaaaatgattcttttgtttgtcaatgcttttattgacttctcatttttatctactaccattttgcaaaaggaactacaaaaa

SEQ ID NO: 8338 - protein, 43 aa, Streptococcus pyogenes
MLISVDKKLKNTDNINKMILLFVNAFIDFSFLSTTILQKELQK

SEQ ID NO: 8339 - DNA, 126 bp, Streptococcus pyogenes
atgaaaattaaaggagatagtaaggagaaaaaagaaggcgttgtctttttgttttgccatactaatatcatttttgaaataggtgctgtgtgtcacctagaggtggtgattgtatttaggcctagg

SEQ ID NO: 8340 - protein, 42 aa, Streptococcus pyogenes
MKIKGDSKEKKEGVVFLFCHTNIIFEIGAVCHLEVVIVFRPR

SEQ ID NO: 8341 - DNA, 507 bp, Streptococcus pyogenes
atgtcaactgaccatcaattacgagaagtttcttatcaattactggctgagcgaggggtttctttagaagctattgcagagctggtgctttttttgcagaatgattatattcccaatttgaccatggcagaatgtttagagagcgttgaggcggtgcttgcaaaacgagaagtgcaaaatgctattatcactggggtagaattggataaattggctgaagccaaccagctgtctgagccactccttagtatcttgaaaaccgaccaagggctgtatgggattgatgaaatcctggccttatccattgttaacctctatgggtctatcggttttaccaattatgggtatctggacaagacaaaaccgggaatagttgacaaactcaaccacaaagatggctactcctgccatacctttttagatgatattgttagcgccattgcggcagcagctgccagtcgtattgcccacaatgaccccgctaaaagtgctattaccaaccaacaa

SEQ ID NO: 8342 - protein, 169 aa, Streptococcus pyogenes
MSTDHQLREVSYQLLAERGVSLEAIAELVLFLQNDYIPNLTMAECLESVEAVLAKREVQNAIITGVELDKLAEANQLSEPLLSILKTDQGLYGIDEILALSIVNLYGSIGFTNYGYLDKTKPGIVDKLNHKDGYSCHTFLDDIVSAIAAAAASRIAHNDPAKSAITNQQ

SEQ ID NO: 8343 - DNA, 90 bp, Streptococcus pyogenes
ttggagatcgttgctacattgcctttacctttatgcttttttaaagctcaaaccagtatgggctttaaaaaagcttaccaatcagattat

SEQ ID NO: 8344 - protein, 30 aa, Streptococcus pyogenes
LEIVATLPLPLCFFKAQTSMGFKKAYQSDY

SEQ ID NO: 8345 - DNA, 198 bp, Streptococcus pyogenes
ttgactctgttacaagctaatttagtgcacttggtttggagatcgttgctacattgcctttacctttatgcttttttaaagctcaaaccagtatgggctttaaaaaagcttaccaatcagattattgatactacaaaaaaggctgggaatactcccagcctaggcttttccaagcaagcttatcatttctaccaatct

SEQ ID NO: 8346 - protein, 66 aa, Streptococcus pyogenes
LTLLQANLVHLVWRSLLHCLYLYAFLKLKPVWALKKLTNQIIDTTKKAGNTPSLGFSKQAYHFYQS

SEQ ID NO: 8347 - DNA, 174 bp, Streptococcus pyogenes
atgggattcattagcgggacttttaaagtcttaaaagacacaacatggccaaatcgtaaacaacgttggaaagattttatctcagttcttgagtacacagctttctttacggtgattatctacatctttgatcagctcttagcaaagagtgtattagcactgattaatttattc

SEQ ID NO: 8348 - protein, 58 aa, Streptococcus pyogenes
MGFISGTFKVLKDTTWPNRKQRWKDFISVLEYTAFFTVIIYIFDQLLAKSVLALINLF

SEQ ID NO: 8349 - DNA, 378 bp, Streptococcus pyogenes
atgaaaacaattagacgttatgatgttaacgaagatagagggcatacaggccttgtagaagcaggagatttctattatttaaactattgtgtcggcaatgttggacaagacattgaaagtcagattaatggagcctttgacgagatggagcgccgattagcattggtggggctcacattagatgcagttgttcaaatggattgtctatttcgagacgtttggaacatacctgtgatggaaaaaatgattaaagagcgctttaatggcagataccctgctcgaaaatcgattcaaacggaatttgcacatcacggtggaccacaaggactactctttcaagtggatggtgtggcttattcaaagcatatttcgatgacc

SEQ ID NO: 8350 - protein, 126 aa, Streptococcus pyogenes
MKTIRRYDVNEDRGHTGLVEAGDFYYLNYCVGNVGQDIESQINGAFDEMERRLALVGLTLDAVVQMDCLFRDVWNIPVMEKMIKERFNGRYPARKSIQTEFAHHGGPQGLLFQVDGVAYSKHISMT

SEQ ID NO: 8351 - DNA, 189 bp, Streptococcus pyogenes
atgaataaattccaagcttttaaagaaaccttatccgcagaaagtctaaaagccatttacgatgagactcgcttggaggtagctaatgacgagcgtgaaggtactgaagctttctctgctgctcttgccacccaaatggctatcaaccttgttgaaaaataccataactggctcaatgaagacaacaaa

SEQ ID NO: 8352 - protein, 63 aa, Streptococcus pyogenes
MNKFQAFKETLSAESLKAIYDETRLEVANDEREGTEAFSAALATQMAINLVEKYHNWLNEDNK

SEQ ID NO: 8353 - DNA, 180 bp, Streptococcus pyogenes
atgctgattttggatgaaagtaacatgcccattgatgagtttatgtatgctgtccatgattttcatcgtgacaacacaattcaagatagtgatggcttgaagcagttacttcatgctcaactagcatcaactgataagaaggagatgttcacggatatcttttggcatatccagcatgtc

SEQ ID NO: 8354 - protein, 60 aa, Streptococcus pyogenes
MLILDESNMPIDEFMYAVHDFHRDNTIQDSDGLKQLLHAQLASTDKKEMFTDIFWHIQHV

SEQ ID NO: 8355 - DNA, 132 bp, Streptococcus pyogenes
atgacaaagaaaaacaatgtattttccaatacattaaaagtctgtaaccacaaagattggcattttatatcacaactaaaaaaacaaagatgggatatcatgagtcgaaatccaatctttgttcttttttca

SEQ ID NO: 8356 - protein, 44 aa, Streptococcus pyogenes
MTKKNNVFSNTLKVCNHKDWHFISQLKKQRWDIMSRNPIFVLFS

SEQ ID NO: 8357 - DNA, 108 bp, Streptococcus pyogenes
ttgcttgcgggctactctaaaaacttagtagcaccacgtcaatacattttgactaaaactgactattattataacaaatacaagaccttaaacgcaactcttaatcat

SEQ ID NO: 8358 - protein, 36 aa, Streptococcus pyogenes
LLAGYSKNLVAPRQYILTKTDYYYNKYKTLNATLNH

SEQ ID NO: 8359 - DNA, 153 bp, Streptococcus pyogenes
ttggccatagtatttttcatacctaataatcaggctctaaaagacatcttcgggaaatttgaccgacttttgaccgactttatttctttttttctctttttttatcctgccgcaaaaaataaaaaccttgatttaacaacgttttcacgaagt

SEQ ID NO: 8360 - protein, 51 aa, Streptococcus pyogenes
LAIVFFIPNNQALKDIFGKFDRLLTDFISFFLFFYPAAKNKNLDLTTFSRS

SEQ ID NO: 8361 - DNA, 1284 bp, Streptococcus pyogenes
atgttaaaaaaggaggtttttatggttgctgatgtcttattaacacattttaatcaactattttgtctaaatgatccaggtcatcctttaactggtcaagaaatgaaaaaagccactatcgttgaagatggctatatagccatcaaagacggcctcattgtggctcttggttctggtgaaccagatgctgagcttgtcggtacacagactattatgcgttcttataaaggtaaaattgcaacgcctggtattattgactgtcatacccatttggtctatggtggcagtcgtgaacatgaatttgccaagaaattagcaggggtgtcttacttggatattttagctcaaggtggtggtattttaagcacggtgagggccactcggtcagccagctttgacaacctttatcaaaaatccaagagattgctagactacatgttgcttcatggagtgactactgtcgaagcgaaaagtggctacggccttgattgggaaacagaaaaacgccaactggatgttgttgctgctttagaaaaagaccatcccattgatttggtgtctacgtttatggcagcccatgcgattcctgaagaatacaaagggaatcctaaggcttatctcgatgtgattatcaaggatatgcttcctgttgttaaagaggaaaatctggcagaattttgtgatattttctgtgaaaaaaatgtttttacagctgatgagtctcgctatctgttaagcaaagccaaagaaatgggcttcaagcttcgtattcacgcagatgaaattgcgtctataggcggagttgatgtcgcagcagagctcagcgcagttagtgcagagcatttgatgatgataacagatgatggtatcgctaagttgattggtgctggtgttattggtaatttgcttccagccaccacctttagtttgatggaagacacttatgcccctgctcgcaaaatgatcgatgctggcatggccatcaccctctcaacagatagtaatccaggcagttgcccgactgctaacatgcagtttgtgatgcaattaggttgttttatgttacgtttaacaccgattgaagtcttaaatgctgttaccattaacgcggcctactctgtcaatcgtcaggagagagttggtagtttgacagttggtaaagaagcagatattgccatttttgatgccccaaatattgattacccattttatttctttgccaccaacttgattcaccaagtctataaaaaaggacaactcacagttgaccgaggtcgtattctt

SEQ ID NO: 8362 - protein, 428 aa, Streptococcus pyogenes
MLKKEVFMVADVLLTHFNQLFCLNDPGHPLTGQEMKKATIVEDGYIAIKDGLIVALGSGEPDAELVGTQTIMRSYKGKIATPGIIDCHTHLVYGGSREHEFAKKLAGVSYLDILAQGGGILSTVRATRSASFDNLYQKSKRLLDYMLLHGVTTVEAKSGYGLDWETEKRQLDVVAALEKDHPIDLVSTFMAAHAIPEEYKGNPKAYLDVIIKDMLPVVKEENLAEFCDIFCEKNVFTADESRYLLSKAKEMGFKLRIHADEIASIGGVDVAAELSAVSAEHLMMITDDGIAKLIGAGVIGNLLPATTFSLMEDTYAPARKMIDAGMAITLSTDSNPGSCPTANMQFVMQLGCFMLRLTPIEVLNAVTINAAYSVNRQERVGSLTVGKEADIAIFDAPNIDYPFYFFATNLIHQVYKKGQLTVDRGRIL

SEQ ID NO: 8363 - DNA, 2028 bp, Streptococcus pyogenes
atgtcattttacagtgaaactgacatagctgccgctatgactgttaagttagacgatgttttaccggaaaagactgtgtttgaagaaggtatccgaagagcaccagacagaggttttcgattgacccaggctcagaccgaaatcgccttgaaaaatgccctacgctatgtacctacgaagttccacgaagaagtcattccagaatttttggaagaactcaaaacccgtggccgtatttatggctaccgctttagaccaaaagaccgcatttacggcaaacccattgacgagtacaagggaaattgtacagctgccaaggccatgcaggtcatgattgacaataacttgagttttgaaattgccttgtacccttacgaactagtcacatatggagaaactggttctgtttgtgccaactggatgcaatattgtttgattaaaaaatacctagaagtcatgactgatgaacaaaccttggtggttgagtctggtcatccagttggtcttttcaaatccaaacctgaagcgcctcgtgtgattattactaatggccttttggtgggtgaatacgacaacatgaaagactgggaaatcgctgaagagatgggtgtcaccaactatggtcaaatgaccgcaggtggttggatgtatattggcccacaaggaatcgttcatggaacgtttaataccctcttaaatgctggtcgtctcaaacttggagtggctgatgacggtgatttgaccggtaaactcttcatctcatctggtctaggaggcatgagtggggcacaaggtaaggctgctgaaattgctaaagcagttgccattattgctgaagttgaccaatctcggattaaaacccgtcattctcaaggctggatcagtcaaattgccgaaagccctgaagaagctctgcaattagcccaaaaagccatagatgctaaggagtccacttcgattgcttaccatggtaatatcgttgatcttttagagtacgtcaatgacaagcagattcatgttgatcttttgtctgaccaaacctcttgtcacaacgtttatgacggtggctactgcccagtaggtattagctttgacgaaagaacccggctcttggcagaagataaagataccttccaccaaatggttgatgataccttggcacggcattttgaagctattaagacgttaactgaaaatggcacctatttctttgactacggcaatgcctttatgaagtctgtttacgactctggtattacagaaatttctaagaatggtcgtaacgacaaagacggatttatctggccatcctatgtggaagatatcatgggacctatgctttttgactatggctatggacctttccgttgggtctgcttgagtggtaatcacgatgacttggtggccactgacaaagctgccatggaagctatcgatcctgaccgccgctatcaagaccgtgataactacaactggattcgtgatgctgagaaaaatcaactcgtagttggtacccaagcccggatcctttaccaagactgtatcggtcgtgtgactatcgcccttaaatttaatgaattggtccgcaaaggcaagattggtcctgtcatgattggtcgtgaccaccatgacgtgtctggtaccgactcaccatttcgtgaaacctcaaacattaaagacggttccaatgtgacctgtgatatggcggtgcaatgttacgctggtaacgctgcgcgtggtatgagtttagtggctcttcataacggtggcggaactggtattggtaaagccatcaatggtggtttcggacttgttttagatggcagcgaacgcattgatgagattattaaatctgctattgcttgggacaccatgggtggtgttgctcgtcgcaattgggctcgcaatgagcacgctattgaaaccgctattgagtataatcgtctccatgcaggtactgatcacatcactatcccatacttggctgatgatgaccttgtgacttcagcagtagatcaattatttcac

SEQ ID NO: 8364 - protein, 676 aa, Streptococcus pyogenes
MSFYSETDIAAAMTVKLDDVLPEKTVFEEGIRRAPDRGFRLTQAQTEIALKNALRYVPTKFHEEVIPEFLEELKTRGRIYGYRFRPKDRIYGKPIDEYKGNCTAAKAMQVMIDNNLSFEIALYPYELVTYGETGSVCANWMQYCLIKKYLEVMTDEQTLVVESGHPVGLFKSKPEAPRVIITNGLLVGEYDNMKDWEIAEEMGVTNYGQMTAGGWMYIGPQGIVHGTFNTLLNAGRLKLGVADDGDLTGKLFISSGLGGMSGAQGKAAEIAKAVAIIAEVDQSRIKTRHSQGWISQIAESPEEALQLAQKAIDAKESTSIAYHGNIVDLLEYVNDKQIHVDLLSDQTSCHNVYDGGYCPVGISFDERTRLLAEDKDTFHQMVDDTLARHFEAIKTLTENGTYFFDYGNAFMKSVYDSGITEISKNGRNDKDGFIWPSYVEDIMGPMLFDYGYGPFRWVCLSGNHDDLVATDKAAMEAIDPDRRYQDRDNYNWIRDAEKNQLVVGTQARILYQDCIGRVTIALKFNELVRKGKIGPVMIGRDHHDVSGTDSPFRETSNIKDGSNVTCDMAVQCYAGNAARGMSLVALHNGGGTGIGKAINGGFGLVLDGSERIDEIIKSAIAWDTMGGVARRNWARNEHAIETAIEYNRLHAGTDHITIPYLADDDLVTSAVDQLFH

SEQ ID NO: 8365 - DNA, 897 bp, Streptococcus pyogenes
atggcgaaaattgttgaatgtattcccaacttctcagaaggccaaaatcaggctgttatcgatggtttggtagcgacggccaaaagtattcctggagtgacccttctcgactactcttctgatgcgagccacaaccggagcgtgtttaccttggttggagatgaccagtctattcaagaagcagctttccaactggtgaaatacgcttctgaaaacattgatatgaccaaacatcatggcgaacaccctcgtatgggagcaaccgatgtctgcccattcgttccgatcaaagacatcactacacaagaatgtgttgagatttccaaacaagtcgcagaacggattaaccgtgaacttggaatcccaatcttcctttatgaagattctgccacacgcccagaacgtcaaaacctggccaaagtccgtaaaggacaattcgaaggcatgccagaaaaactgttggaagaggattgggcacctgactacggagatcgtaagattcacccaactgctggggtaactgccgttggtgctcgcatgccattggttgctttcaatgttaatttggatactgacaatatcgacattgctcataaaattgcgaaaattatccgcggttcaggtggtggctacaaatattgtaaggctatcggtgtcatgttagaagaccgtcatattgcccaagtttccatgaacatggttaactttgaaaaatgttctctttaccgtacttttgaaaccatcaaatttgaagcgcgtcgctacggtgtgaatgttattggttctgaagtcatcggcttagcgccagccaaggccttaatcgatgtggctgaatactacttacaagttgaggactttgactaccataaacagattcttgaaaaccatttgctaggt

SEQ ID NO: 8366 - protein, 299 aa, Streptococcus pyogenes
MAKIVECIPNFSEGQNQAVIDGLVATAKSIPGVTLLDYSSDASHNRSVFTLVGDDQSIQEAAFQLVKYASENIDMTKHHGEHPRMGATDVCPFVPIKDITTQECVEISKQVAERINRELGIPIFLYEDSATRPERQNLAKVRKGQFEGMPEKLLEEDWAPDYGDRKIHPTAGVTAVGARMPLVAFNVNLDTDNIDIAHKIAKIIRGSGGGYKYCKAIGVMLEDRHIAQVSMNMVNFEKCSLYRTFETIKFEARRYGVNVIGSEVIGLAPAKALIDVAEYYLQVEDFDYHKQILENHLLG

SEQ ID NO: 8367 - DNA, 624 bp, Streptococcus pyogenes
atgggtttagttgatttaagcttaacagatttcgctaaagtccttggctcagatgcccctgctccaggtggtggttctgctgctgctctctctggcgctaatggcatttccttaaccaagatggtctgtgaattgactcttggtaagaaaaaatacgctgactaccaagatattattacagagatccatgctaaaagcaccgctctacaagctagcttgcttgcagccattgacaaagataccgaagccttcaacctggtttctgccgtttttgatatgccaaaagagactgacgaagacaaggctgctagacgaactgccatgcaaaaggccttgaaaacagctgcacaatcaccttttgagatgatgaccctcatggtcgaagcacttgagatcactgcaacagctgtcggtaagtctaatacaaatgctgctagcgacttaggagttgctgctttaaacttaaaagcaggtttacaaggcgcttggttgaatgttttgattaatctgtctggcatcaaagatgaagactttgttaccgactatcgccaaaaaggacaagccttactagacaagggctgtcatttggcagatgacatctacacgaaaattctcgatattgtt

SEQ ID NO: 8368 - protein, 208 aa, Streptococcus pyogenes
MGLVDLSLTDFAKVLGSDAPAPGGGSAAALSGANGISLTKMVCELTLGKKKYADYQDIITEIHAKSTALQASLLAAIDKDTEAFNLVSAVFDMPKETDEDKAARRTAMQKALKTAAQSPFEMMTLMVEALEITATAVGKSNTNAASDLGVAALNLKAGLQGAWLNVLINLSGIKDEDFVTDYRQKGQALLDKGCHLADDIYTKILDIV

SEQ ID NO: 8369 - DNA, 615 bp, Streptococcus pyogenes
ttggaaataaggagagaacaaatgacaaaggtaaccatcaaagcgccctctgattacctccaaactgactggtctggcggtgaaaccaaccaattgttcctttatcccgaagatggagattacaaaaagagagaattctcttatcgtctctcaactgcaactgtagccctacgacagacaacctttacccgacttgatggctatcacaggattctaatgagcctagacaagcccatcacattaagtgatttgagtcatgctaaagagatttccctagctccttttcaaccctatgcgtttgaaggcgataccagaatcgtcagtcgtggaacctgccaagacatcaatttaatgtatgatgaccaataccaagggcaattattacccgtctggtctgacacaccatttgaggcacctaaagcggactgtcaactactttatgccctaagcaaactgacttattctgtgaccaatcaggcgaatcaagagcttgaagccaatcacttgttggtaaccgagcaggaggccagcctttcagatctaaaagtttgcctcaatcaaacaagccccgcccaaactccagtagctgtttgggcaggcttatggtataagact

SEQ ID NO: 8370 - protein, 205 aa, Streptococcus pyogenes
LEIRREQMTKVTIKAPSDYLQTDWSGGETNQLFLYPEDGDYKKREFSYRLSTATVALRQTTFTRLDGYHRILMSLDKPITLSDLSHAKEISLAPFQPYAFEGDTRIVSRGTCQDINLMYDDQYQGQLLPVWSDTPFEAPKADCQLLYALSKLTYSVTNQANQELEANHLLVTEQEASLSDLKVCLNQTSPAQTPVAVWAGLWYKT

SEQ ID NO: 8371 - DNA, 1653 bp, Streptococcus pyogenes
ttgtttatggtgcagttggtgtcatcattgcaagtagtgtgtactaccttatgcacggacgtaaccaccaaatggaccaaatgccccctaaggaacaaatctaggagaaaaactatgacaagagtgattaatttagatggcgaaagccttactatcgaagacgtgattgcgattgctcgccaaggcgtagcctgtcacattgatgatagtgctattgaagctgtgaatgcctctcgtaaaattgttgatgacattgtcagtgaaaaacgggtggtttacggggtgaccaccggttttggatccctttgtaacgtgagcatctcaccagaagatacagttcaactccaagaaaatttgattcgtacccatgctagtggatttggtgacccattgccagaagatgccgtgagagctatcatgctgatccgtatcaattcactagtcaaagggtattctggtattcgtctatccaccattgaaaaactgttggaactgctcaataaaggggttcatccttacattcctgaaaaagggtctctaggggcttcaggagatttggcgccgcttgctcacatggtgcttcctatgcttggtctagggaaagcttactacaaaggagagcttctttctggtcaagaagctcttgataaagctggtattgacaagatttctttagccgctaaagaaggactcgcccttatcaacggaacaactgttctcactgcagtcggtgcccttgcaacctatgacgccattcaattattgaaactgtcagacctagctggtgccctatcccttgaagtgcataacgggattactagtccatttgaagaaaaccttcacaccattcgcccacaaagcggccagttggcaacagcccgcaatatccgaaacctccttgaaggcagccaaaacacaaccgtagctactcaatctcgtgtgcaagacccttacaccttgcgctgcatgcctcaaattcatggggctagcaaagacagtatcgcctatgtcaaatccaaagttgacattgaaatcaattctgtcacagataatccaattatctgtaaagatggccacgttatttcaggaggtaacttccacggagaaccaatggcacagccatttgacttcttaggcatcgccatttctgaaattggaaatgtttctgaacgccgcgtggaacgtttggtcaatagccagctcagcaaattgccatccttccttgtcaaatacccaggtctcaattcaggctttatgattacccagtacgcctgtgcctctcttgcttctgaaaacaaggttttggcacatccagccagtgtggattctatcccatcttgtgagaaccaagaagactttgtcagcatgggcaccaccgctgctcgcaaggcctttgaaatccttaaaaattctcgccgcatcgtggctactgaaatcatggcagcctgccaagcccttgatctcaaacctgaaaatcatgaactaggtaaagggactaaggttgcctacgatctcttccgcaaggaagtcaactttatcgaacacgataaacacatcgaaatctacgatgaactaaacaaggcatcagcagtcattgaagacccaagcttcctcgaagcggttgagcaggcagttgagttgagtatccaattt

SEQ ID NO: 8372 - protein, 551 aa, Streptococcus pyogenes
LFMVQLVSSLQVVCTTLCTDVTTKWTKCPLRNKSRRKTMTRVINLDGESLTIEDVIAIARQGVACHIDDSAIEAVNASRKIVDDIVSEKRVVYGVTTGFGSLCNVSISPEDTVQLQENLIRTHASGFGDPLPEDAVRAIMLIRINSLVKGYSGIRLSTIEKLLELLNKGVHPYIPEKGSLGASGDLAPLAHMVLPMLGLGKAYYKGELLSGQEALDKAGIDKISLAAKEGLALINGTTVLTAVGALATYDAIQLLKLSDLAGALSLEVHNGITSPFEENLHTIRPQSGQLATARNIRNLLEGSQNTTVATQSRVQDPYTLRCMPQIHGASKDSIAYVKSKVDIEINSVTDNPIICKDGHVISGGNFHGEPMAQPFDFLGIAISEIGNVSERRVERLVNSQLSKLPSFLVKYPGLNSGFMITQYACASLASENKVLAHPASVDSIPSCENQEDFVSMGTTAARKAFEILKNSRRIVATEIMAACQALDLKPENHELGKGTKVAYDLFRKEVNFIEHDKHIEIYDELNKASAVIEDPSFLEAVEQAVELSIQF

SEQ ID NO: 8373 - DNA, 993 bp, Streptococcus pyogenes
atgacgcgcatgctagaagattactacccatccaccactagctattatcatggtgggatcgacgatgacttatatactgccaaatggggcatggtcatgactttccttgaccttaacgacagctcactaaccccatttgaagggacacattttgccttgattggctttaaaagtgataagggggtttatatcaataatggtcgtgtcggagcggtcgaaagtccagctgccatacgaacccagctcgccaaattcccttggcatttaggaaaccaagttatggtttacgatgtgggtaacattgacggccccaatcgctctttggaacaactgcaaaacagtttaagcaaagccatcaaacggatgtgtgacctcaatctcaaacccatcgtcttaggaggtggccatgaaaccgcctacggccactacttaggcctacgccaaagcctatccccaagtgatgacctagctgtcatcaatatggacgcccactttgatttaaggccttacgaccaaacaggccctaattcagggacaggctttcgacagatgtttgacgatgcggttgctgacaaacgcctctttaaatacttcgttttaggcattcaagaacataataacaaccttttcctatttgactttgtggcaaaatccaagggcattcaatttttaacaggtcaagacatctaccaaatgggccatcaaaaggtctgccgagccattgaccgtttcttagaagggcaagaaagggtctacctgaccattgacatggattgtttctcagttggtgctgcgcctggggttagtgctatccagtccctcggtgttgacccaaatcttgccgtcttagttttgcaacacattgcagctagcggaaaattagttggctttgatgtggttgaggtttcaccaccacacgatattgataaccacaccgccaatttagcagccacctttatcttttacctcgtacagattatggcacaacatagc

SEQ ID NO: 8374 - protein, 331 aa, Streptococcus pyogenes
MTRMLEDYYPSTTSYYHGGIDDDLYTAKWGMVMTFLDLNDSSLTPFEGTHFALIGFKSDKGVYINNGRVGAVESPAAIRTQLAKFPWHLGNQVMVYDVGNIDGPNRSLEQLQNSLSKAIKRMCDLNLKPIVLGGGHETAYGHYLGLRQSLSPSDDLAVINMDAHFDLRPYDQTGPNSGTGFRQMFDDAVADKRLFKYFVLGIQEHNNNLFLFDFVAKSKGIQFLTGQDIYQMGHQKVCRAIDRFLEGQERVYLTIDMDCFSVGAAPGVSAIQSLGVDPNLAVLVLQHIAASGKLVGFDVVEVSPPHDIDNHTANLAATFIFYLVQIMAQHS

SEQ ID NO: 8375 - DNA, 3072 bp, Streptococcus pyogenes
atgacgaagggtattcgatttcaattgcttggcagtccccacatttttcttgatgacaaagaacaattttttgcctttgccaaagcaaatgctctcctttattacttagtggttaatggatctgttagccgcgaggtggcggcgagtctactttgggaaaataagaacacgcaaacagcgaaaaagaatttacgaaacgctatctaccaggtcaataaagtcttgcaagctgatgtgattatttgtcccaatcgcaacctgctggttttgaataaaacacttgatatcaaaacagatattaacctttttctggctgatccgctagctcacttagaactctaccaaggggagtttttgcagggcttttaccttaaaagtggtgaggaatttgatctttgggtttcaaaaatgcgtatgcagtatgaacaggtatacctaaaagcgtgttaccaaaaaattgaagaaaagctctctttagatgccattgaagatgtcgaggaacatttaaaacagcttattgaacgtgatgaatttgaagagaaaaattatcagctcttgatgaggctttatcagcaggggaattgtcctggtaaggtcatcgaaacttattatcagttggctaatgtgttggataaggagctagggattcagccaagtttgcaaagccaacagatttatcaggaagtggtcgctaaagatcgtaatgaacgcaaaatcaagcattttttgcgcaacagtaatcattttttggggcggattgatgagattaagcagctggaaaattattttgccaactgtttggcctgccaagaggtaggagctctgctcttaattggtgatacagggattgggaaacgaaccctagccagacaggtcttagccaatcaaacccaaacgtttcaaattgtcacagctaaatgttttcgtgaagaggctatggattccttattgccttggcgtaatatcttagatggcctgggagatttggtgattcaaaaccgcttattgaccaccaaagcttggaaggctgctcttaaacgctgttttcctgtggcaaccatttttcaagaagataacaaccaaccctttatcaaggaccacaccagcttgttggtttcctttattgttgatattttacaacatttggcagaaatcaaggcgctggtaatccttattgaggattgtcactggatggatgaggatagtttgaccttgttgcaacgggtcatgaatcaattggtccactatccgattgcttttgtcttgaccaagcatctaggaacgactcctgagctcggtctttgtttgaatgctttgatgagtcaagggcgtttagaaagcatttgtttggagccttttaatcggcaagaaagtttggtttatattaacagtcaactgggtagtcagccagtgacggcagaagaaatggagcacctctatcaagccagccaaggcaaccctttctttttgtcagaatacactcaggccctactgcgtcacgaaaaatttgtgcctttaacgcctgccattaaggctaagttgggtcttaaactagctaatctaagtagtcgtgatgacgcattgttaaactatttgtcttgttgtcggaggcctatccctctaaataccctcgctcaattgatgttactgcctttagaagaagtgatcgagatggtggataatctggggcactactatattttggtagaagaaagcgtaggagaggaagtgttgatttcatttcgtcagcggattattcaactctatagttatgaccgtttatctttgtcaaaaaggcgtttattgcacggacaaattgccaaacggttagaagatttactgcctattttgacaccaagccctcacttattagatgacattgcttaccattatcaggaatcacggcaggtgattaaggctttggaatacaaccttaactatctagatgctaccttgccatttcagcatgagctgtttcccatttattcaaagagtattggctccttggaaaagtcagatcgtgaccatcaacgcttaatggaagagcagtttgataagattcgtcaaagcattgcggatttggaactgacctatgataataaccgtgatttccagcagttgcttattcgtttttcttaccttgaaggccgttatgatattcgaacagggaggtatcaagaagggattaaacacattcaaaaggtcatcgctttggcaaccgagctaaaacagccctccttcttgctagaaggctatcgccagttaattcattactgtatccaagtggaaaacaagccagaaatgcgttattacactagtctttcattggaggcagcggttgctgctaatcattttgaggccattgcgattagtttgcggttaaacggtctctatcatttgattattggggagttaaatgaggcagagcgtctgcttcaacagtcgattgacttcttcaaggtgacgccaggcttgcaagctaactatgcgattcagattgctgctgccttagattatttgggggagattgcccagattcgctatcagtttgaaaaggccgttgcttatcaaaaacaagccattgccttgaccgaaaacaagccagctgagttatcggcgagtattttttatattggattagggatttcctacttttatttagctgattttgaacaagctgagcaaatcttgagtttggctaaggaagctttggtcaatcatagttatccttggaaagaaacgcaacttgaaatttacctggctatgattcaatggaaaaagggcaattatcagccagccttgaccctacttgattacagagaaaccttgatgtctaggtatcgcaatccgcgtgataagggcttggttttctatttgatggctgtggtcaagtaccaattgatatttcaaggagctaccctaagtcagcaggaaaaagaaatggcagaccacctgttgtcagaatcctttgagtattattatgagattgctagtactaacctcaacccttaccgagattgtcatttggtgagtgagttgaacgatttgcgtcaacaattatctgctaaaagc

SEQ ID NO: 8376 - protein, 1024 aa, Streptococcus pyogenes
MTKGIRFQLLGSPHIFLDDKEQFFAFAKANALLYYLVVNGSVSREVAASLLWENKNTQTAKKNLRNAIYQVNKVLQADVIICPNRNLLVLNKTLDIKTDINLFLADPLAHLELYQGEFLQGFYLKSGEEFDLWVSKMRMQYEQVYLKACYQKIEEKLSLDAIEDVEEHLKQLIERDEFEEKNYQLLMRLYQQGNCPGKVIETYYQLANVLDKELGIQPSLQSQQIYQEVVAKDRNERKIKHFLRNSNHFLGRIDEIKQLENYFANCLACQEVGALLLIGDTGIGKRTLARQVLANQTQTFQIVTAKCFREEAMDSLLPWRNILDGLGDLVIQNRLLTTKAWKAALKRCFPVATIFQEDNNQPFIKDHTSLLVSFIVDILQHLAEIKALVILIEDCHWMDEDSLTLLQRVMNQLVHYPIAFVLTKHLGTTPELGLCLNALMSQGRLESICLEPFNRQESLVYINSQLGSQPVTAEEMEHLYQASQGNPFFLSEYTQALLRHEKFVPLTPAIKAKLGLKLANLSSRDDALLNYLSCCRRPIPLNTLAQLMLLPLEEVIEMVDNLGHYYILVEESVGEEVLISFRQRIIQLYSYDRLSLSKRRLLHGQIAKRLEDLLPILTPSPHLLDDIAYHYQESRQVIKALEYNLNYLDATLPFQHELFPIYSKSIGSLEKSDRDHQRLMEEQFDKIRQSIADLELTYDNNRDFQQLLIRFSYLEGRYDIRTGRYQEGIKHIQKVIALATELKQPSFLLEGYRQLIHYCIQVENKPEMRYYTSLSLEAAVAANHFEAIAISLRLNGLYHLIIGELNEAERLLQQSIDFFKVTPGLQANYAIQIAAALDYLGEIAQIRYQFEKAVAYQKQAIALTENKPAELSASIFYIGLGISYFYLADFEQAEQILSLAKEALVNHSYPWKETQLEIYLAMIQWKKGNYQPALTLLDYRETLMSRYRNPRDKGLVFYLMAVVKYQLIFQGATLSQQEKEMADHLLSESFEYYYEIASTNLNPYRDCHLVSELNDLRQQLSAKS

SEQ ID NO: 8377 - DNA, 108 bp, Streptococcus pyogenes
ttgtctacaagttgtttgtgccaaaaaagccattattttggtaaaataaaaggtgttgtctgtaaaaaaatagacaaatggaaaggtaatttaccctatgacaaagta

SEQ ID NO: 8378 - protein, 36 aa, Streptococcus pyogenes
LSTSCLCQKSHYFGKIKGVVCKKIDKWKGNLPYDKV

SEQ ID NO: 8379 - DNA, 129 bp, Streptococcus pyogenes
gtgcacacttacaataacacagttgataatggggaaactcagagtcaagaaaaagaaaagcaagccttgcattttgcaaggcttttttctgtctttattttggtctgcgccgagcaaaatctaaaaatt

SEQ ID NO: 8380 - protein, 43 aa, Streptococcus pyogenes
VHTYNNTVDNGETQSQEKEKQALHFARLFSVFILVCAEQNLKI

SEQ ID NO: 8381 - DNA, 126 bp, Streptococcus pyogenes
atgatattatcacattctttacagtttgataaaattactttttttctacaaaaagacttgcgctcatctcacgaatatgataatataatatcaagtctgtttgagaaaacagaagctcaggtcaag

SEQ ID NO: 8382 - protein, 42 aa, Streptococcus pyogenes
MILSHSLQFDKITFFLQKDLRSSHEYDNIISSLFEKTEAQVK

SEQ ID NO: 8383 - DNA, 252 bp, Streptococcus pyogenes
ttgctaaaggggaccttgcgttttgggcagttgaagtcctcaataggttcggtcagtcaaaaggtacttactgcccaattaagggctatggaagcagacggattggttcatcgggaagtgtatgcagaagtgccacctcgggtggagtattccttaacagaaactgggttgagcttagctcctgttattgaagcgatgtcggattggggccaaacttaccaagaaaaacatgccgatttatttgaagaaggc

SEQ ID NO: 8384 - protein, 84 aa, Streptococcus pyogenes
LLKGTLRFGQLKSSIGSVSQKVLTAQLRAMEADGLVHREVYAEVPPRVEYSLTETGLSLAPVIEAMSDWGQTYQEKHADLFEEG

SEQ ID NO: 8385 - DNA, 141 bp, Streptococcus pyogenes
atgtctggaggtggtgcttatgtatgtaagtcacagaaaccaaaagaaaggagacgacaaggtttgtcagtttatgaaacgcttactttgatgattgcctttggtactctgatagtagctatcatgaataacaagaacaaa

SEQ ID NO: 8386 - protein, 47 aa, Streptococcus pyogenes
MSGGGAYVCKSQKPKERRRQGLSVYETLTLMIAFGTLIVAIMNNKNK

SEQ ID NO: 8387 - DNA, 159 bp, Streptococcus pyogenes
atgaataaaaataattttatgcaagaatttataatgctttatgcaaccactgaccacgcgcagacagtttttttaattaccgccgacaaaaagttcagaaaagttcagattatacctcaatttttgtcaagttttgagggtcttgtaattaaagaaaat

SEQ ID NO: 8388 - protein, 53 aa, Streptococcus pyogenes
MNKNNFMQEFIMLYATTDHAQTVFLITADKKFRKVQIIPQFLSSFEGLVIKEN

SEQ ID NO: 8389 - DNA, 204 bp, Streptococcus pyogenes
atgacgcaaattacactaaaagctgcccgaatcaacgctggttacactttaaaacaagtagctggagcggttgggaaaaatccccaaactatttcaaagtacgaaaaagatagctccgatatttctttaggactattgcaaaaattatcatctttgtacggtgtcactattgataacctttttttaggtaaaaaagtacgaaaa

SEQ ID NO: 8390 - protein, 68 aa, Streptococcus pyogenes
MTQITLKAARINAGYTLKQVAGAVGKNPQTISKYEKDSSDISLGLLQKLSSLYGVTIDNLFLGKKVRK

SEQ ID NO: 8391 - DNA, 270 bp, Streptococcus pyogenes
gtgatgcgcgtggataaaggagaaatgattatgaaagcaacaacttacaaagagttgaagaaatggattgatgaaggtgttgatttagctgagctagcacagggttacgctggcaaagtaccaaatgcagatcgcgaacagtttgaagcaatcacacaggaaattttcaacgtattggaaggcgtatcgctcatgcttgatgacaaagtgctaatctataatcgcaaagcagagcaaaagcgtttgaatgacattgaacaaggcaattat

SEQ ID NO: 8392 - protein, 90 aa, Streptococcus pyogenes
VMRVDKGEMIMKATTYKELKKWIDEGVDLAELAQGYAGKVPNADREQFEAITQEIFNVLEGVSLMLDDKVLIYNRKAEQKRLNDIEQGNY

SEQ ID NO: 8393 - DNA, 339 bp, Streptococcus pyogenes
atgaaatatagagtagaaacaaatcctttttcaaaagatagatacaatcctgaacagctagaaatgttcaaaaatcgccaactcagcaaagataaagctgaagtctttttcactcgactatataaccaacatattgcttgggtaattattgctaacgttatgacagagtacgtcattaaattcagaaaaagtgccaccagctttgaagaagcatgggacgctttagactatcaacgaaccacagagattgtctttagagccgttaacggtttaccttgttcagagaaagactcaggggaactagaaacttatttaagtgaggaacagcatgaaaagcat

SEQ ID NO: 8394 - protein, 113 aa, Streptococcus pyogenes
MKYRVETNPFSKDRYNPEQLEMFKNRQLSKDKAEVFFTRLYNQHIAWVIIANVMTEYVIKFRKSATSFEEAWDALDYQRTTEIVFRAVNGLPCSEKDSGELETYLSEEQHEKH

SEQ ID NO: 8395 - DNA, 231 bp, Streptococcus pyogenes
gtgaggaacagcatgaaaagcattaaagaattaaatgaaatcgctaacgacattttggtagattatgaaggtctttgcggtcaacttatggatattctagatgtcctagatttggctgctcaagaatatagtaaggaaacaactagtgcaattataaacacgagttgtagcgctttgaagtgccttatttctgaccatgataagacgacacgtaaatacagaaaggagttg

SEQ ID NO: 8396 - protein, 77 aa, Streptococcus pyogenes
VRNSMKSIKELNEIANDILVDYEGLCGQLMDILDVLDLAAQEYSKETTSAIINTSCSALKCLISDHDKTTRKYRKEL

SEQ ID NO: 8397 - DNA, 189 bp, Streptococcus pyogenes
atgcaagaacttaacctcacaccaacacagacgcttattctattctttgttttaggtctcttagggcttcttcttagccgttctaagtcattaatagacattgatttaccagaagatacccaagtccctaaaccacgtcagaacgcaaactatggggcttatattcaatcacagaaccattattacaat

SEQ ID NO: 8398 - protein, 63 aa, Streptococcus pyogenes
MQELNLTPTQTLILFFVLGLLGLLLSRSKSLIDIDLPEDTQVPKPRQNANYGAYIQSQNHYYN

SEQ ID NO: 8399 - DNA, 327 bp, Streptococcus pyogenes
atgacactaccagagaattatagacgtgtccttaatctgatcaaggttggagcagacaaccccattacaggggcagagattagcttaatactgaaacttgaagaacgctccgtccaaagtatcatcagtagcttaatcacgcgctataacgtccctattatcggcattagacacggattcaatcgtgggtactttatcccagctaacaaagaagaattactaggtggtgctaaagccttttataatcaagtacaaaaggaacaggaacgcctaagtgtgttattgaatgccgatttaaccagttataaggaattactcaaaggaggt

SEQ ID NO: 8400 - protein, 109 aa, Streptococcus pyogenes
MTLPENYRRVLNLIKVGADNPITGAEISLILKLEERSVQSIISSLITRYNVPIIGIRHGFNRGYFIPANKEELLGGAKAFYNQVQKEQERLSVLLNADLTSYKELLKGG

SEQ ID NO: 8401 - DNA, 270 bp, Streptococcus pyogenes
atgaacgtatttagtcaagattatgaagccaaactcttagaacaaaacctgaccgcttttaatcactttttggaagcctaccagaaacctaaaccaagagttttagggttgatcacggccgaacaagtcaaagaggaattaaatatcaaaggtaaaaccctaaaacggtgggaaaatgctgggttaagacgataccaaccaccactagaagacaccaggaaacattattacaaggtcagtgatattcttatctttttgggggtaaatgtg

SEQ ID NO: 8402 - protein, 90 aa, Streptococcus pyogenes
MNVFSQDYEAKLLEQNLTAFNHFLEAYQKPKPRVLGLITAEQVKEELNIKGKTLKRWENAGLRRYQPPLEDTRKHYYKVSDILIFLGVNV

SEQ ID NO: 8403 - DNA, 855 bp, Streptococcus pyogenes
atggctatttatgaagcaagaggctttagctcttatttgtacccctacaaaggacctttagaaccatttgactatattgctcagtttagacctttgaaaccgcctgaggatattgatattgaagaatacaagcgaacacaagccccctactgcctaagtggcaaggtcacagcagagaaaaacggtagctataagcgcaataatgctagtttagtttatcgcgatttgatttttcttgactatgacgagatagaaacaggcgtcaacctacctaaaatcgtttctcagacgctttgggagtatagttatattatttatccaacgattaaacacacccccgagaagccccgttatcgccttgtcatgaagcctagtgacgtgatgactgaagcaacttataaacaagtggtcaaggagatagccgataagattggactgccttttgatttagctagtcttacctggtcgcaattacaaggcttacccgttacaacaggcgacccagaggactatcagcgctatgtgaaccatggtcttgattatcctgttcctaaaaatggtagcacgccaaacagacaagttgttactacttacacgccacgccctagaagtcagcgttctattaccatgagggtcatagataccttgtttaatggttttggaaacgaaggcgggcgcaacgtggccttaactaaatttgttggcttgctatttaataaatgggtggattgtgatttagagacggcttatgagctggtacaaatagctaacagcgtgacaactaagccactacccattgatgagatagataggacgtttaccagcattgctaaagcagaatacagaaagagaggg

SEQ ID NO: 8404 - protein, 285 aa, Streptococcus pyogenes
MAIYEARGFSSYLYPYKGPLEPFDYIAQFRPLKPPEDIDIEEYKRTQAPYCLSGKVTAEKNGSYKRNNASLVYRDLIFLDYDEIETGVNLPKIVSQTLWEYSYIIYPTIKHTPEKPRYRLVMKPSDVMTEATYKQVVKEIADKIGLPFDLASLTWSQLQGLPVTTGDPEDYQRYVNHGLDYPVPKNGSTPNRQVVTTYTPRPRSQRSITMRVIDTLFNGFGNEGGRNVALTKFVGLLFNKWVDCDLETAYELVQIANSVTTKPLPIDEIDRTFTSIAKAEYRKRG

SEQ ID NO: 8405 - DNA, 1686 bp, Streptococcus pyogenes
ttgctaaagcagaatacagaaagagagggtagaaccatagagcaagaagatttgaaaaacttagaaaatgaaatcactgaagcgcgtgagaatgaagataaatatttcagcactttcaaaggtgttagaggtcagcttatcaaggaatgtcaagagatgaaagatgaagctttcaagattgcctatgatggcgttatggctgatagcaaacaccttgagaacgtaaaagcgggtagattgaccgaggtacaacatgaagaattagctaaagaaaaaggacaagaagccagtgaaaaagctttacctaaaacacctttgggcgtggctattatgctcaaacactatctccgctttattcgagttaaacctgaagctcaaggacaaaaagccccactttacttttttcatcctgatcacggggtttggctagaagataatgagtttttacaagatctcatttcagttattttcccaaacgcgactgaaaaacaagcttttgacacactttacaaaattgctaggcaaagtcaactgaaggagattcaaagagaatatacagttatcggaaatcagctctacaattataaaactggtcaatttgaagaattaactccagatataaccgtcactcgtaaaattaagacgggttacaataagaaagctaaagaacccacaataaagggctggaaacctactgcttggctcttagaattgtttgacggtgacgccgaactttataaccttgctattcagattattaaagctagcatcacaggtcaatccttacagaaaatcttctggttattcggtgaaggtgggacaggaaaagggacttttcagcaattactcattaatttagtgggtatggataacgtggcaagccttaaaataacagagctagcaaaaagtcgctttactacttcgatacttctagggaaatccattgtaattggtgatgatattcaaaaagacgcggttatcaaagatacgtctgatatatttagtttagccaccggtgacattatgacgattgaggacaaggggaaacgcccatatagtatccgtttaaacatgactgtggtacaatcttccaacggtttaccacggatgaacggtgataagtccgccattgatagacgctttaggattttaccttttaccaaagtatttaaaggaaagcccaacaaagctatcagaaatgattatattaatcgcaaagaagttcttgagtacttacttaagctagcgattgaaacaccaatcactgacattaatccaaaagcatctattgagatactggaagaacaccataaagagatgaacccagttattgacttcgtttctaagttcttcacggatgagctcaccagcgaatttattcctaatagctttgtctatcatgtttggaaaggctttttagaatactatgacatcaaacaaataaaatcagaaagagggttacataaagaaatcaaaagcaatcttcctgaagggtttgaagcaggccagaaggtcataccagtaggccgacagctccatacaggtttttatcctaaagaagatctacctctgtttgctagcgcatcttacgctaacggtagagcatcacccgaaaaaaggaaaaagccaaagaatgaacgtggatattacaatcattggccgacgcacaaaaaacaaaagaaaact

SEQ ID NO: 8406 - protein, 562 aa, Streptococcus pyogenes
LLKQNTEREGRTIEQEDLKNLENEITEARENEDKYFSTFKGVRGQLIKECQEMKDEAFKIAYDGVMADSKHLENVKAGRLTEVQHEELAKEKGQEASEKALPKTPLGVAIMLKHYLRFIRVKPEAQGQKAPLYFFHPDHGVWLEDNEFLQDLISVIFPNATEKQAFDTLYKIARQSQLKEIQREYTVIGNQLYNYKTGQFEELTPDITVTRKIKTGYNKKAKEPTIKGWKPTAWLLELFDGDAELYNLAIQIIKASITGQSLQKIFWLFGEGGTGKGTFQQLLINLVGMDNVASLKITELAKSRFTTSILLGKSIVIGDDIQKDAVIKDTSDIFSLATGDIMTIEDKGKRPYSIRLNMTVVQSSNGLPRMNGDKSAIDRRFRILPFTKVFKGKPNKAIRNDYINRKEVLEYLLKLAIETPITDINPKASIEILEEHHKEMNPVIDFVSKFFTDELTSEFIPNSFVYHVWKGFLEYYDIKQIKSERGLHKEIKSNLPEGFEAGQKVIPVGRQLHTGFYPKEDLPLFASASYANGRASPEKRKKPKNERGYYNHWPTHKKQKKT

SEQ ID NO: 8407 - DNA, 171 bp, Streptococcus pyogenes
atgaaaatcaaactattttatcaaaaacacaatgaatcactagatgattttgaatatcgggtcaatctctttaccctatcggtatctgtgatagacatcaagttttcagaagccacttatggcaactatgaagacatgagtaccacaacttctttattggtcttgtacagg

SEQ ID NO: 8408 - protein, 57 aa, Streptococcus pyogenes
MKIKLFYQKHNESLDDFEYRVNLFTLSVSVIDIKFSEATYGNYEDMSTTTSLLVLYR

SEQ ID NO: 8409 - DNA, 171 bp, Streptococcus pyogenes
atgaaactaaaattacacacacgaggtggtaacaccatcaccatacaaggagaccgcaccctttataatgagttgatcaaatatcttttatctggccaacagccaaactgggtagcatctccttctgccatcatcaatttatcagacattatagcaatcacaaaagagaaa

SEQ ID NO: 8410 - protein, 57 aa, Streptococcus pyogenes
MKLKLHTRGGNTITIQGDRTLYNELIKYLLSGQQPNWVASPSAIINLSDIIAITKEK

SEQ ID NO: 8411 - DNA, 507 bp, Streptococcus pyogenes
atgagaacattttcagacacaccaaagacattcacattccactacacgtttaaagactttgacaccgcacaagtggcttgtcatgctattttaggctatatgactggtacttatgagcaaccagtgattgacgcaacttatcacaatgatgaccaaggtggtcatgctaatcagttagtcttaaaatatgttgaagacagaaagttaagcaaggtcttcaagcgtatctgtgacagtttcaaggactattacaaccaacctgaggatatgacggatgaagaacttgattatcagcgcgtggtttctttatctaaaagtactcaagggaaagttaataatcgagacacacttatagccttcatctccgatcacaaccaactggctgaacacctctctatgaattataaagagatgacgccagaagacttaggggccatccttgagtctatcagtcaagcctttaaccatttgtatgatatggttgttgaaggtcagttactcgttaaa

SEQ ID NO: 8412 - protein, 169 aa, Streptococcus pyogenes
MRTFSDTPKTFTFHYTFKDFDTAQVACHAILGYMTGTYEQPVIDATYHNDDQGGHANQLVLKYVEDRKLSKVFKRICDSFKDYYNQPEDMTDEELDYQRVVSLSKSTQGKVNNRDTLIAFISDHNQLAEHLSMNYKEMTPEDLGAILESISQAFNHLYDMVVEGQLLVK

SEQ ID NO: 8413 - DNA, 96 bp, Streptococcus pyogenes
ttgccagtagtagcaacagtctgtcttgcttcgattgagcgtggcttgatgaaccttctgacaagaaccacaagcaaaggcatgagaagccttaaa

SEQ ID NO: 8414 - protein, 32 aa, Streptococcus pyogenes
LPVVATVCLASIERGLMNLLTRTTSKGMRSLK

SEQ ID NO: 8415 - DNA, 486 bp, Streptococcus pyogenes
atgttagaactatctattgagaatatcattaaaccaatgaagacacaggggaagacaagagttacaggatcaataggtgaccaagctatccgcataaacctagatgggctagtgattcactacaatggtcaaggcctattgcttgaaacgattccaggaacttatggtggtaaacgttactttttcgtgtgtcctgactgtgagagacgttgtcggaaattatttaaggcttctcatgcctttgcttgtggttcttgtcagaaggttcatcaagccacgctcaatcgaagcaagacagactgttgctactactggcaattagcctttaaagagtgtttgaaagtaaatccagaagcaagacacattcatggatattatagtcgtgatgactttcctaaacgtccaaagtacatgagattaaccaaatacctttatcactggagaagatttcattactatatggataagggtgacaggtactggcta

SEQ ID NO: 8416 - protein, 162 aa, Streptococcus pyogenes
MLELSIENIIKPMKTQGKTRVTGSIGDQAIRINLDGLVIHYNGQGLLLETIPGTYGGKRYFFVCPDCERRCRKLFKASHAFACGSCQKVHQATLNRSKTDCCYYWQLAFKECLKVNPEARHIHGYYSRDDFPKRPKYMRLTKYLYHWRRFHYYMDKGDRYWL

SEQ ID NO: 8417 - DNA, 150 bp, Streptococcus pyogenes
ttgatgatttatactataaactctaaaaagtgcttagaaacgattttagaagcgaaaagcgaagtactacaaaaaatatctagtttacaaaacgaacaaaacaaaaagacgtccacacggaacgcccccttggttaaatttaagcttaac

SEQ ID NO: 8418 - protein, 50 aa, Streptococcus pyogenes
LMIYTINSKKCLETILEAKSEVLQKISSLQNEQNKKTSTRNAPLVKFKLN

SEQ ID NO: 8419 - DNA, 360 bp, Streptococcus pyogenes
atgagcgctaaagaacaacttaaagaattgaaaccacttttcgctttaataaccttatttgaggaacaacgagataaagacatcaagctgataaatgcttttcataatcctgaagcaataagacatatcgaaaaaggtacagctaaacaactcttatatttagctaaagaacgtgacaagagactggccatgatcgccacactccaagatgagagacagatagccgttattaaggctagatacgtggatgacttatcatgggacgagatactcgataaactaggttactcaataaacactgtgttcaaactacatagaaaagctttagaggtattagatgaacaagaagaacgctattcg

SEQ ID NO: 8420 - protein, 120 aa, Streptococcus pyogenes
MSAKEQLKELKPLFALITLFEEQRDKDIKLINAFHNPEAIRHIEKGTAKQLLYLAKERDKRLAMIATLQDERQIAVIKARYVDDLSWDEILDKLGYSINTVFKLHRKALEVLDEQEERYS

SEQ ID NO: 8421 - DNA, 381 bp, Streptococcus pyogenes
atgaacaagaagaacgctattcgtaagctgaaagaattccatagatggcaacgtatcgctaatagccttgatttaacttataccgagctttaccagtttgatatagagtaccatcccacgcgcagaaaacaccttgaaataagccgagaatgcgccctagaggaactagatgctattaggtatgccattaatcaactgtctaaagtagaatatagacaaatactgattgagtgttacttgatcagtgaggaaaaaactcaacaggacattatggaagaacttaatggaagtcaaagctggtattatgaatctaagaaaagagccttgcttgagtttgtggaattttacagagacggggcgctaaaaaataatgttcactta

SEQ ID NO: 8422 - protein, 127 aa, Streptococcus pyogenes
MNKKNAIRKLKEFHRWQRIANSLDLTYTELYQFDIEYHPTRRKHLEISRECALEELDAIRYAINQLSKVEYRQILIECYLISEEKTQQDIMEELNGSQSWYYESKKRALLEFVEFYRDGALKNNVHL

SEQ ID NO: 8423 - DNA, 99 bp, Streptococcus pyogenes
atgattagaagaaaatcacttggtatcgtttgcaaatctgacttggcgggtcaaattagacataaaatgtcaaaaattagagtggattttttgactgac

SEQ ID NO: 8424 - protein, 33 aa, Streptococcus pyogenes
MIRRKSLGIVCKSDLAGQIRHKMSKIRVDFLTD

SEQ ID NO: 8425 - DNA, 573 bp, Streptococcus pyogenes
ttgatatttaattttaaggagaatatagtgaaaaagaaattagttttagctaccttatgtctatcaatgggtgctgtgagtgttagagcggaaagtgattttgggaatgctaatgaaatcgggctaggtttttatggtagtgatgactatactaaccaacctgctttaacaggagaccaagcgaaaataggcttcagaaacgattggaaagatgctagagattttggagtaaaaccaataaatctgggagatagtaaaatcgaagtaaaaacaaatccgggagctcttgtaagagtttccttgacaacgggtgaaacaaccaatagtatatgggagttaacaagtgtatcttcctcaatgagtaacggtatctacactaacacttataaaataaagccaactattgcaaattcttcaggaattgcaacgttcgatttagcgaactcaggaaaatacgacaaggaaaaaagtgaaattataaagagtactgagagtaatgcaaagaaaggtgatacttactcagttactacaagtatagatggatggacaataggttatggagaatggactgtg

SEQ ID NO: 8426 - protein, 191 aa, Streptococcus pyogenes
LIFNFKENIVKKKLVLATLCLSMGAVSVRAESDFGNANEIGLGFYGSDDYTNQPALTGDQAKIGFRNDWKDARDFGVKPINLGDSKIEVKTNPGALVRVSLTTGETTNSIWELTSVSSSMSNGIYTNTYKIKPTIANSSGIATFDLANSGKYDKEKSEIIKSTESNAKKGDTYSVTTSIDGWTIGYGEWTV

SEQ ID NO: 8427 - DNA, 204 bp, Streptococcus pyogenes
atgccctgcttttcaaaaaaaatagataaagaaaaggctgcgacagtatctgcaagcagggcaaaagaactagaagataggctcagtcatcagccattaattgatgattatcgagaaaagatgcaagatgcaagtgatgtgattcagtatatcaccaaacgtatagaagatcagttaaacaaggagttaacaaatggcaaaaac

SEQ ID NO: 8428 - protein, 68 aa, Streptococcus pyogenes
MPCFSKKIDKEKAATVSASRAKELEDRLSHQPLIDDYREKMQDASDVIQYITKRIEDQLNKELTNGKN

SEQ ID NO: 8429 - DNA, 99 bp, Streptococcus pyogenes
ttgaagtttcataagtttacctctttgattagttttctctttaaacattctaccattttttcttatattttaaacaagcatatatcatttgctttagtt

SEQ ID NO: 8430 - protein, 33 aa, Streptococcus pyogenes
LKFHKFTSLISFLFKHSTIFSYILNKHISFALV

SEQ ID NO: 8431 - DNA, 366 bp, Streptococcus pyogenes
atgggctgtgttaggctaggagaaaaaattatgaaaaaagatagtatctgtcaagtgggtgttataaatcaacaaaatgttacaaccgcaacgaactaccttgaaaaggaaaaagtccaaaaatcacttcgtattttatcaaaatttaccgataataaacagataaatatcatcttttatctccttgccgtcgaagaactctgtgtctgcgatatagcctgtttattaaatctcagtatggcatctgcctcccaccatcttcgtaaactagccaatcaaaacatcttggacactagaagagaggggaaaattatatattattttataaaagatgaggaaatcagagatttttttaatcaactagga

SEQ ID NO: 8432 - protein, 122 aa, Streptococcus pyogenes
MGCVRLGEKIMKKDSICQVGVINQQNVTTATNYLEKEKVQKSLRILSKFTDNKQINIIFYLLAVEELCVCDIACLLNLSMASASHHLRKLANQNILDTRREGKIIYYFIKDEEIRDFFNQLG

SEQ ID NO: 8433 - DNA, 942 bp, Streptococcus pyogenes
atgattatagggggattatatatgaaattttttgaagaaaattattcacaagaaatacctactcgtatcaaaaatttaagaaaaaaacacaatattacacaaagcgaactaggcaatgcaggtcaagttagtcaagttgaaagtggtaagcgaccaattacgagttcgatgttagtttatttaaatgctctaaccgcttcgaactatacgtatatcgtttttggagagttagatgagtttattgagaatctgtttcattattttttcagttctattttatatagagatttagaggctgtagatgaaaacctatattctttcatgagtgatgatttaatttcaatccaatcaagttgtctaagtattgccaagacatttgcaaatttcaatattcaaagaaaaagatttatgatttctactgaaactgaaatggatacttttcacaagaaagatgacattgacgtatgggttggtggaaaaagttataaccccgctaggagttttaggaataatccaataaatgaattaactgttattgattttgaagaaatggctgatattcttttgttgatgttgagagataatctaattaggtcgtttgaaattaatgtctgcaacacactgttcgaattagataaaaatggtgaaccgacaacatttaatctagataaaattgactcaataatcaataagtggtggtctgagaatgtctcaacagagataatacccaacctcataaaaaaacttagagaaaatcccttgtttaatatcggatttatggtaaatgatatattagaacgaatgtataaagaggacataccaaagtcttaccttacttctgttccattagttatttccaaaaaagcaaggtcaactttatcgattaagtcaaacggaagtcaaaaaatagataaatcaaaatttgcacagattttgtccctt

SEQ ID NO: 8434 - protein, 314 aa, Streptococcus pyogenes
MIIGGLYMKFFEENYSQEIPTRIKNLRKKHNITQSELGNAGQVSQVESGKRPITSSMLVYLNALTASNYTYIVFGELDEFIENLFHYFFSSILYRDLEAVDENLYSFMSDDLISIQSSCLSIAKTFANFNIQRKRFMISTETEMDTFHKKDDIDVWVGGKSYNPARSFRNNPINELTVIDFEEMADILLLMLRDNLIRSFEINVCNTLFELDKNGEPTTFNLDKIDSIINKWWSENVSTEIIPNLIKKLRENPLFNIGFMVNDILERMYKEDIPKSYLTSVPLVISKKARSTLSIKSNGSQKIDKSKFAQILSL

SEQ ID NO: 8435 - DNA, 600 bp, Streptococcus pyogenes
atgaccactaaaacctacttcatgagaagcttcaatctcatattatacttactgcttattgctccaatctgctatgtgttcggttggctgttcaatcttgtttcagttcaattatctaccgtcacatttgtcaatctggatacggttaaaaacgttactgataccattagttctgtatgttatggattcgctcttatttctttacttctagccttattatctggattaaagatgatacaacgcttgaatacagatagccttgggaactactgccaatctatttatcgcacctttctattaagacacttccttttccagcgtgaacgagtacagaaggtaagcaactttgaacaccagaccgttaccactatcaatccaatccataacgggtttaaccgagctgtacgtaagtgtatcgtagatatacgaaaagatgccattactgtatttctaaaagttcctagagaccaacaggggcaaaaaatcctaaaggatacgggagtacaactgaaagaagagattgtcatccaacacacagactattatttctcttctcctgttcgagttcgtaaccaattgtggtttattggtcaaaagcgt

SEQ ID NO: 8436 - protein, 200 aa, Streptococcus pyogenes
MTTKTYFMRSFNLILYLLLIAPICYVFGWLFNLVSVQLSTVTFVNLDTVKNVTDTISSVCYGFALISLLLALLSGLKMIQRLNTDSLGNYCQSIYRTFLLRHFLFQRERVQKVSNFEHQTVTTINPIHNGFNRAVRKCIVDIRKDAITVFLKVPRDQQGQKILKDTGVQLKEEIVIQHTDYYFSSPVRVRNQLWFIGQKR

SEQ ID NO: 8437 - DNA, 96 bp, Streptococcus pyogenes
atgtcacaagaagagcttgctgaaatgatgtatgtttcaagaagactatctcaaactgggaaaacggtaaaagctatccagacctgcaaaatcttt

SEQ ID NO: 8438 - protein, 32 aa, Streptococcus pyogenes
MSQEELAEMMYVSRRLSQTGKTVKAIQTCKIF

SEQ ID NO: 8439 - DNA, 840 bp, Streptococcus pyogenes
atggtttcatttatttcaagagtttttaaaggcatgattattgcactaggttttattttacctggtgtatccggtggtgttctcgcagccattttaggaatctatgagcgaatgatttcctttttagctcatatgagggataactttattgaaaatgtcttatttttcttaccagtaggaattggtggtattttaggtattgctctcttttctttccccgttgagtttttgcttaagcactatcaagttagcgtcttatggggatttgctggcgctattgtcggcactattcctagtctgattaaggagtcaaccaagcagtctcaaagagacaaagctgactggctatggctagtccttacctttgttatttcaggactaggtctttacttcttaaatgacttaatcggtaccttaccagctaactttttaacctttattttagcaggtgccttaattgctttaggagtactggtccctggactaagcccgtcaaatctcttacttatcttaggactctatggtcctatgttaatagggttcaaatctttggatttattagggactttcttacctattgctatcggaggagtcctagccatcttggctttttctaaaagtatggattatgctttacagcaccatcattcaaaagtttaccactttatcattggtattgtattatccagcacgctattaattcttattccaaatagtagtagtcccgaatccatttcctacagtcatgcaggtatcttaacctggcttatggcctttgtgttatttgctcttggtatttggctcggactttggatgagtcaattagaagaaaaatacaaa

SEQ ID NO: 8440 - protein, 280 aa, Streptococcus pyogenes
MVSFISRVFKGMIIALGFILPGVSGGVLAAILGIYERMISFLAHMRDNFIENVLFFLPVGIGGILGIALFSFPVEFLLKHYQVSVLWGFAGAIVGTIPSLIKESTKQSQRDKADWLWLVLTFVISGLGLYFLNDLIGTLPANFLTFILAGALIALGVLVPGLSPSNLLLILGLYGPMLIGFKSLDLLGTFLPIAIGGVLAILAFSKSMDYALQHHHSKVYHFIIGIVLSSTLLILIPNSSSPESISYSHAGILTWLMAFVLFALGIWLGLWMSQLEEKYK

SEQ ID NO: 8441 - DNA, 420 bp, Streptococcus pyogenes
ttgactgttgatgcgtcccagatccagctatggggtgaaattgattatttagtacagtcttctagaactattcattgtttcgttggtcaattagtcgttgatgactggaaaagcatacagcctaacgaagaagttgacaaggtctttatagtacctttacgtcagctacttttcactgatcctgtctattatcgtttagaagtcactcctattgagacaacggattttccttttgaccgtattcgtaatgggaaatactaccaatttagtcaagagtaccgtagtattccgttttatgaaaatctagaagaaaccatatggggaatgactgcccagtttactaagtgtttaaccgatattctaaatgatgaatcaattgcaaagaaaaacccctcagatattgaaaaatctaaggggaga

SEQ ID NO: 8442 - protein, 140 aa, Streptococcus pyogenes
LTVDASQIQLWGEIDYLVQSSRTIHCFVGQLVVDDWKSIQPNEEVDKVFIVPLRQLLFTDPVYYRLEVTPIETTDFPFDRIRNGKYYQFSQEYRSIPFYENLEETIWGMTAQFTKCLTDILNDESIAKKNPSDIEKSKGR

SEQ ID NO: 8443 - DNA, 153 bp, Streptococcus pyogenes
ttgaccaaaaagctaggattggttatgatgaagataagattaacggaaagagaaattagggaagactatgaaggacttattaaaacagtatcaggcaaaaccactaggagaggagaagcggtacgccgtatttttacctcttattcttgtcaa

SEQ ID NO: 8444 - protein, 51 aa, Streptococcus pyogenes
LTKKLGLVMMKIRLTEREIREDYEGLIKTVSGKTTRRGEAVRRIFTSYSCQ

SEQ ID NO: 8445 - DNA, 324 bp, Streptococcus pyogenes
atgtattttccagtatcggctaccttgattgaatttctgattttagccattgtcgaaaaaaatgattcttacggttacgatattagtcaaaccattaaactagtggctaatatcaaagaatccactctctatcctattcttaaaaaattggagaaagcaggttttttgacaacttatagtcaagaacatcagggacgaaagcgtaaatattatgctgtcacttcttcggggagagcacagctgatttttctaaaaaaagaatggcagagctataaatttgccttagacgggattattgaagggagcttaagacatgacaaggac

SEQ ID NO: 8446 - protein, 108 aa, Streptococcus pyogenes
MYFPVSATLIEFLILAIVEKNDSYGYDISQTIKLVANIKESTLYPILKKLEKAGFLTTYSQEHQGRKRKYYAVTSSGRAQLIFLKKEWQSYKFALDGIIEGSLRHDKD

SEQ ID NO: 8447 - DNA, 585 bp, Streptococcus pyogenes
atgacaaggactgagtatctagcagaactagataaatacttgcgcaaactacctagagaagactaccatgaagcgatggaatattatattgaatattttgatgaagctggtcctgacaaagaaagccaggttatcgacgatttaggaaatcctaaggaagctgccagtgaaatcatttcaaatgttctaggaaaacacttggcaactcccgagaaaactcccaaaaatcgggcaacaattattggattaaccattttgtccctctttgctgctccgattgctttacccgtattgctggcgttgattctctttattattgcctgcctaatgctcgggctcacagctatctttgccgcctacatttttgggcttgcaggtattcttgtcgcaggagtgaccctgtttgaaagcttgaccttgattggctcatctattcctgcacaagctatgggcatcggcagcgccttgttgtgttttggtggtggtcttcttatttggattattgccacagcattccttcgtttttcaggacgggcttttgttgcctttattaagtggatcagtaataagaaaggagctcaagca

SEQ ID NO: 8448 - protein, 195 aa, Streptococcus pyogenes
MTRTEYLAELDKYLRKLPREDYHEAMEYYIEYFDEAGPDKESQVIDDLGNPKEAASEIISNVLGKHLATPEKTPKNRATIIGLTILSLFAAPIALPVLLALILFIIACLMLGLTAIFAAYIFGLAGILVAGVTLFESLTLIGSSIPAQAMGIGSALLCFGGGLLIWIIATAFLRFSGRAFVAFIKWISNKKGAQA

SEQ ID NO: 8449 - DNA, 1077 bp, Streptococcus pyogenes
atgaaaaatatctcacgcaaatgctttatgaccagtgtggtatgtattattctaggaggcattcttctagggactggctatgcaactggaggacttcaggacattaaacaccaaacagctcccaaaaaggtcatcaaaacatttgaccaaataactgctcttgatattgacagttctgcctcaactattacagtagagacaggacccgttcaaagaccaacagtgacctattacacacatcctaaacttattgatcctatcgtcacaacagtaacaggtaagaccctatctctttcgcaaacacctaaagacgttgtcatcactggtggaattgaaattttaggttttactctcaataatagtcgtcaagagaagaactaccgttctattaccattactgttcctgaaaaaactagcctcaatgaagttaaggcaagtaatgtcccacataccactttgtcaaatctaactgtccaagatatgcaattcgatggcaatcttactcttttacataccaaagtcaagaaagctactatcactggtatgttggaagccactaaaagtcagttaacaaatctcgagttaaaagctgactattctttttcaaacctgactgattctagtgtggaaaatgggaccatcagcttaggaaatggacaactaactactaaagataccactctaaaagctgtcaatattcaatcattacaccctggtggtatagaagccgagagaacaacccttgaaaatgtgaccttcactgtttctaaaagcaaagaagaagaggagaacgactactatgacaatgatgctatcttcaccgctcatgcccttacccttaaagggactaatactattactggtggtgatattgatgttgacataaccttgacaaaagcaaaggccatcgcctacagagcaaggaccgaaaatggtaaagtctcccttggctcacagctgacaccagctaagattggtaaggaatcaacttcagatgttatttcttatgtggctgagaataaagcagctactggaaatttaacggttaatctcaataagggagacattactatcaaa

SEQ ID NO: 8450 - protein, 359 aa, Streptococcus pyogenes
MKNISRKCFMTSVVCIILGGILLGTGYATGGLQDIKHQTAPKKVIKTFDQITALDIDSSASTITVETGPVQRPTVTYYTHPKLIDPIVTTVTGKTLSLSQTPKDVVITGGIEILGFTLNNSRQEKNYRSITITVPEKTSLNEVKASNVPHTTLSNLTVQDMQFDGNLTLLHTKVKKATITGMLEATKSQLTNLELKADYSFSNLTDSSVENGTISLGNGQLTTKDTTLKAVNIQSLHPGGIEAERTTLENVTFTVSKSKEEEENDYYDNDAIFTAHALTLKGTNTITGGDIDVDITLTKAKAIAYRARTENGKVSLGSQLTPAKIGKESTSDVISYVAENKAATGNLTVNLNKGDITIK

SEQ ID NO: 8451 - DNA, 99 bp, Streptococcus pyogenes
ttgtcttattttgacaataacttgacaatttctgtcaagttttttattgtcttgttaagattatttgatagtaatgtctcccttattgagattaaccgt

SEQ ID NO: 8452 - protein, 33 aa, Streptococcus pyogenes
LSYFDNNLTISVKFFIVLLRLFDSNVSLIEINR

SEQ ID NO: 8453 - DNA, 117 bp, Streptococcus pyogenes
gtgattgtcaatattgatttcatcacagacctttacagtaatgtcaatgtttttacaactctgtcaatctattgtaatgtttttaaaatgattacaaaagtatcactatgtctaatc

SEQ ID NO: 8454 - protein, 39 aa, Streptococcus pyogenes
VIVNIDFITDLYSNVNVFTTLSIYCNVFKMITKVSLCLI

SEQ ID NO: 8455 - DNA, 1023 bp, Streptococcus pyogenes
atgagtgaaaaaagtcttggtgaagtgttaagagaatcgcgtgttggaaaaaatatcacactagatgatatagaattgaagacagggatttcttcccattacttgctggcaatggaattggatcagtttaaaattattccggaagaaaaatttgatcaatttttaaaagaatatgctgacattgttgagttagatttcaatactttaaaaagacgataccgttatcaagttaattccaaaaaagacagtgatataaaatctgtaactgagattgttgaagagaagttaagtaagaaacgattacaagagaagttgttatcacatcagagcatggggtatggtcaaccgttagaagtttctaaaaacaaagaaaccttagttatccctgtaaagactgttggtttagatagcaaatcgccactaaaaacgatatcgcctgttagccaatttaaatcagataacaggttaattcctaaaaaaaatgtgtcacgtatgaggcgaaatagcactgacagtcgttctaaaacgtcactatttcccatagttatattaggaacgattgcttttgcaattatcagtgttatcattttaggtgtttggcaacaattcgaaaagagtcaaagagctaaagaagctgaagttgctttgcttaaagcctctgagcagtctactaacggtttaaaaaataattcaaatgatcgcaaaactcaagtcacaactgaggggtcgggtaattatttaatagcgactgttactaaatctaaagagaccgttgatatcagtgtgtctttaaccgaggcacaaagtagttggatttctctaacaaattcagaaattggtgaaggtggtataacattgactcaagactcgccaacttatacagcgactttacctgcagaaataacagaatcattgttgacacttggtgtgacaaaaggtgtatctgtaacaattgatggacaacctgttgatctatcacctttaacaagtactgacttaagttatatcacgtttaagatccaa

SEQ ID NO: 8456 - protein, 341 aa, Streptococcus pyogenes
MSEKSLGEVLRESRVGKNITLDDIELKTGISSHYLLAMELDQFKIIPEEKFDQFLKEYADIVELDFNTLKRRYRYQVNSKKDSDIKSVTEIVEEKLSKKRLQEKLLSHQSMGYGQPLEVSKNKETLVIPVKTVGLDSKSPLKTISPVSQFKSDNRLIPKKNVSRMRRNSTDSRSKTSLFPIVILGTIAFAIISVIILGVWQQFEKSQRAKEAEVALLKASEQSTNGLKNNSNDRKTQVTTEGSGNYLIATVTKSKETVDISVSLTEAQSSWISLTNSEIGEGGITLTQDSPTYTATLPAEITESLLTLGVTKGVSVTIDGQPVDLSPLTSTDLSYITFKIQ

SEQ ID NO: 8457 - DNA, 1206 bp, Streptococcus pyogenes
atgaaaatagcagttgctggatcaggatatgttggattatcactaggagttcttttatcacttcaaaacgaagtcactattgttgatattcttccctctaaagttgataagattaataatggcttatcaccaattcaagatgaatatattgaatattacttaaaaagtaagcaattatctattaaagcaactttagatagcaaagcagcttataaagaagcggaactggtcattattgccacacctacaaattacaacagtagaattaattattttgatacacagcatgttgaaacagttatcaaagaggtactaagcgttaatagccatgcaactcttatcatcaaatcaacaattccaataggtttcattactgaaatgagacagaaattccaaactgatcgtattatcttcagccctgaatttttaagagaatctaaagctttatatgacaacttatatccaagccgaattattgtttcttgtgaagaaaacgattctccaaaagtaaaggcagacgcagaaaaatttgcacttttattaaagtctgcagctaaaaaaaataatgtaccagtacttattatgggagcttcagaagctgaagcagtaaaactatttgccaatacttatttagcgttaagggtagcttattttaatgagttagacacttacgcagaatcgagaaaattaaatagtcacatgattattcaaggaatttcttatgatgatcgaataggaatgcattataataacccatcatttggttatggaggttattgtctacctaaagatacgaagcaattattggcaaattacaataatattcctcaaacgctaattgaagctatcgtttcatcaaataatgtgcgcaagtcctatattgctaagcaaattatcaacgtcttagaagagcgggagtccccagtaaaagtagtcggggtttaccgtttaattatgaaaagtaactcagataattttagagaaagtgctatcaaagatgttattgacattcttaaaagtaaagacattaagataattatttatgagccaatgttaaacaaacttgaatctgaagatcaatctgtacttgtaaatgatttagagaatttcaagaaacaagcaaatattatcgtaactaatcgctatgataatgaattacaagatgttaaaaataaagtttacagtagagatatttttaatagagac

SEQ ID NO: 8458 - protein, 402 aa, Streptococcus pyogenes
MKIAVAGSGYVGLSLGVLLSLQNEVTIVDILPSKVDKINNGLSPIQDEYIEYYLKSKQLSIKATLDSKAAYKEAELVIIATPTNYNSRINYFDTQHVETVIKEVLSVNSHATLIIKSTIPIGFITEMRQKFQTDRIIFSPEFLRESKALYDNLYPSRIIVSCEENDSPKVKADAEKFALLLKSAAKKNNVPVLIMGASEAEAVKLFANTYLALRVAYFNELDTYAESRKLNSHMIIQGISYDDRIGMHYNNPSFGYGGYCLPKDTKQLLANYNNIPQTLIEAIVSSNNVRKSYIAKQIINVLEERESPVKVVGVYRLIMKSNSDNFRESAIKDVIDILKSKDIKIIIYEPMLNKLESEDQSVLVNDLENFKKQANIIVTNRYDNELQDVKNKVYSRDIFNRD

SEQ ID NO: 8459 - DNA, 123 bp, Streptococcus pyogenes
gtgaaatggactaatgattatttgaaaggaaaccataactttcaggttggcaccccttaccgtgcagcttctttcattgagaagattgagatagtatctcgttttgataaagcagatgctaat

SEQ ID NO: 8460 - protein, 41 aa, Streptococcus pyogenes
VKWTNDYLKGNHNFQVGTPYRAASFIEKIEIVSRFDKADAN

SEQ ID NO: 8461 - DNA, 111 bp, Streptococcus pyogenes
ttgaaagcatgtctcccattcaatactgatgaatataagattattgtaaggagtcaaaagattgaaatcgtatcagcgatgattattgtcatttcaatctttgaaagagag

SEQ ID NO: 8462 - protein, 37 aa, Streptococcus pyogenes
LKACLPFNTDEYKIIVRSQKIEIVSAMIIVISIFERE

SEQ ID NO: 8463 - DNA, 231 bp, Streptococcus pyogenes
gtgtctatgaaaccaatagatttgtctaagatggttagtatcagaaaacgttctaagaaagtcatgaagacgaataagaagactttaggtaaatctatcgaagaacgtccagaatatattaatgatcgttctgaatttgggcattgggagattgatttggctctcggcaagaaaaccaaaagtgaagctgttatgttgactttggtagagcgccagacacgctatgcacta

SEQ ID NO: 8464 - protein, 77 aa, Streptococcus pyogenes
VSMKPIDLSKMVSIRKRSKKVMKTNKKTLGKSIEERPEYINDRSEFGHWEIDLALGKKTKSEAVMLTLVERQTRYAL

SEQ ID NO: 8465 - DNA, 267 bp, Streptococcus pyogenes
atgaacatgtctaatattaattctaccagaaaatcatcctattctcatctttcagccacagaacggggtgaaattgctgcttatcttaaaatgggaaagaaacccgttgagattgctcgacttctgggtagtcaccgttctacaatctgccgagaaataaaacgtggttcagtagatcaggtaaaggataagaatggaaaacaaaccttcttcaacgcctatttcgctgatagtagacaacgtgtctatgaaaccaatagatttgtc

SEQ ID NO: 8466 - protein, 89 aa, Streptococcus pyogenes
MNMSNINSTRKSSYSHLSATERGEIAAYLKMGKKPVEIARLLGSHRSTICREIKRGSVDQVKDKNGKQTFFNAYFADSRQRVYETNRFV

SEQ ID NO: 8467 - DNA, 171 bp, Streptococcus agalactiae
atgtttgtcaaagggatttttcaagtattgcgtgacactacttggccaaatcgaaaacaacgttggaaagattttatttccatcttggaatacactgtatttttcacaatcgttatctacatctttgacaaactgttagccgcaggagtcatggacttgattaatcgattt

SEQ ID NO: 8468 - protein, 57 aa, Streptococcus agalactiae
MFVKGIFQVLRDTTWPNRKQRWKDFISILEYTVFFTIVIYIFDKLLAAGVMDLINRF

SEQ ID NO: 8469 - DNA, 1614 bp, Streptococcus agalactiae
atgagacgtaacatattattgagcattacttgtttattgatggtgactctgactgcatgccattcacaggatagcaaaagtcataaactaaacagtgataaactcacgcttgcttggggagaagactttggtgatgttaatccgcatcgctataaccctgatcagtttgttatccaggatatggtttatgaggggttggtacgatatggtgacaatgggaaaattgaaccagctttagcgaaaagctggagcattagtcaagatggaaaaacctacacttttaaattgagaaatgctaaatattctgatggcagtaactttaatgctgcgaatgtcaaacgtaattttgatagtattttttcgaagtctaatagaggtaatcataattggtttaatttaacgaatcaattggaaaattatcgtgccttgaatcaaagtacttttgaaattaaactgaaacaagcttatagtgctactttatatgatctctctatgattcgaccaattcgctttttatctgatagcgctttccctaaaggtgatgatacaactaagaagaatgtaaaaaaaccaattggaacgggtcaatgggttgtgaaaagtaaaaagcaaaatgaatatattaccttcaaacgtaatgagaattactggggaaagaaaccaaaattaaaagaagtaaccgtaaaagttatacccgatgctcagacgcgtgctttagcattcgaatcaggtgacgttgatttgatctatgggaatggcattattggtttagacacttttgcccaatatacgaaggacaagaaatatgtcacagctatttctcaacctatgtcaacaagacttttgttgctaaatgctaaggaaagtattttccaagataaaaaagttcgtcaggcaatgaatcatgctattgacaaggtttctattgctaagaacacctttagaggaacagaaaagccagcagacactattttttcaaaatcaacatctcactcagatgctaagttaaatccttatagctataatgttgataaagcaaatcagctattggatcaagctggttggaagatgggaaaagataaggttcgtgaaaaagatggtaaaactctaaccttacgtcttccttatatcgccactaaggcaactgataaagacctggtaacttatttccaaggagaatggcgtaaaatcggtattaatgtttctcttattgctatggaagaagatgattattgggctaatgctaaaaagggtaattttgatatgatgttaacctattcttggggagcaccatgggaccctcatgcttggatgtcggcattaactgccaaggcagatcatggacatccagaaaatatagctttagaaaatctagcaactaaaactgaaatggatagacttattaagtcagctctagtagatcctaaggaagaaaatgttgatagagactataagaaggttcttgaattattgcatgatgaggctgtatatatcccattaacttatcaatcggtgatttctgtttataggaaaggtgattttaaaaccatgcgttttgcgccagaagaaaattcattcccattacgctatatagaaaaaaacaatgtatctaag

SEQ ID NO: 8470 - protein, 538 aa, Streptococcus agalactiae
MRRNILLSITCLLMVTLTACHSQDSKSHKLNSDKLTLAWGEDFGDVNPHRYNPDQFVIQDMVYEGLVRYGDNGKIEPALAKSWSISQDGKTYTFKLRNAKYSDGSNFNAANVKRNFDSIFSKSNRGNHNWFNLTNQLENYRALNQSTFEIKLKQAYSATLYDLSMIRPIRFLSDSAFPKGDDTTKKNVKKPIGTGQWVVKSKKQNEYITFKRNENYWGKKPKLKEVTVKVIPDAQTRALAFESGDVDLIYGNGIIGLDTFAQYTKDKKYVTAISQPMSTRLLLLNAKESIFQDKKVRQAMNHAIDKVSIAKNTFRGTEKPADTIFSKSTSHSDAKLNPYSYNVDKANQLLDQAGWKMGKDKVREKDGKTLTLRLPYIATKATDKDLVTYFQGEWRKIGINVSLIAMEEDDYWANAKKGNFDMMLTYSWGAPWDPHAWMSALTAKADHGHPENIALENLATKTEMDRLIKSALVDPKEENVDRDYKKVLELLHDEAVYIPLTYQSVISVYRKGDFKTMRFAPEENSFPLRYIEKNNVSK

SEQ ID NO: 8471 - DNA, 975 bp, Streptococcus agalactiae
gtgaaacatattaccactgtagttatctggaagatacttaggtgtttgtcactcgtttttggagtatcaattttgacctttattttactaaaacaatcaccggttgatccagtcatggcaagtgtcaattatgacacgtcactaacccctgttcagtacaaagcgattgctcaccactatggtttggataagccagctccggtccagtattttatttggttaaaaaattttatacagggacatttagggacttcactagtttatcggcaacctgttattgatattattagatcacgggcaggtgcctctttcatacttatgggactctcctgggtcttatcgggtcttattggatttatcttaggaactttatcagctttccatcaagggaaattgcttgatcgaattgtaaggtggttttcttaccttcagatatcagtaccaactttttggattgggctcatttttttattaatcttttctgtccagctggggtggttcccgattggtatttcttccccgataggtactttgagtcaagatattacgttagctgatcgtattaagcaccttattttacctgttttcacgctaagtattctaggcattgccaatgtaactcttcatactagaactaaaatgatgtcggtactttctagtgaatatgtcttatttgccagagcgcgtggggaaacggaatggcaaatttttaaaaatcattgtcttagaaatgctatcgtaccagctattacactgcatttttcctattttggagaattgtttggaggatccgttcttgctgagcaagttttctcatatccaggactagggtctaccctaactgaagcaggacttaaaagtgatacaccgctacttctagctattgtgatgatagggacattatttgtttttgcgggcaatcttattgcggatattttaaacagcataatcaatccacagttaaggagaaaagta

SEQ ID NO: 8472 - protein, 325 aa, Streptococcus agalactiae
VKHITTVVIWKILRCLSLVFGVSILTFILLKQSPVDPVMASVNYDTSLTPVQYKAIAHHYGLDKPAPVQYFIWLKNFIQGHLGTSLVYRQPVIDIIRSRAGASFILMGLSWVLSGLIGFILGTLSAFHQGKLLDRIVRWFSYLQISVPTFWIGLIFLLIFSVQLGWFPIGISSPIGTLSQDITLADRIKHLILPVFTLSILGIANVTLHTRTKMMSVLSSEYVLFARARGETEWQIFKNHCLRNAIVPAITLHFSYFGELFGGSVLAEQVFSYPGLGSTLTEAGLKSDTPLLLAIVMIGTLFVFAGNLIADILNSIINPQLRRKV

SEQ ID NO: 8473 - DNA, 765 bp, Streptococcus agalactiae; identical to SEQ ID NO: 65

SEQ ID NO: 8474 - protein, 255 aa, Streptococcus agalactiae
LLVISAIFAPILSSFDPQYVDLSQKLLAPNNVHLLGTDQLGRDVLSRLLYGARYSLFLAIIISLLELTIGMFVGLIVGWYQGKLENLFLWIANIILAFPSFLLSLATVGILGHGLGNLIFAIVFVEWVYYAKLMTNLVKSAKKEPYVINAQIMGLSVWHILRKHIFPFVYQPILVMVLMNIGNIILMISGFSFLGIGVQPNVTEWGMMLHDARGYFRTATWMMLSPGIAIFLTVFSFNTLGDAIDKKDWKRQWNS

SEQ ID NO: 8475 - DNA, 1770 bp, Streptococcus agalactiae
atgagatatacaaatggaaattttgaagcctttgcaagacctcgaaaacctgaaggtgtggataaaaaatccgcttatattgttggttctggtttagcaggattagctgccgctgtctttttaatacgtgacggtcaaatggatggtcaacgtattcatatttttgaagaactacctctttctggaggatcacttgacggtgtcaaacgacctgatatcggttttgtaacgcgtggtggtcgtgaaatggaaaatcacttcgaatgtatgtgggatatgtaccgttccatcccctctctcgaagttccagatgcttcttatctagatgaattttattggcttgacaaggatgatcccaattcatctaactgtcgcctcattcataaacaggggaatcgcttagaatctgatggtgattttacactcggaacacattccaaagagttagttaagctagtcatggagactgaagagtctttaggtgctaagacgattgaagaagttttttcaaaagaattttttgaaagtaatttttggacttattggggtactatgtttgcctttgagaaatggcattcagcgattgaaatgcgtcgatatgctatgcgctttatccatcatattggtggtctgcctgatttcacttcattaaaatttaataaatataatcaatatgattctatggtgaaaccaatcatcagttatttagagtctcataatgtagatgttcaatttgatagcaaggtaactaatatctccgtagactttaagaacggtcagaagcttgcaaaagctattcatctcacagttggtggtgaagcaaaaacaattgatcttactccaaatgattttgtttttgtaacgaatggttctatcactgaaagtacgaactatggtagtcatgatactgtagctaaacctaataccgatttgggaggttcttggaatctttgggaaaacttagctgctcaatctgatgaatttggacatcctaaagtcttctacaaagatattccaaaagagtcatggtttgtttctgctactgcaacaataaaagatccagctattgaaccttatatagagcgtttaacacatcgtgacctccatgatggtaaagtaaataccggaggcattgttacagttacagattctaattggatgatgagttttgctatccatcgccaaccgcatttcaaagagcaaaaggaaaatgaaacaattgtttggatttatggactctattcaaatgtggaaggtaattatattaaaaaaccaattgaagaatgtactggtcgagaaatcacagaagagtggttatatcacttaggtgttcctgaaatgaagattcatgatttatctgataaacaatatgtaagtacagttcctgtttatatgccttacattactagttatttcatgcctcgagttaaaggtgaccgaccagatgttatcccacaaggatctgttaacctagccttcattggtaattttgcagaatctccatccagagatacagtatttacaacggaatattctattagaactgctatggaagctgtttatactttcttaaatattgaacgtggtgttccagaagtctttaattcagcatttgatattcgtgtcttgttgcaatctttatactatctcaatgataagaaatctgttgaagatatggatttaccaatacctgccttaatgcgtaaagtaggcatgaaaaaaattagaggaacttatttagaagaattacttcgagaagctcatctttta

SEQ ID NO: 8476 - protein, 590 aa, Streptococcus agalactiae
MRYTNGNFEAFARPRKPEGVDKKSAYIVGSGLAGLAAAVFLIRDGQMDGQRIHIFEELPLSGGSLDGVKRPDIGFVTRGGREMENHFECMWDMYRSIPSLEVPDASYLDEFYWLDKDDPNSSNCRLIHKQGNRLESDGDFTLGTHSKELVKLVMETEESLGAKTIEEVFSKEFFESNFWTYWGTMFAFEKWHSAIEMRRYAMRFIHHIGGLPDFTSLKFNKYNQYDSMVKPIISYLESHNVDVQFDSKVTNISVDFKNGQKLAKAIHLTVGGEAKTIDLTPNDFVFVTNGSITESTNYGSHDTVAKPNTDLGGSWNLWENLAAQSDEFGHPKVFYKDIPKESWFVSATATIKDPAIEPYIERLTHRDLHDGKVNTGGIVTVTDSNWMMSFAIHRQPHFKEQKENETIVWIYGLYSNVEGNYIKKPIEECTGREITEEWLYHLGVPEMKIHDLSDKQYVSTVPVYMPYITSYFMPRVKGDRPDVIPQGSVNLAFIGNFAESPSRDTVFTTEYSIRTAMEAVYTFLNIERGVPEVFNSAFDIRVLLQSLYYLNDKKSVEDMDLPIPALMRKVGMKKIRGTYLEELLREAHLL

SEQ ID NO: 8477 - DNA, 804 bp, Streptococcus agalactiae
atgaagataacattacacggcgttgctgaaacgttattaatcaccttatatattagggctaaagatgcgatggctaaacatccgatacttaatgatcaaaaatccttagcaattgttgaacagatagaatatgattttgataaattcgataattcagaagcttctttttatgcaacattagctagawttcgcgttatggatagagaaatcaaaaaatttattagagaaaatccaaatagtcaaatcctttcaattggttgtggacttgatacaaggtttgaaagagtcgataatggacaaattaggtggtataaccttgatttgccagaggttatggagataagaaaattattttttgaagagcatgaaagagttactaatatagcaaaatcagccctagatgaaacttggacacgggaggtaaatccccaaaatgccccttttctaatcgtgtcagaaggtgttttaatgtttctaaaagaagatgacgtagagacttttcttcatatcctgacaaattcatttagccaatttatggcacaatttgatttgtgtcataaggaaatgattaataaaggaaagcaacatgatacagtaaagtatatggatacagaatttcagtttggtatcacagatggtcatgagattgtggatttagaccctaaattaaagcaaataaatctgattaactttacagatgagatgagcaaatttgagttaggcacacttcgctctttacttccaacaattcgtaaatttaataattgtttaggtgtgtacgaatataaagcatctgagaaaaag

SEQ ID NO: 8478 - protein, 268 aa, Streptococcus agalactiae
  MISC_FEATURE (1)..(268): Xaa = Any Amino Acid
MKITLHGVAETLLITLYIRAKDAMAKHPILNDQKSLAIVEQIEYDFDKFDNSEASFYATLARXRVMDREIKKFIRENPNSQILSIGCGLDTRFERVDNGQIRWYNLDLPEVMEIRKLFFEEHERVTNIAKSALDETWTREVNPQNAPFLIVSEGVLMFLKEDDVETFLHILTNSFSQFMAQFDLCHKEMINKGKQHDTVKYMDTEFQFGITDGHEIVDLDPKLKQINLINFTDEMSKFELGTLRSLLPTIRKFNNCLGVYEYKASEKK

SEQ ID NO: 8479 - DNA, 1074 bp, Streptococcus agalactiae
gtgaagaatagagatccaaaaagaaaacataaaagtttactaggtctgcttaaatggtggattataggttttgcttttttattgttagtattagcaagccttgtagtgagactaccttattatttggaaatgccaggtggagcttatgatatccgttcggtattgaaagtgaataaaaaggctgataaagctaagggttcgtacaattttgtagcggtatctgtcagtcaagcaacgccagctcaggttctttatgcttggttaactccttttacagaattatctagtaaagaggagacaacaggtggctttagtaatgacgattatctcagaattaatcaattctacatggagacttctcaaaatgagtccatctatcaagctttaaagttagctaataagcaagtatctcttacttataaaggagtttatgtgcttaacttagctaaaaattcgacatttaaagatagattacatttagctgatacagtcacaggagttaatggcaaaagtttcaaaaattcttctcaacttatcaaatatgttgcagctcttcatctaggtgataaagtaaaggtacaatacacaagtcaaggtaaaaagaaagaatcagttggtaaagttattaaactatcaaacggtaaaaatggtattggtatcggtttgacagaccatacagaagtattatctgatgttcctgtggactttaatactgaaggtgttggaggaccaagtgcaggtttaatgtttactttagcgatttacgaccaattggttaaagaagatttacgtaaaggacgtaagattgcaggtactggtactattgagcaaaatgggcatgttggcgatattggtggagcaggtttgaaagttgtttcagcggctaaaaaaggaatggatattttctttgttcctaataatccgatcgataaaaatgctaaaaaaggcaaaacaaaggttcagacgaattatcaagaggcaaaagcagcagctaagcgattaggtacgaagatgaaaattgtaccagttcaaaatgttcagcaagctattgattatttgaaaaaaacaaaataa

SEQ ID NO: 8480 - protein, 357 aa, Streptococcus agalactiae
VKNRDPKRKHKSLLGLLKWWIIGFAFLLLVLASLVVRLPYYLEMPGGAYDIRSVLKVNKKADKAKGSYNFVAVSVSQATPAQVLYAWLTPFTELSSKEETTGGFSNDDYLRINQFYMETSQNESIYQALKLANKQVSLTYKGVYVLNLAKNSTFKDRLHLADTVTGVNGKSFKNSSQLIKYVAALHLGDKVKVQYTSQGKKKESVGKVIKLSNGKNGIGIGLTDHTEVLSDVPVDFNTEGVGGPSAGLMFTLAIYDQLVKEDLRKGRKIAGTGTIEQNGHVGDIGGAGLKVVSAAKKGMDIFFVPNNPIDKNAKKGKTKVQTNYQEAKAAAKRLGTKMKIVPVQNVQQAIDYLKKTK

SEQ ID NO: 8481 - DNA, 1740 bp, Streptococcus agalactiae; identical to SEQ ID NO: 161

SEQ ID NO: 8482 - protein, 580 aa, Streptococcus agalactiae
LMKSNQWQVFKRLISYLRPYKWFTVLALSLLLLTTVVKNIIPLIASHFIDHYLTNVNQTAVLILVGYYSMYVLQTLIQYFGNLFFARVSYSIVRDIRRDAFANMERLGMSYFDRTPAGSIVSRITNDTEAISDMFSGILSSFISAIFIFTVTLYTMLMLDIKLTGLVALLLPVIFILVNVYRKKSVTVIAKTRSLLSDINSKLSESIEGIRIVQAFGQEERLKTEFEEINKEHVVYANRSMALDSLFLRPAMSLLKLLAYAVLMAYFGFTGVKGGLTAGLMYAFIQYVNRLFDPLIEVTQNFSTLQTSMVSAGRVFDLIDETGFEPSQKNTEAFVREGNIEFKNVSFSYDGKKQILDNVSFSVKKGETIAFVGATGSGKSSIINVFMRFYEFQSGQVLLDGKDIRDYSQEQLRKNIGLVLQDPFLYHGTIKSNIKMYQDITDQEVQDAAEFVDADQFIQKLPDKYDAAVSERGSSFSTGQRQLLAFARTVASKPKILILDEATANIDSETEQIVQDSLAKMRQGRTTIAIAHRLSTIQDANCIYVLDRGKIIESGNHESLLDLKGTYYRMYQLQAGMMEV

SEQ ID NO: 8483 - DNA, 375 bp, Streptococcus agalactiae
atgtctgttattttaattattgttattcttctggcttttgttgcttgggcatcttggaattattggagggttcgtagggcagctaaatttttagataacgagtcttttcaaaaagaaatgtcacgaggacagttaattgatatccgagaagctggtgcttttcatagaaagcatattctcggagcacgtaacattccagcaagtcaatttaaagttgccttatcggctttgcgcaaagataaacctgtcctcttatatgacgcaagccgtggtcaatctattccaaggattgttttgttactcagaaaagaaggttttaatcaactttacgtgttaaaggacggtttcaattactggacgggtagagttaagtaa

SEQ ID NO: 8484 - protein, 124 aa, Streptococcus agalactiae
MSVILIIVILLAFVAWASWNYWRVRRAAKFLDNESFQKEMSRGQLIDIREAGAFHRKHILGARNIPASQFKVALSALRKDKPVLLYDASRGQSIPRIVLLLRKEGFNQLYVLKDGFNYWTGRVK

SEQ ID NO: 8485 - DNA, 714 bp, Streptococcus agalactiae
atgattattagtaaacacttaagcgtaagttatgataataatttagtgctagaagatattaatttacgcttagaaggctccggaatcattggtattttagggcctaatggggcggggaaatctacgcttatgaaagctcttcttggtttggttgattctactggagaatcagggattgggggagatttgctacctttaatggggagagtagcatatgttgaacaaaaaactaatattgattaccaattccctataactgttggagaatgcgtttctttaggattatataaggaacgaggcctcttcaagcgactatcaaaaactgactgggaaaaagtatcccgagtgattgatcaagttggtttgagagggtttgaaaatagaccaattaatgccttatcaggtggacaatttcaacgtatgcttatggcaagatgtctcgttcaagaagcggattacatttttttagatgagccgtttgtagggattgattccattagtgaacaaatcatagttaatttactaaaaaaattaagtaaggccggaaaattaattttagtcgtccatcacgatttgagtaaagttgatcattattttgatcaagtaattattttgaaccgtcatctaattgcttgtggaccaatagatcaggcatttacccgtgagaatttaagtgctgcttacggtgatgctattttgttaggacaaggagac

SEQ ID NO: 8486 - protein, 238 aa, Streptococcus agalactiae
MIISKHLSVSYDNNLVLEDINLRLEGSGIIGILGPNGAGKSTLMKALLGLVDSTGESGIGGDLLPLMGRVAYVEQKTNIDYQFPITVGECVSLGLYKERGLFKRLSKTDWEKVSRVIDQVGLRGFENRPINALSGGQFQRMLMARCLVQEADYIFLDEPFVGIDSISEQIIVNLLKKLSKAGKLILVVHHDLSKVDHYFDQVIILNRHLIACGPIDQAFTRENLSAAYGDAILLGQGD

SEQ ID NO: 8487 - DNA, 603 bp, Streptococcus agalactiae
atgaaacaagaaaaaactggccgtaatttaaatttctggaaatgggcatttctcttattgttggcaattaacctttccttcacagcagtgattgcaagtcgcttaattcaagtacgtgagcctaatacaggaaaaatttcgactggggtacaagataaagtaaaagtaggtacttttacgaccaataagtcgcaactgaataagacaattgcactttatttaaaacaatatcaaactaagaagatgaattataagatttatgctgcttcatcttctatactatttgaaggctcttatcaattattaggttatgaagtgcctttatacatctattttgaaccttatcgtttaacaaatggcgctgttcaacttaaagtgacctcattttcagtaggaactcttccgcttccagaaaaagatgtgttacaatatataaaatcatcttataaattgccaaactttgtagatataaaacctaaaaaatcggttattaatattaatttgcaagatttaaaaaataaagaaggtatttatttgaaagcgactgcaattgatttagtaaacgataattttagtttcgatatttttaagaaaaagccctaa

SEQ ID NO: 8488 - protein, 200 aa, Streptococcus agalactiae; identical to SEQ ID NO: 308

SEQ ID NO: 8489 - DNA, 1639 bp, Streptococcus agalactiae
aaaaaactggcgccgtgttggagttggtgtccttacacttgcttcagttgcgactcttgctgcatgtggaagtaaatcagcttcccaggattctaatggagcgattaattgggctattccaacagaaatcaatacactagatttatctaaagtcacagacacttactcaaatctagctattggtaactctagtagtaatttccttcgcttagataaagatggaaagacaagaccagatttggctactaaagtagatgtttcaaaagatggcttaacttatacagctacattacgtaaaggcttgaagtggtcagatggcagtaaacttactgcaaaggattttgtttattcatggcaacgtttagttgatcctaaaacagcttcacaatatgcttaccttgctgttgaagggcatgtgcttaatgccgataaaatcaacgaaggacaagagaaagacttgaataagctaggtgttaaggcggaaggcgatgacaaagttgttattactttatctagtccgtctccacaatttatctactaccttgcattcactaacttcatgccacaaaaacaagaagttgttgaaaaatatggaaaagattacgcaactacttcaaaaaatacagtttactcaggaccatatactgttgaaggttggaatggttcgaatggtactttcacgctgaagaaaaacaaaaattattgggacgctaaaaatgtaaaaacaaaagaagttcgcatccagactgttaaaaaaccagataccgccgttcaaatgtataaacgtggtgagttagatgcagctaatatctcaaatacttctgctatttatcaagctaataagaataataaagatgtcacagatgttctagaagcgaccactgcctatatggaatataatactactggttctgtgaaagggcttgataatgttaagattcgtcgcgccttaaacttagcaactaaccgtaaaggagttgttcaagcagccgttgatacaggctcaaaaccggcaattgcttttgcacctactggtttagccaaaacaccagatggaactgatttggcaaaatatgttgccccaggttatgaatataataaaactgaagcagcaaaactctttaaagaaggtttggctgaatcaggcttgactaagctaaaattaacaattacagcagatgctgatgctcctgctgccaaaaactctgttgactatatcaagtctacttgggaagctgctcttccaggacttactgttgaagaaaaatttgtaacctttaaacaacgcttagaagacagtagaaaacaaaactttgacatcgtagtttctctttggggtggggattatccagaaggatcaactttctacggcctctttaagtcagattcacaaaataacgatggaaaatttgctaacaaggactatgatgctgcttataacaaggcaatttctgaagatgcgatgaaaccagcagaatcagcgaaggactataaagaagcagagaaaattttatttgagcaaggtgcttataacccactctacttccgtagtggtaaaggtttacaaaatccaaaattaaaaggtgttattcgtaatactacaggtttgtcaatagactttacacatgcttataaaaaa

SEQ ID NO: 8490 - protein, 546 aa, Streptococcus agalactiae
KNWRRVGVGVLTLASVATLAACGSKSASQDSNGAINWAIPTEINTLDLSKVTDTYSNLAIGNSSSNFLRLDKDGKTRPDLATKVDVSKDGLTYTATLRKGLKWSDGSKLTAKDFVYSWQRLVDPKTASQYAYLAVEGHVLNADKINEGQEKDLNKLGVKAEGDDKVVITLSSPSPQFIYYLAFTNFMPQKQEVVEKYGKDYATTSKNTVYSGPYTVEGWNGSNGTFTLKKNKNYWDAKNVKTKEVRIQTVKKPDTAVQMYKRGELDAANISNTSAIYQANKNNKDVTDVLEATTAYMEYNTTGSVKGLDNVKIRRALNLATNRKGVVQAAVDTGSKPAIAFAPTGLAKTPDGTDLAKYVAPGYEYNKTEAAKLFKEGLAESGLTKLKLTITADADAPAAKNSVDYIKSTWEAALPGLTVEEKFVTFKQRLEDSRKQNFDIVVSLWGGDYPEGSTFYGLFKSDSQNNDGKFANKDYDAAYNKAISEDAMKPAESAKDYKEAEKILFEQGAYNPLYFRSGKGLQNPKLKGVIRNTTGLSIDFTHAYKK

SEQ ID NO: 8491 - DNA, 912 bp, Streptococcus agalactiae
atgattaaatatattttaaagcgtgttgctattttgttagtaacgctatgggttgtcataaccctatcgttctttctgatgcagatccttccaggaacaccctacaataatccaaaactcactgaagaaatgatcgcattgcttaataaacagtatggtttagacaagcctgtatggcaacaatatttgacttacctttggaatgtacttcatggtgactttggaacgagttatcaatcagtgaatcagccagtatcacgtatgattagcttgagattaggagtttcagtacatctaggtgttcaggctctcgtatttggtgttttaggcggtattttggtaggagctatttcggcacgtcataagaatgataaagtcgatggtatcttaagtgttattgcaacgctagggatttctatgccttcatttatcattggtatcttattattagactattttggatttaagtggaacttgttgcctttatcaggttgggggactttctctcaaaccattttaccttctttagctctaggactccctacattagcatctgtttcacgcttcttccgtagtgaaatgattgaaactttaaattctgattatgtgcaactagctcgttcaaaaggtatgacaattcgtcaagtaactcgaaaacatgcttaccgtaattctatgattccaattttaactctaattggccctttggcggcgggtctgttaactggttctgcactaattgagcagattttctcgattccaggaattgggcagcagtttgttacttcgattccaacaaaagactatcctgttattatggggacaaccattgtttatgcagtaatgttgatggttgctatcttgataacagacgttgttattagtatcgtagacccacgtgttcgcttgcag

SEQ ID NO: 8492 - protein, 304 aa, Streptococcus agalactiae
MIKYILKRVAILLVTLWVVITLSFFLMQILPGTPYNNPKLTEEMIALLNKQYGLDKPVWQQYLTYLWNVLHGDFGTSYQSVNQPVSRMISLRLGVSVHLGVQALVFGVLGGILVGAISARHKNDKVDGILSVIATLGISMPSFIIGILLLDYFGFKWNLLPLSGWGTFSQTILPSLALGLPTLASVSRFFRSEMIETLNSDYVQLARSKGMTIRQVTRKHAYRNSMIPILTLIGPLAAGLLTGSALIEQIFSIPGIGQQFVTSIPTKDYPVIMGTTIVYAVMLMVAILITDVVISIVDPRVRLQ

SEQ ID NO: 8493 - DNA, 849 bp, Streptococcus agalactiae
atgaataaggcattattagagggaaaagatttatcaaaaatgttaggagagttaggtttttctgacactgttatcacacaggttgcattagctgatttgcatggtaacatttcaaggagcctactaaagattgagtcttatttagctaatcttttgttagttagaaaaaaagtaatagaagtagctacttacccattgatattattgtcttttctggtgctaattatgattggccttaggaattatttaatgccccaattaggagaaaataattttgcaactagactgattacaaatgtgccgaatattttcttattacttttagcagttgtacttatttttagtttaatattttatattattcaaaagcgattgtcgcgcattaaagtagcttgttttttaacaacaattcccttagttggatcatatgttaagctttatttaactgcttactatgcccgtgagtggggaaatttattaagtcaaggtattgaattggaccaaattgttaaagtaatgcaaaatcagaaatccaaactttttagggaaataggatatgacatggaagaaggttttctatcaggtaaagcatttcaccaaaaagtattagactatccgtttttcttaactgagcttagtttaatgattgaatatggccaagttaaggcgaaattaggaacagagttagatatatatgctgatgagaagtgggaggatttttttacaaaattagctagagcgacccagttaatccaacccgttatttttatttttgtagctcttatcattgttatgatttatgcagcaatgctgttaccaatgtatcaaaatatggagatattatcatga

SEQ ID NO: 8494 - protein, 282 aa, Streptococcus agalactiae
MNKALLEGKDLSKMLGELGFSDTVITQVALADLHGNISRSLLKIESYLANLLLVRKKVIEVATYPLILLSFLVLIMIGLRNYLMPQLGENNFATRLITNVPNIFLLLLAVVLIFSLIFYIIQKRLSRIKVACFLTTIPLVGSYVKLYLTAYYAREWGNLLSQGIELDQIVKVMQNQKSKLFREIGYDMEEGFLSGKAFHQKVLDYPFFLTELSLMIEYGQVKAKLGTELDIYADEKWEDFFTKLARATQLIQPVIFIFVALIIVMIYAAMLLPMYQNMEILS

SEQ ID NO: 8495 - DNA, 456 bp, Streptococcus agalactiae
atgaaaaatttattgttaaaatgtaaggataagaaggttaaagcatttacacttttagaatgtttggtagcattggttacaatcacaggagctttactagtttatcaaggactgacaaaattgttggctcaacagatagtagtgatgtcttcttccagtcagtctgaatgggtgttattaactcagcaactaaatgcagaatttgaaggcgctcatctggaatatttaagacagaacaaactttatttacgtaagcaagataagattgtaacctttggcaaatctaataaagatgatttccgtaagacaggttatgatggtcgaggttatcaaccaatggtttatgggttagacaattgtcaaatgagtcagaccaaaagtatggtaaaacttgttttttattttaaggacgggttaaaaaggacattttactatgattttaaagaagaaacttaa

SEQ ID NO: 8496 - protein, 151 aa, Streptococcus agalactiae; identical to SEQ ID NO: 398

SEQ ID NO: 8497 - DNA, 282 bp, Streptococcus agalactiae
atgaaaaataaaaaaatcttatttgggactggccttgctggtgtgggtttactggcagctgctggttataccctaactaaaaaagtaacagattataaacgtcagcaaatcactcagaccttaagagaattttttagtcagatgggtgatattcaggtattttattttaatgaatttgaatctgatattaaaatgaccagtggtggtcttgtcttggaagatggcagaattttcgaattcatttatcgtcaaggtgttcttgattatgtggaggtgagcaaa

SEQ ID NO: 8498 - protein, 94 aa, Streptococcus agalactiae
MKNKKILFGTGLAGVGLLAAAGYTLTKKVTDYKRQQITQTLREFFSQMGDIQVFYFNEFESDIKMTSGGLVLEDGRIFEFIYRQGVLDYVEVSK

SEQ ID NO: 8499 - DNA, 453 bp, Streptococcus agalactiae
atgaaacacaccagtaaagaaaccaaaacaaaagaagctccaatgtttattcaaatgtcaatatatgcagctattctattagtttcacaaatgatttcaatgttattaccgaaatcactaccaatcccaacgacggttattggtttggtgctaatgtatgtattgctaactgctaaaattatcaaggtagagtgggttgactcttttggggctttgatgataagcatgattggttttatgtttgtcccctcaggaatatcagtagcagcgaatcttgatatcctaaaagctgaaggcttgcaactagttgctgttattacaatctcaactgttgttatgttggtagtggtagcatatgttgcacgattaatacttgctatcagagaactcagtgtcacagatttatttaaaaagatattacctaaccactatagtaagaaagtagaggaaaaa

SEQ ID NO: 8500 - protein, 151 aa, Streptococcus agalactiae
MKHTSKETKTKEAPMFIQMSIYAAILLVSQMISMLLPKSLPIPTTVIGLVLMYVLLTAKIIKVEWVDSFGALMISMIGFMFVPSGISVAANLDILKAEGLQLVAVITISTVVMLVVVAYVARLILAIRELSVTDLFKKILPNHYSKKVEEK

SEQ ID NO: 8501 - DNA, 1626 bp, Streptococcus agalactiae; identical to SEQ ID NO: 467

SEQ ID NO: 8502 - protein, 542 aa, Streptococcus agalactiae
VTKYLKYISFVALFLASIFLVACQNQNSQTKERTRKQRPKDELVVSMGAKLPHEFDPKDRYGIHNEGNITHSTLLKRSPELDIKGELAKKYKISKDGLTWSFDLNDDFKFSNGEPVTADDVKFTYDMLKADGKAWDLTFIKNVEVVGKNQVNIHLTEAHSTFTAQLTEIPIVPKKHYNDKYKSNPIGSGPYMVKEYKAGEQAIFVRNPYWHGKKPYFKKWTWVLLDENTALAALESGDVDMIYATPELASKKVKGTRLLDIASNDVRGLSLPYVKKGVVKNSPDGYPVGNDVTSDPAIRKALTIGLNRQKVLDTVLNGYGKPAYSIIDRTPFWNPKTAIKDNKVAKAKQLLTKAGWKEQADGSRKKGNLKSEFDLYYPTNDQLRANLAVEVAEQAKALGITIKLKASNWDEMATKSHDSALLYAGGRHHAQQFYESHYPSLAGKGWTNITFYNNPTVTKYLDKAMTSPDLDKANKYWKLAQWDGKTGASTLGDLPNVWLVSLNHTYIGDKRINVGKQGVHSHGHDWSLLTNIAEWTWDESAK

SEQ ID NO: 8503 - DNA, 1257 bp, Streptococcus agalactiae
atgcgagcttggaaaggtattgttttaattttatctagcatagtggtgacactagtagcatggcaaaatgcaggattaagtgaatttgttgtaccaggattagctttgacaagtttatcgctaacattcctcttatcaaccaaatttaggatacttgaaagttactttcaaggtattgaaaatatgtatttttaccacaaggtaatggctgtattttcaatgattttgcttctattgcacaaaattggtcttggacaaggcggacatggaagtgagtttgcaaagactattggcagtgcgggattatatctttttctaagtattgtttttgtagcttatttcggaaattttttaaagtatgaaatttggcgttttattcatcgctttgtttatttagcttatattttgggattggtacatacttttatgattttaggagataggatactaggaaatactttactcagtttaatcgtattaggttatgctgtcattggggttatatctggattttatattattttcctatattctagaatgcgttttcgtcgtgtagggtacgttcaaaaggttactcatcttaaccatgatacaactgagattgaaatagcaatgaagcgtccttatcgatatgactatggacaatttactttttttaaaatttatcaagctggctttgaatcagcagctcatcctttctcgatatcaggtggtcatgatagagtgatatttttaactgttaaagcttcaggagattatacgaaatccatttacaaacagctaaaagttgggacaaaaatagccttagatagagcttatggtcatatgttatttgataaagacaagaaagaacaggtttggattgcaggaggtatcggcatcactcccttcatttcatttattagagaaaatagtattttgactaagagagttgacttcttttataccttttcaaatcaagacaatttgatttatcaagatatgttagaatcctatgctaaagccaatcctaattttaaacttcacttaaataatagtagcctcaaaggaagacttgattttagtcagtctgtttttgaaggacaaccaacaatatttatgtgtgggccaactagtatgacatctacttatgctaaggtctttcggcaaaaagatgcaaagtctcgtttagtctatgaaggattttcctttagagacagttggttatccatatttctattaaaaacttttgacaaagtttattctaatttgataaaa

SEQ ID NO: 8504 - protein, 419 aa, Streptococcus agalactiae
MRAWKGIVLILSSIVVTLVAWQNAGLSEFVVPGLALTSLSLTFLLSTKFRILESYFQGIENMYFYHKVMAVFSMILLLLHKIGLGQGGHGSEFAKTIGSAGLYLFLSIVFVAYFGNFLKYEIWRFIHRFVYLAYILGLVHTFMILGDRILGNTLLSLIVLGYAVIGVISGFYIIFLYSRMRFRRVGYVQKVTHLNHDTTEIEIAMKRPYRYDYGQFTFFKIYQAGFESAAHPFSISGGHDRVIFLTVKASGDYTKSIYKQLKVGTKIALDRAYGHMLFDKDKKEQVWIAGGIGITPFISFIRENSILTKRVDFFYTFSNQDNLIYQDMLESYAKANPNFKLHLNNSSLKGRLDFSQSVFEGQPTIFMCGPTSMTSTYAKVFRQKDAKSRLVYEGFSFRDSWLSIFLLKTFDKVYSNLIK

SEQ ID NO: 8505 - DNA, 228 bp, Streptococcus agalactiae
atggataaaaataatttagaagacttgacaggaaaaaagatacttagaaatggttttggtggtcttcgtttggaatatgggacaatctttcttgatgttggattgttcacttatattgtgctgatactatcaatatttttctttttagttgaacgttggtttttgggagctttaacttttgtgttgcatgttcccttgcttctacttgggatatggtgtggagagaga

SEQ ID NO: 8506 - protein, 76 aa, Streptococcus agalactiae
MDKNNLEDLTGKKILRNGFGGLRLEYGTIFLDVGLFTYIVLILSIFFFLVERWFLGALTFVLHVPLLLLGIWCGER

SEQ ID NO: 8507 - DNA, 474 bp, Streptococcus agalactiae; identical to SEQ ID NO: 593

SEQ ID NO: 8508 - protein, 158 aa, Streptococcus agalactiae
LLKIQYYQGVTRSKMRIKDYADSLGVSSQSIYKRIRSPKYKERLKGHLYRDNQKVENLDLIGIKILEDYHFENDVIELEKTLGDIQEEFEQEKKGMQYRIDRLADKLTPLLEDNQNLVQKNYELLNYVRSLERQKLLLIIALAVMVITLLVAIWLAIF

SEQ ID NO: 8509 - DNA, 648 bp, Streptococcus agalactiae
atgaaacaaatgaatactttccaacaatttatctactacttccaacataatggtagttatatcttagaacaatttatccaccactttttaatttcagtttacggcgttattttagctgcaattgttggtatccctctaggtatcttcatcgctagacgtggtaaaattaaaacctttgttatgggaatcgcaaatgtcatccaaaccattccttctttagctatgatctctatcattatgttaggtctagggctaggtattaaaacagtagttgcaactgtctttctttattctcttctgccaatcatcacaaatacttacactggtattagaaatgttgactccgacttactagatgctgctaaaggaatgggcatgactaagcgtcaacgtttatttatggttgagttaccactatctatttccgttatcatggctggacttagaaatgcccttgttgtagcaattggtattacagccattggtgctttcgtcgggggaggcggacttggagatatcatcataagaggaactaatgcaacaaatggtggtgctattatcttagcaggatctcttccaacagcccttatggcaattttctctgatttaatcctaggcggtatccaacgcatgcttgaaccaagaaaa

SEQ ID NO: 8510 - protein, 216 aa, Streptococcus agalactiae
MKQMNTFQQFIYYFQHNGSYILEQFIHHFLISVYGVILAAIVGIPLGIFIARRGKIKTFVMGIANVIQTIPSLAMISIIMLGLGLGIKTVVATVFLYSLLPIITNTYTGIRNVDSDLLDAAKGMGMTKRQRLFMVELPLSISVIMAGLRNALVVAIGITAIGAFVGGGGLGDIIIRGTNATNGGAIILAGSLPTALMAIFSDLILGGIQRMLEPRK

SEQ ID NO: 8511 - DNA, 927 bp, Streptococcus agalactiae
atgcttaaaaaatcgcactttttacagatatttacactttgcttagccctcttaacgatttctggttgtcaattaaccgatactaaaaagtctggtcataccacaattaaggttgctgcccaaagttctacagagtctagtattatggcaaatattatcaccgaattaattcatcacgaattaggatacaacacaactttaataagcaatcttggttcctctacggttactcaccaagctttgctccgtggtgatgctgacattgctgccacacgttatacaggaacagacatcacagggactcttggtttaaaagctgttaaagaccctaaagaagcttctaagattgtaaaaactgaawtccaaaaacgctacaatcaaacttggtatcctacttatggtttttctgatacttatgcattcatggttactaaagagtttgccagacagaataaaatcactaagatctctgatcttaaaaaattatcaacaactatgaaggcaggggttgatagttcatggatgaatcgcgagggagatggatacactgatttcgctaaaacatacggttttgaattttcacatatttaccctatgcaaattggcttagtctatgatgcggttgaaagtaacaaaatgcaatctgtattaggctactccactgacggtcgtatttcgagctatgatttagaaattttaagggatgataaaaaattctttcctccttatgaagcctctatggttgtcaacaattctatcatcaaaaaagatcctaaactaaaaaaattactccatcgactcgatggtaaaatcaatttaaaaacgatgcaaaaccttaattatatggtagatgataaacttttagaaccttcagttgttgccaaacaatttttagaaaaaaaccattattttagaggagataaataa

SEQ ID NO: 8512 - protein, 308 aa, Streptococcus agalactiae
  MISC_FEATURE (1)..(308): Xaa = Any Amino Acid
MLKKSHFLQIFTLCLALLTISGCQLTDTKKSGHTTIKVAAQSSTESSIMANIITELIHHELGYNTTLISNLGSSTVTHQALLRGDADIAATRYTGTDITGTLGLKAVKDPKEASKIVKTEXQKRYNQTWYPTYGFSDTYAFMVTKEFARQNKITKISDLKKLSTTMKAGVDSSWMNREGDGYTDFAKTYGFEFSHIYPMQIGLVYDAVESNKMQSVLGYSTDGRISSYDLEILRDDKKFFPPYEASMVVNNSIIKKDPKLKKLLHRLDGKINLKTMQNLNYMVDDKLLEPSVVAKQFLEKNHYFRGDK

SEQ ID NO: 8513 - DNA, 633 bp, Streptococcus agalactiae
atggtcaatttcttatcacagtatggcatgcaaatattagtaaaaacatgggaacaagtctatatctcattctttgctatagcacttgggattgcaattgctgttccatkgggtgtggtcttaacacgttttcccaaagtagccaaaattatcattgctatagctagcatgttacaaactataccaagtttagccttattagctttaatgattccattgtttggaattggaaaaatcccagctatcgttgctttatttatttattccttgcttcctatactaaggaatacttatataggtatgaataatgtcaatccaacacttaaagattgtgctaaagggatgggaatgaaacctattcaatctatatttcaagttgagttacctttagctactccaattattatggctggtattcgcttgtctactatttatgttattgcttgggctacattggcttcttatataggtgcaggtggacttggtgatctcatttttagcgggttaaatctttttcagtccaaattaattctagggggcacaattcctgttattatcctgtcacttattatagattatcttttaggattactggaaacagctctaacgcccagaacaacaagaagggaggct

SEQ ID NO: 8514 - protein, 211 aa, Streptococcus agalactiae
  MISC_FEATURE (1)..(211): Xaa = Any Amino Acid
MVNFLSQYGMQILVKTWEQVYISFFAIALGIAIAVPXGVVLTRFPKVAKIIIAIASMLQTIPSLALLALMIPLFGIGKIPAIVALFIYSLLPILRNTYIGMNNVNPTLKDCAKGMGMKPIQSIFQVELPLATPIIMAGIRLSTIYVIAWATLASYIGAGGLGDLIFSGLNLFQSKLILGGTIPVIILSLIIDYLLGLLETALTPRTTRREA

SEQ ID NO: 8515 - DNA, 456 bp, Streptococcus agalactiae
atgagaaaatatataaaatggttaattcccatatcaatttttgggatgatacttggaggctgtcaaatgaatagtgaacataaaattcagtcaaacgaagtaaaaaatagcaagcaatcagaagtgaagaaagataaaaaaatgacaaaaaaagaacaattagcctatctcaaagagcatgagcaagaaatcatagattatgtaaaattacataacaaccaaattgagtccgttcaattcgattggtcaagtgtaaaagtagaacaaagcgggaatggaactccacaagggggtgattataatctttcactgagaggaaagtttaatcatctacaaaattcaaaattaatagttgatttttatttagctcataaaaatgatatcccaaatatcaaatcaatgggaatgctaaataagccgtatatacataaaaatggtatttggcacatttatgaa

SEQ ID NO: 8516 - protein, 152 aa, Streptococcus agalactiae
MRKYIKWLIPISIFGMILGGCQMNSEHKIQSNEVKNSKQSEVKKDKKMTKKEQLAYLKEHEQEIIDYVKLHNNQIESVQFDWSSVKVEQSGNGTPQGGDYNLSLRGKFNHLQNSKLIVDFYLAHKNDIPNIKSMGMLNKPYIHKNGIWHIYE

SEQ ID NO: 8517 - DNA, 579 bp, Streptococcus agalactiae
atgaacaataaaaacaaatggactataattttacttatttttactatcatcgtaattgatgttagcttactatttggcgggaatcgtttaagtttaccaatcaaattattaattttattagtaaccagtatagcagaattttgttcgatttttataatgataaaagttccgactcctcaaaaatataagaaagaaccatttggattaaaagcaaaattttattctattgtactctttctctcgactattctttatacaattgggatatggaatgtgacgccagcttccccatacaatgttaaagaatcaattcttggagttggcattttaatacaagtagttttcttcatttattttctattaaaaaaaattaacgaaagtcccgatgaacgcttttatagtaatttagcattgtcagcttctttgatgtttttgatatcaataatgttattaattcttatagctatttaccttaatatatatggaacgttagagttaaaatcaggctacctttatattatggtaggtttattattactaatgtttgctgttacatattactttcttgagggacggaga

SEQ ID NO: 8518 - protein, 193 aa, Streptococcus agalactiae
MNNKNKWTIILLIFTIIVIDVSLLFGGNRLSLPIKLLILLVTSIAEFCSIFIMIKVPTPQKYKKEPFGLKAKFYSIVLFLSTILYTIGIWNVTPASPYNVKESILGVGILIQVVFFIYFLLKKINESPDERFYSNLALSASLMFLISIMLLILIAIYLNIYGTLELKSGYLYIMVGLLLLMFAVTYYFLEGRR

SEQ ID NO: 8519 - DNA, 948 bp, Streptococcus agalactiae
atgataaaaacaaagtttagtgatccactggaacaattagccaaaaaaaggaaaaggaaaacattattcaagaccgtagtattggcattaataactgtactattagtagttggaatagcttttaaagggtttacatatttaacttcaaaaaatggtcaaaaaacatatcataactttgaactactttctgaaatagcatatccaaatatttcctatgatagtctctattaccagccaagcggtcagtttactggtaaagtacatgctgatagatttaaagatatcgatggggttcaaattccatattctagttttgaagaaaattatagtatctcaggtacttttggcacaaatgctgatgaaaaatcagaaaagaatggcttgtatgatcgaggtactagacaaaaagttccacaatttttcaataaaaatgttaagtataaaaaaggagaagccaaaacaactccaacaaatgatttaaaatatgtaaataaattgaataatgatcttattgaaattgcaataacttttgataagtcctatagttacaaagaaataaaaacaatgataccaaataatataaaacaaaattggttatggataggtacaagcacagaattagatacatcatattggccaacaaagtatcaattcggtacagatcctgaaactttgaatacaccacaaatattcatagataaaataaaagaaaacttaaaaggtaactcaaaagtatactttaataatataaatatctactcagatttagaaaagtatgccaaaaaatacgacaaggtaaataatagcgacaaattaaaattttcgggaataatattaacaggtaaagccgaaaactttaaacaacttaaagaaaaagaatgggtacatgcttcaagtataggggcaaacatagaatataagccctattataaattagataaagaataa

SEQ ID NO: 8520 - protein, 315 aa, Streptococcus agalactiae; identical to SEQ ID NO: 672

SEQ ID NO: 8521 - DNA, 714 bp, Streptococcus agalactiae
atgaaaaaagtcatcgatttaaaaaaactacaaaaagcatatgcctcagaaaccgttttaaataatattaatttggaggtgtttaaaggcgaaataattggattaataggaccctctggagcagggaaatctaccttgattaaaactatgcttggcatggaaaaagcagataagggaacagctcttgttcttgatactcaaatgccagatcgtaatattttaaatcaaattggctatatggctcaatctgatgccttatacgagtctttaactggcttagaaaatttattattctttggaaaaatgaaaggtattcaaaaaactgaattaaaacagcagataactcatatttctaaagtagtagatctagaaaaccaacttgataaatttgtctcaggttactcaggaggtatgaaaagacggctttctctagccatcgccctacttggaaaccccacagttttaatcctagatgaacctaccgttggaattgatccatccttgaggagaaaaatctggcaagagctaattaatattaaggatgaaggacattctatctttattacaacccacgttatggatgaagcagaattaacaagtaaggttgcactactattacgtggaaacattattgcctttgatactccattacatttaaaaaaacaatttaatgtgagtactattgaggaagttttcttaaaagctgaaggagaa

SEQ ID NO: 8522 - protein, 238 aa, Streptococcus agalactiae
MKKVIDLKKLQKAYASETVLNNINLEVFKGEIIGLIGPSGAGKSTLIKTMLGMEKADKGTALVLDTQMPDRNILNQIGYMAQSDALYESLTGLENLLFFGKMKGIQKTELKQQITHISKVVDLENQLDKFVSGYSGGMKRRLSLAIALLGNPTVLILDEPTVGIDPSLRRKIWQELINIKDEGHSIFITTHVMDEAELTSKVALLLRGNIIAFDTPLHLKKQFNVSTIEEVFLKAEGE

SEQ ID NO: 8523 - DNA, 705 bp, Streptococcus agalactiae
atgaaaatagataaaaaagaacttttagcacttattgctagtattattttattaatttttgcttctgttacgtttttcttatttaaagatcatggcactactcaaatggatactgtagaaagcagtgttaaccatgtcagtgattctcaattaactgaggcacaagatatgttagataaatttgagaagaaaccttcagaaaaattattgaaggatgtcgaacttgctttaaataaattgtccaattcttctaaaaaagaagctttgcaaaaacgttttaagaaagcaaaagataagtatcttaaagacgaagcagataagaaagctaccaaagatgctacagatttagtagaaattctagaacaagccccttcagaagaaaatgtgttaaaagctgaagcagcagtcaataagttaactgtcaaagaatctaaagaagctttacaaaaacgtattgatactgttaagacacaatatggtttgattgggaatcaaactccctctagttcagtagctgaaactacagaacaagggacagctaatcctgctagtcaggatacttctagttacgttaatcagaatgtagcaccaacttatgagcaaccgcaagcgaataatacaccagttactccaggggttaacaatactgttccgactccaggaactggtactgtacctgctactaatgggacaggtgttgctcag

SEQ ID NO: 8524 - protein, 235 aa, Streptococcus agalactiae
MKIDKKELLALIASIILLIFASVTFFLFKDHGTTQMDTVESSVNHVSDSQLTEAQDMLDKFEKKPSEKLLKDVELALNKLSNSSKKEALQKRFKKAKDKYLKDEADKKATKDATDLVEILEQAPSEENVLKAEAAVNKLTVKESKEALQKRIDTVKTQYGLIGNQTPSSSVAETTEQGTANPASQDTSSYVNQNVAPTYEQPQANNTPVTPGVNNTVPTPGTGTVPATNGTGVAQ

SEQ ID NO: 8525 - DNA, 3699 bp, Streptococcus agalactiae
gtggataaacatcactcaaaaaaggctattttaaagttaacacttataacaactagtattttattaatgcatagcaatcaagtgaatgcagaggagcaagaattaaaaaaccaagagcaatcacctgtaattgctaatgttgctcaacagccatcgccatcggtaactactaatactgttgaaaaaacatctgtaacagctgcttctgctagtaatacagcgaaagaaatgggtgatacatctgtaaaaaatgacaaaacagaagatgaattattagaagagttatctaaaaaccttgatacgtctaatttgggggctgatcttgaagaagaatatccctctaaaccagagacaaccaacaataaagaaagcaatgtagtaacaaatgcttcaactgcaatagcacagaaagttccctcagcatatgaagaggtgaagccagaaagcaagtcatcgcttgctgttcttgatacatctaaaataacaaaattacaagccataacccaaagaggaaagggaaatgtagtagctattattgatactggctttgatattaaccatgatatttttcgtttagatagcccaaaagatgataagcacagctttaaaactaagacagaatttgaggaattaaaagcaaaacataatatcacttatgggaaatgggttaacgataagattgtttttgcacataactacgccaacaatacagaaacggtggctgatattgcagcagctatgaaagatggttatggttcagaagcaaagaatatttcgcatggtacacacgttgctggtatttttgtaggtaatagtaaacgtccagcaatcaatggtcttcttttagaaggtgcagcgccaaatgctcaagtcttattaatgcgtattccagataaaattgattcggacaaatttggtgaagcatatgctaaagcaatcacagacgctgttaatctaggagcaaaaacgattaatatgagtattggaaaaacagctgattctttaattgctctcaatgataaagttaaattagcacttaaattagcttctgagaagggcgttgcagttgttgtggctgccggaaatgaaggcgcatttggtatggattatagcaaaccattatcaactaatcctgactacggtacggttaatagtccagctatttctgaagatactttgagtgttgctagctatgaatcacttaaaactatcagtgaggtcgttgaaacaactattgaaggtaagttagttaagttgccgattgtgacttctaaaccttttgacaaaggtaaggcctacgatgtggtttatgccaattatggtgcaaaaaaagactttgaaggtaaggactttaaaggtaagattgcattaattgagcgtggtggtggacttgattttatgactaaaatcactcatgctacaaatgcaggtgttgttggtatcgttatttttaacgatcaagaaaaacgtggaaattttctaattccttaccgtgaattacctgtggggattattagtaaagtagatggcgagcgtataaaaaatacttcaagtcagttaacatttaaccagagttttgaagtagttgatagccaaggtggtaatcgtatgctggaacaatcaagttggggcgtgacagctgaaggagcaatcaagcctgatgtaacagcttctggctttgaaatttattcttcaacctataataatcaataccaaacaatgtctggtacaagtatggcttcaccacatgttgcaggattaatgacaatgcttcaaagtcatttggctgagaaatataaagggatgaatttagattctaaaaaattgctagaattgtctaaaaacatcctcatgagctcagcaacagcattatatagtgaagaggataaggcgttttattcaccacgtcagcaaggtgcaggtgtagttgatgctgaaaaagctatccaagctcaatattatattactggaaacgatggcaaagctaaaattaatctcaaacgaatgggagataaatttgatatcacagttacaattcataaacttgtagaaggtgtcaaagaattgtattatcaagctaatgtagcaacagaacaagtaaataaaggtaaatttgcccttaaaccacaagccttgctagatactaattggcagaaagtaattcttcgtgataaagaaacacaagttcgatttactattgatgctagtcaatttagtcagaaattaaaagaacagatggcaaatggttatttcttagaaggttttgtacgttttaaagaagccaaggatagtaatcaggagttaatgagtattccttttgtaggatttaatggtgattttgcgaacttacaagcacttgaaacaccgatttataagacgctttctaaaggtagtttctactataaaccaaatgatacaactcataaagaccaattggagtacaatgaatcagctccttttgaaagcaacaactatactgccttgttaacacaatcagcgtcttggggctatgttgattatgtcaaaaatggtggggagttagaattagcaccggagagtccaaaaagaattattttaggaacttttgagaataaggttgaggataaaacaattcatcttttggaaagagatgcagcgaataatccatattttgccatttctccaaataaagatggaaatagggacgaaatcactccccaggcaactttcttaagaaatgttaaggatatttctgctcaagttctagatcaaaatggaaatgttatttggcaaagtaaggttttaccatcttatcgtaaaaatttccataataatccaaagcaaagtgatggtcattatcgtatggatgctcttcagtggagtggtttagataaggatggcaaagttgtagcagatggtttttatacttatcgcttacgttacacaccagtagcagaaggagcaaatagtcaggagtcagactttaaagtacaagtaagtactaagtcaccaaatcttccttcacgagctcagtttgatgaaactaatcgaacattaagcttagccatgcctaaggaaagtagttatgttcctacatatcgtttacaattagttttatctcatgttgtaaaagatgaagaatatggggatgagacttcttaccattatttccatatagatcaagaaggtaaagtgacacttcctaaaacggttaagataggagagagtgaggttgcggtagaccctaaggccttgacacttgttgtggaagataaagctggtaatttcgcaacggtaaaattgtctgatctcttgaataaggcagtagtatcagagaaagaaaacgctatagtaatttctaacagtttcaaatattttgataacttgaaaaaagaacctatgtttatttctaaaaaagaaaaagtagtaaacaagaatctagaagaaataatattagttaagccgcaaactacagttactactcaatcattgtctaaagaaataactaaatcaggaaatgagaaagtcctcacttctacaaacaataatagtagcagagtagctaagatcatatcacctaaacataacggggattctgttaaccataccttacctagtacatcagatagagcaacgaatggtctatttgttggtactttggcattgttatctagtttacttctttatttgaaacccaaaaagactaaaaataatagtaaa

SEQ ID NO: 8526 - protein, 1233 aa, Streptococcus agalactiae
VDKHHSKKAILKLTLITTSILLMHSNQVNAEEQELKNQEQSPVIANVAQQPSPSVTTNTVEKTSVTAASASNTAKEMGDTSVKNDKTEDELLEELSKNLDTSNLGADLEEEYPSKPETTNNKESNVVTNASTAIAQKVPSAYEEVKPESKSSLAVLDTSKITKLQAITQRGKGNVVAIIDTGFDINHDIFRLDSPKDDKHSFKTKTEFEELKAKHNITYGKWVNDKIVFAHNYANNTETVADIAAAMKDGYGSEAKNISHGTHVAGIFVGNSKRPAINGLLLEGAAPNAQVLLMRIPDKIDSDKFGEAYAKAITDAVNLGAKTINMSIGKTADSLIALNDKVKLALKLASEKGVAVVVAAGNEGAFGMDYSKPLSTNPDYGTVNSPAISEDTLSVASYESLKTISEVVETTIEGKLVKLPIVTSKPFDKGKAYDVVYANYGAKKDFEGKDFKGKIALIERGGGLDFMTKITHATNAGVVGIVIFNDQEKRGNFLIPYRELPVGIISKVDGERIKNTSSQLTFNQSFEVVDSQGGNRMLEQSSWGVTAEGAIKPDVTASGFEIYSSTYNNQYQTMSGTSMASPHVAGLMTMLQSHLAEKYKGMNLDSKKLLELSKNILMSSATALYSEEDKAFYSPRQQGAGVVDAEKAIQAQYYITGNDGKAKINLKRMGDKFDITVTIHKLVEGVKELYYQANVATEQVNKGKFALKPQALLDTNWQKVILRDKETQVRFTIDASQFSQKLKEQMANGYFLEGFVRFKEAKDSNQELMSIPFVGFNGDFANLQALETPIYKTLSKGSFYYKPNDTTHKDQLEYNESAPFESNNYTALLTQSASWGYVDYVKNGGELELAPESPKRIILGTFENKVEDKTIHLLERDAANNPYFAISPNKDGNRDEITPQATFLRNVKDISAQVLDQNGNVIWQSKVLPSYRKNFHNNPKQSDGHYRMDALQWSGLDKDGKVVADGFYTYRLRYTPVAEGANSQESDFKVQVSTKSPNLPSRAQFDETNRTLSLAMPKESSYVPTYRLQLVLSHVVKDEEYGDETSYHYFHIDQEGKVTLPKTVKIGESEVAVDPKALTLVVEDKAGNFATVKLSDLLNKAVVSEKENAIVISNSFKYFDNLKKEPMFISKKEKVVNKNLEEIILVKPQTTVTTQSLSKEITKSGNEKVLTSTNNNSSRVAKIISPKHNGDSVNHTLPSTSDRATNGLFVGTLALLSSLLLYLKPKKTKNNSK

SEQ ID NO: 8527 - DNA, 60 bp, Streptococcus agalactiae
ttgaagaaaaaacttaaaacatttagcttaatattgctgacaggctctttattggttgct

SEQ ID NO: 8528 - protein, 60 aa, Streptococcus agalactiae
LKKKLKTFSLILLTGSLLVACGRGEVSSHSATLWEQIVYAFAKSIQWLSFNHSIGLGIIL

SEQ ID NO: 8529 - DNA, 1014 bp, Streptococcus agalactiae
atgacaaaacaaaaaattgccgttcttggacctggttcatgggggactgctcttgcacaagtattaaatgacaatggacatgaggtacgcttatggggaaacgtggttgaacaaatagaagagattaatactaaccatactaatcaacgttacttcaaagatattaccttagattccaaaataaaagcctacactaatcttgaggaagcgattaataatgttgacagcattttattcgtcgtcccaactaaagttacaagacttgttgctaaacaagtggctaatcttttaaagcataaagttgttcttatgcatgcttctaagggactagaacctggtactcatgaacgactttctacaattttagaagaagaaatctctgaacaatatcgtagtgatatcgttgttgtttcaggtcccagtcatgctgaagaagccatcgttcgtgatattactttgattactgctgcttcaaaagatattgaagcagctaagtatgtccaaaaattgtttagtaatcattattttagactttatactaacactgatgtcgtaggagtagaaacagctggtgctctaaaaaatattattgctgttggtgctggagcactacacggtcttggttatggtgataatgctaaagcagctattattacgcgtggtttagctgagataacacgtcttggtgtacaattaggggccgaccctctcactttcagtggtttatccggagttggagatttaattgtgactggtacatctgttcattctcgcaactggagagcgggagatgctttaggacgtggtgagaaacttgaagatattgaaaaaaatatggggatggttattgaaggtatctcaacaactaaagttgcttacgaaatcgcccaaaacttaaatgtttacatgcccattacagaagctatttataaatcaatatatgaaggggctaatatcaaagatagcattttagatatgatgtccaatgaatttcgttcagagaatgaatggcac

SEQ ID NO: 8530 - protein, 338 aa, Streptococcus agalactiae
MTKQKIAVLGPGSWGTALAQVLNDNGHEVRLWGNVVEQIEEINTNHTNQRYFKDITLDSKIKAYTNLEEAINNVDSILFVVPTKVTRLVAKQVANLLKHKVVLMHASKGLEPGTHERLSTILEEEISEQYRSDIVVVSGPSHAEEAIVRDITLITAASKDIEAAKYVQKLFSNHYFRLYTNTDVVGVETAGALKNIIAVGAGALHGLGYGDNAKAAIITRGLAEITRLGVQLGADPLTFSGLSGVGDLIVTGTSVHSRNWRAGDALGRGEKLEDIEKNMGMVIEGISTTKVAYEIAQNLNVYMPITEAIYKSIYEGANIKDSILDMMSNEFRSENEWH

SEQ ID NO: 8531 - DNA, 1041 bp, Streptococcus agalactiae
gtgaacagaaaaattattggcttaactctactatctttatctgtactaacattaacagcatgtggtaatcgttcagataagtctgcaaataaatcagatatcaaagttgcgatggtaactaatcaaggtggagtagacgataaatcgtttaatcaatcagcttgggaagggctacaaaagtggggaaaaaagaaggggttgacaaaaggtaatggctttgattatttccagtcatctaatgaatcagatcatgctaataaccttgatacggcagcctctagtggttataatttaatttttggtattggatttggtcttcatgatactattgaaaaagtatcagaaaataataaagatgttaaatacgttattgtagatgatatcattaaaggtaaagaaaatgtagctagtgttacttttgcagacaatgaagctgcttacttagctggagttgctgcagctaagacaactaagacaaaaacagttggttttatcggagggatggaaggcgtcgttgttaagcgatttgaagcaggatttaaggctggagtaaaatcaattgatccggctattaaagttgcggtatcttatgcaggctcatttacagatgcagctaaaggtaaaacgattgctgccacacagtatgcaacaggtgttgatgttatttaccaggctgctggtggtacaggagcaggaatttttagtgaggctaaaactgaaaatgagacccgcaaggaatctaacaaagtctgggtaattggtgttgacagagatcaaagtcaagaaggcaattatgtttcaaaagatggtaagaaagcaaactttgttctggcatctactataaaagaggtggggaaatctctccaatctgtagcagaattaacagagaaaaaacaatatccaggagggaaagtaacagtttttggtctaaaggatagtggtgtagatattaaagagcatcaattgtctagtgagggatctgttgctgtcaaaaaagctaaagaggatattgtttcagggaaaatacaagttcctatgaaa

SEQ ID NO: 8532 - protein, 347 aa, Streptococcus agalactiae
VNRKIIGLTLLSLSVLTLTACGNRSDKSANKSDIKVAMVTNQGGVDDKSFNQSAWEGLQKWGKKKGLTKGNGFDYFQSSNESDHANNLDTAASSGYNLIFGIGFGLHDTIEKVSENNKDVKYVIVDDIIKGKENVASVTFADNEAAYLAGVAAAKTTKTKTVGFIGGMEGVVVKRFEAGFKAGVKSIDPAIKVAVSYAGSFTDAAKGKTIAATQYATGVDVIYQAAGGTGAGIFSEAKTENETRKESNKVWVIGVDRDQSQEGNYVSKDGKKANFVLASTIKEVGKSLQSVAELTEKKQYPGGKVTVFGLKDSGVDIKEHQLSSEGSVAVKKAKEDIVSGKIQVPMK

SEQ ID NO: 8533 - DNA, 1011 bp, Streptococcus agalactiae
atgcgtaccttcaaaccagacactattatgcatttaggtggtggttctcctatggatgctgcgaaagttatgtggctcttctatgaacaaccagaagttgatttccatgacctcgttcaaaaattcatggatatccgtaaacgtgcgttcaaattcccagaacttggtaagaaaacaaaatttgttgctattccaacaacttctggaacaggttctgaagtgacaccatttgccgttatctctgacaaagcaaataatcgtaaatatccaatcgctgattattcattaacaccaactgtagctatcgttgatccggcccttgttatgactgttcctggttttattgcggctgatacgggtatggatgtattgacacatgcamcagaggsttatgtttcacagatggcaaatgattatacagacggacttgctcttcaagcaattaaaattgtgtttgactacttagaacgctcagtaaaagatgctgattttgaagcacgtgaaaagatgcacaatgcgtcaactatggcaggtatggctttcgccaatgcattcttaggtatttctcactcaatggcgcataaaattggcgcacaattccataccgtacacggacgtacaaatgcaattcttttgccgtatgttatccgctataatggaactcgtccagctaaaacagcaacatggcctaagtacaattactatcgtgctgacgaaaagtatcaagatatcgctaaattactcggcttaccagcagcaacaccagaagaagctgtcgaatcatatgcaaaagctgtgtatgaccttggaacacgtttaggtattaagatgaatttccgcgaccaaggcattgatgaaaaagaatggaaagaaaaatctcgtgaactagctttcttagcatatgaagatcaatgttcaccagcaaatccacgccttccgatggtagatcacatgcaagaaatcatcgaagatgcttattatggttatgaggaacgtccaggacgtcgtaag

SEQ ID NO: 8534 - protein, 337 aa, Streptococcus agalactiae
  MISC_FEATURE (1)..(337): Xaa = Any Amino Acid
MRTFKPDTIMHLGGGSPMDAAKVMWLFYEQPEVDFHDLVQKFMDIRKRAFKFPELGKKTKFVAIPTTSGTGSEVTPFAVISDKANNRKYPIADYSLTPTVAIVDPALVMTVPGFIAADTGMDVLTHAXEXYVSQMANDYTDGLALQAIKIVFDYLERSVKDADFEAREKMHNASTMAGMAFANAFLGISHSMAHKIGAQFHTVHGRTNAILLPYVIRYNGTRPAKTATWPKYNYYRADEKYQDIAKLLGLPAATPEEAVESYAKAVYDLGTRLGIKMNFRDQGIDEKEWKEKSRELAFLAYEDQCSPANPRLPMVDHMQEIIEDAYYGYEERPGRRK

SEQ ID NO: 8535 - DNA, 660 bp, Streptococcus agalactiae; identical to SEQ ID NO: 929

SEQ ID NO: 8536 - protein, 220 aa, Streptococcus agalactiae
VKKANQLIAAIFDVNNPFMQGCNVVFDLALLNLLFMITCLPLVTIGAAKISLYRTLWQKLEGDQTNLLILYIKHLKKEWFQGMLLGLVELSILVVIIFDLTILHYQIGFIVSFLKITCYAFLLLTVMTSIYLFPMAARYEMSLLDTVKKSFIMACLNLKWTGVLMFLLIMTWFIMVQSSLLFMLTVSAIFIFAYTAFAYFKIIILQKQFAYFSKQQGDYQ

SEQ ID NO: 8537 - DNA, 1317 bp, Streptococcus agalactiae
atgagtatcaaaaaaagtgtgattggtttttgcctcggagctgcagcattatcaatgtttgcttgtgtagacagtagtcaatctgttatggctgccgagaaggataaagtcgaaattacgtggtgggcttttccaacctttactcaagaaaaggctaaggatggagtaggtacttatgagaaaaaagtcatcaaggcttttgaaaagaaaaatcctaatataaaagtaaaactagagacaattgatttcacatctggacctgaaaaaatcactacagcgattgaagcagggacagcacctgatgtgctttttgatgcaccagggcgaattattcaatatggtaaaaatggtaaattagcagatttgaatgatttatttacagaccaatttattaaggatgtcaataataagaatatcattcaagcttctaagtctggcgataaagcctacatgtatccaataagttctgccccattttatatggcgttcaataaaaaaatgcttaaagatgcaggagttttgaaactcgtaaaagaaggttggactactagtgattttgaaaaagtactaaaagcactaaaaaataaaggctatacaccaggttcattctttgcaaacgggcaaggaggagatcaaggaccacgtgcattttttgctaatctttatagtgctccaataacagataaagaagtaacaaaatataccactgacactaaaaattctgtaaaatcaatgaaaaaaatagttgaatggattaagaaaggctacttgatgaatgggtctcagtatgatggctcagctgacattcaaaactttgccaatggacaaactgctttcactatcctatgggctccagctcaacccaaaactcaagcaaaattattagagtcaagtaaagtggattaccttgaagtgccattcccatcagaagatggaaaaccagatttagaataccttgttaatggttttgcggtctttaataataaagatgaaaacaaagtaaaagcctctaagaaatttatcacttttattgctgacgataaaaaatggggaccaaaagatgttatacgtacaggtgctttcccagttagaacatcatttggagatctttataaaggtgataaacgtatgatgaagatttcaaaatggactcaatattattcaccatattacaacactatcgatggattttctgaaatgagaaccttatggttcccaatggttcaatctgtatccaatggtgacgaaaaaccagcagatgctttgaaagactttactcaaaaagcaaatgataccattaaaaaagcagctaaataa

SEQ ID NO: 8538 - protein, 438 aa, Streptococcus agalactiae; identical to SEQ ID NO: 944

SEQ ID NO: 8539 - DNA, 1376 bp, Streptococcus agalactiae
atgaataaaaaggtactattgacatcgacaatggcagcttcgctattatcagtcgcaagtgttcaagcacaagaaacagatacgacgtggacagcacgtactgtttcagaggtaaaggctgatttggtaaagcaagacaataaatcatcatatactgtgaaatatggtgatacactaagcgttatttcagaagcaatgtcaattgatatgaatgtcttagcaaaaataaataacattgcagatatcaatcttatttatcctgagacaacactgacagtaacttacgatcagaagagtcatactgccacttcaatgaaaatagaaacaccagcaacaaatgctgctggtcaaacaacagctactgtggatttgaaaaccaatcaagtttctgttgcagaccaaaaagtttctctcaatacaatttcggaaggtatgacaccagaagcagcaacaacgattgtttcgccaatgaagacatattcttctgcgccagctttgaaatcaaaagaagtattagcacaagagcaagctgttagtcaagcagcagctaatgaacaggtatcaccagctcctgtgaagtcgattacttcagaagttccagcagctaaagaggaagttaaaccaactcagacgtcagtcagtcagtcaacaacagtatcaccagcttctgttgccgctgaaacaccagctccagtagctaaagtagcaccggtaagaactgtagcagcccctagagtggcaagtgttaaagtagtcactcctaaagtagaaactggtgcatcaccagagcatgtatcagctccagcagttcctgtgactacgacttcaccagctacagacagtaagttacaagcgactgaagttaagagcgttccggtagcacaaaaagctccaacagcaacaccggtagcacaaccagcttcaacaacaaatgcagtagctgcacatcctgaaaatgcagggctccaacctcatgttgcagcttataaagaaaaagtagcgtcaacttatggagttaatgaattcagtacataccgtgcgggagatccaggtgatcatggtaaaggtttagcagttgactttattgtaggtactaatcaagcacttggtaataaagttgcacagtactctacacaaaatatggcagcaaataacatttcatatgttatctggcaacaaaagttttactcaaatacaaacagtatttatggacctgctaatacttggaatgcaatgccagatcgtggtggcgttactgccaaccactatgaccacgttcacgtatcatttaacaaataatataaaaaaggaagctatttggcttcttttttatatgccttgaatagactttcaaggttcttatataatttttatta

SEQ ID NO: 8540 - protein, 432 aa, Streptococcus agalactiae
MNKKVLLTSTMAASLLSVASVQAQETDTTWTARTVSEVKADLVKQDNKSSYTVKYGDTLSVISEAMSIDMNVLAKINNIADINLIYPETTLTVTYDQKSHTATSMKIETPATNAAGQTTATVDLKTNQVSVADQKVSLNTISEGMTPEAATTIVSPMKTYSSAPALKSKEVLAQEQAVSQAAANEQVSPAPVKSITSEVPAAKEEVKPTQTSVSQSTTVSPASVAAETPAPVAKVAPVRTVAAPRVASVKVVTPKVETGASPEHVSAPAVPVTTTSPATDSKLQATEVKSVPVAQKAPTATPVAQPASTTNAVAAHPENAGLQPHVAAYKEKVASTYGVNEFSTYRAGDPGDHGKGLAVDFIVGTNQALGNKVAQYSTQNMAANNISYVIWQQKFYSNTNSIYGPANTWNAMPDRGGVTANHYDHVHVSFNK

SEQ ID NO: 8541 - DNA, 900 bp, Streptococcus agalactiae
ttgaataaatggttagttaaggcaagttccttagttgttttaggtggtatggttttatctgcgggttcccgagttttagcggatacttatgtccgtccaattgataatggtagaattacaacaggtttcaatggttatcctggacattgtggggtggattatgctgttccgactggaacgattattagggcagtggcagatggtactgtgaaatttgcaggagctggagccaacttttcttggatgacagacttagcaggaaattgtgtcatgattcaacatgcggatggaatgcatagtggttacgctcatatgtcacgtgtggtggctaggactggggaaaaagtcaaacaaggagatatcatcggttacgtaggagcaactggtatggcgacgggacctcaccttcattttgaatttttaccagctaaccctaattttcaaaatggtttccatggacgtatcaatccaacgtcactaattgctaatgttgcgacctttagtggaaaaacgcaagcatcagctccaagcattaagccattacaatcagctcctgtacagaatcaatctagtaaattaaaagtgtatcgagtagatgaattacaaaaggttaatggtgtttggttagtcaaaaataacaccctaacgccgactgggtttgattggaacgataatggtataccagcatcagaaattgatgaggttgatgctaatggtaatttgacagctgaccaggttcttcaaaaaggtggttactttatctttaatcctaaaactcttaagactgtagaaaaacccatccaaggaacagctggtttaacttgggctaagacacgctttgctaatggtagttcagtttggcttcgcgttgacaacagtcaagaactgctttacaaatag

SEQ ID NO: 8542 - protein, 299 aa, Streptococcus agalactiae
LNKWLVKASSLVVLGGMVLSAGSRVLADTYVRPIDNGRITTGFNGYPGHCGVDYAVPTGTIIRAVADGTVKFAGAGANFSWMTDLAGNCVMIQHADGMHSGYAHMSRVVARTGEKVKQGDIIGYVGATGMATGPHLHFEFLPANPNFQNGFHGRINPTSLIANVATFSGKTQASAPSIKPLQSAPVQNQSSKLKVYRVDELQKVNGVWLVKNNTLTPTGFDWNDNGIPASEIDEVDANGNLTADQVLQKGGYFIFNPKTLKTVEKPIQGTAGLTWAKTRFANGSSVWLRVDNSQELLYK

SEQ ID NO: 8543 - DNA, 1341 bp, Streptococcus agalactiae
atgaaaaaaagaatattatcagcagtccttgtgagtggagtaactcttggaactgctgccgtaacagtaaacgctgatgactttgactcgaaaattgctgctactgattcagtaatcaatactttatcagggcaacaagcagcagcacaaaaccaggtgactgctattaaaggacaagttggtgctttagagtctcaacaatcagaattagaagcgcaaaatgctcaacttgaggctgtatctcagcagttaggtcaagagattcaaactctttctaataaaattgttgcacgtaacgaatctttgaaaaagcaagttcgtagtgctcaaaagggtaacttgactaactatattaatactattttaaattcgaaatcagtatctgatgctgttaatcgtgttgttgctattcgtgaggttgtttcagctaatgaaaagatgttagcacaacaagaggctgacaaagcggccttagaagctaaacaaattgaaaatcaaaatgctataaatactgtagcagctaacaagcaagctatcgaaaataataaagcagccttagcaacacaaagagcacaattagaagcagctcaattagagttatctgctcaattgactacagtccaaaatgaaaaagcatctttaattcaggcaaaagcacaagctgaggaagctgcgcgtaaggcagctgaagcacaagcagcagctgaagcgaaagcacaagctgaagcgaaagcacaagctgagtctgtagcaaaagcacaggcagcagcacaagttgagtctgccacagctcctactgaaacagttcaaacacaaccgagaactgaaataaagccttctaatcttacggctacttcttcggcaactactgttgctacaactacagctacagctactaatgagccaaaagttactcaaccttctgtagtaactaaagcagttgaagcacctaaagcagttgtttcttcaacacctagagcggtatcaaaacctgttgtcagaagttatgattcaagtaacacatacccaatgggacaatgtacttggggagctaagtcaatggcttcttgggttggtaactattggggaaatgctaatcagtggggtgctagtgcacgtgcagctggttattctgtaggaactacccctcgtgttggtgcagtagctgtttggccatatgatggtggtggttacgggcacgttgcagtagtaacgtcagtggctaacaattcatctatccaagttatggaatcaaactatgctggaaatatgagtattggcaattaccgtggttcatttaaccctagtgcttctggctctgtttactatatttacccaaat

SEQ ID NO: 8544 - protein, 447 aa, Streptococcus agalactiae
MKKRILSAVLVSGVTLGTAAVTVNADDFDSKIAATDSVINTLSGQQAAAQNQVTAIKGQVGALESQQSELEAQNAQLEAVSQQLGQEIQTLSNKIVARNESLKKQVRSAQKGNLTNYINTILNSKSVSDAVNRVVAIREVVSANEKMLAQQEADKAALEAKQIENQNAINTVAANKQAIENNKAALATQRAQLEAAQLELSAQLTTVQNEKASLIQAKAQAEEAARKAAEAQAAAEAKAQAEAKAQAESVAKAQAAAQVESATAPTETVQTQPRTEIKPSNLTATSSATTVATTTATATNEPKVTQPSVVTKAVEAPKAVVSSTPRAVSKPVVRSYDSSNTYPMGQCTWGAKSMASWVGNYWGNANQWGASARAAGYSVGTTPRVGAVAVWPYDGGGYGHVAVVTSVANNSSIQVMESNYAGNMSIGNYRGSFNPSASGSVYYIYPN

SEQ ID NO: 8545 - DNA, 777 bp, Streptococcus agalactiae
atgaaaattgataaaaggcatcttctgaattattccatcctcattccctatttgatattgtctattctaggcttaattgtaatttattcgacaactagtgcaactctaattcagcttggagctaacccttttcgttcagtaatcaaccagggtgtcttttgggcagtcagtttggttgcaattatctttatctataaactgaaactaaattttttgaaaaattctaaagtgttgactatggcagtattggtagaagtatttttactactaatagcgcgcttttttacacaagaagttaatggagcacatggttggattgttattggtcctattagttttcaacctgctgaatatttaaaagttatcattgtatggtatttagcgtttacttttgctcgaaggcaaaaaaagatagaaatatatgattatcaagctttgacaaaagggagatggcttccgagatcactaagcgacctaaaagattggcgattttattctttatttatgattggtttggtaattgcacaacctgatttaggaaatggttcgataattgttctaacggtcattattatgtactgtattagtggtattggttatcgatggttttcagctttacttggtctaatcgtcgtggggtcaactttatttatcggaactattgcagttgttggagttgagacaatggctaaagtccctgtctttggttatgtagctaagcgatttaatgctttttttgacccatttaagatttacagattcaggacaccagttggc

SEQ ID NO: 8546 - protein, 259 aa, Streptococcus agalactiae
MKIDKRHLLNYSILIPYLILSILGLIVIYSTTSATLIQLGANPFRSVINQGVFWAVSLVAIIFIYKLKLNFLKNSKVLTMAVLVEVFLLLIARFFTQEVNGAHGWIVIGPISFQPAEYLKVIIVWYLAFTFARRQKKIEIYDYQALTKGRWLPRSLSDLKDWRFYSLFMIGLVIAQPDLGNGSIIVLTVIIMYCISGIGYRWFSALLGLIVVGSTLFIGTIAVVGVETMAKVPVFGYVAKRFNAFFDPFKIYRFRTPVG

SEQ ID NO: 8547 - DNA, 1131 bp, Streptococcus agalactiae
atgattgattttattatttctattgatgattgcgcagttgaattggatagtcgtcaatcttggaaaattcgctaccccttatcaaccattctatttcttgtctttgtttgtcagttagctggcattgaaacctggaaggagatggaagattttattgaaatgaatgaaccattgtttgcgacctacgttgatttgagtgaaggttgtccgtctcatgataccttagagcgtgtgattagtcttgttaattcagaccgtttaaaagagcttaaagttcaatttgagcaatcattgacaagcttagatgccgttcatcaactgatttcagtggacggtaaaacgattcgaggcaatcgaggtaaaaatcagaagcctgttcatattgtaacggcttatgatgggggtcatcatcttagtttgggacaggtagcggttgaggagaaaagtaatgaaattgttgccattcctcagttattgcggacaattgatatccgtaaaagcattgtaacgatagacgcaatgggcacgcagacggctatcgttgatacgattataaaaggtaaagcagactattgcttagccgtcaaaggaaatcaagaaacactttatgatgatattgctctttattttagtgatgtcaacttattggaagaactccaagaaaatgcgcagtattatcagactgttgaaaaatctaggggacagattgaagttagagaatactgggtgtcttccgatatcaaatggttgtgtcaaaaccatcccaaatggcataagttacgtggtattgggatgactcgtaacacgattgataaggatggtcagctgagtcaagagaatcgttattttatctttagctttaagccggatgtcctcacatttgccaattgtgtacgaggtcattggcagatagagagtatgcactggttattggacgttgtttatcatgaagatcatcatcagacattggataaaagagccgcatttaacctaaatcttatccgaaaaatgtgcttatattttctcaaagtgatggtatttcctaaaaaagacctcagttatcgtcgcaaacaacggtatatttctgtccatttggaagattatttagtccaattatttggagaaagaggc

SEQ ID NO: 8548 - protein, 377 aa, Streptococcus agalactiae
MIDFIISIDDCAVELDSRQSWKIRYPLSTILFLVFVCQLAGIETWKEMEDFIEMNEPLFATYVDLSEGCPSHDTLERVISLVNSDRLKELKVQFEQSLTSLDAVHQLISVDGKTIRGNRGKNQKPVHIVTAYDGGHHLSLGQVAVEEKSNEIVAIPQLLRTIDIRKSIVTIDAMGTQTAIVDTIIKGKADYCLAVKGNQETLYDDIALYFSDVNLLEELQENAQYYQTVEKSRGQIEVREYWVSSDIKWLCQNHPKWHKLRGIGMTRNTIDKDGQLSQENRYFIFSFKPDVLTFANCVRGHWQIESMHWLLDVVYHEDHHQTLDKRAAFNLNLIRKMCLYFLKVMVFPKKDLSYRRKQRYISVHLEDYLVQLFGERG

SEQ ID NO: 8549 - DNA, 402 bp, Streptococcus agalactiae
ttgattacagttgtcttattcgatttaaaagaaggtgtagctactgtaactataacaatgctagtttcttcttttttaatgggctttgggccatgggtctttttgcaaatcatttccttcactttaattttatgcttgtggaaatttctgatatatccgctgacaaaagctgtatgttttggtaaaataacggaggtagtacttcaaactttctttgcaggagggttaggggttgtttatggcgtcattattgatacctgttttgcttggttatatcatatgccttggtggacttatgtattagcaggacttagttttaatatggcacacgctttatcaacttgtttattttatcctcttttgttaccgattttaaggagatttaggaatgaaaaaatacat

SEQ ID NO: 8550 - protein, 134 aa, Streptococcus agalactiae
LITVVLFDLKEGVATVTITMLVSSFLMGFGPWVFLQIISFTLILCLWKFLIYPLTKAVCFGKITEVVLQTFFAGGLGVVYGVIIDTCFAWLYHMPWWTYVLAGLSFNMAHALSTCLFYPLLLPILRRFRNEKIH

SEQ ID NO: 8551 - DNA, 846 bp, Streptococcus agalactiae
atgagaagaagaattaaacctattgttgttgcggtttttttcagtttatttggacttttattaattattggtcatttacattcgacaaatactttgaaaaaagaattagttgaagctaaaaagacaattccatccgtaaaagcttcaaaagtaccgcaaaaatcaacatcatcgaaagataaagagtttgttcttaaaccgattatcgatgtctctggttggcaacttcctaaggagattgattacgatacgctttcaaaaaatatttcaggtgttgttattcgtgtctttggtggatcaaagatatctaagactaataacgctgcttatacaactggaatcgataaatcgtttaagacccatatcaaagaatttcaaaagcgaaatatcccagtagctgtctacagttatgcacttggttcaagtgttaaagaaatgaaagaagaggctcagatattttataagaatgcagctccttacaaaccaactttttattggattgacgtagaagaggagacaatgtctaacatgaataaaggtgtccaagcattccgaaaagaattaaaaagacttggtgctaaaaatgttggtatctacattggtacttactttatgactgagcaaggcatctctgtaaaaggatttgacgctgtttggattccaacttatggtagcgattctggatactatgaagcggctccgcaaactgaacttaaatacgatttacaccaatacacctctcaaggttatctaccaggawtcaatcaaccgcttgatttaaatcaaattgcagttaataaagacaagaagaaaacttatgagaaactttttggaaaagtaaaagag

SEQ ID NO: 8552 - protein, 282 aa, Streptococcus agalactiae
  MISC_FEATURE (1)..(282): Xaa = Any Amino Acid
MRRRIKPIVVAVFFSLFGLLLIIGHLHSTNTLKKELVEAKKTIPSVKASKVPQKSTSSKDKEFVLKPIIDVSGWQLPKEIDYDTLSKNISGVVIRVFGGSKISKTNNAAYTTGIDKSFKTHIKEFQKRNIPVAVYSYALGSSVKEMKEEAQIFYKNAAPYKPTFYWIDVEEETMSNMNKGVQAFRKELKRLGAKNVGIYIGTYFMTEQGISVKGFDAVWIPTYGSDSGYYEAAPQTELKYDLHQYTSQGYLPGXNQPLDLNQIAVNKDKKKTYEKLFGKVKE

SEQ ID NO: 8553 - DNA, 672 bp, Streptococcus agalactiae; identical to SEQ ID NO: 1057

SEQ ID NO: 8554 - protein, 224 aa, Streptococcus agalactiae
LTRHIKISILNLQNEGEGTMEILIAGGSGFLGKQIIKAALTKGHKVAYLSRHEGKGDIFKDPRLTYIRGDITEADKIHLEDRTFDILIDCIGAIKPNQLDELNVKATQKAVALCHKNQIPKLVYISANSGYSAYIKSKRKAEQIIKASGLDYLFVRPGLMYGEERPLSIFQAKCIKLFSHLPFLGIVVQKVFPTKVVIVAEAIVTTLRKKPTQKILSIEELNNK

SEQ ID NO: 8555 - DNA, 639 bp, Streptococcus agalactiae
atgaaattttatcttgttagacacggaaaaacacaatggaatttagaggggcgtttccaaggtgctaacggagactcacctctccttgaagaagctattgaagaattagaagaacttggacaatacctatcatctattcattttgatgctgtttattctagcgacttaggtcgtgctagagatactgttaatatcctcaatgatgctaattcatgcccaaaagaaatccactatactcctcaacttcgtgaatgggcattgggaactttagaaggttgtaaaattgcaactatgcaagctatctatcctcgtcaaatgaccgcattttatcaaaatcccttacaatttaaacatgacatgttcggtgcagaatctctttatcagacaacgcatcgtgtagagagtttcttacgttctctagcttcaaaaaattacgacaaggtccttattgtaggacatggagcaaacctaactgcgtctattcgttccttactgggttatcaatatggtagtttacactacaaagataaacttgataatgccagcctcacaatcatagaaactcatgattttaaagacttcaactgtctgacttggaacgataaatcttatttaaggcaagaggtcaaaatgacacac

SEQ ID NO: 8556 - protein, 213 aa, Streptococcus agalactiae
MKFYLVRHGKTQWNLEGRFQGANGDSPLLEEAIEELEELGQYLSSIHFDAVYSSDLGRARDTVNILNDANSCPKEIHYTPQLREWALGTLEGCKIATMQAIYPRQMTAFYQNPLQFKHDMFGAESLYQTTHRVESFLRSLASKNYDKVLIVGHGANLTASIRSLLGYQYGSLHYKDKLDNASLTIIETHDFKDFNCLTWNDKSYLRQEVKMTH

SEQ ID NO: 8557 - DNA, 708 bp, Streptococcus agalactiae
gtgtctggtatgttgttagcagtttacttagcaatgaaagaggcccctcgtaagaacattaagtcggatgatattctagatttcattctcatggcttttccactatccattgttggagctcgtatttattatgttatcttcgaatgggcttattactctaagcacccagtagagattatcgccatctggaatggcggtattgctatttacggagggttaattaccggggccattctccttgtgattttttcatatcgtcgcttgattaatcccattgattttctggatattgctgctccaggagtgatgattgcccaagccataggtaggtgggggaattttattaatcaagaagcatacggtagggcagtaaaaaatctgaattacgtaccaaactttataaaaaatcaaatgtatattgatggagcttaccgagtacctacatttttatatgagtctctttggaacttcctaggttttgtcatcatcatgtctattcgtcatcgaccgcgcactttaaaacaaggtgaagtggcatgtttttatttagtttggtatggatgtggacggttcattattgaagggatgaggacagatagcctttatttggcgggtttgcgcgtgtcacaatggttatcagttattttagttattatcggaattgtcatgattatttatcgtcgtcgtgaacaacatatttcatattat

SEQ ID NO: 8558 - protein, 236 aa, Streptococcus agalactiae
VSGMLLAVYLAMKEAPRKNIKSDDILDFILMAFPLSIVGARIYYVIFEWAYYSKHPVEIIAIWNGGIAIYGGLITGAILLVIFSYRRLINPIDFLDIAAPGVMIAQAIGRWGNFINQEAYGRAVKNLNYVPNFIKNQMYIDGAYRVPTFLYESLWNFLGFVIIMSIRHRPRTLKQGEVACFYLVWYGCGRFIIEGMRTDSLYLAGLRVSQWLSVILVIIGIVMIIYRRREQHISYY

SEQ ID NO: 8559 - DNA, 810 bp, Streptococcus agalactiae
atgattcgatttcttattcttgctggttattttgaattaagcatgtatttaaagttatcaggtaaactaaatcagtatattaatactcattatacctatttggcctatatttcaatggtcctatcttttattttagcaattgtacagctaattatttgggttaaaaatatgaaaatgcatagtcacctacatggtaaaatagctaaatcaacaagcccaatgattttagtatttcccgttttagtaggtttgttagtacctacagttagtttagactcaaccacagtctctgccaagggatataatttccctctagcagccggctctactggtactgtaagtcaagatgggacacgcgttcaatatttgaaaccagataccagcacttattttacttcttcagcctatgaaaaagaaatgcaaaaagagcttaaaaaatataaaggctctggtacattaaccatcacaactgaaaattacatggaagttatggaactaatttatctctatcccgagcaattcatggatcgccaaatacaatatactgggtttgtttataacgaacccaaacacgaaggatatcaatttattttccgctttggaatcattcattgtattgccgattcaggagtttatggtctactaacgactggaaatcaaaaaagttatccggacaatacttgggtaactgttagaggtacaattaaatccgagtataatcaattgttacaacaaaacttaccagtcttacacattgaagagtctcgtcaagtttctaaagctaataatccttatgtttatcgtgtcttt

SEQ ID NO: 8560 - protein, 270 aa, Streptococcus agalactiae
MIRFLILAGYFELSMYLKLSGKLNQYINTHYTYLAYISMVLSFILAIVQLIIWVKNMKMHSHLHGKIAKSTSPMILVFPVLVGLLVPTVSLDSTTVSAKGYNFPLAAGSTGTVSQDGTRVQYLKPDTSTYFTSSAYEKEMQKELKKYKGSGTLTITTENYMEVMELIYLYPEQFMDRQIQYTGFVYNEPKHEGYQFIFRFGIIHCIADSGVYGLLTTGNQKSYPDNTWVTVRGTIKSEYNQLLQQNLPVLHIEESRQVSKANNPYVYRVF

SEQ ID NO: 8561 - DNA, 1350 bp, Streptococcus agalactiae
atgaataatagtgctgcaaatattaggtcgtttgagctagccttactttttttactagtttttgttgctgtttattttgtttatctagcggttagagattttaaaatgtctaaaaatatccggcttttgaattggaaagtcagagatttgatagcaggaaattattcagatagtattctaattcaaggtgatgcagatttggtagaattaggtgaaagtctaaatgatttatctgatgtcttccgaatggcacatgataacttagaacaagaaaagaatcgcttagcaagtatcttaacttatatgactgacggtgtgctggctacagatcgttcaggaaaaatcgttatgattaatgagacagcccaacagcagttcaatctagcatatgatgaagctttatcaatgaatattgttgatatgttagggtcgggaagtccatattcgttccaagatttagtctctaaaacgccagaggtagttcttaatagacgtgatgaaaacggtgaatttgttaccttacggattcgatttgctttgaaccgtcgtgaaagtggttttatttccggtttagttgcagtgtcacacgatgctactgagcaagagaaagaagagcgtgaaagaagactttttgtatctaatgtttctcatgaacttcgtacacctttgacatctgtaaaatcttatttagaagctttagatgagggagcgcttaatgaagaagttgctccaagcttcattaaggtatctctagatgaaacaaatcgtatgatgcgtatgatatcagatttattaagtttatcgcgcattgataatgaagtaacgcatttagatgttgaaatgacgaattttacagctttcatgacctcaattttgaatcgatttgatcagattagaaatcaaaaaacagtcacaggaaaagtttatgaaattgtcagagattatcctcttaagtcaatttgggtggaaattgatacagataagatgactcaagtgattgataacattttaaataatgcagtcaagtattcaccagatggtggtaagatcacagttaatctacgcacaactaaaacgcagatgattttatcaatatcagaccaaggcttaggtattcccaaaaaagatttacctctcatctttgatcgtttttatcgtgttgataaggcgagaagtcgtaaacagggtgggactggacttggtttgtcaattgcaaaagaaattgttaagcagcataagggatttatttgggctaagagtgagtatggtaaagggtctacttttacaatagtcttgccttatgataaagatgctgtaacttatgaagaatgggaggacgttgaagattaa

SEQ ID NO: 8562 - protein, 449 aa, Streptococcus agalactiae; identical to SEQ ID NO: 1176

SEQ ID NO: 8563 - DNA, 567 bp, Streptococcus agalactiae
atgattaagaaaaataaagtttttttagaagttcttttagtccttgttgttatccttgaaggtggtgtattattttaccaatcacaattccaaaagacaactaatcaagcgttagctattgcttataaagatgctaaagtggctaagaaggatgtcatacatcaaaaaattgacaaagaatttgaaaactttagagggagctacgaaattgaattcaataccaaaagcgcagaatacagctatcatgtagatgttaagactggacaaatccttgagcgggacatggataataatggcttttcaaaatcgacttctcagtcaagttcatcgtcaagtcaaaaatctcataaaataagtcaagaagaagccaaaaagattgcatttaaagatgctaatatagaggaatcagaagtcagtaatcttaagatcaaagaagaaattgaaaatggaaaatcagtttatgatattgactttgtggacctgaaaaataaaaatgaagttgattatcaaattgatgcagaaactggaaaaatcattgaacgttctagagatcatatgaatgattaa

SEQ ID NO: 8564 - protein, 188 aa, Streptococcus agalactiae
MIKKNKVFLEVLLVLVVILEGGVLFYQSQFQKTTNQALAIAYKDAKVAKKDVIHQKIDKEFENFRGSYEIEFNTKSAEYSYHVDVKTGQILERDMDNNGFSKSTSQSSSSSSQKSHKISQEEAKKIAFKDANIEESEVSNLKIKEEIENGKSVYDIDFVDLKNKNEVDYQIDAETGKIIERSRDHMND

SEQ ID NO: 8565 - DNA, 1791 bp, Streptococcus agalactiae
atgacacatttagttgacttaacaaagaaacccttcaatctaaatcaagaagcaattgagtggattgaaaaaacaattaatgagatgacattggatgagaaaattgggcaactttttttcaatatgggagctagtcgttcagaagaatatttaacagatgttttggatcggtatcatattgctgctgttcgctataatagaggtagttcaagtgaaatctatgatcagaatttaattttacagacaaagtcgaaattgccgatgttgattgctgcaaatacagaagctggtggagacggtgctgtcacggatggaactaaagttggcgatgaaataaaagtggctgctacaaatgatccgaaatatgcttatgaaatgggaagaatcgcagggatggaggcatctgctgtgggttgtaatgcttcattttctccaattgtagatttgacacgtaattggcgtaatcctatcatagctagtcgaaattggggtgctaacgttgatcaaattatttcactttcaaaagagtatatgaaaggaatcatgcaatataatattgtacctttcgctaaacattttccaggggatggcattgatgagcgtgatcatcatttgtcatttgcttccaatcctatgagtaaagaggagtggatgtcgacatttggccgcatttatggtgaattggctgacgcaggtttaccaggagtcatggcaggtcacatacatttaccaaacgttgaaaaagaaatgcatccagagcgagaccttgatgatatgttaccagcttcattgaataaaacacttttagatgagttattgagaggagagttaggttataatggagctattgtaacggacgcttctcatatggttggaatgactgcttcaatggcaaggagagatttgttgccaacggcgattgaagcaggttgtgatttattcttattctttaatgaccctgatgaagacattcaatggatgaaagaaggttacgaaaaaggtattctaacagaggaacgtctccatgacgctttacgtcgtactctcggtctaaaagcgaaattaggcttgcataactatgagggacgtcgccaagaactctttatgcctaaagataaggctatggctttaatcaacacattagagtcgcaaaaaatagctgatgaagttgctgataaagcagtaactctggtaaaagataaacaaaaagatatctttccagtaaatccagaacgttatcgtcatatcttacttgttaacgttgaaggatataagggaggttttggtgcgatgattgctggaaacaagcaacgtgcatcggattacatgaaagagttacttgaggcacgtggccatgaagtaactgtctgggagtctaccgaagagcgtattatgaaattgccacaagaggagcgggcagcagctatcgctaatgtttacgcacaaaaacagccaatcgcaaatctaacagaacactatgacttgattattaacttggtagatgtcaatgctggaggaacaacacaacgtattatttggccagcagctaaaggcacccctgatcagcctttttacgttcatgaaataccatctattgtgatttcagtacaacatgcatttgctttagcagatatgccacaggtagggacttatattaatgcttatgatgggcttcctagcacgataagtgcagtagttgcgaaattggctggagaatcagaatttacaggagtttcaccagtagatgcttactgtggtttaattgatacacatttatggcgccaatgctaa

SEQ ID NO: 8566 - protein, 596 aa, Streptococcus agalactiae; identical to SEQ ID NO: 1236

SEQ ID NO: 8567 - DNA, 618 bp, Streptococcus agalactiae; identical to SEQ ID NO: 1277

SEQ ID NO: 8568 - protein, 206 aa, Streptococcus agalactiae
VKSQTIIISRRHLMSDVVEKQTTKSFIMNVLNGLALGTVIVLIPGAILGELMKALLPMWSGFATLIAATAVATSMMGLVIGIMVGLNFKFNPIQSASLGLAVMFAGGAATFLKGAIMLKGTGDIINMGITAALGVLLIQFLSDKTKSFTLIVIPTVTLLLVGGVGHVLLPYVKMITTMIGQGTRRTHENFLFILLCPDINFEKIPF

SEQ ID NO: 8569 - DNA, 816 bp, Streptococcus agalactiae
atgattttaaaaatttgtcgtgcagcatatagtttacaatggggaggtgtttaccaattagctttgctggattatcctcgaattaaggcgtttgaattggaaaggataggagctttcatagcttacgagaaacaatataaaagaaaaactgagatacaatgtgacgataaacatctcctcgcaaaaattgttcattttttaaaatacaatagttttacttttccctatattcccaaatatagagaagcggcagctacttttaatgaggatggtattagtttaacttctgattttttaagccatacatgtacgattgaaactgcaaaactaatttttaaagaaggtaaaatcttatcagcagttaaagcctttaataagcctgctgaagtactggtaaaagataagaggaatgctgctggagaccctaaagattactttgactatgtgatgttgaactggtcaaataccaattctggttatcgtttagtaatggaaagattgttaggcaaagcaccatctgaacaggagttaacagtaggttttaagccaggggtcagttttcattttacttatcaagatatcatcaatcatcctgattctatttttgatggttatcatcctgctaaaattaaaaatcagctttctttagcagaacatttagttgcatgtgttatcccaaaacattatcaagaagattatcaaagccttgtgcccaatgacttgaaacacagggtttattatttagattactgtaacgaaacactttatgagtggaatcaaaaagtttatgattttctttgtcatttggaaaataaa

SEQ ID NO: 8570 - protein, 272 aa, Streptococcus agalactiae
MILKICRAAYSLQWGGVYQLALLDYPRIKAFELERIGAFIAYEKQYKRKTEIQCDDKHLLAKIVHFLKYNSFTFPYIPKYREAAATFNEDGISLTSDFLSHTCTIETAKLIFKEGKILSAVKAFNKPAEVLVKDKRNAAGDPKDYFDYVMLNWSNTNSGYRLVMERLLGKAPSEQELTVGFKPGVSFHFTYQDIINHPDSIFDGYHPAKIKNQLSLAEHLVACVIPKHYQEDYQSLVPNDLKHRVYYLDYCNETLYEWNQKVYDFLCHLENK

SEQ ID NO: 8571 - DNA, 1275 bp, Streptococcus agalactiae; identical to SEQ ID NO: 1357

SEQ ID NO: 8572 - protein, 425 aa, Streptococcus agalactiae
VIKNAIAYITRKKNRTLIIFAILTIVLSCLYSCLTIMKSSNEIEKALYESSNSSISITKKDGKYFNINQFKNIEKIKEVEEKIFQYDGLAKLKDLKVVSGEQSINREDLSDEFKNVVSLEATSNTKRNLLFSSGVFSFKEGKNIEENDKNSILVHEEFAKQNKLKLGDEIDLELLDTEKSGKIKSHKFKIIGIFSGKKQETYTGLSSDFSENMVFVDYSTSQEILNKSENNRIANKILMYSGSLESTELALNKLKDFKIDKSKYSIKKDNKAFEESLESVSGIKHIIKIMTYSIMLGGIVVLSLILILWLRERIYEIGIFLSIGTTKIQIIRQFIFELIFISIPSIISSLFLGNLLLKVIVEGFINSENSMIFGGSLINKSSFMLNITTLAESYLILISIIVLSVVMASSLILFKKPKEILSKIS

SEQ ID NO: 8573 - DNA, 1086 bp, Streptococcus agalactiae; identical to SEQ ID NO: 1383

SEQ ID NO: 8574 - protein, 362 aa, Streptococcus agalactiae
LWLDIIFKKSIIILTRQTPHSFIGRYVLIWGFFYIVRRVMKQPLALTWEDQIRLLEKRGLIVKADDVEKIKHISYYRIKEFAKPLEIKQQDGEEQDILYDNIEFAEVLARYYQDKNLRIYLLHAIEKIEVSIKTKISFVLGDRYGAFGYLNFSSWANRNKFTKYDIEKRQFRIKKNLLNTVRKSQLTELQKSINLDLDGFPTVWLAIDLLMFGDIVSILTIMSEKNIKQICQYYSCTPEELVSWLKCLNFIRNVCAHNSNVLDIQITTKPKLRSEWRNYIDTVIIKHNVTKPSNKLSVIIAIVVYLVNTINSKYQWRNIQSSLKALCKEDDSRAKLLGFKDYDSVKAMINGIKCTTFTNSKK

SEQ ID NO: 8575 - DNA, 717 bp, Streptococcus agalactiae
atggtaattaatattgagcaagctatcgcatggatggcatctagaaaaggtaaagttacttactcgatggactatcgaaatggtccttcatcttacgattgctctagctctgtctattttgctctacgctcagcaggcgcatcagataatggctgggcagtaaatacagaatatgagcacgattggttgataaaaaacggttatgttcttattgcagaaaatactaattggaatgcgcaaagaggtgatatttttatttggggtaaacgtggggcttcggctggagcttttggacatactggtatgtttgttgatccagacaatattattcactgtaattatggttataactcaattacagtgaataaccatgatgaaatctggggatataatggtcaaccttatgtttacgcttatcgttacgctaggaaacagtcaaatgctaaggttgataatcaatcagttgtatctaaatttgaaaaagagttagacgttaacacaccgctaagtaattcaaatatgccatattacgaagcaacaatttcagaagattattacgttgagtccaagcctgacgtcaatagcactgataaggagttgcttgttgctggtactagagttcgagtttacgaaaaagtaaaaggctgggcaaggataggcgctccacagtctaatcagtgggtagaagatgcttacttaattgatgcaacagatatg

SEQ ID NO: 8576 - protein, 239 aa, Streptococcus agalactiae
MVINIEQAIAWMASRKGKVTYSMDYRNGPSSYDCSSSVYFALRSAGASDNGWAVNTEYEHDWLIKNGYVLIAENTNWNAQRGDIFIWGKRGASAGAFGHTGMFVDPDNIIHCNYGYNSITVNNHDEIWGYNGQPYVYAYRYARKQSNAKVDNQSVVSKFEKELDVNTPLSNSNMPYYEATISEDYYVESKPDVNSTDKELLVAGTRVRVYEKVKGWARIGAPQSNQWVEDAYLIDATDM

SEQ ID NO: 8577 - DNA, 1194 bp, Streptococcus agalactiae
gtgattaaacgatttgataattatgctcagtacgtacttgttttaggttttagcttactaattggtggtgtggttggggctattacagcagtctttggacgtgttctattattcctgacagcctttagaagtgattatatagcttacctactcccttttcttagcattgttggtttatttatagtttttgtctatcaaaaatttgggggtaagagtgttaaagggatgggattggtatttgaagtaggtcatggtaatgaggagactattccgaaacgtcttgttcctctcgtgatattaacaacttggttaacccacttatttggtggtagtgcaggtcgtgagggggttgctgtacagattggggctaccgtttcacactactttcaaaaatattgccgtttacaaaacgcttctcaacttttcctagtaatgggaatggcagcaggttttgctggtttatttcagactcctttagctgctactttttttgcgattgaagttttggtagtaggtcgtttaatggtttcgtatgtattaccaagtttaattgctgccctgacagcaaatttcgtctcacattctttaggtttagaaaaattttctcatagtatagcaacatcaatggcgttaacaccagatattattctaaaattattggttttaggactatgttttggtctgtgtggtaatttatttgcttatttattggctaaagctaaattaattgcttctagtaggttgctaaacccatataaacggattttcacacttggattgttagctacttttttattgtttatcttccattttggacgatattcaggactgggaacaaatctaattgaggctagcttcactaataagaacctttatgattatgattggttgttaaaattgtgtttgacagttattactttggctgcaggttatcagggaggagaagtaactcccttatttgcaatcggagcaagtttaggagtgattattgcgcccattttaggtttgccagttattttagttgctgctttaggctatactagcgtttttgggagtgcaacgaatactctgttaggtcctatcttaataggaggcgaagtctttggctttgccaacactccttattttgttattgtatgtcttgttgcttactccatatcacatgctcatacgatttatggtgctcaatctaga

SEQ ID NO: 8578 - protein, 398 aa, Streptococcus agalactiae
VIKRFDNYAQYVLVLGFSLLIGGVVGAITAVFGRVLLFLTAFRSDYIAYLLPFLSIVGLFIVFVYQKFGGKSVKGMGLVFEVGHGNEETIPKRLVPLVILTTWLTHLFGGSAGREGVAVQIGATVSHYFQKYCRLQNASQLFLVMGMAAGFAGLFQTPLAATFFAIEVLVVGRLMVSYVLPSLIAALTANFVSHSLGLEKFSHSIATSMALTPDIILKLLVLGLCFGLCGNLFAYLLAKAKLIASSRLLNPYKRIFTLGLLATFLLFIFHFGRYSGLGTNLIEASFTNKNLYDYDWLLKLCLTVITLAAGYQGGEVTPLFAIGASLGVIIAPILGLPVILVAALGYTSVFGSATNTLLGPILIGGEVFGFANTPYFVIVCLVAYSISHAHTIYGAQSR

SEQ ID NO: 8579 - DNA, 855 bp, Streptococcus agalactiae
atgcaggtatttttaaatattgtcaataaattctttgatccaattatccatatgggttcgggagttgtgatgctaattgtcatgacaggtttagccatgatatttggagtgaagttttctaaagcacttgaaggtggtattaagttagctattgctcttacgggtattggtgctattattggtattttaactggtgctttttctgaatcacttcaagcttttgttaaaaatacaggaatcaatctaagcattattgacgttggttgggctccattagcaactattacatggggatcaccatatacgctttacttcttattaatcatgcttattgtcaatattgttatgattgttatgaaaaaaacggataccttagatgttgatatttttgatatttggcatttatctatcacaggtcttttaattatgtggtatgctaaaaaaaataatctaccaacacttttatctgtcattattgcaactgtagctattatcttcgttggtgttctaaaaattatcaattctgatttgatgaaacctacctttgatgatttattggggacaggtccaacttctcccatgacttcaacgcatatgaattatatgatgaaccccattattatggttttggataagctttttgataaagtttttccagggctagataaatatgactttgacgcggctaaattaaataaagccattggattctggggctctaagttctttattggtatgattttaggacttgtcatarggattatgggcaaccccgtgttctcatttgcaagcattaggtggctggttttcttcttcgttttacagcagggtgcttgtttagaagttggtctcttt

SEQ ID NO: 8580 - protein, 285 aa, Streptococcus agalactiae
  MISC_FEATURE (1)..(285): Xaa = Any Amino Acid
MQVFLNIVNKFFDPIIHMGSGVVMLIVMTGLAMIFGVKFSKALEGGIKLAIALTGIGAIIGILTGAFSESLQAFVKNTGINLSIIDVGWAPLATITWGSPYTLYFLLIMLIVNIVMIVMKKTDTLDVDIFDIWHLSITGLLIMWYAKKNNLPTLLSVIIATVAIIFVGVLKIINSDLMKPTFDDLLGTGPTSPMTSTHMNYMMNPIIMVLDKLFDKVFPGLDKYDFDAAKLNKAIGFWGSKFFIGMILGLVIXIMGNPVFSFASIRWLVFFFVLQQGACLEVGLF

SEQ ID NO: 8581 - DNA, 2466 bp, Streptococcus agalactiae; identical to SEQ ID NO: 6983

SEQ ID NO: 8582 - protein, 822 aa, Streptococcus agalactiae
VKKTYGYIGSVAAILLATHIGSYQLGKHHMGLATKDNQIAYIDDSKGKVKAPKTNKTMDQISAEEGISAEQIVVKITDQGYVTSHGDHYHFYNGKVPYDAIISEELLMTDPNYHFKQSDVINEILDGYVIKVNGNYYVYLKPGSKRKNIRTKQQIAEQVAKGTKEAKEKGLAQVAHLSKEEVAAVNEAKRQGRYTTDDGYIFSPTDIIDDLGDAYLVPHGNHYHYIPKKDLSPSELAAAQAYWSQKQGRGARPSDYRPTPAPGRRKAPIPDVTPNPGQGHQPDNGGYHPAPPRPNDASQNKHQRDEFKGKTFKELLDQLHRLDLKYRHVEEDGLIFEPTQVIKSNAFGYVVPHGDHYHIIPRSQLSPLEMELADRYLAGQTDDNDSGSDHSKPSDKEVTHTFLGHRIKAYGKGLDGKPYDTSDAYVFSKESIHSVDKSGVTAKHGDHFHYIGFGELEQYELDEVANWVKAKGQADELVAALDQEQGKEKPLFDTKKVSRKVTKDGKVGYIMPKDGKDYFYARYQLDLTQIAFAEQELMLKDKKHYRYDIVDTGIEPRLAVDLSSLPMHAGNATYDTGSSFVIPHIDHIHVVPYSWLTRNQIATIKYVMQHPEVRPDVWSKPGHEESGSVIPNVTPLDKRAGMPNWQIIHSAEEVQKALAEGRFAAPDGYIFDPRDVLAKETFVWKDGSFSIPRADGSSLRTINKSDLSQAEWQQAQELLAKKNAGDATDTDKPEEKQQADKSNENQQPSEASKEEKESDDFIDSLPDYGLDRATLEDHINQLAQKANIDPKYLIFQPEGVQFYNKNGELVTYDIKTLQQINP

SEQ ID NO: 8583 - DNA, 924 bp, Streptococcus agalactiae
atgaaaaggatacggaaaagccttatttttgttctcggagtagttaccctaatttgcttatgtgcttgtactaaacaaagccagcaaaaaaatggcttgtcagtagtgactagcttttatccagtatattccattacaaaagcagtttctggtgatttgaatgatattaaaatgattcgatcacagtcaggtattcatggttttgaaccctcatcaagtgatgttgctgccatttatgatgctgatctatttctttatcattcgcacacactagaagcttgggcgagacgtttggaacctagtttgcatcactctaaagtatctgtaattgaagcttcaaaaggtatgactttggataaagttcatggcttagaagatgtagaggcagaaaaaggagtagatgagtcaaccttgtatgaccctcacacttggaatgaccctgtaaaagtatctgaggaagcacaactcatcgctacacaattagctaaaaaggatcctaaaaacgctaaggtttatcaaaaaaatgctgatcaatttagtgacaaggcaatggctattgcagagaagtataagccaaaatttaaagctgcaaagtctaaatactttgtgacttcacatacagcattctcatacttagctaagcgatacggattgactcagttaggtattgcaggtgtctcaaccgagcaagaacctagtgctaaaaaattagccgaaattcaggagtttgtgaaaacatataaggttaagactatttttgttgaagaaggagtctcacctaaattagctcaagcagtagcttcagctactcgagttaaaattgcaagtttaagtcctttaraagcagttcccaaaaacaataaagattacttagaaaatttggaaactaatcttaaggtacttgtcaaatcgttaaatcaatag

SEQ ID NO: 8584 - protein, 307 aa, Streptococcus agalactiae
  MISC_FEATURE (1)..(307): Xaa = Any Amino Acid
MKRIRKSLIFVLGVVTLICLCACTKQSQQKNGLSVVTSFYPVYSITKAVSGDLNDIKMIRSQSGIHGFEPSSSDVAAIYDADLFLYHSHTLEAWARRLEPSLHHSKVSVIEASKGMTLDKVHGLEDVEAEKGVDESTLYDPHTWNDPVKVSEEAQLIATQLAKKDPKNAKVYQKNADQFSDKAMAIAEKYKPKFKAAKSKYFVTSHTAFSYLAKRYGLTQLGIAGVSTEQEPSAKKLAEIQEFVKTYKVKTIFVEEGVSPKLAQAVASATRVKIASLSPLXAVPKNNKDYLENLETNLKVLVKSLNQ

SEQ ID NO: 8585 - DNA, 2400 bp, Streptococcus agalactiae
atgtcaaaacattatttttcaaaaagcgtattcgctttaactgtcttaacagctacagcaacaagtggtttagctgttcaagcagaagacattgttacaacaccaagttcaacctctacaaaggttgaatcaactacccccactagcacaattgcagaggaaaagtcaaacgttacttctactccaactgcaataactgatgcttcaacagccacaagcacaaataccactaccaataaccaaaatccacagcctgttgccacagaagccacaactagtgatctcaaacctattgaaggtgaaaaagttgaccttcgcatcatgtcaaccacagacctacacaccaatttagttaactatgattattatcaagataaagaatctcaaaaaatagggttagcaaaaactgctgtccttattgaagaagcaaaaaaagaaaatcctaataccgtcttagttgataacggagatgtcattcaagggacacctttaggaacttataaagcaatcgttaaacctgtcgcagaaaatgaagaacatcctatgtaccaagccatgaatgctcttggttatgatgcatcaacactaggtaatcatgagtttaattacggtttagattacctcaaaaaaatcattgctacagccaaccttycaatcctcaacgcaaatgttttggatttcaaaacacatcaaccagtttttaaaacttatgacatcattactaaaaccttcaaagattcaacaggaagagctgttgcactaaatattgggattacaggaattgtacctcctcaaatcttaaactgggacaaggctaacctagagggaaaggttattgtcaaagattcagttaaagcaatcgaagaaatcgttcctactatgcgtgctaaaggagcagatgtcattctcgttttatcacactctggcattggagatgatcgatatgaagaaggtgaagaaaacgttggctatcaaattgccagcatcaagggagtggatgccgttgttacgggacactcacacgctgaatttccatcaggtaacggtactggcttctatgaaaaatacactggagttgatggtatcaatggaaaaataaatggaacacctgttacaatggcaggcaagtacggggatcatcttggtattattgatttaggacttagttatactaatggaaaatggcaagtctccgaaagtagtgctaaaatccgtaaaattgatatgaactcaacaactgctgacgagcgtatcattgcattggctaaggaagcacacgatggcactatcaactatgttcgccaacaagtaggtacaacaactgcgccaattacaagttactttgcactagttaaagatgacccttcagttcaaattgttamcaacgctcaacgttggtacgttgcaaatgaattgaaaggaacacctgaggcaaatttaccacttctatctgctgcagcaccatttaaagctggaacacgcggcgatgctaccgcatatactgatattccagctggacctgttgcaattaaaaacgtagctgatctttacctttatgataatgttactgcacttttaaaagtgaccggagcagacttacgtgaatggttagaaatgtccgctggtcaatttaaccaaattgaccctaacaataaagcaccacaaaatattatcaataccgaatatcgtacctataattttgacgttattgacggcttgacttataaatttgatattacacaacctaataaatacaataaagatggaaaagttgttaatagtcaagctagtcgagtacgcgatttaatgtacaatggtaagcctgttgcagacaaacaagagtttatgattgtgaccaataactaccgtgctagtggtaccttccctggggctaaaaatgccacaatgaaccgtttgctgaacttagaaaatcgccaaactattatcaactatattatttcagagaaaaccatcaatcctacagctgataataactggggcttcacagagtctattaaagaccttgatttacgattccaaacagccgataaagctaaaaatcttgttactaatagcaaggatattcagtatatcgctagttctaccaaagatgaaggatttggtgattatcgatttgtctatactgaacaagaaaaagtagaccttactgagccatcacatcaagaaaagttaagccaaatagaaaaacaaaaaattcaccacatggttgcaactgcttatacaaaagcaaaagcttctccaaatattacaggcactgtctatacacaacagaaagaaaaaacattacctaaaactggacaagaaaaacaatcttatctggctttctttggtgtcgcaatacttggactcgtgggaagtttacttaaaaagaaacaaata

SEQ ID NO: 8586 - protein, 800 aa, Streptococcus agalactiae
  MISC_FEATURE (1)..(800): Xaa = Any Amino Acid
MSKHYFSKSVFALTVLTATATSGLAVQAEDIVTTPSSTSTKVESTTPTSTIAEEKSNVTSTPTAITDASTATSTNTTTNNQNPQPVATEATTSDLKPIEGEKVDLRIMSTTDLHTNLVNYDYYQDKESQKIGLAKTAVLIEEAKKENPNTVLVDNGDVIQGTPLGTYKAIVKPVAENEEHPMYQAMNALGYDASTLGNHEFNYGLDYLKKIIATANLXILNANVLDFKTHQPVFKTYDIITKTFKDSTGRAVALNIGITGIVPPQILNWDKANLEGKVIVKDSVKAIEEIVPTMRAKGADVILVLSHSGIGDDRYEEGEENVGYQIASIKGVDAVVTGHSHAEFPSGNGTGFYEKYTGVDGINGKINGTPVTMAGKYGDHLGIIDLGLSYTNGKWQVSESSAKIRKIDMNSTTADERIIALAKEAHDGTINYVRQQVGTTTAPITSYFALVKDDPSVQIVXNAQRWYVANELKGTPEANLPLLSAAAPFKAGTRGDATAYTDIPAGPVAIKNVADLYLYDNVTALLKVTGADLREWLEMSAGQFNQIDPNNKAPQNIINTEYRTYNFDVIDGLTYKFDITQPNKYNKDGKVVNSQASRVRDLMYNGKPVADKQEFMIVTNNYRASGTFPGAKNATMNRLLNLENRQTIINYIISEKTINPTADNNWGFTESIKDLDLRFQTADKAKNLVTNSKDIQYIASSTKDEGFGDYRFVYTEQEKVDLTEPSHQEKLSQIEKQKIHHMVATAYTKAKASPNITGTVYTQQKEKTLPKTGQEKQSYLAFFGVAILGLVGSLLKKKQI

SEQ ID NO: 8587 - DNA, 1635 bp, Streptococcus agalactiae
atggaagaacgctttaagaaacgactacaagatgatatctctaaacatttttcccgccagtctttaattttatccttgttattgattgcacttttcgtccttttttctttagcgcctcaacagataggtctttataaagatgttaattcagtttcctatagttataagcaattgattcaaaaacatgataccttattagatgacttaggtaaaaatagtttgaaaccatttgtctcaggacacttaggaagtgctgatttgagtaagcaatattatcatttaaggaatcatttacaaagtcaaacagaacttttagtattctcacctaatcaagaacttttgtttgctagtaattcacatttaggtaatttttttagtaagtctatttacattagtgaagttttagataaggctaaaataaatcaaaggctactaaaaattattgtggatagtgagggagggcattaccttgcactcattaagccaattatagttaataaaaaagtttcaggttatgcctttttattgatgaatgggaaagactttttacttccaacgaaggctattaactcagacttgattattgccgatcagctaaataatagctttacttttactaatcgtgattttatctcctctagtttagataaggtagatagtcaattcttaactagatattttagttttcacgatcatcgagcttttgttgttaggaaagtagctctgcaagacaatatcctactttacatgtatcgtcccctgataccagtaactctggtcgtccttttttctctagtatcatcagttattatttttgtgattttacgacaaaaatctagagttctagccgatcgcatcgcagtaaaaaattctagcgccataaatcaaatggtgctagatatggatgccatttcccgccaagaaaaatctagtattgagcttgatagtcaagatgaatttcaatatctatctgtgcaaatcaatcagatggtttcacggttaaaagatttacatgagaaaactcttgatttggaaacacaaaagttgttgtttgaaaagaggatgttagaagctcagtttaatcctcacttcctttataatacccttgagacaattttaataaccagtcactatgattcacaattaacagaaagaatcgttatacaactaacaaaattattgcgctatagccttagtggtagcacagaagcagctgtgcttaaggatgatttagcaatcattgaatcctaccttttgattaatcaagtgagatttgaagaattaacttacactatttcagtatctcctgaacttgaacacatgcgtgtaccaaaacttttcttgttaccgctaattgagaatgctattaaatatggcttaaaagaacgtcatgatgtagcaataaacatagatatttggcaagatagtgatggaatttggtttactgtttcaaataatggatcaggtattagtttggctaggcaacaagccatacgtacaatgttaagatcaactcactcgcatcatgggcttattaattcttatagacgattacaatatcaattttcaacagtattgttagagtttacgaagacagatgatgcttttcgagttagctatatagtaaaggagtga

SEQ ID NO: 8588 - protein, 544 aa, Streptococcus agalactiae
MEERFKKRLQDDISKHFSRQSLILSLLLIALFVLFSLAPQQIGLYKDVNSVSYSYKQLIQKHDTLLDDLGKNSLKPFVSGHLGSADLSKQYYHLRNHLQSQTELLVFSPNQELLFASNSHLGNFFSKSIYISEVLDKAKINQRLLKIIVDSEGGHYLALIKPIIVNKKVSGYAFLLMNGKDFLLPTKAINSDLIIADQLNNSFTFTNRDFISSSLDKVDSQFLTRYFSFHDHRAFVVRKVALQDNILLYMYRPLIPVTLVVLFSLVSSVIIFVILRQKSRVLADRIAVKNSSAINQMVLDMDAISRQEKSSIELDSQDEFQYLSVQINQMVSRLKDLHEKTLDLETQKLLFEKRMLEAQFNPHFLYNTLETILITSHYDSQLTERIVIQLTKLLRYSLSGSTEAAVLKDDLAIIESYLLINQVRFEELTYTISVSPELEHMRVPKLFLLPLIENAIKYGLKERHDVAINIDIWQDSDGIWFTVSNNGSGISLARQQAIRTMLRSTHSHHGLINSYRRLQYQFSTVLLEFTKTDDAFRVSYIVKE

SEQ ID NO: 8589 - DNA, 435 bp, Streptococcus agalactiae
atgtcaatttttcagacaacacgaaacggattattttacactccagtttatcttctagcaggatatttactctatgattattttaatactgacctatttaccaaatcgcgtggtcttaagtatattctcttccttttacttctagctttagagaatgttcttatttattttaatcaagggttggataaaaatttcttcttattagctcctttatgtgcagtattcttatttaactggagtatacgtacatcactgtttaaggaatatcgtttaagtcctttaaaacagttgagtgtctattatttcttccttccccctctttttattggcatagtgtcttactgtttaaaatcaacttccttagttgcacaccatcaagggaaaagtgatttttgtggtgaccttggcattaacaccatgcttgtgctctactca

SEQ ID NO: 8590 - protein, 145 aa, Streptococcus agalactiae
MSIFQTTRNGLFYTPVYLLAGYLLYDYFNTDLFTKSRGLKYILFLLLLALENVLIYFNQGLDKNFFLLAPLCAVFLFNWSIRTSLFKEYRLSPLKQLSVYYFFLPPLFIGIVSYCLKSTSLVAHHQGKSDFCGDLGINTMLVLYS

SEQ ID NO: 8591 - DNA, 1032 bp, Streptococcus agalactiae
gtggataataagcagcataatacatcaatgattagtttgctacaataccttttttccatactggtcattttagttcatagtgggaggttatttagtcaggatgtcattcattttacctttaaaagtttcctaggtcggatggctgttccttattttttgatttgtactgctttctttttgagaggtcgtatacagcaaggtttgtgtaatcactcctactttcgtaaactgattaaaaagtatagcatgtggactatcatttatttgccttatggttatttcttttttgaatctctaaatatagcgaagatctatttgttgccggggtttattgtggcatttttgtatttaggtatgtcacataccctttggtacatccctgctgttattctaggttgggtcattattcaaggattattgaagtatgtaggaactagggggacatttatcacagttgttgtactctattgtattggagcagtagagacctattctgtctttatacagtcaacaaaattttatcccctgatgtccacttatatgtcaatttttcagacaacacgaaacggattattttacactccagtttatcttctagcaggatatttactctatgattattttaatactgacctatttaccaaatcgcgtggtcttaagtatattctcttccttttacttctagctttagagaatgttcttatttattttaatcaagggttggataaaaatttcttcttattagctcctttatgtgcagtattcttatttaactggagtatacgtacatcactgtttaaggaatatcgtttaagtcctttaaaacagttgagtgtctattatttcttccttccccctctttttattggcatagtgtcttactgtttaaaatcaacttccttagttgcacaccatcaaggaaaagtgatttttgtggtgaccttggcattaacacatgcttgtgctctactcataataaaggttgttaataagataccctatcaaaaaattattccattatctctttcgaaa

SEQ ID NO: 8592 - protein, 344 aa, Streptococcus agalactiae
VDNKQHNTSMISLLQYLFSILVILVHSGRLFSQDVIHFTFKSFLGRMAVPYFLICTAFFLRGRIQQGLCNHSYFRKLIKKYSMWTIIYLPYGYFFFESLNIAKIYLLPGFIVAFLYLGMSHTLWYIPAVILGWVIIQGLLKYVGTRGTFITVVVLYCIGAVETYSVFIQSTKFYPLMSTYMSIFQTTRNGLFYTPVYLLAGYLLYDYFNTDLFTKSRGLKYILFLLLLALENVLIYFNQGLDKNFFLLAPLCAVFLFNWSIRTSLFKEYRLSPLKQLSVYYFFLPPLFIGIVSYCLKSTSLVAHHQGKVIFVVTLALTHACALLIIKVVNKIPYQKIIPLSLSK

SEQ ID NO: 8593 - DNA, 1656 bp, Streptococcus agalactiae
atgactaaaaaaattttccgtacaactttatctgctagtttgggaattgttttagttacaattttgatgattatgggatttctctataattacttcaatcacattcagcgagaacagttgagaacacaaacggcactggcgtcacaaggaatttcctttgaaggtaaagattattttgaaaatcttaaaacttcaaatgtgcgtattacttgggtagataataagggacaagtgctttatgatacccaatcagatgcaaaacatatgaaaaatcacgccaatcgtcaagaaattaaagaagctatcaagagtggttatggtgagagcacgaggtggtcagcgacacttactgagaagtctatctatgctgcgcaacgtttaaataatggaacgatagttcgtttatcagttgcgcaacaaactattttttatcttctccttggtatgataagtcccttagcaattatcatcttacttgctattattttatctgtattaattgcacgatatatagcaaaaaaagtatcagagcctttaaacaatattgacttagatcatcctttatcaaatgatagttacgaggagataacaccattattaaggcgtcttgatagccatcaggctaagattcaacatcaaaaactgttattacaaaagcgtcaaaaagaatttgataccattatttctaaaattaaggaaggaatgattcttttagatgatcaagcaagaatcgttagtatcaacgcagaagctttaaagttattccaaattaatgatgattggcatgggcgctttatgatggaagttagccgagatttaactctcaaagacttaatcgatcaaggactaaaagggaaaaagaaagaggctaatattggcattgaaaataatcattaccgcgtcttggtaagaccaactacagataacaaccgagtaacaggattggttgttctactgtttgatgtgactgatcaactccaaatggaacaacttcaacgtgaatttactgccaatgtctctcatgaattgaaaaccccgcttcatgttatttctggttactcagaactgttagctaatcaaatggttccaaacgaagaagtcccacaatttgcagctaaaattcataaagaatctgaacgattagttaaattggttgaggatattatcaacctttctcaccttgatgaacaagaaaaattaccgcaagagacagtaaatctgtatgacttaacacaaaaagttttagaaggtttacaagctaaagcagataagaagcacatacaaatcaattttaatggagaagaagctattttgcgagggaatccagttttattgaattccttggtgtacaacttgtgtgacaatgctatcacctataaccatgagaaaggtcaagtaaatgtgactttgaaaaattcacctgatacaattaccttagaagttagtgatacgggactaggcattgcagagaaggacaaaaaacgtattttcgaacgtttctatcgcgtcgataaaagtcgctcaaaaatagttggggggactggtttaggtttgtctattgtaaagagtgctttagattttcacaatggtagtataaaagtggacagccatttggggcagggaacaacaatgaccgttttacttcacaaacaataa

SEQ ID NO: 8594 - protein, 551 aa, Streptococcus agalactiae
MTKKIFRTTLSASLGIVLVTILMIMGFLYNYFNHIQREQLRTQTALASQGISFEGKDYFENLKTSNVRITWVDNKGQVLYDTQSDAKHMKNHANRQEIKEAIKSGYGESTRWSATLTEKSIYAAQRLNNGTIVRLSVAQQTIFYLLLGMISPLAIIILLAIILSVLIARYIAKKVSEPLNNIDLDHPLSNDSYEEITPLLRRLDSHQAKIQHQKLLLQKRQKEFDTIISKIKEGMILLDDQARIVSINAEALKLFQINDDWHGRFMMEVSRDLTLKDLIDQGLKGKKKEANIGIENNHYRVLVRPTTDNNRVTGLVVLLFDVTDQLQMEQLQREFTANVSHELKTPLHVISGYSELLANQMVPNEEVPQFAAKIHKESERLVKLVEDIINLSHLDEQEKLPQETVNLYDLTQKVLEGLQAKADKKHIQINFNGEEAILRGNPVLLNSLVYNLCDNAITYNHEKGQVNVTLKNSPDTITLEVSDTGLGIAEKDKKRIFERFYRVDKSRSKIVGGTGLGLSIVKSALDFHNGSIKVDSHLGQGTTMTVLLHKQ

SEQ ID NO: 8595 - DNA, 1653 bp, Streptococcus agalactiae
atgactaaaaaaattttccgtacaactttatctgctagtttgggaattgttttagttacaattttgatgattatgggatttctctataattacttcaatcacattcagcgagaacagttgagaacacaaacggcactggcgtcacaaggaatttcctttgaaggtaaagattattttgaaaatcttaaaacttcaaatgtgcgtattacttgggtagataataagggacaagtgctttatgatacccaatcagatgcaaaacatatgaaaaatcacgccaatcgtcaagaaattaaagaagctatcaagagtggttatggtgagagcacgaggtggtcagcgacacttactgagaagtctatctatgctgcgcaacgtttaaataatggaacgatagttcgtttatcagttgcgcaacaaactattttttatcttctccttggtatgataagtcccttagcaattatcatcttacttgctattattttatctgtattaattgcacgatatatagcaaaaaaagtatcagagcctttaaacaatattgacttagatcatcctttatcaaatgatagttacgaggagataacaccattattaaggcgtcttgatagccatcaggctaagattcaacatcaaaaactgttattacaaaagcgtcaaaaagaatttgataccattatttctaaaattaaggaaggaatgattcttttagatgatcaagcaagaatcgttagtatcaacgcagaagctttaaagttattccaaattaatgatgattggcatgggcgctttatgatggaagttagccgagatttaactctcaaagacttaatcgatcaaggactaaaagggaaaaagaaagaggctaatattggcattgaaaataatcattaccgcgtcttggtaagaccaactacagataacaaccgagtaacaggattggttgttctactgtttgatgtgactgatcaactccaaatggaacaacttcaacgtgaatttactgccaatgtctctcatgaattgaaaaccccgcttcatgttatttctggttactcagaactgttagctaatcaaatggttccaaacgaagaagtcccacaatttgcagctaaaattcataaagaatctgaacgattagttaaattggttgaggatattatcaacctttctcaccttgatgaacaagaaaaattaccgcaagagacagtaaatctgtatgacttaacacaaaaagttttagaaggtttacaagctaaagcagataagaagcacatacaaatcaattttaatggagaagaagctattttgcgagggaatccagttttattgaattccttggtgtacaacttgtgtgacaatgctatcacctataaccatgagaaaggtcaagtaaatgtgactttgaaaaattcacctgatacaattaccttagaagttagtgatacgggactaggcattgcagagaaggacaaaaaacgtattttcgaacgtttctatcgcgtcgataaaagtcgctcaaaaatagttggggggactggtttaggtttgtctattgtaaagagtgctttagattttcacaatggtagtataaaagtggacagccatttggggcagggaacaacaatgaccgttttacttcacaaacaa

SEQ ID NO: 8596 - protein, 551 aa, Streptococcus agalactiae; identical to SEQ ID NO: 8594

SEQ ID NO: 8597 - DNA, 882 bp, Streptococcus agalactiae
atgaaaaaacacaaaatgctatctcttttggcggtatctggtcttatgggaattggcatcctagcaggatgctcaaatgattcatcatcttcatctaaagggacaattaacattgtttctagagaggaagggtctggaactcgtggagctttcatagagttatttgggatcgagtcaaaaaataaaaagggcgaaaaagtagaccatacttctgatgcagcaactgttaccaattcaacttcagttatgctaaccactgtctctaaagacccgtcagctattggttattcttcactaggttcattaaatagtagcgttaaagtgcttaaaattgatggcaaaaatgcgactgtaaaagatattaaatcaggaagctataagatttctcgtcctttcaatattgtaacaaaagaaggtaaggaaaaagaagcaacaaaagattttattgattatatcttaagcaaagatgggcaagcagtcgttgagaaaaatggctatattccacttgacaatgctaaagcatatcaagcaaaagtgtcatctggtaaagttgttatagcaggttcaagttcagtaacgccggttatggaaaagattaaagaagcctatcataaagtaaatgcaaaagtagatgttgaaattcaacaaagtgattcttcaactgggattacaagcgcaattgatggatcagcagatataggtatggcatcacgtgaattggataagacagagtcatccaaaggggtcaaagctactgttattgcaacagatggtattgcagtagttgttaataagaaaaataaagttaatgatctatcaacaaaacaagtaaaagacatttttactggaaagacaacgtcttggtctgacttatcaaagtaa

SEQ ID NO: 8598 - protein, 293 aa, Streptococcus agalactiae; identical to SEQ ID NO: 1694

SEQ ID NO: 8599 - DNA, 1554 bp, Streptococcus agalactiae; identical to SEQ ID NO: 1759

SEQ ID NO: 8600 - protein, 518 aa, Streptococcus agalactiae
VNFIEQISENNQFPIIFVGSGITQRYFENAPTWEKLLKDIWLELFDEESYYAKAFELRERFENNDFDIYTNLASLLEKEVSKAFINGNIQVDNLDLKTAYELNISPFKQLVANRFSNLKIREEKIEEIKQFSQMLSKARIIITTNYDNFIEECLKTINVSVKINVGNKGLFLKSSDYGELYKIHGTVDDASTITITKEDYEKNVTKSALINAKILSNLVESPILFLGYSLTDENIRKLLTDFAENSPFDISESAQKIGVVEYLPDSESIETVVSSLPDLSVYYSCLKTDNFTNIYRLISKINQGFLPSEIAKYENVFRKIIEVKGESKDLKTVLTSYEDLANLTEDEIRSKNIVVAFGDERYIYKFPDFKEYVRSYFLDKETIPQEIVIRFIATQPVASHLPIKKYMFAMSEYISKDSNKYTENIKKRLSKEEELSLDDFTSSIGVPLLHSKTLERQTEIVGILEADVPDNVRYNFIATHIKNFPKEELFLLVEKIIDEGIFETSRRRFLKAFDLLHY

SEQ ID NO: 8601 - DNA, 549 bp, Streptococcus agalactiae
atgaaacgtagaaaaatagttttatttttaatggtgttagtgatggcttttatagtttataaagttattcaaaaagataatccagtgattaaaacaagtggtaatcatacaaaagttgaacgagttgaaccgaaacataaggttaagtcttatgattcaactaaagaagcaaaatctactttggaagctagtgatcgtcaagtatctgataaggaaaaggagaaggttaaaagatctataactgtacctattgattaccttgtaaaaatcccaacacaatcagatattaagggtgattatcaaaataaattatccattacaaatcctacagttgcccaaactgtaaaaaccatgttgatggctggttatcattttgatttggaaagtttacaagtatatgagtcagatgcgagtaatgtttatcagtttactattaatttagtaacagataaaagagacaaattaagtttagctggtaattatgtattaggtacagaccaatttgagattgcgagtgtacatggtacacctgtaaatgtagtattttaa

SEQ ID NO: 8602 - protein, 182 aa, Streptococcus agalactiae; identical to SEQ ID NO: 1770

SEQ ID NO: 8603 - DNA, 1287 bp, Streptococcus agalactiae; identical to SEQ ID NO: 1805

SEQ ID NO: 8604 - protein, 429 aa, Streptococcus agalactiae
VGHFSEKSGSLILRRSLFIVDAIYLKKFRKKTGLKQKEFALSSGLTLKSLRNYEQGKRKLTLEKYQEIKSHFGYLVENDSSRLQVMIDYVRITLKDVRDLEFFCRNFLHCAFKEFQPFESKLMNYNHLWKRGDIWIFDFADKHETGNFQITVQLSGRGCRQLELLMETEKFTWHDWLSYLRNSYRDDMNVTRFDIAIDELYLGKDRENEQFHLSDMISKYYRHELDFESLRTWNYIGGGSLNFSDMEEIEQNRQGISLYFGSRQSEMYFNFYEKRYEIAKQEGITVEEALEIFELWNRYEIRLSQSKANAAVDEFISGVPIGEISRGLIVSKIDVYDGKNEYGSFQADRKWQLMFGGVEPLKFVTKPEAYSIERTLRWLSDSVSPSLAMIREYDMIVDGDYLQTILNSGEVNERGEKILDSIKASLGIL

SEQ ID NO: 8605 - DNA, 1716 bp, Streptococcus agalactiae; identical to SEQ ID NO: 1807

SEQ ID NO: 8606 - protein, 572 aa, Streptococcus agalactiae
LARLIPQYRGIKVKPYMRYMSYYLFSFLFILFLTPVGVYSYYYLDLLKMMDKMSMISVGTGLFLAFFVSWYLTWFLQEANPLFNKLDRLKRMSKFLYENGYVYEKRKKSNKKTKTKYRFPKVYVKQGKYDLSVSFEMAGGKFQKKFKDIGGELEDTFFMDFMEKTDDPRFKIYKLAYSAFLSRITVKDVIWNKDKGIKLMDGYYWDFINDPHLLVAGGTGGGKTVLLRSILRCLAEIGVCDICDPKRADFVTMSDLSAFEGRIAFEKADIIEKFENAVTIMFARYDFVRNEMKRLGHKDMKKFYDYGLEPYFFVCDEYNALMSSLSYQEREIVDNAFTQYILLGRQVGCNAIIAMQKPSADDLPTKIRSNMMHHISVGRLDDGGYVMMFGDENRNKEFRFIKYLAGRRVYGRGYSAVFGEVAREFYSPLLPKNFSFYDAFEKINRHENPFDPTENQEVSKAILKDESLREFVEKTSENELLKGSVGFDFDDEMEEMENMSIGDLAKKTGFSFGKIKNLIDMIEKDNYMTFSREDEKVVLNDSDAVVLESLLTQKDEFEGSWKELLLNYFKGE

SEQ ID NO: 8607 - DNA, 855 bp, Streptococcus agalactiae
atgagagatgagcaagaaatatataatttggtgttaaacatagcaaaccaagataagagaatcgaagctgtactattgaatggatctcgggctaacccaaatgtaccgaaagatgattttcaagattatgatattgtttttgttactaattttatagaagatattatttctgacactaattatcataaaaaattcggtgatattcttataatgcagaaaccaaatgagtttagaaataagacggaatacaattgctttgcttacttaatgcagtttcaagatctgacgaggattgatttaagacttattaaaccagaattcttggaggattatttagatgatgctttttcaaaagtacttttagataaaaagaataaatatcttgattataattttgaaagaagttctctgtacgaaacaaagcaattgtcagaagatgaaatcaacaaaattcttaatgaaatatattgggttagtacttatgtagtcaaggggatagcaagaaatgatattatttattcagagtttatgatatctaatcctattaaaaatgcttttattaaacttctaaaacaaaaaatattaatagaaaaagagcttgattcattatcttttggaaagctcgacaaggatatcttgcaatatattacagataaagatcaactattgaaaattttttcaaataaatctttaaaagacattgaggctaatttgcgatttttattggatgaaacaaatcaaatggcgaaatatatttctattaataggaaacttaatctgaaccaaggagaataccaatcagcaatgaaatttatgaatatctttttgtcaaattcatatcaaaatttcaactaa

SEQ ID NO: 8608 - protein, 284 aa, Streptococcus agalactiae; identical to SEQ ID NO: 1834

SEQ ID NO: 8609 - DNA, 606 bp, Streptococcus agalactiae
atgataaagtttaaattattttttaaatccacagaaaaagaggaagaatggatcgataaggttcaaaaaagtggctatgcttttacaggcattaactcatttcttccagccttctattattttaagagagataaagaaaaagacaagatgtcaataaaaatggattttaaaaaatacatgtcgaaagatgactatgctaactatatcactttatttgaggacagtggatggaagcatattagcggtagtcgttggggagggctgcattattttcaaaaaataaagcctgaaaccagttcagagattttttctgatcaagaatcaaaatcagcgatggctatgagttattataaatatacttgtgagcatgcgtttttctctttattttatttctttctcttgataagaacaacttctatcaccatatttgatccaaaaagttggtatctgacgcaaggtctatgggaaatgcaagggaaaatattttggttagcattcttatttgaaacaccatttgccttattaagaatattacctatgttttactttttaatttctggaatatactatattacacgagctgtaaaacccaaggaaattataaat

SEQ ID NO: 8610 - protein, 202 aa, Streptococcus agalactiae
MIKFKLFFKSTEKEEEWIDKVQKSGYAFTGINSFLPAFYYFKRDKEKDKMSIKMDFKKYMSKDDYANYITLFEDSGWKHISGSRWGGLHYFQKIKPETSSEIFSDQESKSAMAMSYYKYTCEHAFFSLFYFFLLIRTTSITIFDPKSWYLTQGLWEMQGKIFWLAFLFETPFALLRILPMFYFLISGIYYITRAVKPKEIIN

SEQ ID NO: 8611 - DNA, 612 bp, Streptococcus agalactiae; identical to SEQ ID NO: 1849

SEQ ID NO: 8612 - protein, 204 aa, Streptococcus agalactiae
VNKKSFFQCVILLVSFLVLTLAVKSQSDMISYLDNITSAFFQSIRNPDLTNLMTIISTVVSPLTTSLIALVILGYQYFLNQRIAVWLFMLFFGTNALALLLKDIIARHRPMNQLVFDSGYSFPSGHTISAFLLMILVLVVARQRLRRVLSQVVFVIFALVILASVIFSRLYLENHFLTDILGSLLLGASSYYGLSAIVSLKELQ

SEQ ID NO: 8613 - DNA, 375 bp, Streptococcus agalactiae
ttgaatcaagaaaaaaagagacttaacctaatcgggctgatacttttagctcaggctattgttttaagtttggcgactacactatttgctgaaatcttacaaaatgatgtctggataggtatagcaagtactttaatcgccttactcattccttgtttttttatgggttttaaaaatttaaaaaaacatctaacggcaacccatcatacaatcactttcaccactattttattcttgttaagcattatatatactactaataatatagtctccacaatatgggatgttgtgctaaatcatctcaatattatggaatcggaaagtcaaaattatgatgccacattcaatatacttatgattagttatctgttgttg

SEQ ID NO: 8614 - protein, 125 aa, Streptococcus agalactiae
LNQEKKRLNLIGLILLAQAIVLSLATTLFAEILQNDVWIGIASTLIALLIPCFFMGFKNLKKHLTATHHTITFTTILFLLSIIYTTNNIVSTIWDVVLNHLNIMESESQNYDATFNILMISYLLL

SEQ ID NO: 8615 - DNA, 1080 bp, Streptococcus agalactiae
atggcaagaatcccttatcagaaaacacttattttttgtgtagccgttattattgctatttttattttggggttatctaaggatttagcacaatctaaagggcaaaaggttgcaaataataatactgtaaaaacagcacgtgtggttgcaaacggagatattttgctgcacgatgtactatatgccagtgcgcgccaacccgacggcacttataattttactccttattttaaagaggtaaaatcttggattgagagcgctgatttagcgattggtgattatgaagggacgattagttcagaatatcctttagcgggctatcctttatttaatgctcctaatgagattgcaactactatgaaagaaactggatatgatgtcgttgacttagcacataatcatattctggattcacaactggcaggtgctatcaatactgtcaagacttttaatcgtctgggattggatactattggggtttatttaaaggatagaaataaagaagatatcttaattaagcatgtaaatggtattaaaattgctattttaggttattcgtatggctacaatggtatggaagctaatgtttcaaagagtgactatgaaaaacatatgtctgatttagatactaaaaagattaagcaagatattaaaaaggctgaaaaagaagcagatatcaccattgtcatgccacagatggggatagaatatcaaaaaaaacctactacagaacaagtaatgctttatcatagtatgattaaatggggggcagatattatattcggaggacaccctcacgttgttgaaccgtctgaagtgataaaaaaagatggccagaaaaaatttattatttactctatgggaaattttatttcaaatcagcgtttagaaacggttgatgatatctggacagaaagaggattattaatggatgtaaccatagagaaaaaaggtcaaaaaacagtaattaaaaaagttaaggcgcatccaacactagtagaagcaaaaccaaatggccgttatgttgaagaaggctttccagcttatgattataggacgctagttttagaggaattatat

SEQ ID NO: 8616 - protein, 360 aa, Streptococcus agalactiae
MARIPYQKTLIFCVAVIIAIFILGLSKDLAQSKGQKVANNNTVKTARVVANGDILLHDVLYASARQPDGTYNFTPYFKEVKSWIESADLAIGDYEGTISSEYPLAGYPLFNAPNEIATTMKETGYDVVDLAHNHILDSQLAGAINTVKTFNRLGLDTIGVYLKDRNKEDILIKHVNGIKIAILGYSYGYNGMEANVSKSDYEKHMSDLDTKKIKQDIKKAEKEADITIVMPQMGIEYQKKPTTEQVMLYHSMIKWGADIIFGGHPHVVEPSEVIKKDGQKKFIIYSMGNFISNQRLETVDDIWTERGLLMDVTIEKKGQKTVIKKVKAHPTLVEAKPNGRYVEEGFPAYDYRTLVLEELY

SEQ ID NO: 8617 - DNA, 1119 bp, Streptococcus agalactiae
atgagatatttaactgctggtgagtcacatggacctagtttaacagctattatcgaagggattcctgcgggactgaaattatctgctaaagatattaatgaagatttaaaacgccgccaaggtggttatggtcgtgggaatcgaatgaaaattgaaactgatcaagtgatcattagttctggtgtgcgccatggaaaaaccttgggttcacctattacactgacagtaactaataaggatcatagcaaatggctggacatcatgtcagtcgaagacattgaagagcgcctaaagcaaaaacgtcgtattaagcatcctagacctgggcacgcagatttagtaggtggaattaaataccgtttcgatgatttgagaaatgctttagagcgttcttcggctcgtgagaccacaatgcgagtagctattggtgcgattgctaaacgtatcttgaaagaaattggtatcgaaattgccaaccatattgtagtttttggtggcaaggagattactgtccctgataagctaacagttcaacaaatcaaagtgttatctagtcaatcgcaagtagctatcgtcaatccatccttcgaacaagaaatcaaggattatattgacagtgtgaaaaaggctggagatactatcggaggagtggttgaaactatcgttggaggagttcccgttggtttaggctcttatgtacactgggatagaaagttagatgctaagatagcgcaagcagttgtatctatcaatgcttttaaaggtgttgaatttggtctaggttttaagtcagggtttttaaaaggaagtcaagtaatggactccatatcatggacaaaggaccaaggttatatacgtcagtcaaataatttaggcggttttgaaggcggtatgactaatggagagcctattatcgttaggggagtaatgaaaccaattcctacgctttacaagccactaatgtcagttgatattgatactcacgagccttatagagctacagtggaacgttctgatcccacggcacttccggctgcaggtgtcgttatggaagctgtagtagccaccgtcctggtgacagaagtgctagaaaaattttcttcagacaacatgtataac

SEQ ID NO: 8618 - protein, 373 aa, Streptococcus agalactiae
MRYLTAGESHGPSLTAIIEGIPAGLKLSAKDINEDLKRRQGGYGRGNRMKIETDQVIISSGVRHGKTLGSPITLTVTNKDHSKWLDIMSVEDIEERLKQKRRIKHPRPGHADLVGGIKYRFDDLRNALERSSARETTMRVAIGAIAKRILKEIGIEIANHIVVFGGKEITVPDKLTVQQIKVLSSQSQVAIVNPSFEQEIKDYIDSVKKAGDTIGGVVETIVGGVPVGLGSYVHWDRKLDAKIAQAVVSINAFKGVEFGLGFKSGFLKGSQVMDSISWTKDQGYIRQSNNLGGFEGGMTNGEPIIVRGVMKPIPTLYKPLMSVDIDTHEPYRATVERSDPTALPAAGVVMEAVVATVLVTEVLEKFSSDNMYN

SEQ ID NO: 8619 - DNA, 2142 bp, Streptococcus agalactiae; identical to SEQ ID NO: 1899

SEQ ID NO: 8620 - protein, 714 aa, Streptococcus agalactiae
VKKIKDFASRAINTRLGFILLLVVIYWLKTIWAYHTDFNLGLENSYQLFLTIINPIPLGLLIIGLALYVKRTKAFYITAFITYAIVNILLIANAIYYREFSDFITVSAVLASSKTSAGLGDSALNLLRIWDLVYVFDFIILIFLFATKKIHLDDRPFNKRASFSITALSGLLFSINLFLAEIDRPELLSRGFSNTYIVKALGLPSFSIYSGNQTYQAQKERNGATAQELATAKKYVAEHYAKPNPEYYGIGKGRNVIMIHLESFQQFLIDYKLNIDGKEHVVTPFINSLYHSKETVSFSNFFHQVKAGKTSDAETLMENSLFGLSSGSFMVNYGGENTQFAAPHILAQNGGYSSAVFHGNVGTFWNRNNAYKQWGYDYFFDSSYFSKQTKDNSFQYGLNDKYMFADSIKYLEHMQQPFYTKFITVSNHYPYTSLKGESDEEGFPLAKTNDETINGYFATANYLDTALKSFFEYLKAAGVYDNSIIVMYGDHYGISNTRNPSLAELLGKDPETWSEYDNAMLQRVPYMIHIPGYSKGFISNTYGGEVDNLPTLLHILGIDTSKYTQLGQDLLSKDNKQMVAMRTTGQYITPKYTNYSGHLYYTDSGQEITNPDETTKAEIKAIRDATNKQLSTSDSIQTGDLLRFDENNGLKTVEVEKFNYTHSLKALKAKERKLKDRSTSIYSKHNNKSTVDLFHAPSYLELQDPNKTHKTSKK

SEQ ID NO: 8621 - DNA, 960 bp, Streptococcus agalactiae
atgaaaaagctattaaccactcctgtaatgggttgtactttggttatactttctctaacgtccctatttgttggtgtgaaatctatcccactggagcaaataacacaccttgatcaatcacaggtagatatttttttaacgagtcgcttaccaagaaccattagtatcctaatatctggtgcaagtttgtcagtctgtggcctgctgatgcaacaactaacccaaaacaagttcgtttcaccgacaacttcagggactatggattgggcgaaattaggagtagttgttacgctgattttctttaaaaatacctctatttttattcaactatgtatagcttcaggttttgccattttaggatcgcttctttttgtaaccattttaaaaatgattacttttaaggataatatttttatacctcttatcggactgatgcttggacaaattgtagcagcagcaacagtatttttaggaacacattttcaagtactacaatctgtcaacagttggcttcaaggtaatttttccatcatgactagccatcgctacgaaattctttacttagcattgccatgtttgtttttagtatatttttttgctcatcagtttaccattgttgggcttggagaaagcttcgctaagaatttaggggttgcttatgaaaagatgatttactttggtttagttttggtttcaattatgacatccctagtcattattatcgtaggagctttacctttcttaggtttaatcgtacctaatctaattagcataactaaaggagatcatatgtcctcaactatcttagagacatcgcttttaggggcttgtatcgtcatgatatgtgatctttttggtcgcttagttatttttccttatgaagtctcaataggagttacgctaggagtattaggtagtgcctttttcctgatttcaattataagaaatgagggaaaatca

SEQ ID NO: 8622 - protein, 320 aa, Streptococcus agalactiae
MKKLLTTPVMGCTLVILSLTSLFVGVKSIPLEQITHLDQSQVDIFLTSRLPRTISILISGASLSVCGLLMQQLTQNKFVSPTTSGTMDWAKLGVVVTLIFFKNTSIFIQLCIASGFAILGSLLFVTILKMITFKDNIFIPLIGLMLGQIVAAATVFLGTHFQVLQSVNSWLQGNFSIMTSHRYEILYLALPCLFLVYFFAHQFTIVGLGESFAKNLGVAYEKMIYFGLVLVSIMTSLVIIIVGALPFLGLIVPNLISITKGDHMSSTILETSLLGACIVMICDLFGRLVIFPYEVSIGVTLGVLGSAFFLISIIRNEGKS

SEQ ID NO: 8623 - DNA, 1482 bp, Streptococcus agalactiae
atggtaacatttttaggaggggtagcccttttaattgttggttatttcacgtacggtagatacattgaaaagaattttcaaattgatgaaaatcgccaaacacctgcagaagcattaagggatggatatgattttgttcctatgccaaaatggaagaatgggatgattgagttattgaacatcgcaggaaccggacctatctttggccctattttaggagcactctatggtccagttgcttatatctggatagtcttaggatgtatttttgcaggggctgttcatgattatatgattggaatgatttctcttagaaataatggtgcatatcttcctgaattagctagtcgctatcttggaaagtcaatgaagcatgtgatcaacattttttcaatgctattacttattttagttgcaaccgtatttgtggtaactccagctaatcttatcctaagtattttaccagctgggacactatctttaccttggataatcggtcttattttcgtttattaccttatttctacagtcttacctattgataaagcacttggtaaagtttatcctgtattctgcgtcatcttaatggttagtacggcagcagttggcttccgtttattaactggtggctttgatatgccaaacttaacttttgaaacctttaaaaatatgcatccagctgggcttgggatattccctgctttattctttaccatttcatgtggagccatctctggtttccatgctacccaagcacctatggtctcaagaacaactgttaatgagagagaagggcgtttcactttctacggcatgatgattgcagaaggagtaattgcgatgatttgggcaggtgcttcaatgagcttgttcaaaggtcaaaatctctatgaaatgattgctgctgggacaccttctgcagttgtcaatcaagtaatgttaatgttactcggtagtgtaattggaactatcgctatcattggtgttattgttctccctgtttcatctggtttatcagctttccgtagcttacgtactatcgttgctgattatatccatgtcaaacaagatactcttccaaaaatctttgctgtaactatcccattatatgttatttcatttgtccttacacacgttgattttaatctcctatggcgttactttaactgggcaaatcaagtaactgctgttattggtttattagttgctacaagatatctcatcctaaaaagacgaaattattgggtaacatttgtaccagctatgttcatgttgtatgcagtagttgtttatattttatctcaaccaattggatttaatatgggcttaggcatcttaacttattcacttgctttagtgttaacaggtattcwtgttggacttttctggaaatctggtcaaaaacaattaaaaactgttcatcctgaagcattcctgtttaacgatcatagaccaattaattattacagtagtttagattct

SEQ ID NO: 8624 - protein, 494 aa, Streptococcus agalactiae
  MISC_FEATURE (1)..(494): Xaa = Any Amino Acid
MVTFLGGVALLIVGYFTYGRYIEKNFQIDENRQTPAEALRDGYDFVPMPKWKNGMIELLNIAGTGPIFGPILGALYGPVAYIWIVLGCIFAGAVHDYMIGMISLRNNGAYLPELASRYLGKSMKHVINIFSMLLLILVATVFVVTPANLILSILPAGTLSLPWIIGLIFVYYLISTVLPIDKALGKVYPVFCVILMVSTAAVGFRLLTGGFDMPNLTFETFKNMHPAGLGIFPALFFTISCGAISGFHATQAPMVSRTTVNEREGRFTFYGMMIAEGVIAMIWAGASMSLFKGQNLYEMIAAGTPSAVVNQVMLMLLGSVIGTIAIIGVIVLPVSSGLSAFRSLRTIVADYIHVKQDTLPKIFAVTIPLYVISFVLTHVDFNLLWRYFNWANQVTAVIGLLVATRYLILKRRNYWVTFVPAMFMLYAVVVYILSQPIGFNMGLGILTYSLALVLTGIXVGLFWKSGQKQLKTVHPEAFLFNDHRPINYYSSLDS

SEQ ID NO: 8625 - DNA, 681 bp, Streptococcus agalactiae; identical to SEQ ID NO: 1967

SEQ ID NO: 8626 - protein, 227 aa, Streptococcus agalactiae
LKQSNHRYHGPLIEFEIEYSYIKIFPWIGLFISCIGLYASNFGDPLGFIKFIFSVCIFVNLVSIIISLFFKKISNFLKKISYILLSLVFLTLIIGFDFIGLAMFLNNRNFGHVQSIYYTEMAKMYIMIMLIIFIVFSGIYYFYYLPKNQGKKWKFNQWKLQKGKKEQLKINYGIIFGLVMLSPVFLVGSIENIFGLIGGVLFTATFPALIVDSLYAAYYIHKHPEYE

SEQ ID NO: 8627 - DNA, 426 bp, Streptococcus agalactiae; identical to SEQ ID NO: 1989

SEQ ID NO: 8628 - protein, 142 aa, Streptococcus agalactiae
LKKDKYIALCLLCAIATSNLSAVTVFAQDAQTILTQATTVTDQTIEKAGENSSAEATSASESVSSEATTVVPEASLPSTDLHAQPADSKTAPTETVIEGQTETNPTTSPDKQFLQQVIPKEKHRLGRKQIQANPKLQLLVSL

SEQ ID NO: 8629 - DNA, 1716 bp, Streptococcus agalactiae
atgggcatctcagacttacctcaaccgtggctaccgcctctaagcaatcagattgcagtaaccgatctccgtaaggagggatcagtagacctctggagcaaggccccatcttacaaagctgttcttggctttatggatataccaagccaacaagcacaagaagtggcttaccacgattttgaagacgatgggcatttgtcaatttttgcaggaccaagtatggggaaatccacagcccttcaaactgtaacaatggacttagcacgtcataatagtccagaatttttaaacctttacctctttgattttggtaccaatggcctcttacctctaagacgtttgccacatgtagcagatttctttaccattgatgatgacgaaaaaatagccaagtttattgcccgtatcaaagttgaaatgtctgatcgtaaaaaagccctcagtcgctacaatgtcgcgacagcaaaactttaccgtcaggtatctggggaaaccatgcctcaaatcctgattgttattgacagttatgaagggctacgggaagctcaaacaccgactaacttagaagcttgtttccaaaatatttcgcgtgatgggtcgtcacttggcatttccttagttatctcagctggtcgtacggcagctttgaggtcgtccttaatggcaaaccttaaagaacgtatcgctcttaaattaacagatgactctgaatcacggacacttgtcggtcgtcaccaacacatcatggaagatattccaggacgtggattaatcaaacgtgatgacattgaagtgttacaagtggctctctcaacagaaggcactgaaacctttgacatcatcaataacatccaaaacgaatctgacgccatgaacagcaaatggactggaccaagaccaaaagcaataccaattgttcccgaagaattaacctttgacgactttatggctacagatagtgttcaagctgacctatcagctaatcgtttaccacttgggcttgaaatggttgacgttgaaagttatagtttagcacttaatcgctttaagcatatgctttacatgtctgattctgacgagtcactcgaagcagttggttcccatatcatcaaggtcttgcttaacgtcccaaattaccataacatgatcatcgattcgcttggcgaatatgaaagctatcaaggtcaggtacgtacttatgtgggttctgatatgattgaagatatggcggatcagttgatctatgagttgcagcaacgtgaaagccaatctgagatagctgaatggtttatcatgattccagattttgaaagctttgtggctaagagcaatatgaagcttgaacaggttcaggcattgcttgacaatggaccacgctatggtttacatctgattcttggatcaagctataactatgttgggactaagatcgatgctgtgcctaaatacgttcgcacaacgacccagtatgtgctggctggcatgaggctcatggatcaaaccttccttgaaaaagtgtataatagtaaggaaatccgtccaaacaaagacgaagcctacattcacgatagaaaaacctatcaaaaattaaaactcaccatagactaagaaaggagaccaaatggcaaaaatacaaagtgatgcctccgtcgcatccacctgtgcaactgcaatacaatcaggagccagtggaatcacagcagtaggagctccaac

SEQ ID NO: 8630 - protein, 535 aa, Streptococcus agalactiae
MGISDLPQPWLPPLSNQIAVTDLRKEGSVDLWSKAPSYKAVLGFMDIPSQQAQEVAYHDFEDDGHLSIFAGPSMGKSTALQTVTMDLARHNSPEFLNLYLFDFGTNGLLPLRRLPHVADFFTIDDDEKIAKFIARIKVEMSDRKKALSRYNVATAKLYRQVSGETMPQILIVIDSYEGLREAQTPTNLEACFQNISRDGSSLGISLVISAGRTAALRSSLMANLKERIALKLTDDSESRTLVGRHQHIMEDIPGRGLIKRDDIEVLQVALSTEGTETFDIINNIQNESDAMNSKWTGPRPKAIPIVPEELTFDDFMATDSVQADLSANRLPLGLEMVDVESYSLALNRFKHMLYMSDSDESLEAVGSHIIKVLLNVPNYHNMIIDSLGEYESYQGQVRTYVGSDMIEDMADQLIYELQQRESQSEIAEWFIMIPDFESFVAKSNMKLEQVQALLDNGPRYGLHLILGSSYNYVGTKIDAVPKYVRTTTQYVLAGMRLMDQTFLEKVYNSKEIRPNKDEAYIHDRKTYQKLKLTID

SEQ ID NO: 8631 - DNA, 471 bp, Streptococcus agalactiae
atgaagttgaaacgatttttagcctgtctactaatattatcctgtatgagtcaaacatcagtattttctgatgggttaaagaataatgatattcattttgatacaaaacgtttagaatcagattcacaaaaaaattctggttttcaaactgaattaactaaagatttatttaaaaaagaagaccttaaaaaattggataaaaaccgtcaatctaaagtctcactccagaaaaagcagtctaagcaactgtttcaatattcaaataaaggacaatctgataggaaaaaacgtatcaaacaattattttctgaagaaagtaatcaatttaaatttgttacaagaacagaagaaccgactgtttcggctgatattggtcatataattatatacctggttctcattagtttggtactaatattagcttctataatgacttttaaaataaaggacaaaaaggatgaatacacatat

SEQ ID NO: 8632 - protein, 157 aa, Streptococcus agalactiae
MKLKRFLACLLILSCMSQTSVFSDGLKNNDIHFDTKRLESDSQKNSGFQTELTKDLFKKEDLKKLDKNRQSKVSLQKKQSKQLFQYSNKGQSDRKKRIKQLFSEESNQFKFVTRTEEPTVSADIGHIIIYLVLISLVLILASIMTFKIKDKKDEYTY

SEQ ID NO: 8633 - DNA, 3009 bp, Streptococcus agalactiae
atgaaaagaaataactttagaatactttggtatattatagctgttgctctctttttagtagctattgctggccttaatcttaagcttcaaggcgatcatgcaaaagagaataaaacaacacagtcagctactaacactaaactaaatatagcattagtcaacgaagatcaaaatgtatctaatggtaaagaaagttataatttaggagctagttatattaagtctatcgaacgtgataatagtcaaaattggtcagttgttagtcgaggtactgctcaaaatggattagacaaaggtgattatcaattaatggttatcatccctaataacttttctcaaaaacttcttgatgtcaataaagcaaatgcagagcaaacaactatctcttataaggttaatgccaaggggaatttagcattagagaaaaaggcaactgaaaaagagaaagatattgtttcagagttaaatagccacttagtaaatatgtacatggcaagtattttaagtaacttatatacagctcaagaaaatgtacaggccatggtaaatgttcagtcaggtaatatctcaaattaccaaaaaaatcttttagattctgcaactaatttccaaaatatctttccagccctcgttaaccagtctagtagttccattactgctaacgaatcactgaaaaaatctttagaagcttctgataacatgtttaatgatttggtgacaacccagacaaatactggaaaagatttatcaagcttaatagaacagcgccatcaagatagcatttcgtatgaagcgttttcgacctcattactagaaatgaataacgagttattagagaagcaattatctgatattatcacacaagcacaaaaagaccaagaaacattatcatcacaactcaatagtattatgggtgatgataacaatcataatcataaagaaaactcatcagcttatctaaatgttgcaaggcaaaaaatccaagaactatctgaagcactcaagtcacaagataacattgctaaagatcaaagtgaacaactagataaaattgttagagagggactagcaagttactttgctaagaataataaagataatattactttattagaattattgaagagtcattctactaatgagaagactttgaaagattttaaagctaaggtagcagatttcacaaattctctcatttcaagcattccttcactaaacctttcggagttgcacttaacccaagaagaagaaaaagccattcagtttacatcttctgattcggaaatcattaaaaaagtaagcaacgaaagaactctgtatttaaatactaatttattgaatcgtctttttgaagctaggaaaaatagagatgaagctaaaaataaagttaatcaattaaaattgtcatctagttctactcgaactggtgagcagatagtttctgttgaatcaaataatccagattacagggtagatacctggacggttaatggtaagcaaacaagaaccttggaccccagccaaaacaataatattattatcaatagcagttatcaaagggaatcatctaactctagtattacgaaaccaagctatacaatcactatcgggaatcagaaacaaattgtacaaaatgatgacggtaaaatccaacggtcttactttgaggcagaggcaacgtatcaacgaactctacaagaagtaaatgatgcatataacaccactcacggattagtagctaaatactacattatttctgatggcgaagaaccgcaaaatttatttgatcaatttttaaatcaaagtgttaacgatacgatggttgatctggtcaaaaatggtataactaagtatttgatggatgaaaacactgctgatgcgcaacagaaagttaaagatgtcatggaggaagttgaaaatagtcaagatgaattggcggatcaaatggcaaaagtaactgagacaaatgtacgactaacagatgcaatcaaaaaacagcttgaaacccttcaatcaattaacatgaaggtccaaaacatcacacaggatcaatctaaagtaaacgactcacagaaaacaactgatcaacaattatctgatttgaagaaccagctagatgggctaatgacctctgcagcgggcgtaaaagatatgtccaaatctaatagtcaagaggcggaccaagttaatcaaatattcacatcattcaataaagatgttcaagatgctaaaaattcgggcaacaaactttcgacggatgcaaccgatttaatggctaacttccaaaaagaattggccaataatggtgatttcgtagcttctttctctaaagtttttaatactgcttataaaaatggagtgccaaatgatattctccttaatttcttatcacgacctgtcgctgaatcagcgtctgcagttagggcaactgaaaatacttatcgcccattcacttggatactattattagaagttgttagcctatttacagcatatatctttgcgactcaaaaccttattaagaaattgacagataggtataatgtcaaccgctggcttcaaacagactttttaaatgtcattgtcatttcaggcctctctcttgttattggtttagcactgggagttatctcaagcagaagtcttcatgtcatgcctgaatatgtaccatcttggttcctagttatgactctgtttagttttttattaattcatagtcagtatttctttattaaaaattttaaagcagttggtatgggtttagctttgtttatgattattagttttgtgtatctatcaaatgccgtaggcacagtagcgactgttagtggacttccaaaattactaaaagctattaatccactatctatccttgaaaatcaattatcatcttattttgataatgtgacaactggatttattttccttatcttagtacttcttgtggatgttgcttttattatcatgaatatttttatcaccttaaattttgaagctaaagtaaaagag

SEQ ID NO: 8634 - protein, 1003 aa, Streptococcus agalactiae
MKRNNFRILWYIIAVALFLVAIAGLNLKLQGDHAKENKTTQSATNTKLNIALVNEDQNVSNGKESYNLGASYIKSIERDNSQNWSVVSRGTAQNGLDKGDYQLMVIIPNNFSQKLLDVNKANAEQTTISYKVNAKGNLALEKKATEKEKDIVSELNSHLVNMYMASILSNLYTAQENVQAMVNVQSGNISNYQKNLLDSATNFQNIFPALVNQSSSSITANESLKKSLEASDNMFNDLVTTQTNTGKDLSSLIEQRHQDSISYEAFSTSLLEMNNELLEKQLSDIITQAQKDQETLSSQLNSIMGDDNNHNHKENSSAYLNVARQKIQELSEALKSQDNIAKDQSEQLDKIVREGLASYFAKNNKDNITLLELLKSHSTNEKTLKDFKAKVADFTNSLISSIPSLNLSELHLTQEEEKAIQFTSSDSEIIKKVSNERTLYLNTNLLNRLFEARKNRDEAKNKVNQLKLSSSSTRTGEQIVSVESNNPDYRVDTWTVNGKQTRTLDPSQNNNIIINSSYQRESSNSSITKPSYTITIGNQKQIVQNDDGKIQRSYFEAEATYQRTLQEVNDAYNTTHGLVAKYYIISDGEEPQNLFDQFLNQSVNDTMVDLVKNGITKYLMDENTADAQQKVKDVMEEVENSQDELADQMAKVTETNVRLTDAIKKQLETLQSINMKVQNITQDQSKVNDSQKTTDQQLSDLKNQLDGLMTSAAGVKDMSKSNSQEADQVNQIFTSFNKDVQDAKNSGNKLSTDATDLMANFQKELANNGDFVASFSKVFNTAYKNGVPNDILLNFLSRPVAESASAVRATENTYRPFTWILLLEVVSLFTAYIFATQNLIKKLTDRYNVNRWLQTDFLNVIVISGLSLVIGLALGVISSRSLHVMPEYVPSWFLVMTLFSFLLIHSQYFFIKNFKAVGMGLALFMIISFVYLSNAVGTVATVSGLPKLLKAINPLSILENQLSSYFDNVTTGFIFLILVLLVDVAFIIMNIFITLNFEAKVKE

SEQ ID NO: 8635 - DNA, 915 bp, Streptococcus agalactiae
atgaaaaatcaagaattagctaaaaaattaacatctccttcaaaaaactctcgattagaaaaatttggtaaaggaataacttttctttcgcttgccctaatcgtcttcattgttgcgatgattttgatttttgttgctcaaaaaggactatctacattttttgttgatggcgttaaattaacagacttcttatttaatacaaaatgggaaccaagtgctaagtcatttggtgcttttccaatgatagctggatcatttattgttactattctatcagctatcattgctacaccatttgctatcggtgctgccgtatttatgactgaaatctcacctaaatatggttctaaaattttacaacctgcagttgaattactagttgggattccttctgttgtttacggttttattggtttacagattattgttcccttcgttcgctctatttttgggggaacaggttttggcattttatctggggtctgtgtcctcttcgtcatgattctaccaactgttactttcatgacagtagatagccttagagctgtgccacgtcactataaagaagcaagtttagccatgggggcaactcgttggcaaacaatttggcgtgttatattaaacgctgcacgtccaggaattttcactgcaattgtttttggtatggcacgtgcatttggtgaagctctagcaattcagatggttgtcggaaactctgcaattttaccaacgtcattgacaacaccagcagcaacattaacgtctgttctaacaatgggtattggtaatactgtaatgggaactgtacaaaacaatgtcctctggtcgctagccttagtacttttaattatgagtttagcatttaatacagttattaagttaattacaagggaaggaaagaaaaactatgaacgc

SEQ ID NO: 8636 - protein, 305 aa, Streptococcus agalactiae
MKNQELAKKLTSPSKNSRLEKFGKGITFLSLALIVFIVAMILIFVAQKGLSTFFVDGVKLTDFLFNTKWEPSAKSFGAFPMIAGSFIVTILSAIIATPFAIGAAVFMTEISPKYGSKILQPAVELLVGIPSVVYGFIGLQIIVPFVRSIFGGTGFGILSGVCVLFVMILPTVTFMTVDSLRAVPRHYKEASLAMGATRWQTIWRVILNAARPGIFTAIVFGMARAFGEALAIQMVVGNSAILPTSLTTPAATLTSVLTMGIGNTVMGTVQNNVLWSLALVLLIMSLAFNTVIKLITREGKKNYER

SEQ ID NO: 8637 - DNA, 720 bp, Streptococcus agalactiae; identical to SEQ ID NO: 2091

SEQ ID NO: 8638 - protein, 240 aa, Streptococcus agalactiae
LSAIIDKKVVIFMYLALIGDIINSKQILERETFQQSFQQLMTELSDVYGEELISPFTITAGDEFQALLKPSKKVFQIIDHIQLALKPVNVRFGLGTGNIITSINSNESIGADGPAYWHARSAINHIHDKNDYGTVQVAICLDDEDQNLELTLNSLISAGDFIKSKWTTNHFQMLEHLILQDNYQEQFQHQKLAQLENIEPSALTKRLKASGLKIYLRTRTQAADLLVKSCTQTKGGSYDF

SEQ ID NO: 8639 - DNA, 1962 bp, Streptococcus agalactiae; identical to SEQ ID NO: 2113

SEQ ID NO: 8640 - protein, 654 aa, Streptococcus agalactiae
VNNMFYLKIAWHNLKHSIDQYIPFLLASLLLYSLTCSTLLILMSAVGRDMGTAATVLFLGVIVLSIFAVVMEHYSYNILMKQRSSEFGLYNILGMNKRQVARVASLELFIIYIFLISIGSLFSAFFAKFIYLIFVNIINYHALNLSLSLWPFIICIVIFTGIFLTLEVPVIRHVHLSSPLSLFRKKQQGEKEPKGNLILAILALVAIAIAYTMALTSGKAPALAVIYRFFFAVLLVIAGTYLFYISFMTWYLKRLRQNKHYYYKSEHFVSTSQMIFRMKQNAVGLASITLLAVMALVTIATTVSLYSNTQNVVTGLFPKSVSLSIDNSKGDAKNIFEEKILKKLGKSSKEAITYNQTMISMPVSQSSELNITSKNVKHVDITKTGFMYLITQNDFRRLGHQLPKLKDNQVAYFVQKGDSRLKKINLLGNKFDVVKNLKEAYVPETTNTYNPGLIIFANNKQIDNIRKAYLPYTKNINTFPKTFKAYLDLNSQEINSISKNDIIEVDGKYVGNISTKQSFLKEGYQMFGGLLFTGFLLGISFLLGIALIVYYKQYSEGHEDKRSYRILQEVGMSKKLVKRTINSQIMIFFFQPLVVAVIHFGVAIPMLKQMLLVFGVLNSTIVYVVSGLTVLAISIIYFIIYRITSRTYYHIIER

SEQ ID NO: 8641 - DNA, 963 bp, Streptococcus agalactiae
atgcggcgaaaaatagttttactttttgtagttccaatgcttatagttttaggaattttaggagtggtagttcattattatggttcagcattaaatatttatctattacctcctagtagcgaacgttatggacgtgttattttagatcgtgttgaacagcgtggtttgtattcgcaaggtcgtcaatggcaaattataagacaacgatcagaaaaaaagttgaaaacgtcaaaatcttaccaagagagtcgcaacattgtacaggaagcagtacggtatggaggcggtaaacatagtcaaatattatccaaagagactgtacgaagagataccctagatagtcgatatccagaatatcgaagattaaacgaagacattctcttaattactattccttctataagtaagttagataaacgatctattagccattatagtggtaaattacaaaatatattgatggaaaaaagttataagggactcattttagacttatcgaataatactggcggcaatatgatccctatgattgggggggtagcctctattttaccaaatgataccctatttcattatactgataagtatggaaataagaaaacaatcacgatgaaaaatataccgctagaagcattaaaaatatctaggaaaacaatcaatactaagcatgttccaatcgctattataactaatcataaaactgctagttcggcagaaatgacttttttatcatttaaaggattacctaatgttaaaagctttggtcaagctacagcaggatatacgactgttaatgaaactttcatgctttacgacggtgctagattagctttaactacaggaatagttagtgatcgacaaggatataaatacgagaacacccctatcttaccagatcaagtaaccagccttcctttacaagagtcacagtcttggttaaagagtagaatcaatcaaaattag

SEQ ID NO: 8642 - protein, 320 aa, Streptococcus agalactiae; identical to SEQ ID NO: 2122

SEQ ID NO: 8643 - DNA, 867 bp, Streptococcus agalactiae
atggaaatgcaagttcaaaaaagttttaaatcaaatatacattacggaacactctatctagtcccaactccaattggtaatctagatgatatgacttttcgtgccattaggattttaagagaagttgattttatttgtgcagaggatacacgaaatacgggacttttactcaagcactttgatattactactaaacaaattagttttcacgaacacaatgcttacgataaaatctctgggttaattgatttgttaaaagaagggaaatctttagcccaagtatctgatgcaggaatgccctctatttctgacccaggacatgaccttgtcaaggctgctattgaaggggatatcccagttgtatctataccaggagctagcgctggtattactgctctcatcgcttcaggtttagctccacaacctcatattttttatggcttcttacctcgtaagaaaggtcaacaaataactttctttgaaacaaagcaagattaccctgaaacacaaatcttttatgagtcaccgtttcgagtctctgatacgctaaaacacatgaaagagatttacggagatcgccaagttgttttagtacgcgaattgacgaaactctatgaagagtatcaaagaggaaccattagtcaacttttagagcatattgaaaaggtccctctcaaaggtgaatgcttaattattgttgatggtaagagagataccgagcgagtgaaagacagtagccaacaagatccactagtattagtaaaagaatatatcgctaatggtgataaaactaatcaagcgataaaaaaagtagcaaaagaatttaatctcaatagacaagaactctatgctagtttccatgattta

SEQ ID NO: 8644 - protein, 289 aa, Streptococcus agalactiae
MEMQVQKSFKSNIHYGTLYLVPTPIGNLDDMTFRAIRILREVDFICAEDTRNTGLLLKHFDITTKQISFHEHNAYDKISGLIDLLKEGKSLAQVSDAGMPSISDPGHDLVKAAIEGDIPVVSIPGASAGITALIASGLAPQPHIFYGFLPRKKGQQITFFETKQDYPETQIFYESPFRVSDTLKHMKEIYGDRQVVLVRELTKLYEEYQRGTISQLLEHIEKVPLKGECLIIVDGKRDTERVKDSSQQDPLVLVKEYIANGDKTNQAIKKVAKEFNLNRQELYASFHDL

SEQ ID NO: 8645 - DNA, 840 bp, Streptococcus agalactiae
atgaaaaaattacttagatggcttcctcctgtacttttcattattatccttataggaatgactatcttaggtaagtcctatatcaataaagtaacagctcacaaaataaaactctataactctcgaatgactcctactattttaattccaggatccagtgctactcaagaacgatttaacagcatgttagcacagctcaaccaaatgggagaaaaacatagcgttttaaagttaactgtcaaaaaagacaatagcattatctacaatggacaaattagcggcaatgaccacaaaccctacattgtcattggatttgaaaataatgaagatggttatagtaacatcaaaaaacaaacaaaatggctacagattgctatgaatgatcttcagaagaaatataaatttaaacgttttaacgctatcggtcattcaaatggtggcttatcatggactattttcctagaagattattacgactctgatgaatttgatatgaaatcattgttaacaatgggaacaccttttaactttgaagaaagtaacacctcaaatcatactcaaatgcttaaagatttaatcagtaataaaggaaatattccatcaagtctcatggtatacaatttggcaggaactaattcatatgatggtgataaaattgttccatttgctagtgtggagactggtaaatatattttccaagaaaccgctaaacactatacccaactaacagtaactggtaataatgctacacattctgacttgcctgataatcctgaagttatccaatatgtcgcagaaaaaattcttaaaaatgagaaaggtaaattaccaaaacctcac

SEQ ID NO: 8646 - protein, 280 aa, Streptococcus agalactiae
MKKLLRWLPPVLFIIILIGMTILGKSYINKVTAHKIKLYNSRMTPTILIPGSSATQERFNSMLAQLNQMGEKHSVLKLTVKKDNSIIYNGQISGNDHKPYIVIGFENNEDGYSNIKKQTKWLQIAMNDLQKKYKFKRFNAIGHSNGGLSWTIFLEDYYDSDEFDMKSLLTMGTPFNFEESNTSNHTQMLKDLISNKGNIPSSLMVYNLAGTNSYDGDKIVPFASVETGKYIFQETAKHYTQLTVTGNNATHSDLPDNPEVIQYVAEKILKNEKGKLPKPH

SEQ ID NO: 8647 - DNA, 693 bp, Streptococcus agalactiae
atgtctaaaaagtctcaccgtcaatatcaaatatatgaagggctcaggtgtgcggttgcactctgttttatttcaggttatatcaatgcttttacttatgtaacacaaggaaaacgttttgcaggtgtacaaacagggaatttgttatcttttgctattcatcttagtaataagcattatagtcaagcgcttgcttttttgctacctataatggttttcatgttaggtcaatcgtttacttatttcatgaatcgttgggcgaataaacatcaactgcactggtacctattatctagttttgcgttgacacaggttgctatagtaacaattatattgactcctttcttaccatcgtcgtttactgtggcaggactagccttctttgcttcaatacaagtagatacctttaaatcgctcagaggagcaccttatgctaatatgatgatgactggtaatatcaagaatgctgcttatttattaacaaagggactttacgaaaaaaattctgatattttcttaattgctagaaatacgattattattattggaggatttatctttggtgttgtttgctcgacttatttttcaagtaaactgggcgaatggagcttatcattaatattaattcctcttttatatgtcaacttgctgttaggccatgaattttataacctacaagtagaaaggcactcc

SEQ ID NO: 8648 - protein, 231 aa, Streptococcus agalactiae
MSKKSHRQYQIYEGLRCAVALCFISGYINAFTYVTQGKRFAGVQTGNLLSFAIHLSNKHYSQALAFLLPIMVFMLGQSFTYFMNRWANKHQLHWYLLSSFALTQVAIVTIILTPFLPSSFTVAGLAFFASIQVDTFKSLRGAPYANMMMTGNIKNAAYLLTKGLYEKNSDIFLIARNTIIIIGGFIFGVVCSTYFSSKLGEWSLSLILIPLLYVNLLLGHEFYNLQVERHS

SEQ ID NO: 8649 - DNA, 1335 bp, Streptococcus agalactiae
atggtaaaaaaaggctttttaacgggattactcttatttggtatcttctttggtgcagggaacctcatttttccaccagcattaggtgtagcatctggacaagatttctggccagcgattttaggattttgtttgtcaggagttggattagctattattaccctcctactaggcacactaactaatggtggttataagacagagatgtcggaaaaatttagtccgtggttttctttaacatttttagttatactctacctaactattggtccactttttgctattcctagaacagcaacggtttcttttgaaattggggttgctccaattgtagggcatagtccgattgctcttttgtgttttacagcctgtttttttgctgcagcttattatctcgctattagaccaaatggtatattagatagtgttggaaaaatcttaacgcctgtttttgcctttttaattctctctttggttgttgttggagctattgcttatggaaacttggagagtgctaaggcgagtgctgactatgcaggaaaagcgtttggaagtggtgtcttagcaggctataatacacttgatgcacttgcagcagttgctttttgtctagtagcaacagaaacgcttaaaaagtttggttttaaaactaaaaaagaatatttatcaaccatttggattgttggaattgttactagtttagcatttagtattttatatattggcttaggttttttagggaataagtttcctgtcccagctgatattttagctgacccaaatgttaataaaggagcttatgtattatcacaagcatcttataaattatttggaaattttggtcgttatttcttgagtattatggtaacattgacatgctttacaacaacagttgggcttattgtgtcagtatctgaattttttgataagaactttcgttttgggaattataaattatttgctactgtttttactttgattggctttttaattgctaatcttggtttaaatgctgtaattactttttcagttcctgtgctaactttattgtatccgattgttattgttattgtcttaattattttgattaataagtggttgccgctttcaaaaaagggaatgtctttgacaattggtcttgtcactttagtgtcgtttgttgaggttctagcgggacaatggcaagaaaaaacattaactcagttagttggattcctcccctttcatactatttcaatggggtggctagttccaatgttgattggtatagtattttctttggtgctgtcagataaacaaaaaggccaagcatttgatttagagaaatttgaagga

SEQ ID NO: 8650 - protein, 445 aa, Streptococcus agalactiae
MVKKGFLTGLLLFGIFFGAGNLIFPPALGVASGQDFWPAILGFCLSGVGLAIITLLLGTLTNGGYKTEMSEKFSPWFSLTFLVILYLTIGPLFAIPRTATVSFEIGVAPIVGHSPIALLCFTACFFAAAYYLAIRPNGILDSVGKILTPVFAFLILSLVVVGAIAYGNLESAKASADYAGKAFGSGVLAGYNTLDALAAVAFCLVATETLKKFGFKTKKEYLSTIWIVGIVTSLAFSILYIGLGFLGNKFPVPADILADPNVNKGAYVLSQASYKLFGNFGRYFLSIMVTLTCFTTTVGLIVSVSEFFDKNFRFGNYKLFATVFTLIGFLIANLGLNAVITFSVPVLTLLYPIVIVIVLIILINKWLPLSKKGMSLTIGLVTLVSFVEVLAGQWQEKTLTQLVGFLPFHTISMGWLVPMLIGIVFSLVLSDKQKGQAFDLEKFEG

SEQ ID NO: 8651 - DNA, 1431 bp, Streptococcus agalactiae
atgagagggaaggttatttacggcacaacccttataggtctttttctattcttatttttctatttttggattcctaagcatcacatcgagagaatacatcatcatcgtataaagcaggtagatgcgaagagtgatttaacaggatttaaaacccatttgcccattatcagcattgatacaaagcaacaagttattcctcttgttacaaaagaaggcggaaaatatgtcaaagctagggataatattaatgttgatatcgaattacgggattctccaagtagatcacatcatttatcagaaaagccgagaattaggacaaaagggttaatatcatatagaggaaatacctctcgttactttgataagaagtcattgaaagttaagtttgttactaataagttaaaggaaaagaagcatcgattagcaggaatgcctaaagaatcggagtgggtattgcatggtccctttctagacagaacattattaagaaattatctgagttataatattgctggtgagattatgtcctatgccccaaacgttcgctactgtgagttatttgtcaatggtgagtatcagggagtatatctagcagttgagaatatcgaacaaggtgagcaacgagttcccattgaaaaaagtgataaaaagttgcataaaacaccttatatcgttgcttgggatcgtgaacataaggcaaagcaaaagttagataactatgtacattatacacaccagtctggtatctcagctcttgatgtgaaatatccaggtaaacaaagattgacatcaaaacaattagagtttattaataaggacatcaatcatattgaaaaagtcctttattcttatgatttttcacaatatcctaaatatattgatagagaatcatttgcaaattattttgtcatcaatgaattttttagaaatgtggatgcgggtaaattttcaacctatctatataaagatcttcgtgatagagcaaaactagtagtttgggattttaataatgcttttgataatcaaattgaaggacgtgttgatgaggcagattttaccttgacggatgcaccgtggttcaatatgctcattaaggacaaagcatttatagacctggttgttcatcgctataaagaattacgaaagggagttctagcgacagaatatttatctaattacatagacgagacaaggcattttttaggtccagctattgatcgaaattataaaaaatggggctatgtctttgatttaaagaatactgatccaaggaattatttgattcctactgaacgcaatgtgacaagttatcacaaatcagtagaacaattaaaagattttatcaaaaagcgtggcagatggatggatagaaatattgagaccttgtatcaatatagtgcaccatcgaaaaatactaatactttactggag

SEQ ID NO: 8652 - protein, 477 aa, Streptococcus agalactiae
MRGKVIYGTTLIGLFLFLFFYFWIPKHHIERIHHHRIKQVDAKSDLTGFKTHLPIISIDTKQQVIPLVTKEGGKYVKARDNINVDIELRDSPSRSHHLSEKPRIRTKGLISYRGNTSRYFDKKSLKVKFVTNKLKEKKHRLAGMPKESEWVLHGPFLDRTLLRNYLSYNIAGEIMSYAPNVRYCELFVNGEYQGVYLAVENIEQGEQRVPIEKSDKKLHKTPYIVAWDREHKAKQKLDNYVHYTHQSGISALDVKYPGKQRLTSKQLEFINKDINHIEKVLYSYDFSQYPKYIDRESFANYFVINEFFRNVDAGKFSTYLYKDLRDRAKLVVWDFNNAFDNQIEGRVDEADFTLTDAPWFNMLIKDKAFIDLVVHRYKELRKGVLATEYLSNYIDETRHFLGPAIDRNYKKWGYVFDLKNTDPRNYLIPTERNVTSYHKSVEQLKDFIKKRGRWMDRNIETLYQYSAPSKNTNTLLE

SEQ ID NO: 8653 - DNA, 876 bp, Streptococcus agalactiae
atgaaaaaatatctaagtattgtagcccttttaactattttgtttagctctatttattatttgtattactttgatggtagtttgtatttaccaaagggcttattaaaagaaaatacaagaactaactttgttgttaaaggtgatactgtacttcacaagcccaccaataaaccttttgttgttaaaggagtagacgttgagtcttccttagcgggttatcatcacaacgattttcctattactcaaaaaacgtatcgtgaatggttccatttaatttccaacatgggggcaaatactgtaagagtcaaggtaccgatgaatgttgcattttacgatgccttatatcaccacaacaaagcatcaaagaggccactgtatttgttgcaaggaatacgtatagattcttatcgcaataatgcttctataacagcttttaatgataattatagggggtatttaaaacgagaagcaaaaggcgttgtggatattctccatgggcgtaagcaagtatggaatactgatttgggtagccgtcattatcattatgatcttagtccttgggtacttggttatgtcgtaggggatgattgraatagtggtactgtcgcttatactaatcatcaagagaaaaaaacgcaatataaagracgttattttaaaacttctgtggcagctaatccatttgaggtcatgctagctcaagtaatggatgaattgacacattatgagacagctaaatatggttggcaacatttgattagtttttcaaactcaccaacaacagacccttttcattatcgaaaaccatttgaggcacaggctcctaaatacgtacaactaaatgtagaaaatattcaagctaattcaaatggttaa

SEQ ID NO: 8654 - protein, 291 aa, Streptococcus agalactiae
  MISC_FEATURE (1)..(291): Xaa = Any Amino Acid
MKKYLSIVALLTILFSSIYYLYYFDGSLYLPKGLLKENTRTNFVVKGDTVLHKPTNKPFVVKGVDVESSLAGYHHNDFPITQKTYREWFHLISNMGANTVRVKVPMNVAFYDALYHHNKASKRPLYLLQGIRIDSYRNNASITAFNDNYRGYLKREAKGVVDILHGRKQVWNTDLGSRHYHYDLSPWVLGYVVGDDXNSGTVAYTNHQEKKTQYKXRYFKTSVAANPFEVMLAQVMDELTHYETAKYGWQHLISFSNSPTTDPFHYRKPFEAQAPKYVQLNVENIQANSNG

SEQ ID NO: 8655 - DNA, 1266 bp, Streptococcus agalactiae; identical to SEQ ID NO: 2245

SEQ ID NO: 8656 - protein, 422 aa, Streptococcus agalactiae
LYHILFRRKSIVPAYNESTTIVSSIDSLLHLDYEAYEIIVVDDGSSDNTSDVLKEEFALMKISNTIDSIIATQTCKDVFQRQVGKVKLTLIVKENGGKGDALNMGINAANYDYFLCLDADSMLQVDSLSQISKSIQVDPTVIAVGGLVQVAQGVKIEQGKVASYRLPWRIIPCAQALEYDSSFLGARIFLDYLRANLIISGAFGLFKKDLVKAVGGYDTQTLGEDMELVMKLHFFCRNNNIPYRICYETDAVCWSQAPTNLGDLRKQRRRWYLGLYQCLKKYKSIFANYRFGAVGSISYIYYILFELLTPFIECFGIVIIFLSLLFNQLNIPFFISLVSLYIFYCVLITLSSFLHRIYSQQLVIGILDIVKVFYIAVFRYLILHPVLTFVKVASVIGYKNKKMVWGHITREKQMKDFETSVT

SEQ ID NO: 8657 - DNA, 813 bp, Streptococcus agalactiae
atgactggatctaaaaaattagcaaaaagtgattacactaaaacagctttacgtgccttttatttacaaaatggctttaattacagtaactatcaaggtcttggttatgctaatgtcatatatccagctctcaaaaaatattatggagatgacaaaaaagctttagcgggagctctagaagaaaatgtggagttttacaatacaaaccctcatttcttaccttttgtaactagcttacatttagcaatgcttgataatgagcggccagaagaagaaattcgcggtattaagatggcgcttatggggcctcttgcaggtatcggtgattctttatcacaattttgcttagcacccttgttctcaacgattgcagcctctttagcgacagatggtttggtgatgggaccgattctgttctttgtggctatgaatactattttaacgggaattaaattagttactggcatgtatggttatcgtcttgggaccagttttattgataaattgagtgaacaaatgtcagttatctcacgggcagctaatatcgttggtgtaacggtcatctcaagtttagctgcaacacaagttaagcttacaatcccttacacttttgctccagaaaaagtaactagtacaacgcaaaagattgttactgtccaaggtatgcttgataaaattgcaccagctctacttccagcactctacactttccttatgttttaccttattaaaaataaaaaatggacaacttataagttagttatccttacagttattattggtatccttggtagctggttaggtattttagct

SEQ ID NO: 8658 - protein, 271 aa, Streptococcus agalactiae
MTGSKKLAKSDYTKTALRAFYLQNGFNYSNYQGLGYANVIYPALKKYYGDDKKALAGALEENVEFYNTNPHFLPFVTSLHLAMLDNERPEEEIRGIKMALMGPLAGIGDSLSQFCLAPLFSTIAASLATDGLVMGPILFFVAMNTILTGIKLVTGMYGYRLGTSFIDKLSEQMSVISRAANIVGVTVISSLAATQVKLTIPYTFAPEKVTSTTQKIVTVQGMLDKIAPALLPALYTFLMFYLIKNKKWTTYKLVILTVIIGILGSWLGILA

SEQ ID NO: 8659 - DNA, 1074 bp, Streptococcus agalactiae
atgatatcttattatagagataagggcttaccatcaccccaagttgaattattgttttcaattccttcgatggctattatcttcatcttgcttatcacaccttggttaagtaaaaaactttctgagaaacatatgattatctttgggctattgctaacagcattagggggaggattgccggttgtcagtcagaactaccttttagtatttgtatcgcgtcttttattggggagtggtattggttttattaatactagggccattagtgtgattagtgaatattatcaaggcaaagaaagaagaaaactcttaggattaagggggtcctttgaagttttaggaaatgctggtttgacagctttagttgggctgttgttgacttttggttggtccaaatcatttatgatttattttttagctttaccaatcttagttctatatcttgtttttgcgcctaagaaagtggtgaaagatacaaatgacaagattaaaactaaaggtcaaaaaatccctaaagctgatttaacttatattgtcgccttagctattttagcaggatttgtcataactataaatactgggattaatcttaggatacctctgctagtagtagaatttggtttgggtacgccagctcaagctagtcttgttcttagtgcgatgatgcttatgggaataatagcaggtatgagttttggtcagttgatagctatgtttcataaacaattaattccaatctgcctcgtcttattttctttaacattgcttggagttggattgccttctaatctaatggtactaacaattagtgcgatggcatcaggtttcctttacagcctgatggtcactgctgtgtttagcctagtagcagaccgtgttgaatattcgttggttggttctgcaacgacattagttttagtattttgtaatattggtggagctagtgcggctattcttctgtcttgttttgatcatttactaggacaaataaatgcagttttctatgtttatgctattttaagtttagcagttggtatgatttatttctttaaacgcctattttttaagaaaatg

SEQ ID NO: 8660 - protein, 358 aa, Streptococcus agalactiae
MISYYRDKGLPSPQVELLFSIPSMAIIFILLITPWLSKKLSEKHMIIFGLLLTALGGGLPVVSQNYLLVFVSRLLLGSGIGFINTRAISVISEYYQGKERRKLLGLRGSFEVLGNAGLTALVGLLLTFGWSKSFMIYFLALPILVLYLVFAPKKVVKDTNDKIKTKGQKIPKADLTYIVALAILAGFVITINTGINLRIPLLVVEFGLGTPAQASLVLSAMMLMGIIAGMSFGQLIAMFHKQLIPICLVLFSLTLLGVGLPSNLMVLTISAMASGFLYSLMVTAVFSLVADRVEYSLVGSATTLVLVFCNIGGASAAILLSCFDHLLGQINAVFYVYAILSLAVGMIYFFKRLFFKKM

SEQ ID NO: 8661 - DNA, 744 bp, Streptococcus agalactiae
atggcacaacgcagaatgtttagtagaaaaatcactgagactgaccgttttttggaaatgccactatcatcccaagctctctatttccatttgaacatgggagctgatgatgagggctttatagataaggcaaagacgattcagagaactattggcgctagtgatgatgatatgaaattactgattgcaaaagggttcttgattccctttgatagtggtgtagtcgttatccgtcattggcggattcacaactatatccagtctgaccgctttcaatcaaccttataccagtcagaaaaggctcagctagagtatgacaagtcaaaaacagctagtcttaaacctattggaaattgtatacaaaatgtatccaaaatggagacacaggttaggttaagtaagggtagcttagataaggatagcttaactacctatcctacagtttcagacaatgaggaagaagatattccatacaaggaaattatttcttacttgaatgaaaaagctaatagaaattacagacctaacattcagaaaaacaaaactcttatcaaggctagatggtcagaaggattcaggttagatgatttcaaacatgtgattgataccacggtcaaggattggtcaggcactaagtatgaaaagtatctcagacctgaaacgctctttggttctaagtttgaaggctatttgaatcaagcaccacgaatcaagacggaaacaattgacggaaggttgggcttt

SEQ ID NO: 8662 - protein, 248 aa, Streptococcus agalactiae
MAQRRMFSRKITETDRFLEMPLSSQALYFHLNMGADDEGFIDKAKTIQRTIGASDDDMKLLIAKGFLIPFDSGVVVIRHWRIHNYIQSDRFQSTLYQSEKAQLEYDKSKTASLKPIGNCIQNVSKMETQVRLSKGSLDKDSLTTYPTVSDNEEEDIPYKEIISYLNEKANRNYRPNIQKNKTLIKARWSEGFRLDDFKHVIDTTVKDWSGTKYEKYLRPETLFGSKFEGYLNQAPRIKTETIDGRLGF

SEQ ID NO: 8663 - DNA, 2733 bp, Streptococcus agalactiae
atgactgaaacgtttgaaggcttatacgtcaaatttggtgctaatactgttgaatttgataggtctgtaaaaggtatcaacactgccttatctagtttgaaaaaagacttcaataacatcaacagacaattgaagatggatccagacaatgttgacttgttgaatcgtaagttggttaacttgcaagaacaggctcgtgttggtgctataaaaattgctgaactcaaaaagcaacagaaggcactgggagaatctgaagttgggtcagcacagtggaataagcttcaacttgaaattgctaaggttgaatcacagatgaagattgttgataaggcaatggagtcaacaaagaaacacattgaagatgtaggagacccaaagtctattctgaatcttaacaaagaacttgataatgttgctaaagagcttgatattgtcaatcaaaagcttgagctagaccctgacaatgtcgaactagcagagcaaaaaatgaaactacttggcaaacagtcggaattggctggggataaagtccaagaattaaagaaaaaacaagctgcccttggcgatgagaaaataggtacagaagaatggcgtcaacttcaaaatgaaatcggtcaasctgaagttgaagttctaaagattgaccgtgcaatggacattcttggtgagtcaagccgttctgcaactggagacatcaaagaggcaaccagctatttaagagctgatgtcatgatggatgttgcagataaggctggtcagattggccagaaaatggttgacgctgggaaaatgacagtagatgcttggtctgagatagatgaggctctggacaccgtcacaaccaaaactggtctgactggtgatgccttagcagagcttcaggaaattgctaaagacattgctactggtatgcctaccagctttcagaatgctggtgatgccgttggggaattgaatactcagttcggtttgactggggaaaagctgaaatcagcatctgaattacttatcaagtatgctgagattaacgaaacagacatttcaagctctgccatttctgcaaaacaagctattgaagcttacggtttgacagctgaagacttgggaatggtcttagacaatgtgaccaaagccgctcaagatacaggacagtcagttgacacgattgttcaaaaagccattgacggtgctcctcagattaaaggtttgggactttcttttgaagaaggtgctgcactgatcggtaagtttgagaaaagcggtgtggattcatctgctgctctatcctctctatcgaaagctgctgtcatctatgctaaagacggtaagactctgacagatggattgaatgagactgttagtgctattcaaaattctactagtgagacagaggctttaagtattgcctcagaaatctttggtagtaaggctgctcctagaatggtcgatgctattcagcgtggtgcttttagctttgatgacttagctgaagcagctaaaagttcctctggtactgtctccaccacatttgatgagacgcttgacccaatagataagttgactcagtattctaaccaagcaaaagagggaatggcagaacttggcggtaaattgcttgagactgtcatcccagctttagaacctttgatgggtatgcttgaatcttctgtcaattggtttactagcctaaacgaaactgatcaacagactatcgtgattcttggcctagttacaactgctgtgatgatgttgcttggtgcaattgcaccgctggtcatcgccataggggcaataggtgcgcctgtcggaattgtagtggcggcaatagtaggggctattgccgtcataacacttatcatccaagcaatcatgaactggggagccataactgaatggcttcagtcaacgtgggattcttgtgctgcctggsyttctgaattgtggactaacatagtcacgactgccaccacagcgtggtcaaatttcactgcctggctttctggcctttggtcttcagtagtctcaactggacagtctttgtggtctagctttactagttccttgtccaatattttctcaagtttgattacaggtgctcagtctctgtggtcaagtttcacttccactctttccaatttgtggtctggactggtctcaactgggtcaaatttgtttaataatttgagtagcacgatttcaggaatttttaatgggatactttcaacagcaagcaatatttggaattccataaaatccactatttccaatgcaatagatggggcgaaaaatgcagtgtccaacggggtcaatgccatcaagaatctgtttaacttccagattaaatggcctcatattccactacctcacttccgtgtgagtggttctgctaaccctctggattggctaaaaggtggcttaccaagtatcggcattgactggtatgccaagggcggtatcatgaccaaaccaaccctatttggcatgaatggaaaccgtgcaatggttggcggtgaggctggcgctgaagccatcttgccattgaataagtcaaccctgggggcaattggtcaaagtattgctaacacgatgaatacatcgaacaatattaacgttaacttctctggcgtcactatcagggaagaagctgaccttaacagactagccaacgtggttggaaatcgtattgctgaagaattgcaacgtaaaactaatttgagaggaggaatggca

SEQ ID NO: 8664 - protein, 911 aa, Streptococcus agalactiae
  MISC_FEATURE (1)..(911): Xaa = Any Amino Acid
MTETFEGLYVKFGANTVEFDRSVKGINTALSSLKKDFNNINRQLKMDPDNVDLLNRKLVNLQEQARVGAIKIAELKKQQKALGESEVGSAQWNKLQLEIAKVESQMKIVDKAMESTKKHIEDVGDPKSILNLNKELDNVAKELDIVNQKLELDPDNVELAEQKMKLLGKQSELAGDKVQELKKKQAALGDEKIGTEEWRQLQNEIGQXEVEVLKIDRAMDILGESSRSATGDIKEATSYLRADVMMDVADKAGQIGQKMVDAGKMTVDAWSEIDEALDTVTTKTGLTGDALAELQEIAKDIATGMPTSFQNAGDAVGELNTQFGLTGEKLKSASELLIKYAEINETDISSSAISAKQAIEAYGLTAEDLGMVLDNVTKAAQDTGQSVDTIVQKAIDGAPQIKGLGLSFEEGAALIGKFEKSGVDSSAALSSLSKAAVIYAKDGKTLTDGLNETVSAIQNSTSETEALSIASEIFGSKAAPRMVDAIQRGAFSFDDLAEAAKSSSGTVSTTFDETLDPIDKLTQYSNQAKEGMAELGGKLLETVIPALEPLMGMLESSVNWFTSLNETDQQTIVILGLVTTAVMMLLGAIAPLVIAIGAIGAPVGIVVAAIVGAIAVITLIIQAIMNWGAITEWLQSTWDSCAAWXSELWTNIVTTATTAWSNFTAWLSGLWSSVVSTGQSLWSSFTSSLSNIFSSLITGAQSLWSSFTSTLSNLWSGLVSTGSNLFNNLSSTISGIFNGILSTASNIWNSIKSTISNAIDGAKNAVSNGVNAIKNLFNFQIKWPHIPLPHFRVSGSANPLDWLKGGLPSIGIDWYAKGGIMTKPTLFGMNGNRAMVGGEAGAEAILPLNKSTLGAIGQSIANTMNTSNNINVNFSGVTIREEADLNRLANVVGNRIAEELQRKTNLRGGMA

SEQ ID NO: 8665 - DNA, 3507 bp, Streptococcus agalactiae
atgctgattaagtcgcctgtgcctgtgctgggcgctcagctgttccgtatcaagaagcctattgagaatgacgacagcatggacatcactgcctatcatgtctctgatgacatcatgaagcggtctatcactcctgtgagtgtggttggtcaaggctgtgctatggcactgtctcagatggttcaaaatgctaagactgggctaggtgatttctcctttaccagcgatattatggacagccgaacctttaacacgactgaaacggaaacgctctactctgtccttatggacggtaaacacagtattgttggaacgtgggaaggtgagcttgtccgtgataactttgccttatctatcaaacgtagccgtggggctgatcgtggtgttgtcatcacaacacacaagaacctcaaatcctatcaacgaaccaagaactctcagggtgttgtcacaaggattcatgcacggtcaaccttcaaacctgatggagctgaagatgaagtgacgctcagagtgtctgttgacagtccactaataaactcttatccctacatcaatgagaaagagtatgagaacaacaacgctgaaaccgttgaagaccttagaaagtgggctgaggctaagtttacaaatgagggcattgataaggtttctgatgccattgagattgaagcctatgagcttgacggtcaagttgtaaatctgggcgacacggttaacctcaagagtagaaagcacagtgctgacctctacaagaaggccattgcctacgagtttaacgctttaacggaagagtatatctccataacttttgatgataagccaggagttggtggttctggggtgtcaagtggcttgtctaatgttgctgatgctatacttgtagcaagtgccacagctcaggacgttgctgttcaaagggctgtgaaaaatgctaacgctgcctttgatgcagagtttggtaaaacaaaaacaaaaattaatgatgatatcgaaatcgcaaaagccaaagtagaaagctttaaatcggaactatctaatcgcatggataatcagcttcttccccttgcgacagaagctaagaatttagccagtcaggcacaagcagacttgaccagaaaagaaatagagcttagagctgaattaaatagacaagtcacaagcacagaagctgtaaaaatctctctaacaaatcttagtcacaatatggatatcattaagcaaaaagccctaaacgaccttagagacgcagagacaaggctaaaggaagctgatagcgtccaacaacttgcgacaaagcgggttgaggataaactgacaggacttagcacgaaactggagtcattctctgttggtggctataattatgtcattgacggcggagaacctaaagaactaatggctaacttctatggtaagacctatgatattaatccccaactactcgaacgaactagtcaagcgaccttgagttttagctatgaagcagaatcaactagtcgtttagaagttagactttataaaaagatgcacaccggggacactagtaagattacaattattgtcatgcctaactttgacttatctccagggaaaggctttatctctcagagctttgatttaggtggtgttatgcctgaccctagaaaccaagcctggcttgtgatgcgggggacaaatgctaaccccttgacgctctcgaaagttaagctggaacgtggtaccgttgctacagactggaataatcgcgatgaaaccttaaaagctagcttcgccgaatacaagcagaccgttgatgaaaacttagccaaccttagaacaagtacggaaaccttggcaggtcaactgacaagtgctgagtctagcattaggcagacgtcggaatcctttagcaatcgtttagttagtcttgagacctataaagatagtgaaccaaatcgagctagtcgttactttgaagcaagcaagtctgaaaccgctaagcagctatcagccttacgaacagaggttaatggctcttatgtggataagtcaacctatgaggaaaatgcaagaggtttgataagacgctttgaaagtctgtcatcagggacacagaactatgctttggggactgaaagagatgtctatctaaacgtttcagggactaccgtctatgacctttatagcttcggtactaccttagccgtaaaagggattgaaatgggagatactgtaactattgcatttaactattttgcggatagtcggacggcttttggttcttatgaactggagctatacggacatgcaggcaaaatcgaacgggttggtgaggtacagagaacgatatcaaatcgtggtacctataccgcatcttttgtggcaaacaatgccaatttcagggcaaactcccttaaaattagatttacggatagccaacttaagtttagagtgacaacacttcgtgtgactaaggggacaattcctgcggactggagtccatctccagatgacctgaaagcctactcagatactaagcttgaacagacagctaatgagattaaagctagtgtaacaagtcttgatcataaaactcttaagcaaactgatattactatgacttctgaagggattgtcctgagagcaggcaagacgagtaatgatgtggcaagagctattggctcttactttaaggtcactcctgatgctatagctctgtttagctcactgataaaagttagcgggaacatgttggttgatggttctgtaactagtcgtaagttggtaacaggcgctgtcgaaacgggacatgttaaggctggagcaatcacaggagtgcttttagcagctgaagctgtaacggcagaaaaacttaaagtcgaccaagctttctttaacaagttgatggccaacgatgcctacttgaagcaactatttgccaagtcagccttcatcactcaggttcaatccgtgacaatatctgccagtcagatttcgggcggtgttattaaagctttgaataatgccatggaaatccagatgaacagtggtcagatactttactacactgaccaagctgcactgaaacgggttttgagtggctatcctactcagtttgttaagttcgcaactggtacagtatctggtaaaggaaatgctggtgttacggtcattggttctaaccgctacggtacagaatcaaccaatgatggtggatttgttggagtccgtgcatggaacggctcaaacattgactcacttgacttagttggtgatgaaatccgattagcaagctctgcctttgacaattcagatggttgggatgttcggacacttgattcaggcttgaaaatcacaccacacaatagggctgctgaacgcaatagccgaattgaggttggtgatgtctggattttaaaaggaaatggatcctattcttctctcagagatattttgaactcattcaatgagaacttctcaaaaggcccaaatgctgactcttacacttactacccttcagggttc

SEQ ID NO: 8666 - protein, 1169 aa, Streptococcus agalactiae
MLIKSPVPVLGAQLFRIKKPIENDDSMDITAYHVSDDIMKRSITPVSVVGQGCAMALSQMVQNAKTGLGDFSFTSDIMDSRTFNTTETETLYSVLMDGKHSIVGTWEGELVRDNFALSIKRSRGADRGVVITTHKNLKSYQRTKNSQGVVTRIHARSTFKPDGAEDEVTLRVSVDSPLINSYPYINEKEYENNNAETVEDLRKWAEAKFTNEGIDKVSDAIEIEAYELDGQVVNLGDTVNLKSRKHSADLYKKAIAYEFNALTEEYISITFDDKPGVGGSGVSSGLSNVADAILVASATAQDVAVQRAVKNANAAFDAEFGKTKTKINDDIEIAKAKVESFKSELSNRMDNQLLPLATEAKNLASQAQADLTRKEIELRAELNRQVTSTEAVKISLTNLSHNMDIIKQKALNDLRDAETRLKEADSVQQLATKRVEDKLTGLSTKLESFSVGGYNYVIDGGEPKELMANFYGKTYDINPQLLERTSQATLSFSYEAESTSRLEVRLYKKMHTGDTSKITIIVMPNFDLSPGKGFISQSFDLGGVMPDPRNQAWLVMRGTNANPLTLSKVKLERGTVATDWNNRDETLKASFAEYKQTVDENLANLRTSTETLAGQLTSAESSIRQTSESFSNRLVSLETYKDSEPNRASRYFEASKSETAKQLSALRTEVNGSYVDKSTYEENARGLIRRFESLSSGTQNYALGTERDVYLNVSGTTVYDLYSFGTTLAVKGIEMGDTVTIAFNYFADSRTAFGSYELELYGHAGKIERVGEVQRTISNRGTYTASFVANNANFRANSLKIRFTDSQLKFRVTTLRVTKGTIPADWSPSPDDLKAYSDTKLEQTANEIKASVTSLDHKTLKQTDITMTSEGIVLRAGKTSNDVARAIGSYFKVTPDAIALFSSLIKVSGNMLVDGSVTSRKLVTGAVETGHVKAGAITGVLLAAEAVTAEKLKVDQAFFNKLMANDAYLKQLFAKSAFITQVQSVTISASQISGGVIKALNNAMEIQMNSGQILYYTDQAALKRVLSGYPTQFVKFATGTVSGKGNAGVTVIGSNRYGTESTNDGGFVGVRAWNGSNIDSLDLVGDEIRLASSAFDNSDGWDVRTLDSGLKITPHNRAAERNSRIEVGDVWILKGNGSYSSLRDILNSFNENFSKGPNADSYTYYPSGF

SEQ ID NO: 8667 - DNA, 330 bp, Streptococcus agalactiae
atgacacaaattacagatattatcatcagctcagctatgggaattttgaccattttggcaggaattgcagtgcaagctgtcaaggtttatttgattaaaaaaggcggtgaaaaggccgtcttgattacagaaatcttggccaagaacgctgttaatgctgtggagcaagtggccactgaaactggcttcaaaggagctgacaagctaacttctgctaaggctcagattttagctgagttgcaaaaatacaatatccacatgtcagacgatgatctcactttgtttgttgaatcagctgtcaaacaaatgcacgatgcctggaaggagtaa

SEQ ID NO: 8668 - protein, 109 aa, Streptococcus agalactiae; identical to SEQ ID NO: 2510

SEQ ID NO: 8669 - DNA, 1404 bp, Streptococcus agalactiae
  misc_feature (1)..(1404): n = a, c, g, or t
atggaaatcaacactgaaatagccattgcctggatgtctgcacgtcaaggcaaggtcagctattccatggactaccgtgacgsccctaacagctatgactgttccagctctgtctattatgctctcaggtcagctggtgcaagctcagcaggttgggcggtcaacactgagtacatgcacgattggctgattaaaaacggttatgagcttattgctgaaaacgtggattggaatgctgtccgtggtgatatagcaatttggggcatgcgagggcactcaagcggagctggtggtcatgtagtcatgtttattgaccctgaaaatatcattcactgtaactgggcaaataatggcatcacagtgaacaactacaatcagacagcggctgctagtggctggatgtattgctacgtttaccgtttgaaaagcggagcttctacccaaggaaaaagccttgataccttggtcaaggaaacccttgctggtaactacggtaatggcgaagcacgcaaggcagtgcttggcaatcaatatgaggctgttatgtcagtcatcaatggcaaaactacgactaatcaaaagactgttgaccaacttgttcaagaggtaatcgctggcaaacatggcaacggtgaagctcgtaaaaagtcgcttggtagtcaatatgatgcagttcagaaacgagtgacggaattgctcaaaaaacagccctctgagccgtttaaggctcaagaggtaaacaagcccacggaaaccaaaacaagccaaacagagctaactggacaagccacagccaccaaagaagagggcgacctctctttcaatgggactatcttgaaaaaagcggtgctggacaagattctgggcaactgtaaaaagcatgatattcttccaagttatgcactgactatcctacactatgaaggtctttggggaacttcagcagttgggaaggcagataataactggggcggtatgacctggactggtcaaggcaaccgtccaagcggtgtcactgtcacacaaggttccgcacgtccttcaaatgagggcggtcactatatgcactatgcaagcgtggatgactttctgacagactggttttatcttctaagggctggtggctcttacaaggtgtctggtgctaaaaccttcagtgaggctatcaagggaatgtttaaagttggcggtgctgtctatgattatgctgcaagcggctttgatagctatattgtcggagcttcaagccgcctcaaggctattgaggcagaaaatggttcactggacaagtttgataaagctaccgacattggtgacggtagcaaagacaagattgacattactattnaaggtattgaagttaccatcaacggtatcacttatgaactgactaaaaagccagtt

SEQ ID NO: 8670 - protein, 468 aa, Streptococcus agalactiae
  MISC_FEATURE (1)..(468): Xaa = Any Amino Acid
MEINTEIAIAWMSARQGKVSYSMDYRDXPNSYDCSSSVYYALRSAGASSAGWAVNTEYMHDWLIKNGYELIAENVDWNAVRGDIAIWGMRGHSSGAGGHVVMFIDPENIIHCNWANNGITVNNYNQTAAASGWMYCYVYRLKSGASTQGKSLDTLVKETLAGNYGNGEARKAVLGNQYEAVMSVINGKTTTNQKTVDQLVQEVIAGKHGNGEARKKSLGSQYDAVQKRVTELLKKQPSEPFKAQEVNKPTETKTSQTELTGQATATKEEGDLSFNGTILKKAVLDKILGNCKKHDILPSYALTILHYEGLWGTSAVGKADNNWGGMTWTGQGNRPSGVTVTQGSARPSNEGGHYMHYASVDDFLTDWFYLLRAGGSYKVSGAKTFSEAIKGMFKVGGAVYDYAASGFDSYIVGASSRLKAIEAENGSLDKFDKATDIGDGSKDKIDITIXGIEVTINGITYELTKKPV

SEQ ID NO: 8671 - DNA, 591 bp, Streptococcus agalactiae; identical to SEQ ID NO: 2575

SEQ ID NO: 8672 - protein, 197 aa, Streptococcus agalactiae
VVQYLMTIKKELFMLRALKEDFFLTLTSLKNQFWVYIGTGILIQTLVAYLVKGILSFIFRRILILSNTPAVTKDNWTLLFNHPLALLLFILYIVILIGFIYTEFAIYTIAILKTEFSLSIKKWLTIFPKKIKSLLGPQLIWVSIYLLLTIPLANLGLRSSILEHLKIPDFISGELTKTVFGKIGYSTLLLLICYLNL

SEQ ID NO: 8673 - DNA, 3759 bp, Streptococcus agalactiae
atgaaaagaaaagacttatttggtgataaacaaactcaatacacgattagaaagttaagtgttggagtagcttcagttgcaacaggggtatgtatttttcttcatagtccacaggtatttgctgaagaagtaagtgcttctcctgcaaatacagcgattgcagagtcgaatattaatcaggttgacaaccaacaatctactaatttaaaagatgacataaactcaaactctgagacggttgtgacaccctcagatatgccggataccaagcaattagtatcagatgaaactgacactcaaaagggagtgacagagccggataaggcgacaagcctgcttgaagaaaataaaggtcctgtttcagataaaaataccttagatttaaaagtagcaccatctacattgcaaaatactcccgacaaaacttctcaagctataggtgctccaagccctaccttgaaagtagctaatcaagctccacggattgaaaatggttactttaggctacatcttaaagaattgcctcaaggtcatcctgtagaaagcactggactttggatatggggagatgttgatcaaccgtctagtaattggccaaatggtgctatccctatgactgatgctaagaaagatgattacggttattatgttgattttaaattatctgaaaaacaacgaaaacaaatatcttttttaattaataacaaagcagggacaaatttaagcggcgatcatcatattccattattacgacctgagatgaaccaagtttggattgatgaaaagtacggtacacatacttatcaacccctcaaagaagggtatgtccgtattaactatttgagttcctctagtaactatgaccacttatcagcatggctctttaaagatgttgcaaccccctcaacaacttggccagatggtagtaattttgtgaatcaaggactatatggaaggtatattgatgtatcactaaaaactaacgccaaagagattggttttctaatcttagatgaaagtaagacaggagatgcagtgaaagttcaacccaacgactatgtttttagagatttagctaaccataaccaaatttttgtaaaagataaggatccaaaggtttataataatccttattacattgatcaagtgcagctaaaggatgcccaacaaattgatttaacaagtattcaagcaagttttacaactctagatggggtagataaaactgaaattttaaaagaattgaaagtgactgataaaaatcaaaatgctatacaaatttctgatatcactctcgatactagtaaatctcttttaataatcaaaggcgactttaatcctaaacaaggtcatttcaacatatcttataatggtaacaatgtcatgacaaggcaatcttgggaatttaaagaccaactttatgcttatagtggaaatttaggtgcagttctcaatcaagatggttcaaaagttgaagccagcctctggtcaccgagtgctgatagtgtcactatgattatttatgacaaagataaccaaaacagggttgtagcgactaccccccttatgaaaaataataaaggtgtttggcagacgatacttgatactaaattaggtattaaaaactatactggttactattatctttacgaaataaaaagaggtaaggataaggttaagattttagatccttatgcaaagtcattagcagagtgggatagtaatactgttaatgatgatattaaaacggctaaagcagcttttgtaaatccaagtcaacttggacctcaaaatttaagttttgctaaaattgctaattttaaaggaagacaagatgctgttatatacgaagcacatgtaagagacttcacttctgatcgatctttggatggaaaattaaaaaatcaatttggtacctttgcagccttttcagagaaactagattatttacagaaattaggagttacacacattcagcttttaccggtattgagttatttttatgttaatgaaatggataagtcacgctcaacagcttacacttcctcagacaataattacaattggggctatgacccacagagctattttgctctttctgggatgtattcagagaaaccaaaagatccatcagcacgtatcgccgaattaaaacaattaatacatgatattcataaacgtggcatgggggttatacttgatgtcgtctataatcacactgcaaaaacttatctctttgaggatatagaacctaattattatcactttatgaatgaagatggttcaccaagagaaagttttggagggggacgtttaggaaccactcatgcaatgagtcgtcgtgttttggttgattccattaaatatcttacaagtgaatttaaagttgatggtttccgttttgatatgatgggagatcatgatgcggctgcgattgaattagcttataaagaagctaaagctattaatcctaatatgattatgattggtgagggctggagaacattccaaggcgatcaaggtcagccggttaaaccagctgaccaagattggatgaagtcaaccgatacagttggcgtcttttcagatgatattcgtaatagcttgaaatctggttttccaaatgaaggtactccagctttcatcacaggtggcccacaatctttacaaggtatttttaaaaatatcaaagcacaacctgggaattttgaagcagattcgccaggagatgtggtgcagtatattgctgcacatgataaccttaccttgcatgatgtgattgcaaaatcaattaataaagaccctaaggtagctgaagaagagattcatagacgtctgcgtttaggaaatgtaatgattttaacatctcaagggacagcattcattcattctggtcaagagtatggtcgtacgaagcgtttacttaaccctgattacatgacaaaagtttcagatgacaaattgcctaataaagcaacacttattgaagctgttaaagaatacccatattttattcatgattcatatgattcttcagatgccattaatcattttgattgggcagcagccacagataataacaaacacccaatttcaacgaaaacacaggcctatacagcaggtttaatcacattaaggcgttcaacagatgctttccgaaaattgagcaaagcagaaattgatcgtgaggttagcttgattacagaggtaggtcaaggtgatattaaagaaaaagatttggttattgcttaccaaacaatagattctaaaggtgatatttacgcagtatttgttaatgctgatagtaaagctagaaacgttttactaggtgaaaaatataaacaccttttaaaagggcaagtaattgttgatgctgatcaagcggggattaaaccaatctcaactcctagaggtgttcattttgaaaaagatagtttgctgattgatccattaacagcaattgtgattaaagttggcaaagttgctcctagccctaaggaggaattgcaagcagattatcccaaaacacaatctttcaaggaatctaaaacggtagaaaaagtaaatagaatagctaataagacctcaataactcctgtagtttctaagaaggccgattcatatctgacaaatgaagctaatttgccaaaaactggagataagtcatcaaaaatactaagtgtagtaggaataagcattctagcaagtctacttgctctagtaggtctctctttaaagaggaatcgtcacttaaaataa

SEQ ID NO: 8674 - protein, 1252 aa, Streptococcus agalactiae; identical to SEQ ID NO: 2598

SEQ ID NO: 8675 - DNA, 915 bp, Streptococcus agalactiae
atgaaaaattgggaaaaaccaccattagtgatggcgggattagtattagggctattagctttggggaaccttctagagggatatggcacctatgttcgctattgtttagggctagtagcacttgttttttggatttttttaatcaaaggaatattaaaaaataaaaaagaaagcaggaaggagttaagcaatcctttgattgcttctgtctttactactttttttatggcaggtatgattttatcaacctatatcttattatttagaagtttaggaatatgggtagcagttctgtcaaaaggtgtatggtggttgtcatttattgcgttaatcattcatatggctattttttcatggaaatatttgagacacttttcgatggctaatctttttccttcttggtctgtcctctatgttggtataggggtagctagcctgacagcaccaattagtggacaatttactattgggaaaatagtcttttggtatggttttattgcaactttagtattattaccatttctattcattaaagcatataaaatcgggctaccttcggcagttaagcctaatataactactatttgcgctccaatgtcgctaatcacagcgggatatgtcaatagttttgtgtcaccaaatagaggtttattactgctattaatcgtaatggcacaatttctttattttttcattctttttcaggtgcctaaattactgattggtgattttacaccaggtttctcagcctttactttcccccttgttatctcagctacctcacttaaattaagtattcagcatctatcattaccagttgatatacaggggctagtccactttgaaattgggacaacaactcttattgttatgatagtaatggtacgttatattttctttttaaggcgaacaatt

SEQ ID NO: 8676 - protein, 305 aa, Streptococcus agalactiae
MKNWEKPPLVMAGLVLGLLALGNLLEGYGTYVRYCLGLVALVFWIFLIKGILKNKKESRKELSNPLIASVFTTFFMAGMILSTYILLFRSLGIWVAVLSKGVWWLSFIALIIHMAIFSWKYLRHFSMANLFPSWSVLYVGIGVASLTAPISGQFTIGKIVFWYGFIATLVLLPFLFIKAYKIGLPSAVKPNITTICAPMSLITAGYVNSFVSPNRGLLLLLIVMAQFLYFFILFQVPKLLIGDFTPGFSAFTFPLVISATSLKLSIQHLSLPVDIQGLVHFEIGTTTLIVMIVMVRYIFFLRRTI

SEQ ID NO: 8677 - DNA, 2538 bp, Streptococcus agalactiae
atgtacaaaaaaggcaaattttgggtcgttgcaggtatcgttaccattttaggtggtagtgcaattcttggtcaagatgtcaaggcagaacaggcagaagcagtaacttcaacgatctcagagaaaactgatagcagtcagactatttcggatacttccaagttaacgttacctgttaattcctcggaggctatgaaaaatagtgcagagcctttaataaaaacagcctttgctacatctgtttcatctaatcctagagagatagcagctaccccagtcaaaacctttgatgctagctcaaaagttgttgtaaaagctagtactgctgagcactcagcaaatcaaacaaattctaatgttaatcaagtagctaatgatagtgaagttattactcaacaaaattcaacaaagcaattaccaacagtgacttactctgctcatgttcaagatattggatggcaaaagtcggttgataatgcaacagtttcaggaacagtaggacaagaaaagcaggttgaggcaataaaattgtctattaaagcacctgaaggaataacaggaaaacttagctataaaacttatgttaaaggacaaggttggcaaccttcagtagagagtggtcaagttagtggtactgttggtcagagtagacctattgaagcactaagcattaaccttactgataatttacaaaaattatatgatgtctattatcgtgttcatgttcaagatatcgggtggatggcttgggctaaaaatggagcttacgctgggactttgggaatgtcaaagcgccttgaagcttacgaagtaaaatttacccttaaaggacaatctgttttaacaccaactatacctaaggaagagagacctgtcttaaattatcaggttaaggtaggccaaaatggttggcaatctaataaacttgaaggacaaatggcgggaactttaggagaatccaaagccctagatggagtaaaattcactcttagcaccttgaagtatggggacattctctatcgtactcatgtacaagataaaggttggggagaaattttaggtagtcaaacaagtaaggattatcaaggaaaaagactagaagctattcaattggacttaagtgggaatttaaaacaaaattatgatatttattatcgcgctcacgtccaagataaaggttggatggcttggcaaaaaaataatagtgtagcaggtacagtcggagaatcgaaacgtttagaggctttggaggtaaaactagtagctaaagcttcagattttagttcccaaacaaatcattcattcttagaaatgaagcatcctggattaagttatcaaacttatcttcaaaaagatggttggaaaccaacggttttggaaggccaattaggaggtagtattggactttcaaaatctataaaagccatcaaacttaacttaggtagtacagctctaggaaatatagaatatagaacttttcttaatggttcaggttggcaaactgttgttaattcagggagagaaagtaatgtaccaaatgaatctcaacaagtagaagctattcagatgcgattgacaggtctgctatcgaaaacctatagtgtgatgtatcgagttcacatgcaagattatggttggcaggattggacttataacaatgacatcgctggtagtactaaccaaggaaaacgaattgaagcaatcgaaattaaattagttgagactgctaaaataccggtaactgtccaaacgacttataagggaactggaaactataatgtacgagtgacaaatgttattagtcctggggatttaaaaattgctatttggtcagataaaaacaatcaggatgaccttaagtggtataccgtcgcacccaaaaatcatgaagctacattgacatttaatgttacaaatcatagagacaatggtaaatactttatccatgtttatcaggaaaatgcttctaatcaaaaacaattattggtaaaaacttctctacaagtcgcacattcaaattataatactccttactttagccaacgtgatggaaggtgggcaagtcgaagatatggtatggcaactttaggagaaactggttgtgtaccaacttctctagctatgattttgtcttctttgaaaggagaaactgttttaccaacgcaaattgcagattacctttaccataagacagttgaatttaatcgtggtgttcaaggaacaacttctagaggaattttaaaagcagccaaagaatggggtgtaactgcaactgcattaggaactcaagctaaccttgtacaagcgttgaaggatggttatcatgtcctagcggcagtacaaaataatgtttttgttcttcatggaagtcatgaaatcgttctcaaaggatataataacggactgacacatgtctctgacccttacacaccgtccttgtctggttggtatccaatttcacaactttggaaagaacagagctattatagtgaggatagaattgatattggagcaccttttgtcaaggtaacagatgcc

SEQ ID NO: 8678 - protein, 846 aa, Streptococcus agalactiae
MYKKGKFWVVAGIVTILGGSAILGQDVKAEQAEAVTSTISEKTDSSQTISDTSKLTLPVNSSEAMKNSAEPLIKTAFATSVSSNPREIAATPVKTFDASSKVVVKASTAEHSANQTNSNVNQVANDSEVITQQNSTKQLPTVTYSAHVQDIGWQKSVDNATVSGTVGQEKQVEAIKLSIKAPEGITGKLSYKTYVKGQGWQPSVESGQVSGTVGQSRPIEALSINLTDNLQKLYDVYYRVHVQDIGWMAWAKNGAYAGTLGMSKRLEAYEVKFTLKGQSVLTPTIPKEERPVLNYQVKVGQNGWQSNKLEGQMAGTLGESKALDGVKFTLSTLKYGDILYRTHVQDKGWGEILGSQTSKDYQGKRLEAIQLDLSGNLKQNYDIYYRAHVQDKGWMAWQKNNSVAGTVGESKRLEALEVKLVAKASDFSSQTNHSFLEMKHPGLSYQTYLQKDGWKPTVLEGQLGGSIGLSKSIKAIKLNLGSTALGNIEYRTFLNGSGWQTVVNSGRESNVPNESQQVEAIQMRLTGLLSKTYSVMYRVHMQDYGWQDWTYNNDIAGSTNQGKRIEAIEIKLVETAKIPVTVQTTYKGTGNYNVRVTNVISPGDLKIAIWSDKNNQDDLKWYTVAPKNHEATLTFNVTNHRDNGKYFIHVYQENASNQKQLLVKTSLQVAHSNYNTPYFSQRDGRWASRRYGMATLGETGCVPTSLAMILSSLKGETVLPTQIADYLYHKTVEFNRGVQGTTSRGILKAAKEWGVTATALGTQANLVQALKDGYHVLAAVQNNVFVLHGSHEIVLKGYNNGLTHVSDPYTPSLSGWYPISQLWKEQSYYSEDRIDIGAPFVKVTDA

SEQ ID NO: 8679 - DNA, 561 bp, Streptococcus agalactiae
atgaaaaagatagcaattattggtgcaggagcagtcggagcgacactagcctattacttatcaaaagaaaaggatattcaggttactgtttttgattatggagttggacaagcaactaaggctgctgcggggattattagcccatggttttcaaaacgtcgtaataaagcctggtatcgtatggcgaggttgggggctgatttttattcaaagctagtcacggatttacaaaaagatggttttgaaacaaaattttatcagcaaactggtgttttcttattaaaaaaggacgagagtcagttagagtcattgtttgcactagcagataaacgtcgactagaatctcctctaataggtgatttacaaatactaaataaaagtgaagcaaatactcactttcctgagttagatggctatgaacagttactttatgcgagcggaggagcacgagtagaaggggcggacttaacacgaatattgktagaagcaagtggtgttaatgtcatcaaggatgaaagtcactttacgataactgataaatggctttcgtgttcaaggaat

SEQ ID NO: 8680 - protein, 187 aa, Streptococcus agalactiae
  MISC_FEATURE (1)..(187): Xaa = Any Amino Acid
MKKIAIIGAGAVGATLAYYLSKEKDIQVTVFDYGVGQATKAAAGIISPWFSKRRNKAWYRMARLGADFYSKLVTDLQKDGFETKFYQQTGVFLLKKDESQLESLFALADKRRLESPLIGDLQILNKSEANTHFPELDGYEQLLYASGGARVEGADLTRILXEASGVNVIKDESHFTITDKWLSCSRN

SEQ ID NO: 8681 - DNA, 861 bp, Streptococcus agalactiae
atgattatttcatcagtttcacaaggtttattatgggggatattaggattagggatatacttaacctttagaatcttaaaatttccagacatgacaacagagggctccttccctctagggggagcggtttgtgttaccttaatgaatcaaggggttaatcctattttggcgacgattctaggcatgctatcagggatgttagcgggatttgttactggtttactttatactaaaggaaagataccgacgattttagcagggattttagtaatgacctcatgccactctattatgctaatggttatgaaaagagcaaatctaggtttaaatgagattcaaacattgaaagattttcttccgttttcaaatgatttaaatcttctcgtattaggcttgatagctattctcttggtgatttctgccttaatttattttctctatacacgcttggggcaagcttatattgcaacaggagataaccctgatatggcaaagagcttcggcattgataccgacaaaatggaaatgcttggcttaattgtatcaaatggcttaattgctttatcaggagctttagtaagtcaacaagatggatatgctgatgtatcaaaaggtataggtgttattgktattgggttagctagtattattattggagaggtactttactctactggtttaactctctttgaacgtttaattgctatagtggtgggttctattctttatcaatttttaataacggcagtaatcgccttaggatttaatacgaattacctaaaattatttagtgcaatagtgcttggaatttgtttaatggttcctgtcctaaaaacgaagattttgaaaggagtacgctta

SEQ ID NO: 8682 - protein, 287 aa, Streptococcus agalactiae
  MISC_FEATURE (1)..(287): Xaa = Any Amino Acid
MIISSVSQGLLWGILGLGIYLTFRILKFPDMTTEGSFPLGGAVCVTLMNQGVNPILATILGMLSGMLAGFVTGLLYTKGKIPTILAGILVMTSCHSIMLMVMKRANLGLNEIQTLKDFLPFSNDLNLLVLGLIAILLVISALIYFLYTRLGQAYIATGDNPDMAKSFGIDTDKMEMLGLIVSNGLIALSGALVSQQDGYADVSKGIGVIXIGLASIIIGEVLYSTGLTLFERLIAIVVGSILYQFLITAVIALGFNTNYLKLFSAIVLGICLMVPVLKTKILKGVRL

SEQ ID NO: 8683 - DNA, 1254 bp, Streptococcus agalactiae
atggtttctcgattatactatgctgtcaagtttatgatagccgttctatttatgacagttatggcaggagttggagctatcttaatgcactatgtattaatgtttacagagtggttagcatttggtgatagtagagaaaatactctgtctttgttaaatagtgtcacaccaattaaaagagtgttatcacttactttagtctcctttttagcatcccttagttggtattacttacaaatcaaaccaaagcaaataactagtattaaacaacaggttgtttttaaggatttttctgtaaaaaaatcaccttactggctacatataggtcacgcatttttgcaattgatttatgtaggaactggtggccctattggaaaagaaggagcgccacgagagtttggagccataaatgctgggaaaatatcggatttattagcacttaaagtgctggataaacgtttattaatcattagtggtgcagctgcaggtttgtcagcagtttatcaagtccccctagctagtgtattctttgcttttgaaactttagctttaggaatctcactgaaaaatattgtgacattgctagcctctacttttggtgcagctagtattgctcaattagttatttcgacagcccctctttatcatatttcaaagatgagtctgaattcacagtcattagcttttatgttcttgatcgttttatgtgtaactccgattgcgattagctttagatatttaaatcaaaaagtgacagagagacgtattaaaaatataaaaatattgttaagtttgccagtagtgtcattgatagtatctgttttatcaatcgtctatccccagattttaggaaatggtaatgccctagttcaagaagtctttaaagggaccacagttagcttaatcgctattttagttgttctcaagatgatagcaacattatccactctttacgctggtgcttatggcggtatactgacaccatctttttccattggtgcttgtttaggttttttgttagctagtatttctattcctttacttccccacatatcgatagtaaccagtatgttggttggtgcagctatttttttagctattacaatgagagcgccactgacagctgtcggtttagtcatatcttttactggtcaatctgttataactattgttcccctaactatagcagtactttttgctactgcctatgattattttataagaaaaatgaggagtttatatgtcaatccatat

SEQ ID NO: 8684 - protein, 418 aa, Streptococcus agalactiae
MVSRLYYAVKFMIAVLFMTVMAGVGAILMHYVLMFTEWLAFGDSRENTLSLLNSVTPIKRVLSLTLVSFLASLSWYYLQIKPKQITSIKQQVVFKDFSVKKSPYWLHIGHAFLQLIYVGTGGPIGKEGAPREFGAINAGKISDLLALKVLDKRLLIISGAAAGLSAVYQVPLASVFFAFETLALGISLKNIVTLLASTFGAASIAQLVISTAPLYHISKMSLNSQSLAFMFLIVLCVTPIAISFRYLNQKVTERRIKNIKILLSLPVVSLIVSVLSIVYPQILGNGNALVQEVFKGTTVSLIAILVVLKMIATLSTLYAGAYGGILTPSFSIGACLGFLLASISIPLLPHISIVTSMLVGAAIFLAITMRAPLTAVGLVISFTGQSVITIVPLTIAVLFATAYDYFIRKMRSLYVNPY

SEQ ID NO: 8685 - DNA, 261 bp, Streptococcus agalactiae
ttgatagcatcttctttcttagtgctatctttcatttctaatactttaacggtcaacaatttattaccaaaacgaatttcaacttggtcattaagctttaggtcagttgatgactttgctaatacgccattcaccttgacacgtcctttgtctgcaacttctttagcaacgggacgacgcttaatgatacgcgacacttttagatacttgtctaatctcactgatgatcacatccttctatctaaattaactctactattt

SEQ ID NO: 8686 - protein, 87 aa, Streptococcus agalactiae
MIASSFLVLSFISNTLTVNNLLPKRISTWSLSFRSVDDFANTPFTLTRPLSATSLATGRRLMIRDTFRYLSNLTDDHILLSKLTLLF

SEQ ID NO: 8687 - DNA, 1386 bp, Streptococcus agalactiae; identical to SEQ ID NO: 2771

SEQ ID NO: 8688 - protein, 462 aa, Streptococcus agalactiae
LKEKENIQKIIIAMIQTVVVYFSASLTLTLITPNFKSNKDLLFVLLIHYIVFYLSDFYRDFWSRGYLEEFKMVLKYSFYYIFISSSLFFIFKNSFTTTRLSFFTFIAMNSILLYLLNSFLKYYRKYSYAKFSRDTKVVLITNKDSLSKMTFRNKYDHNYIAVCILDSSEKDCYDLKHNSLRIINKDALTSELTCLTVDQAFINIPIELFGKYQIQDIINDIEAMGVIVNVNVEALSFDNIGEKRIQTFEGYSVITYSMKFYKYSHLIAKRFLDITGAIIGLLICGIVAIFLVPQIRKDGGPAIFSQNRVGRNGRIFRFYKFRSMRVDAEQIKKDLLVHNQMTGLMFKLDDDPRITKIGKFIRKTSIDELPQFYNVLKGDMSLVGTRPPTVDEYEKYNSTQKRRLSFKPGITGLWQISGRNNITDFDEIVKLDVQYINEWSIWSDIKIILLTLKVVLLGTGAK

SEQ ID NO: 8689 - DNA, 696 bp, Streptococcus agalactiae
atggatatttttggagaattcttaggaacagctctcttagtcttacttggtaatggtgttgtagcaggtgttgttttgcctaaaacgaagaatcataattctggatggattgttatcacatttggatggggacttgctgtagctattgcagcgttggtatctggcaatattagccctgcccacttgaatccagctgtgtcattagcttttgcgatcaaaggtgatttagcttggggaacagctattctttatatgattgcacagattattggtgcaatgctaggttcacttcttgtttatttgcaatttagaccccattatgaggctgcagaaaatagagcagacatccttggaacttttgcaactggtccggctttgaaggataatttttccaattttttaagtgaagtattgggaacacttgttcttgtacttactatttttgccatcggaaaatacaatatgcctccaggagttggtacgatgagtgttggtatgttagtggttgggattggtctatcgctcggtggaacaacaggttatgctattaatcctgcacgtgattttggtcctcgtttattgcatgccttgttaccgatgaagaacaaaggtgattctgattggacttattcatggattccgatagtaggacctatggtaggagctattttagcagccttaatatttgctatgatg

SEQ ID NO: 8690 - protein, 232 aa, Streptococcus agalactiae
MDIFGEFLGTALLVLLGNGVVAGVVLPKTKNHNSGWIVITFGWGLAVAIAALVSGNISPAHLNPAVSLAFAIKGDLAWGTAILYMIAQIIGAMLGSLLVYLQFRPHYEAAENRADILGTFATGPALKDNFSNFLSEVLGTLVLVLTIFAIGKYNMPPGVGTMSVGMLVVGIGLSLGGTTGYAINPARDFGPRLLHALLPMKNKGDSDWTYSWIPIVGPMVGAILAALIFAMM

SEQ ID NO: 8691 - DNA, 2256 bp, Streptococcus agalactiae; identical to SEQ ID NO: 2903

SEQ ID NO: 8692 - protein, 752 aa, Streptococcus agalactiae
VTFFKKLKKIFLDYVIHIRDRRSPQKNRERVGQNLMILTIFLFFIFIINFVIIVGTDSKFGVNLSKEAKKVYQQSMTVQAKRGTIYDRNGNPIAEDATTYSLYAIISKNYTTATGQKLYVQPSQYEKVASILENKLGMKKNLVLKQLNQKKLFQVSFGSSGSGLSYTKMADIKKTMEKSDIKGIGFSTSPGRIYPNGIFASQFIGFTLPQDDGDGKKLVGNTGLEAALNKVLSGTDGKVTYEKDRSGNVLLGTATTERRAVNGKDIYTTLSEPIQTVLETQMDVFAEKTKGKFASATVVNAKTGEILATSQRPTYNPSTLKGYDKKNLGTYNTLLYDNFFEPGSTMKVMTLASAIDSKHFNSTEVYNSAQYKIADAIIRDWDVNEGLSSGSYMTFPQGFAHSSNVGMVTLEQKMGRDKWLNYLSKFKFGYPTRFGMLHESGGLFPSDNEVTIAMSSFGQGIGVTQVQMLRAFTSISNDGVMLQPQFISSIYDPNTGTSRTARKEVVGKPVSKEAASKTRDYMVTVGTDPYYGTLYAAGAPVIQVGNQSVAVKSGTAQIAQEGGGGYLQGKNDTINSVVAMVPSENPDFIMYVTIQQPEKFSITFWKDVVNPVLEQATAMKETILKPGLNDSEHQTKYKLSKIVGENPGHVAEELRRNLVQPIILGNGSKVSKVSKRPGANLAENEQLLVLTNKLTELPDMYGWSKANVEQFAKWTGIKVTYKGSTSGKVRKQSIDVGKSINKIKKIKITIGD

SEQ ID NO: 8693 - DNA, 813 bp, Streptococcus agalactiae
atgtttaaaaaaataatattatctattgcaactatagccgcaaccgccagcctagcagtatcagttcaggcgtcagagaaagtagaacttaaagtagctacagattctgacacggcaccatttacttatcaaaaagacgggaaattcaaaggttatgatgttgatgttgtcaaagctgtttttaaaggtagtaagtacaaagtaaccttcaagacagttccttttgatactatttcaacaggtattgatgcagggaaatttgatttatcagctaatgatttttcatacaataaagaaagagcagaaaaatatctcttctcagatcctwtatcccgttcaaattatgccgtagtagggaagaaggggagccattacaaatcattaagtgacctctctggaaaatcaaccgaagttttatctggcgttaactatgcacaggttctagaaaattggaataaaaatcatcctaataaaaaaccaataaaaatcaaatatgtttctgggacaactggtgttactagcagattaaaaaatattgagagtgggaaaattgactttatcctatatgatgccatttcatccgactatattgtaaaagaccaatcattaaacttaagcgtttctcctttgaaaggtaaaattggtaataataaggatggactagaatacctccttttaccaaaagataaaaaaggtaaaactctacagaaatttataaataagcgtattaaagttttgaaagaaaatggtactttggcacgtttaagtaaacaatatttcggtggagattacgtttcaaacattgataaataa

SEQ ID NO: 8694 - protein, 270 aa, Streptococcus agalactiae
  MISC_FEATURE (1)..(270): Xaa = Any Amino Acid
MFKKIILSIATIAATASLAVSVQASEKVELKVATDSDTAPFTYQKDGKFKGYDVDVVKAVFKGSKYKVTFKTVPFDTISTGIDAGKFDLSANDFSYNKERAEKYLFSDPXSRSNYAVVGKKGSHYKSLSDLSGKSTEVLSGVNYAQVLENWNKNHPNKKPIKIKYVSGTTGVTSRLKNIESGKIDFILYDAISSDYIVKDQSLNLSVSPLKGKIGNNKDGLEYLLLPKDKKGKTLQKFINKRIKVLKENGTLARLSKQYFGGDYVSNIDK

SEQ ID NO: 8695 - DNA, 2250 bp, Streptococcus agalactiae; identical to SEQ ID NO: 2947

SEQ ID NO: 8696 - protein, 750 aa, Streptococcus agalactiae
VITIKKESVIKLLKYAFGIIMGFIILAIVIGGLLFAYYVSRSPKLTDQALKSVNSSLVYDGNNKLIADLGSEKRESVSADSIPLNLVNAITSIEDKRFFKHRGVDIYRILGAAWHNLVSSNTQGGSTLDQQLIKLAYFSTNKSDQTLKRKSQEVWLALQMERKYTKEEILTFYINKVYMGNGNYGMRTTAKSYFGKDLKELSIAQLALLAGIPQAPTQYDPYKNPESAQTRRNTVLQQMYQDKNISKKEYDQAVATPVTDGLKELKQKSTYPKYMDNYLKQVISEVKQKTGKDIFTAGLKVYTNINTDAQKQLYDIYNSDTYIAYPNNELQIASTIMDATNGKVIAQLGGRHQNENISFGTNQSVLTDRDWGSTMKPISAYAPAIDSGVYNSTGQSLNDSVYYWPGTSTQLYDWDRQYMGWMSMQTAIQQSRNVPAVRALEAAGLDEAKSFLEKLGIYYPEMNYSNAISSNNSSSDAKYGASSEKMAAAYSAFANGGTYYKPQYVNKIEFSDGTNDTYAASGSRAMKETTAYMMTDMLKTVLTFGTGTKAAIPGVAQAGKTGTSNYTEDELAKIEATTGIYNSAVGTMAPDENFVGYTSKYTMAIWTGYKNRLTPLYGSQLDIATEVYRAMMSYLTGGYSADWTMPEGLYRSGSYLYINGTTTTGTYSSSVYKNIYQNSGQSSQSSSSTSSEKQKEDKNTANDANSSSPQVETPNNGNATTPNNSNQTVPGTGHGNGNGNGNNNTVPNGN

SEQ ID NO: 8697 - DNA, 690 bp, Streptococcus agalactiae
atggcaaaagatataattaaggttgatcatatatttaaaagcatcgggcaaaaaacgattttagaagatatatcatttagtatagcttctaaccaatgtgtagcattgattggacctaatggtgcagggaaaacaactctgatgtcaactttgttaggtgatattagtatttcttcaggatcattgacgatttttaatctgcctgcacaccacaataggttaaaatataaggtggccatcttaccacaagaaaatgtattgccctcaaagtttacagtgagagaactcattgatttccaaaggtgtttatttccagaagtgctgccaatgtctctgattttagactatctacagtggagtgatacgcacttgcaacaatttacagagactttatctggagggcaaaaacgacttttagcttttgttttaactttggttggtaagccccaattactatttttagatgaacctacttccggaatggatacttccacacgtcaacgattttgggagctgattgcgacactaaaaaaagaaggtgtcacaattgtctattctagtcattatatcgaagaggtagaacatacagctgataggattttagtacttcataaaggaaagttattacgcgatacaacccccctttgccatgaagcaagaaaaaaccgaaaagttattcaccgttccgct

SEQ ID NO: 8698 - protein, 230 aa, Streptococcus agalactiae
MAKDIIKVDHIFKSIGQKTILEDISFSIASNQCVALIGPNGAGKTTLMSTLLGDISISSGSLTIFNLPAHHNRLKYKVAILPQENVLPSKFTVRELIDFQRCLFPEVLPMSLILDYLQWSDTHLQQFTETLSGGQKRLLAFVLTLVGKPQLLFLDEPTSGMDTSTRQRFWELIATLKKEGVTIVYSSHYIEEVEHTADRILVLHKGKLLRDTTPLCHEARKNRKVIHRSA

SEQ ID NO: 8699 - DNA, 1083 bp, Streptococcus agalactiae; identical to SEQ ID NO: 2989

SEQ ID NO: 8700 - protein, 361 aa, Streptococcus agalactiae
LKNKKNNYDLMYFIPLVFLIYPIGGILYYHYPFWTLFFTLAFVGAYLYSVIIRGESKYHMIAWSTMLTYIFYMTIFINSGFIWYIYFLSNLLVYRFRDKLKSFRFISFACTLATVVFLCFFKASDFGDRIMFLIVPIFCIGYMWIAIENRNSEEQREKIAEQNQYINILSAENERNRIGRDLHDSLGHTFAMMTLKTELALKLLEKRNYDKVQKELSELNHISHQSMSEVRQIVSNLKYRTVVEEIDELYRLFQLSNIKLTVVNKLETSQLSPVTQSTITMILKELSNNIVKHAEADSVELSLVRQGATINIEMIDNGCGFTNLDGDELHSIQERLTIVEGTLTILSRSKPTHIQVVLKEV

SEQ ID NO: 8701 - DNA, 1020 bp, Streptococcus agalactiae
atgaaaaagcaccactactttttagctttcttctatggaagtgtcattatatttgccatttgttttgtcattattgatagtttgggtgttaatttggtgcacctctatcaaacgtctcgtttgtggctgattgaacaattgattttctctattttctttctatctttagcggtaactatccttttattgctaacttggtttttattagatgataatagtaaacgtcaaattaaccataatttacgtcgcattttaaataaccaatcaataaatgttaccgatgatggtactgaaatatcgaccaatattcaacggctctctaaaaaaatgaatttaatgacagcaagtctacaatctaaggaaaatagtcgtattttaaaaagccaagaaattgtgaaacaagaacgtaagcgtattgcacgtgatttacacgacacagttagtcaggatttgttcgctgcttccatggttttgtcagggatagcacagaatgtttctcagctagacgttgatcaggttggctcgcaattattagcagtagaagaaatgcttcagcatgcacaaaatgatttgagaattctgctacttcatttgaggccagttgaattagaaaataagaccctatctgaaggattcagaatgatattgaaagaattgaccgataagagcgacattgaagttgtttatcatgaatcaattctaaccttacccaaaaagattgaagacaatatttttagaattggtcaagaatttatcagtaatactttaaagcattcacaagccagtcgtctcgaagtttaccttaatcaaacagagaatgaattgcagttaaaaatgattgataatggtattggatttgatatggattctgtctatgatttaagttatgggttaaaaaatattgragatcgagtagaagatttagcaggaaatttacagcttctcagtcagcctggtaaaggagttgctatggatataagattacctttagtaaatcagagtgaggataaaaatggataa

SEQ ID NO: 8702 - protein, 339 aa, Streptococcus agalactiae
  MISC_FEATURE (1)..(339): Xaa = Any Amino Acid
MKKHHYFLAFFYGSVIIFAICFVIIDSLGVNLVHLYQTSRLWLIEQLIFSIFFLSLAVTILLLLTWFLLDDNSKRQINHNLRRILNNQSINVTDDGTEISTNIQRLSKKMNLMTASLQSKENSRILKSQEIVKQERKRIARDLHDTVSQDLFAASMVLSGIAQNVSQLDVDQVGSQLLAVEEMLQHAQNDLRILLLHLRPVELENKTLSEGFRMILKELTDKSDIEVVYHESILTLPKKIEDNIFRIGQEFISNTLKHSQASRLEVYLNQTENELQLKMIDNGIGFDMDSVYDLSYGLKNIXDRVEDLAGNLQLLSQPGKGVAMDIRLPLVNQSEDKNG

SEQ ID NO: 8703 - DNA, 702 bp, Streptococcus agalactiae
atgactaaatttattgttgattcatcgtactggaatttgtttccaacttctaaaattggagtaatcttaatcaaagattatcacatggacagaaaccttgaaacagaacttaaacagttactgtctgatagtcattctttagcaaaaaaatatttgcaagagaaagaattcagtcaaaacagagttatccaaacttatcgcaaagcatatcaaacctttaaaactaaaaaaggtgcacgttcaagtatcgaagcattattgaagcgagttaattcaggaaacgaaattactagtataaatcctctagttgatatctataatgccgctagccttaggtttggattacctattggtgctgaggatagtgatacatttagaggtgatttaaaactaactattaccaatggtggtgatgaattttacttgattggcgaagattttaacagaccaactctttcaggtgagcttgcctatgttgatgatgttggagcagtttgccgctgttttaattggcgtgatggaaaacgtactatgattaccgataatactcagaatgcttttttagttatcgaattaattgataatggaagagaaattatttttaaagaagcgttggactttatcgccaccaatacaaatcgttttctaaaagctaaaacacagaccatcatattagataaagaacacagtgaaataacgcta

SEQ ID NO: 8704 - protein, 234 aa, Streptococcus agalactiae
MTKFIVDSSYWNLFPTSKIGVILIKDYHMDRNLETELKQLLSDSHSLAKKYLQEKEFSQNRVIQTYRKAYQTFKTKKGARSSIEALLKRVNSGNEITSINPLVDIYNAASLRFGLPIGAEDSDTFRGDLKLTITNGGDEFYLIGEDFNRPTLSGELAYVDDVGAVCRCFNWRDGKRTMITDNTQNAFLVIELIDNGREIIFKEALDFIATNTNRFLKAKTQTIILDKEHSEITL

SEQ ID NO: 8705 - DNA, 540 bp, Streptococcus agalactiae
atgatgaagaaagaaaatattccgaatctattaactgtagtcagaattttaatgattccgttatttatagtattaacttcagtaacaacaagtacaacttggcatattgttgcagctattgtatttgctattgcaagtttgaccgattacctagatggttatctagcacgtaaatggcaagtagtaacaaattttgggaaatttgcagacccattagctgataaaatgctagttatgagtgcttttatcatgttagttggactagacttagcaccagcttgggtttcagctattatcatttgtagagagttagcagttacaggtttgcgtttacttttagttgaaacaggtggaacagtacttgctgcagctatgccagggaaaataaagacggctactcaaatgtttgcagttatttttttgttagtacattggatgacacttggtaacatcatgttatacattgctctattctttaccttgtattcaggctacgactattttaaaggtgcaggcttcttatttaaggatacttttaaa

SEQ ID NO: 8706 - protein, 180 aa, Streptococcus agalactiae
MMKKENIPNLLTVVRILMIPLFIVLTSVTTSTTWHIVAAIVFAIASLTDYLDGYLARKWQVVTNFGKFADPLADKMLVMSAFIMLVGLDLAPAWVSAIIICRELAVTGLRLLLVETGGTVLAAAMPGKIKTATQMFAVIFLLVHWMTLGNIMLYIALFFTLYSGYDYFKGAGFLFKDTFK

SEQ ID NO: 8707 - DNA, 792 bp, Streptococcus agalactiae
atggataaattgattttgggacgttacataccaggtaattctctcattcataaattagatcctcgaagtaagttactagccatgttgctttttatcattattgttttttgggcaaataatgtagtgacaaatgtgatcgtattcatttttacgttggttattgtgggtttatctcagataaaattttcctattttttcaatggtattaaaccgatggttggtattattttatttacaaccctcttccagatgctgtttgcacaaggcgggcaggttatcttctcgttttggatttttagcatcactagccttgggttacaacaagcagcacttatttttatgagatttgttttaattatcttcttttcgacattacttaccttaactactactccgttaagtttagcagatgctgttgaatctttgttaaaaccattggaagtactgagagtaccagcacacgagattggtttgatgttatcccttagcttacgtttcgttcctactttaatggatgatacaacacgtatcatgaatgctcaaagagctcgtggagttgattttggagagggaaacctaattcataaggttaagtctattatccctattttgattccattatttgcttctagttttaaaagagcagatgcgttggcaattgctatggaagcaagaggttatcaaggcggagccaatcgtagtaagtaccgtttattgaagtggactgttcgggatacttttagtatattacttatgttattattgggtttgagtttgtttctattaaaaaat

SEQ ID NO: 8708 - protein, 264 aa, Streptococcus agalactiae
MDKLILGRYIPGNSLIHKLDPRSKLLAMLLFIIIVFWANNVVTNVIVFIFTLVIVGLSQIKFSYFFNGIKPMVGIILFTTLFQMLFAQGGQVIFSFWIFSITSLGLQQAALIFMRFVLIIFFSTLLTLTTTPLSLADAVESLLKPLEVLRVPAHEIGLMLSLSLRFVPTLMDDTTRIMNAQRARGVDFGEGNLIHKVKSIIPILIPLFASSFKRADALAIAMEARGYQGGANRSKYRLLKWTVRDTFSILLMLLLGLSLFLLKN

SEQ ID NO: 8709 - DNA, 540 bp, Streptococcus agalactiae
atgtcaataacctcggttaaaaaatcaaaaccatttaaattaggagtggcaggtcttttagtgggtgcttcattagctttaccactttcagtaagcgcagcatcttataccgtgaaatcaggtgataccttatcagctattgctaaaaatcataaaactacggtacaagagttagtgtctctcaatagtatcagtaacgctgatgtcatcagtataggtgatgttttaaaattggataattctacagctagtcaagcagaagcaaaatctcaaccaacaattgaaaattcaatgaattcttcatcaaatttgagttcaagtgattcagccgcaaaagaagaaatagctcgtcgtgaatcaaatggtagttatactgcacagaatggacaatattatggaagatatcaactgtctcaatcttacctaaatggcgacttatctcctgaaaatcaagaaaaagtagcggacaattatgtggtttctcgttacggatcttggtcggcagcgctatcattttggaatagtaacggctggtattaa

SEQ ID NO: 8710 - protein, 179 aa, Streptococcus agalactiae; identical to SEQ ID NO: 4

SEQ ID NO: 8711 - DNA, 354 bp, Streptococcus agalactiae
atgtcaataacctcggttaaaaaatcaaaaccatttaaattaggagtggcaggtcttttagtgggtgcttcattagctttaccactttcagtaagcgcagcatcttataccgtgaaatcaggtgataccttatcagctattgctaaaaatcataaaactacggtacaagagttagtgtctctcaatagtatcagtaacgctgatgtcatcagtataggtgatgttttaaaattggataattctacagctagtcaagcagaagcaaaatctcaaccaacaattgaaaattcaatgaattcttcatcaaatttgagttcaagtgattcagccgcaaaagaagaaatagcttcgtcg

SEQ ID NO: 8712 - protein, 118 aa, Streptococcus agalactiae
MSITSVKKSKPFKLGVAGLLVGASLALPLSVSAASYTVKSGDTLSAIAKNHKTTVQELVSLNSISNADVISIGDVLKLDNSTASQAEAKSQPTIENSMNSSSNLSSSDSAAKEEIASS

SEQ ID NO: 8713 - DNA, 705 bp, Streptococcus agalactiae
atgaataaaagaagaaaattatcaaaattgaatgtaaaaaaacatcatttagcttatggagctatcactttagtagcccttttttcatgtattttggctgtaatggtcatctttaaaagttcacaagttactactgaatctttgtcaaaagcagataaagttcgcgtagccaaaaaatcaaaaatgactaaggcgacatctaaatcaaaagtagaagatgtaaaacaggctccaaaaccttctcaggcatctaatgaagccccaaaatcaagttctcaatctacagaagctaattctcagcaacaagttactgcgagtgaagaggcagctgtagaacaagcagttgtaacagaaaacacccctgctaccagtcaggcacaacaagcttatgctgttactgagacaacttatagacctgctcaacaccagacgagtggccaagtattgagtaatggaaatactgcaggggctattggctcagcagctgcagcacaaatggctgctgcaacaggagtccctcagtctacttgggaacatattattgcccgtgaatcaaatggtaatcctaatgttgctaatgcctcaggagcttcaggacttttccaaacgatgccaggttggggttcaacagctacagttcaggatcaagttaattcagctattaaagcttatcgtgctcaaggtttatcagcttggggttactag

SEQ ID NO: 8714 - protein, 234 aa, Streptococcus agalactiae; identical to SEQ ID NO: 3180

SEQ ID NO: 8715 - DNA, 609 bp, Streptococcus agalactiae
atgatttcaaaatttattttagctttcatggcttttttcgccattatgaatcccatttctaatttgccagcttttatggctttagtagctgatgatgatcagaagatttcacgtcggattgcagcaaaaggagtattacttgcttttgtcattattgtaatctttgtattaagtggccacttactttttaacttatttgggattaccctagccgccctaaaaatatctggtggaatattggtaggcattataggttataaaatgattaatggtatacattcaccaaccaataaaaacctagaggagcataaggatgatccaatgaatgtggcagtttcaccattagcaatgccccttttggcaggtccgggtactattgcaactgctatggggttatcaagtggtggtttatctggcaaactcattactatacttgcttttgccatattatgtgtgataatgtatgttattttaataagtgcaaacgaaattactaaatttcttggaaaaaatgcaatgactataatcaccaaaatgatgggacttattttgatgactatcgggatagagatgctaataacaggcataaaaattggttttcatttwaca

SEQ ID NO: 8716 - protein, 203 aa, Streptococcus agalactiae
  MISC_FEATURE (1)..(203): Xaa = Any Amino Acid
MISKFILAFMAFFAIMNPISNLPAFMALVADDDQKISRRIAAKGVLLAFVIIVIFVLSGHLLFNLFGITLAALKISGGILVGIIGYKMINGIHSPTNKNLEEHKDDPMNVAVSPLAMPLLAGPGTIATAMGLSSGGLSGKLITILAFAILCVIMYVILISANEITKFLGKNAMTIITKMMGLILMTIGIEMLITGIKIGFHXT

SEQ ID NO: 8717 - DNA, 1983 bp, Streptococcus agalactiae
atgaaaagatttcgttttgcaaccgtccatttagttttaataggcctgattttatttggactattagctatttgtgttaggttatttcaatcctatacggctctattattggctatttttgttgctttatcttttgttgttgccttattatattaccaaaagataacttatgaactatctgaagttgaacaaattgaattacttaatgatcaaacagaagtttctcttaagagtcttcttgaacaaatgccagttggtgttatacaatttgatcttgaaacaaatgatattgagtggtttaacccttatgcagaattgatttttactggggataatggtcattttcagtctgctactgttaaagatatcattactagtagacgtaatggaacggctgggcaatcatttgaatacggtgataacaaatattcagcttatttggatacagagacgggtgttttctatttcttcgataatttcatggggaatagaagaaactatgatagttcaatgctacgtccagttattggtattatttccattgataactacgatgatattatggatactatgttagaggctgatatgtcaaagattaacgccytcgtgactagttttawttctgattttacacagtctaaaaatattttttatcgtcgtgtcaatatggatcgatactatatttttaccgactatagcgttttaaatacattgataaaagataaatttgatattttaaatgagtttcgaaaacgcgctcaggaaaaccatttatcattaacattaagtatgggaatttcttatggtgatggtaaccataatcaaattgggcaaattgctttagaaaatcttaatacagcactcgttcgcggaggagatcaaatagtagtacgtgaaaatgatagtagtaaaaaagcactttactttggtggtggtgctgtttcaactattaaacgttcacgaacacgtaccagagctatgatgactgctatttctgaccgtttgaaagtagttgatagtgtctttattgtgggacacaggaaattggacatggatgcactaggtgcatctgtagggatgcaattttttgctagtaatattgttaatgccagttatgtagtttatgacccaaatgacatgaattctgatattgaaagagcaattgattacttgcaagaagacggcgaaacacgtctcgtaagtgttgagagagcttttgaattaattactcaaaattctttattagtcatggtagaccattctaaaacagctttaaccttatctaaggaattctttaacaagtttgcagatgttattgtggtagatcatcatagaagagatgaagattttccaaaaaatgctgttctttcatttatagaaagtggcgcaagtagtgccagcgaattagttacagaattgattcaatttcaacaagctaaagataaattaagccgcagtcaagcaagtattttaatggctggtatcatgcttgatacaagaaattttgcatctaatgtaacgagtagaacttttgatgtggcaagctatttacgcggtttaggtagtaatagtatggctattcaaaaaatatcagctacagattttgatgaatatcgtttaattaatgaattgattttaaaaggtgagcgtatttatgataacatcattgttgctaccggagaagaacataaagtttactcgcatgttatagctagtaaagcagctgacaccatgttgacaatggcaggtattgaggctacttttgttattactaaaaacagttcaaatattggtatttcagcgcgcagtagaaataatatcaatgtccagcgtattatggaaaaacttggtggtggcggacattttagttttgctgcttgtcaaatacaagacaagtctgtaaagcaagttagacgtatgttactggaaataattgacgaagatttaagagaaaatagtacagtcgaaaatagaagggattaa

SEQ ID NO: 8718 - protein, 660 aa, Streptococcus agalactiae
  MISC_FEATURE (1)..(660): Xaa = Any Amino Acid
MKRFRFATVHLVLIGLILFGLLAICVRLFQSYTALLLAIFVALSFVVALLYYQKITYELSEVEQIELLNDQTEVSLKSLLEQMPVGVIQFDLETNDIEWFNPYAELIFTGDNGHFQSATVKDIITSRRNGTAGQSFEYGDNKYSAYLDTETGVFYFFDNFMGNRRNYDSSMLRPVIGIISIDNYDDIMDTMLEADMSKINAXVTSFXSDFTQSKNIFYRRVNMDRYYIFTDYSVLNTLIKDKFDILNEFRKRAQENHLSLTLSMGISYGDGNHNQIGQIALENLNTALVRGGDQIVVRENDSSKKALYFGGGAVSTIKRSRTRTRAMMTAISDRLKVVDSVFIVGHRKLDMDALGASVGMQFFASNIVNASYVVYDPNDMNSDIERAIDYLQEDGETRLVSVERAFELITQNSLLVMVDHSKTALTLSKEFFNKFADVIVVDHHRRDEDFPKNAVLSFIESGASSASELVTELIQFQQAKDKLSRSQASILMAGIMLDTRNFASNVTSRTFDVASYLRGLGSNSMAIQKISATDFDEYRLINELILKGERIYDNIIVATGEEHKVYSHVIASKAADTMLTMAGIEATFVITKNSSNIGISARSRNNINVQRIMEKLGGGGHFSFAACQIQDKSVKQVRRMLLEIIDEDLRENSTVENRRD

SEQ ID NO: 8719 - DNA, 381 bp, Streptococcus agalactiae
atgtcaaagtatttaggaggagaagatatgtctactttaacaataattattgcaacattaactgctttggaacatttttatattatgtatttggagacgttagccacccagtcaaatatgactgggaagatttttagtatgtctaaagaagagttgtcatatttacccgttattaaactttttaagaatcaaggtgtatacaacggcttgattggcctattcctcctttatgggttatatatttcacagaatcaagaaattgtagctgtttttttaatcaatgtattgctagttgctatttatggtgctttgacagttgataaaaaaatcttattaaaacagggtggtttacctatattagctcttttaacattcttattt

SEQ ID NO: 8720 - protein, 127 aa, Streptococcus agalactiae
MSKYLGGEDMSTLTIIIATLTALEHFYIMYLETLATQSNMTGKIFSMSKEELSYLPVIKLFKNQGVYNGLIGLFLLYGLYISQNQEIVAVFLINVLLVAIYGALTVDKKILLKQGGLPILALLTFLF

SEQ ID NO: 8721 - DNA, 2541 bp, Streptococcus agalactiae; identical to SEQ ID NO: 3235

SEQ ID NO: 8722 - protein, 847 aa, Streptococcus agalactiae
LLKKLIEKVKSLTSVIKIVFFISVLVLIIVEMIHLKRTISVEQLKSVFGQLSPMNLFLIILVGVIAVLPTTGYDFVLNGLLRTDKSKRYILQTSWCINTFNNLSGFGGLIDIGLRMAFYGKKGQEKSDLREVTRFLPYLISGLSFISVIALIMSHIFHAKASVDYYYLVLIGASMYFPVIYWISGHKGSHYFGDMPSSTRIKLGVVSFFEWGCAAAAFIIIGYLMGIHLPVYKILPLFCIGCAVGIVSLIPGGLGSFELVLFTGFAAEGLPKETVVAWLLLYRLAYYIIPFFAGIYFFIHYLGSQINQRYENVPKELVSTVLQTMVSHLMRILGAFLIFSTAFFENITYIMWLQKLGLDPLQEQMLWQFPGLLLGVCFILLARTIDQKVKNAFPIAIIWITLTLFYLNLGHISWRLSFWFILLLLGLLVIKPTLYKKQFIYSWEERIKDGIIIVSLMGVLFYIAGLLFPIRAHITGGSIERLHYIIAWEPIALATLILTLVYLCLVKILQGKSCQIGDVFNVDRYKKLLQAYGGSSDSGLAFLNDKRLYWYQKNGEDCVAFQFVIVNNKCLIMGEPAGDDTYIREAIESFIDDADKLDYDLVFYSIGQKLTLLLHEYGFDFMKVGEDALVNLETFTLKGNKYKPFRNALNRVEKDGFYFEVVQSPHSQELLNSLEEISNTWLEGRPEKGFSLGYFNKDYFQQAPIALVKNAEHEVVAFANIMPNYEKSIISIDLMRHDKQKIPNGVMDFLFLSLFSYYQEKGYHYFDLGMAPLSGVGRVETSFAKERMAYLVYHFGSHFYSFNGLHKYKKKFTPLWSERYISCSRSSWLICAICALLMEDSKIKIVK

SEQ ID NO: 8723 - DNA, 831 bp, Streptococcus agalactiae; identical to SEQ ID NO: 3241

SEQ ID NO: 8724 - protein, 277 aa, Streptococcus agalactiae
VKFYIIDDDPTITMILQDIIEEDFNNTVVRVNNVSSKAYNELLIADVDIVLIDLLMPILDGVTLVQKIYKQRSDLKFIMISQVKDNDLRQEAYKAGIEFFINKPINIIEVKSVVKRVTDTIEMQKKLNTIQNLLENTPSYQKPITTSNLTKIRSILSYLGITSETAYTDILNICELLLKQELNFAQFDFQKELSIDEHQQKIILQRIRRAVKKAMINMAHLYIDDFENELTLQYANALFGFQNIHNEAQLIQGKSMYGGKISLKHFFDELILQSKTF

SEQ ID NO: 8725 - DNA, 1230 bp, Streptococcus agalactiae
gtgaaagagttttttgctttgccaaaacagctacagttaagagaattattgcgttttatttccattacggttggttcagctatttttccttttatggcaatgtattatgttcaatattttggaaatctagttacaggaatcttgatcatcataactcaactatcagggtttgtagcgaccttatatggaggccatttgtcagatgctatggggaggaaaaaagttgtgattataggttcactgctggcaaccattggttgggctataactatagctgcaaatgttccaaatcatattacgccacacttgacctttgtaggtatccttatcattgaaatagctcaccaattttatttccctgcctatgaagctatgaccattgatttgacgaacgaacagaatcgtcgctttgtttacactataggttattggttggttaacatcgctgtaatgctaggttctggaattgctgggattttctatgatcaccatttttttgaattattaatagttcttcttattatttcagcgatttgttgtttcgtggtctacttcaagtttgatgagacaaaaccacaggagggaaccttcaagcatgataaaggagttttaggaacttttaaaaattatagtcaggttttagtggataaagcgtttgttgtttatactttaggagcaattggttccagtgttgtctggctccaggttgataattatttctcggtcaatcttaagcaaaattttgaagtagtgtccattttaggacatacaatcacaggtgctaaaatgcttagtttagcagtctttacaaacactctattaattgtcttactaatgacaactataaataaattcatagagaattggcctttgaaacgtcaactaatattagggagcttgatttgtggttttggaatgctttttaatatttctctaaacacttttggagctattttgattgccatgacgtttttcacctttggcgaaatgatttatgttccagctagtcaggttctaagggcggagatgatggtggagggaaaaattggatcatattctggatttttagctatcgcacaacctgttgcaagtgtattagcaggtgccatggtttcgctcagctattttacaggaaaaataggtgttcaaataacattgaccatttttatgttagcaggtctggttttaatcttatatgctaccaaaatgaaaaatattgagataggaaaa

SEQ ID NO: 8726 - protein, 410 aa, Streptococcus agalactiae
VKEFFALPKQLQLRELLRFISITVGSAIFPFMAMYYVQYFGNLVTGILIIITQLSGFVATLYGGHLSDAMGRKKVVIIGSLLATIGWAITIAANVPNHITPHLTFVGILIIEIAHQFYFPAYEAMTIDLTNEQNRRFVYTIGYWLVNIAVMLGSGIAGIFYDHHFFELLIVLLIISAICCFVVYFKFDETKPQEGTFKHDKGVLGTFKNYSQVLVDKAFVVYTLGAIGSSVVWLQVDNYFSVNLKQNFEVVSILGHTITGAKMLSLAVFTNTLLIVLLMTTINKFIENWPLKRQLILGSLICGFGMLFNISLNTFGAILIAMTFFTFGEMIYVPASQVLRAEMMVEGKIGSYSGFLAIAQPVASVLAGAMVSLSYFTGKIGVQITLTIFMLAGLVLILYATKMKNIEIGK

SEQ ID NO: 8727 - DNA, 1134 bp, Streptococcus agalactiae
atgacgttgattttctatataatgaatattgtcttaggattcggtggtatgtacccaatacagtgggcattaccttttatgctcatttcgctatggtttttaattaaattttgtgtcgataatatcgttgatgaagcatttatattttatggcattttagcagcattctcactatttatagatccccaaacactgattttttggctttgctcttttgttctcttaacagcaaccaatattaagcaaaagcagtcactacgaggattttatcagtttttatgcgttgtttttggtatgattttaattgcttatactgttggttactttatgtttaatctacagattatctcttcttatattgacaaagctattttttacccctttacgtatttcgctaggacaaaccactcattccttcttagtttagcaattcaaattgttgtccttctagggtcaggttgtctctttggactatgggattttattcaaaatcgtaaaaaagcatcttatcaaatcggcttgaactttattgcctgtatttttattatttacgctataatggccattttttcaagagattttaacctttaccactttttacctgctttaccatttggtcttttgctaacgagtaataaaattactattctttaccaaaaagtgattgacagacgttcacatagacgtcagtatttctctggtaaatctcttatcgtagacctttttgtaaagaaaacatattatttgcccctcttactagtttccttatcgatagggttactagtttataatacttatcaaaatgttactcttagtaaagaaaggcgtgacatttcacattatttgactacaaaaattgatagagatggtaagatttatgtttgggacaaagttgctagcatttatagccagactcggttaaaatctgcttctcaatttgttttgccacatattaatacagcgcaaaaaaataatgagaaaattttgaaggacgagctgcttcagcatggggctaaatactttatcttaaataaaaatgagaagttaccaaatgaactgaaatctgatattaagaagcactaccaagaagttcctctatcaaatatcactcattttgttctatatcgtttcaaa

SEQ ID NO: 8728 - protein, 378 aa, Streptococcus agalactiae
MTLIFYIMNIVLGFGGMYPIQWALPFMLISLWFLIKFCVDNIVDEAFIFYGILAAFSLFIDPQTLIFWLCSFVLLTATNIKQKQSLRGFYQFLCVVFGMILIAYTVGYFMFNLQIISSYIDKAIFYPFTYFARTNHSFLLSLAIQIVVLLGSGCLFGLWDFIQNRKKASYQIGLNFIACIFIIYAIMAIFSRDFNLYHFLPALPFGLLLTSNKITILYQKVIDRRSHRRQYFSGKSLIVDLFVKKTYYLPLLLVSLSIGLLVYNTYQNVTLSKERRDISHYLTTKIDRDGKIYVWDKVASIYSQTRLKSASQFVLPHINTAQKNNEKILKDELLQHGAKYFILNKNEKLPNELKSDIKKHYQEVPLSNITHFVLYRFK

SEQ ID NO: 8729 - DNA, 609 bp, Streptococcus agalactiae
atgaaagtaaaactatttgcgatacatctattttttattgttatttcttttgggattaaatattatcatttgcagggaccaaatttgatttggaatatgactctagccctaatagcgttagattttgcataccttactagtttatttaagaaaaaaattcttatcggtctttttgcacttgcttggttttttttctatcctaataccttttatatgttgacggatatcattcatatgcattttgtcggagacgttctttataataagacaaatttaatactttatatcttgtatgtatctagtatcttgtttggttttttatcaggtatcgaaagtttttctgtgattatgcgtaaatttagaattagcaatatatttttaagatggggaattattggaattgtatcattagtttcaagttttggtattcatattggtcgttatgcccgtctaaattcatgggatatcttaacgaagccacaagtggtaattaacgaacttttagcggttccgagtagggattcattccactttattttaggatttacatttttacaggtattgtgtcttatttttatggattattctgcagggaaaaagcttgaaaag

SEQ ID NO: 8730 - protein, 203 aa, Streptococcus agalactiae
MKVKLFAIHLFFIVISFGIKYYHLQGPNLIWNMTLALIALDFAYLTSLFKKKILIGLFALAWFFFYPNTFYMLTDIIHMHFVGDVLYNKTNLILYILYVSSILFGFLSGIESFSVIMRKFRISNIFLRWGIIGIVSLVSSFGIHIGRYARLNSWDILTKPQVVINELLAVPSRDSFHFILGFTFLQVLCLIFMDYSAGKKLEK

SEQ ID NO: 8731 - DNA, 1002 bp, Streptococcus agalactiae; identical to SEQ ID NO: 3495

SEQ ID NO: 8732 - protein, 334 aa, Streptococcus agalactiae
LKPSFKKLLLLFSIITILSIACTPHAKASGRSWKSWFIEQYFWLKRDKSYYKVQDESSFQKYLNASREQSDKGYYLDPNSVNGGLVQERLFDMQVYSWNDNGKANQKTIFYLAGGSYLNNPTPYHISMLKTLSTSLDAKIILPIYPKTPRYTYDYAIPRLVNLYRHFHEKNANLTLMGDSAGGGLALGLAHALSHQSGQEAIPQPKNIILLSPWLDVTMKHPEIPKYEDTDPILSAWGLARVGEIWANGSNNTNHTYVSPKNAPATKLAPITLFTGTREIFFPDIRDYAAQLQAANHPVNYIAQEGMNHVYPIYPIEEAKTAQYQMIDIINKTP

SEQ ID NO: 8733 - DNA, 612 bp, Streptococcus agalactiae
atgtcaattgatatttggaacattttaagtttggttggaaccgtagcttttgcaagttcgggagctattgtggcgattgaggaagaatttgatattctagggctttttatcttaggttttgtaacggcatttggtggtggagctattagaaatgtactaattggcttgcctattgaaacactttggagtcaaggaattgctttttatgcagcagcagcagctattttatttattatgattttccctaatttgttgagtggtaagggacgggatgccgaagttgtatcagatgctattgggttagcagcgtttagtgttcaaggagcactatatgcgactcaatctcatcaacctcttagtgctgtcattgtcgcagcagtactaactggtgcaggtggtggtattgtcagagatgttctggctggccgaaaacctggagtactaagaagtgaaatatatgcaggttggtcaatattagtggggatcattttatattttaaaattgctaaaacaacaactgactattatttgttagtgttagttgtaactagcctaaggatgttgggttataagaaacaatggcacttgccagttgtcagaccacgtaagaaa

SEQ ID NO: 8734 - protein, 204 aa, Streptococcus agalactiae
MSIDIWNILSLVGTVAFASSGAIVAIEEEFDILGLFILGFVTAFGGGAIRNVLIGLPIETLWSQGIAFYAAAAAILFIMIFPNLLSGKGRDAEVVSDAIGLAAFSVQGALYATQSHQPLSAVIVAAVLTGAGGGIVRDVLAGRKPGVLRSEIYAGWSILVGIILYFKIAKTTTDYYLLVLVVTSLRMLGYKKQWHLPVVRPRKK

SEQ ID NO: 8735 - DNA, 1566 bp, Streptococcus agalactiae
atgaaaatatcacaatacaataaatggtcaattcgccgattgaaagttggagctgcatctgtaatgattgctagtggaagcattgttgctttagggcaatctcatattgtttcagcagatgagatgtcccaacctaaaacaaccattacagctccaacagctaacacttctacaaatgtagaaagtagtactgataaggcattatcaaaagttactacgatggagacaagttcagaaatgcctaaaatgcaaaatatggcaaaagttgaaaaaacgagtgacaaacctatgatggtggctacctctgttagaaaaatgatggcaacgccgacacctgtagcgatgaccaaaacgactagtgtagatgaggtaaagaaatcaactgatactgcttttaaacagacagtagacgttccggctcattatgttaatgcagcaaaagggaatggcccatttctagcaggtgtaaatcaaacgattccatatgaagcgtttggtggagatggcatgttaacgcgtttaatccttaaatcttctgaaggagcaaaatggtcagataatggtgttgataaaaatagtccattattaccattgaaaggcttaactaaaggtaaatatttctatcaagtttctttaaatggtaatacgacaggtaaagagggacaagctctcttagatcaaattaaagctaatgataaacatagctaccaagccacaattagagtttatggtgctaaagatggtaaagttgatttaaaaaacatgattagcccaaaaatggtaaccattaacattcctcacattacaactgatatggaagtaaaaaattctctaaagatggcctttaaagaaaaagtagacgtcccagcaaaatatgttagtgctgcaaaagctaaaggtccatttttagcaggtgttaacgaaacgattccatatgaagcgtttggtggggatggcatgttaacgcgtttaatccttaaagcttcagagggagcaaaatggtcagacaatggtgttgataaaaatagtccattattaccgttaaaagatttaactaagggtaaatacttctaccaagtctctcttaatggcaatacagccggtaaaaaaggccaagctctcttagatcaaattaaggcaaatggaagccatacttatcaagcaactatcactatttatggtacgaaagatggcaaagttgatatgaatactattttaggacaaaagacagtgatgattcatattaatgtcgctaaaaaagatatgaatagcacatcaatgatgatgaaaaaagataagatgacaatgcctatgaagaaagaaatgacttcatctaaaataaataccggtatgatgatgtctaacaacaagatgtcagctaatatgcaaatgtcatcacaagccaaatcaaatgataaagctggtaaaaaaatgtctatgatgtctaaaaatttacctaatacaggtgaaacaaagcaacaaaatgtaggtgtgctaggtatgcttagtctagcctttgcgacaggtctaactgcgctaggtcttaaaaaatctaaacaaagatag

SEQ ID NO: 8736 - protein, 521 aa, Streptococcus agalactiae; identical to SEQ ID NO: 3532

SEQ ID NO: 8737 - DNA, 1038 bp, Streptococcus agalactiae
atgaaattaaaatattatattgttattggttaccttatttctatgttaataactgtagcaggtgttttctttgggcttaatcatatgctgattgagactcgaggtgtttactacatcctttcagttacaattattgcctgtattgtaggtggtatagttaatttgttcttattatcaagtgtatttacatctttgaaaaagttaaaacaaaaaatgaaggatatttctcaaagatgttttgatacaaaagcacaaatttgttcaccacaagaattcaaggatttagagacagcctttaaccaaatgtcttcggagttagagtcaacgtttaaatctctaaacgagagtgaacgcgaaaaaacaatgatgattgcacaactttcacatgatatcaagactccaattacttctatacaatcaacagtagaaggtattttagatggtattatatctgaagaagaagttaactattatctcaataccatttctcgtcaaacaaaccgtcttaaccatctggttgaagaattaagttttattacattagagactatgtcagacacggctgaacctcataaagaagaaacaatttatctggataaactactgattgatattttatctgaatttcaattggtgtttgaaaaagaaaatcgccaagtaatgattgatgttgcgccagatgtttcgaaattatctagtcaatatgataaattatcacgaattttattgaatttgattagcaatgcartcaaatattctgatcctggaagtcccttgactatcaaggcctattcaaatcgtcaagatatcgttatcgatattattgaccaaggctatgggataaaagatgaagatcttgcttctatttttaatcgtctttatcgtgtagaatcttcacgaaatatgaagacaggaggacatggtctaggtctttatattgcgcgacaacttgcacatcaactgaatggggatattttggtcgaaagtcagtatcaaaaaggcagtaagttctctttagtacttaaattacaaaaatag

SEQ ID NO: 8738 - protein, 345 aa, Streptococcus agalactiae
  MISC_FEATURE (1)..(345): Xaa = Any Amino Acid
MKLKYYIVIGYLISMLITVAGVFFGLNHMLIETRGVYYILSVTIIACIVGGIVNLFLLSSVFTSLKKLKQKMKDISQRCFDTKAQICSPQEFKDLETAFNQMSSELESTFKSLNESEREKTMMIAQLSHDIKTPITSIQSTVEGILDGIISEEEVNYYLNTISRQTNRLNHLVEELSFITLETMSDTAEPHKEETIYLDKLLIDILSEFQLVFEKENRQVMIDVAPDVSKLSSQYDKLSRILLNLISNAXKYSDPGSPLTIKAYSNRQDIVIDIIDQGYGIKDEDLASIFNRLYRVESSRNMKTGGHGLGLYIARQLAHQLNGDILVESQYQKGSKFSLVLKLQK

SEQ ID NO: 8739 - DNA, 783 bp, Streptococcus agalactiae
atgtgttataatgaaatgaattgtacttttgtgtatggaggagatatgacgaattcagaaattaaaaatgaggcaaaaactatattaagcaatcttcaaggkwagaatcaactttttttactcccgattctccttagtattattacgttatatatatcattttattatcaatataataatatgacactacttgatttttttgtacctcttccagtttatttcttttacacactttttattatttcagtcagttttgtaatgttagatgtcgtcaaaaatcagaaactaaacgttagattctcggacaatacttatgtattttcaagccatattttctggaaattactctcagtacttgttctaaaaggactaattttatctttcttttatctactaagtacttttggtctactaatcatcatttcaagttttaggctacttttgagtggtaaccttatccttgcccctgttttaatagttgttagtagcctaattactactaaggcagttataaaactcgttcaacaatattactcctatagtatctcaactttagtattttacactcaattagaaagtggaaactatgagggaccgtctaaagtactggttgctagtcgagaactaatgaatggtaataaacttagactcttccttttagacttaagttttattggttggcagttccttacaatcttcagtttcggattagtctatatctatctccttccttaccaaactactgcgcgcttaatcttttatagaaacattacaaaaaatagc

SEQ ID NO: 8740 - protein, 261 aa, Streptococcus agalactiae
  MISC_FEATURE (1)..(261): Xaa = Any Amino Acid
MCYNEMNCTFVYGGDMTNSEIKNEAKTILSNLQGXNQLFLLPILLSIITLYISFYYQYNNMTLLDFFVPLPVYFFYTLFIISVSFVMLDVVKNQKLNVRFSDNTYVFSSHIFWKLLSVLVLKGLILSFFYLLSTFGLLIIISSFRLLLSGNLILAPVLIVVSSLITTKAVIKLVQQYYSYSISTLVFYTQLESGNYEGPSKVLVASRELMNGNKLRLFLLDLSFIGWQFLTIFSFGLVYIYLLPYQTTARLIFYRNITKNS

SEQ ID NO: 8741 - DNA, 93 bp, Streptococcus agalactiae
ttgagagaattaagagagctattagctctctttttgttacattatattgacaaatattatcagttcagatatttttcaaaaaaaatgctaaaa

SEQ ID NO: 8742 - protein, 31 aa, Streptococcus agalactiae
MRELRELLALFLLHYIDKYYQFRYFSKKMLK

SEQ ID NO: 8743 - DNA, 666 bp, Streptococcus agalactiae
atgttgattcgtccaaaagctctacggtatattctaggtcttctctcattagctttgttgtttgcctcagtttggatgttaacggatcactttattaatcatacaggtatgactattgaaactaagacaaagacacgtgagatttatagtgcgggtgatagtaaggctccatttggtctcatgatttataaagagattggtactcattcgagtaataatgttttagtttatcgaacagatttaaatcaaaaagaagcaaaagctcactttgttccaaatacaaaagaagtgacaagtgctgtgaaaaaatctgctagctaccaattagctgatgtgaaaaaagccacagtaacaacaaagactaaacgttatgtgtggaaagatagtctttcgaaactactttatggctttgcaggtgaaaatggagaattgatttctcagaaatcagttgctaaaataccacgaaaaacttggctagttttgactaaagagcagtccgaacacttagaatcggctgcggctaaactaaaagaacaaatgacttcgcaagcaaaagtaaacccagtgaaagctatggagataaagacattagctaagacaaatccagaagcttatgctgagatgcaagttaaagcattaaaagaagctcttaatataaaagaatag

SEQ ID NO: 8744 - protein, 221 aa, Streptococcus agalactiae
MLIRPKALRYILGLLSLALLFASVWMLTDHFINHTGMTIETKTKTREIYSAGDSKAPFGLMIYKEIGTHSSNNVLVYRTDLNQKEAKAHFVPNTKEVTSAVKKSASYQLADVKKATVTTKTKRYVWKDSLSKLLYGFAGENGELISQKSVAKIPRKTWLVLTKEQSEHLESAAAKLKEQMTSQAKVNPVKAMEIKTLAKTNPEAYAEMQVKALKEALNIKE

SEQ ID NO: 8745 - DNA, 1536 bp, Streptococcus agalactiae
atgtcaaaacaaaaagtaatggcaactttgttgttatccactttagtcttatcgctatcatcacctttagtgaccttagcagaaactattaatccagaaacaagcctgacaatggcaacagcatcaacagaaagttcttctgaagcagagaaacaggaaaaaacacaacctacagattcagaaactgcttcaccttcagccgaaggaagtatctcaacagaaaaaacagagattggtacgacagagacatcatcaagcaatgaatcatcatcaagttcatcacatcaatcttcttccaacgaagatgctaaaacatctgattctgcttcaacagcatctactcctagcactaatactacaaacagtagtcaagcagacagtaagccaggtcaatcaacaaagactgaattaaaacctgagcctaccttaccattagtagagcctaaaataactcccgctccgtctcagatagaaagtgttcagacaaatcagaatgcttctgttcctgctttatcctttgatgataacttattatcaacaccgatttcaccagtgacagcaacgccattctacgtagaacactggtctggtcaggatgcctactctcactatttattgtcacatcgttacggtatcaaagctgaacaattagatgggtacttaaaatctttagggattcaatatgattctaatcgtatcaatggtgctaagttattacaatgggaaaaagatagtggtttagatgtccgtgctattgtagctattgctgtccttgaaagttcattgggaactcaaggagtggctaagatgccaggtgctaatatgtttggttatggtgcctttgatcatgactctagccatgctagtgcttataatgatgaagaagcaattatgttgttgacaaaaaatacaattattaaaaacaacaactctagctttgaaatccaagatttgaaagcacagaaattatcttctggacaacttaatacagttactgagggtggtgtttattatacagataactctggaactggtaaacgtcgtgcccagattatggaagatttagaccgctggattgatcaacatggagggacaccagaaattcctgctgccttgaaagctttatcgacagcaagtttagcagatttaccaagtggttttagcttatcaacagcagttaacacagctagctatattgcatcaacttatccatggggtgaatgtacatggtatgtctttaaccgcgctaaagagttaggttatacatttgatccatttatgggtaatggtggagattggcaacataaggctggttttgaaacaacacattcaccaaaagtaggctatgctgtatcattttcaccaggacaagctggtgctgatggcacttacggtcacgtagctattgktgaagaagttaaaaaagatggttcagttcttatttcagaatctaatgcaatgggacgtggtattgtctcttaccgtacttttagttcagcacaagctgcacaattaacttatgttattggccataaa

SEQ ID NO: 8746 - protein, 512 aa, Streptococcus agalactiae
  MISC_FEATURE (1)..(512): Xaa = Any Amino Acid
MSKQKVMATLLLSTLVLSLSSPLVTLAETINPETSLTMATASTESSSEAEKQEKTQPTDSETASPSAEGSISTEKTEIGTTETSSSNESSSSSSHQSSSNEDAKTSDSASTASTPSTNTTNSSQADSKPGQSTKTELKPEPTLPLVEPKITPAPSQIESVQTNQNASVPALSFDDNLLSTPISPVTATPFYVEHWSGQDAYSHYLLSHRYGIKAEQLDGYLKSLGIQYDSNRINGAKLLQWEKDSGLDVRAIVAIAVLESSLGTQGVAKMPGANMFGYGAFDHDSSHASAYNDEEAIMLLTKNTIIKNNNSSFEIQDLKAQKLSSGQLNTVTEGGVYYTDNSGTGKRRAQIMEDLDRWIDQHGGTPEIPAALKALSTASLADLPSGFSLSTAVNTASYIASTYPWGECTWYVFNRAKELGYTFDPFMGNGGDWQHKAGFETTHSPKVGYAVSFSPGQAGADGTYGHVAIXEEVKKDGSVLISESNAMGRGIVSYRTFSSAQAAQLTYVIGHK

SEQ ID NO: 8747 - DNA, 1632 bp, Streptococcus agalactiae
atgtcacaaaaaacaacaaaagttagtcagcaagaacaaatggtcaaagggacggcttggttaacagcagggaatttcattagtcgcttgctgggagccatctatattatcccttggtatgcttggatgggaaagcatgctgccgaagcaaatgctttatttgggatgggatatgaaatctatgctttatttcttttgatatcaactgttggaattccagtagcagttgcaaaacaggtatctaagtataacactttaggtaaagaagagatgagcatttatctggttcggaaaatcttgcagtttatgctgattttaggtggaatttttgcattaattatgtatattggttcacctctatttgcttcacttagtaaaggagggcaagaactcgttccaatattgcgtagtctaactctagctgttttagtttttccttcaatgagtgttttacgtggtttttttcaaggttttaataatttaaaaccgtatgccattagtcaagtcgctgagcagattatacgtgtcatatggatgttattaactgctttctatattatgcgtctaggatcaggagattatattgccgctgtgacacagtcaacattcgccgcctttgtcggtatgtttgctagtatagctgtgctgctttatttcttatggcgttataatatgctatctgccttgattggtaaaactccaaagcacattaaattagatactaaagaaatcctaattgagactattaaggaagcaatcccttttattattactggtgcagcaattcaaattttcaaactgattgatcagttttcatttgggaatacgatggcgctctttacgaattattcaagtgaagaattacgggttatgtttgcttacttttcaagcaaccctggtaaagttacgatgattctaattgctgttgctaccgcaattgctggagttggtattccattgttaacagagaattttgttaagaatgataaaaaagccgccgctcgtttggttgttaataatctacaaatgttactaatgtttttactgccagctgttgcaggatccgttattttagcaaaacctttgtatacagtcttttatgggttaccgcagggacaagctttaggactttttgtcatatctcttattcaaacaattattttatctatttatactgttttagcaccaatgctacaagcattgtttgaaaatcgtaaagctattatttacttcctatatggtctggtggcaaaagttattttacaacttccctccattttccttttccatgcctatggaccacttttctcaacgacagtagctctttgtatcccagtaattcttatgtatttgaaaatacatgaaattacaggatttaaacgccaagctattcgtcgtacaagtgctttagtccttattctaacgctattgatgagctttattatttctatgataatatggttaatgaatctggttattgtacccgatagtagactggtaagtctagtttacattatcgttatcggtgcaataggtttaggggtatatggctttatggcactggccacccatctacttgataaaatgattggtagtcgtgctcaagacttacgccgaaagttgcaccttaac

SEQ ID NO: 8748 - protein, 544 aa, Streptococcus agalactiae
MSQKTTKVSQQEQMVKGTAWLTAGNFISRLLGAIYIIPWYAWMGKHAAEANALFGMGYEIYALFLLISTVGIPVAVAKQVSKYNTLGKEEMSIYLVRKILQFMLILGGIFALIMYIGSPLFASLSKGGQELVPILRSLTLAVLVFPSMSVLRGFFQGFNNLKPYAISQVAEQIIRVIWMLLTAFYIMRLGSGDYIAAVTQSTFAAFVGMFASIAVLLYFLWRYNMLSALIGKTPKHIKLDTKEILIETIKEAIPFIITGAAIQIFKLIDQFSFGNTMALFTNYSSEELRVMFAYFSSNPGKVTMILIAVATAIAGVGIPLLTENFVKNDKKAAARLVVNNLQMLLMFLLPAVAGSVILAKPLYTVFYGLPQGQALGLFVISLIQTIILSIYTVLAPMLQALFENRKAIIYFLYGLVAKVILQLPSIFLFHAYGPLFSTTVALCIPVILMYLKIHEITGFKRQAIRRTSALVLILTLLMSFIISMIIWLMNLVIVPDSRLVSLVYIIVIGAIGLGVYGFMALATHLLDKMIGSRAQDLRRKLHLN

SEQ ID NO: 8749 - DNA, 879 bp, Streptococcus agalactiae; identical to SEQ ID NO: 3741

SEQ ID NO: 8750 - protein, 293 aa, Streptococcus agalactiae
VKTKKIIKKTKKKKKSNLPFIILFLIGLSILLYPVVSRFYYTIESNNQTQDFERAAKKLSQKEINRRMALAQAYNDSLNNVHLEDPYEKKRIQKGVAEYARMLEVSEKIGTISVPKIGQKLPIFAGSSQEVLSKGAGHLEGTSLPIGGNSTHTVITAHSGIPDKELFSNLKKLKKGDKFYIQNIKETIAYQVDQIKVVTPDNFSDLLVVPGHDYATLLTCTPIMINTHRLLVRGHRIPYKGPIDEKLIKDGHLNTIYRYLFYISLVIIAWLLWLIKRQRQKNRLASVRKGIES

SEQ ID NO: 8751 - DNA, 729 bp, Streptococcus agalactiae
atgatgaaaaaaattttactagtgatacctgcttataatgaagaaggtagtattgcaaagacagtccagactattgtagattttaaggcgtctcgctcactaccttttgagctggattatattgttattaacgatgggtcaaccgatggtactccagagttattagatagattgggtttaaatcatattgaccttgttcaaaatctaggtattggtggctgtgtgcagacaggatacttatacgctaatcgtaatcattacgatgttgccgttcaatttgatggtgatggtcaacatgatattagaagcattgaagatgttgttatgccaatcttaaatgacgaagcagattttgttattggttctcgctttgttgataaaaaacatcaaaattttcaatcgacagcaatgaggcgtcttggcataaatttaatatctgctgctataaaattaacgacgggacacaaagtctatgatacaacaagtggttatagggcagccaacgcggcgctaatagcttatttatcgtgtcattatccagtacaatacccagagcctgaatcaactgctcggattttgaaaaaaggctatcgtttgaaggaagtcacagctaatatgtttgaacgtgaggcaggtacttcaagtataagttccctaaaatcgattttttatatgacggatgttttaacatcaattattattgcagggtttattaaggaggatgataaa

SEQ ID NO: 8752 - protein, 243 aa, Streptococcus agalactiae
MMKKILLVIPAYNEEGSIAKTVQTIVDFKASRSLPFELDYIVINDGSTDGTPELLDRLGLNHIDLVQNLGIGGCVQTGYLYANRNHYDVAVQFDGDGQHDIRSIEDVVMPILNDEADFVIGSRFVDKKHQNFQSTAMRRLGINLISAAIKLTTGHKVYDTTSGYRAANAALIAYLSCHYPVQYPEPESTARILKKGYRLKEVTANMFEREAGTSSISSLKSIFYMTDVLTSIIIAGFIKEDDK

SEQ ID NO: 8753 - DNA, 375 bp, Streptococcus agalactiae
atgattaaagaactaaaagaatttttatttaagggtaatgttttagaccttgctgttgctgttattttaggtgcagcttttaatgctatcatcacttcacttgttaaagacgttattacaccgcttatccttaatcctgtattaaaagctgctggcgtttcaaatatcgcacagctttcatggaatggtgttgcttacggtaatttcttaagtgcagttattaatttcttaatcgttggtactactttattcttcatcgttaaagctgctaacaaggttatggctaagaaacctgytgaagaagaaattattgaagttgttgaaccaacacaagagcaattacttgytgaaatccgcgacttactcgctaacaaa

SEQ ID NO: 8754 - protein, 125 aa, Streptococcus agalactiae
  MISC_FEATURE (1)..(125): Xaa = Any Amino Acid
MIKELKEFLFKGNVLDLAVAVILGAAFNAIITSLVKDVITPLILNPVLKAAGVSNIAQLSWNGVAYGNFLSAVINFLIVGTTLFFIVKAANKVMAKKPXEEEIIEVVEPTQEQLLXEIRDLLANK

SEQ ID NO: 8755 - DNA, 1443 bp, Streptococcus agalactiae; identical to SEQ ID NO: 3813

SEQ ID NO: 8756 - protein, 481 aa, Streptococcus agalactiae
VKKTIGIIGMGVSGLAVLLALSRKKEKELKQLAIFCFDDTVHFGRGIPFQEDVDSALINSPINDISFDYRHMSDFMDWLEENYYDTNLTYVSRTLYGQYLSERTKLLLDKLPVTVIKTRVDKLNYLSDEQQWQVYIQDKLFPVTFDELHLACGALPVIEPYHLEGKTDYIKDPYPIKYLAQENWKGKTVAIIGTGLAAIDVIKWLLLNTQSSVKAFSRTNYFPSVRIVNDLPLTWHFFTNDNLKAFLSHPSKTFTIADFNDLMSGELEHLGFKNWKNTTETFLSPGIDGLKLAFKYPKQLYLLQQLASRITVWLTDLWPLMSLSDKKEYKALYGKAIINLRNPMPDESAKVILKAAQKGTFSLINNVKTITKNDEGFSIEKEKQNHISVDRVINATGYQLNTKNWTKANPLLKSLINQEFCQIDDQGGITILTENAQVLSPKYGPMPGLYAHGALVNGVVYQNNSTIKIQQMAERAFSDNK

SEQ ID NO: 8757 - DNA, 1317 bp, Streptococcus agalactiae; identical to SEQ ID NO: 3823

SEQ ID NO: 8758 - protein, 439 aa, Streptococcus agalactiae
LIDNVEVDREYLTTSIVILEIIKIEKGGKIVNLWTLSLAYLKRQKMKTVTLFLVFLTIGTCLISLMSIQHSLEKNILTKQGKSIYLTSKEKAYWPEQAYEALKKAKMVESVEASLSIDVGSRLKSVSPYNSSKEENQVTLAGYQSTEDLRAFQTKALVLKKGSHLAADNTKQVLVPLKLAQKNHLSVGNKLRLGKENVTIAGIYDANSAKSKNTFNPNIDNTLIAQATLVRKISKQKGYQTVAVRLSDKRLVDTVIQNIKQWPLDFGKLDVQTAKEFYGDSYRNIETLHRLVGRIILIVSLVAMAILVVMLTFWINNRIKETGILLAIGKTKFEIIGHYLIEVLLVAGAAFTLSIIGGVFLGKTFAAGLLSQVNGGVSSQIVQNSSLIIDRIDNLAVSVGVMDVFRLYAQGALICLFAVVLSSYSILKLQPKQILSRMS

SEQ ID NO: 8759 - DNA, 1017 bp, Streptococcus agalactiae
atgaataaaataacgaaattatcaaccgttgccctcgctttgatgctttgcgttggatgttctgccaataaagataatcaaaaaactaaaactgagcagcctaagcaagaaaagtcaatcgctaagcaaaaacaagagagagaagcagaaaaagctatgattgctaaaggtgctattgacctaactaaatataaagcgaaaccaattgaagattacggacaaaaaattgatgtcggtgacggtaaaaaaatgaacatatatacaatgggtcaagggaaaattccgctagtagtcttccctggtcaagctgaaatttcaccacgttatgcttacaaaaacttgcttgatagattagggaaaaaatataaaatttatacggttgaaccgctcggttatgggcttagtgatatgacagataagccacgtacgattgaaaatattaccaaagagattcatacagctcttgaaaaagtcggtgtcaaaaatttctatcttatggctcactcgttaggtggcatatacggtctaaattatgctaagacatattctaacgatgtcaaaggtttcattggcatggatacaagcacaccaaatatggaaggtgatggcacaactggagaatcttcagcttcaaccttaaaatgggcagaatccattccagaagttgataagaaaaccaatgaacaatacttatcaatcggtgctaaaaaatcaggtaataaaacagagcgcgataaagataggcgtgttagtgacaatcttcataaaatggaaaaagttaagttccctaaaggtatgccagctaagtatttcttagctaatgagtcagcagaagatataaaaatgcgtaaaaaaatattccctaagcttaaaagctgggaacaacaacatattgacttatctgaagatccaaaagacgtttctgttgagacactagatgctagccacttgatttatcatacgcaatataaacatatggcgaaggctattgacgagtggattcaatcgcatgaaaaa

SEQ ID NO: 8760 - protein, 339 aa, Streptococcus agalactiae
MNKITKLSTVALALMLCVGCSANKDNQKTKTEQPKQEKSIAKQKQEREAEKAMIAKGAIDLTKYKAKPIEDYGQKIDVGDGKKMNIYTMGQGKIPLVVFPGQAEISPRYAYKNLLDRLGKKYKIYTVEPLGYGLSDMTDKPRTIENITKEIHTALEKVGVKNFYLMAHSLGGIYGLNYAKTYSNDVKGFIGMDTSTPNMEGDGTTGESSASTLKWAESIPEVDKKTNEQYLSIGAKKSGNKTERDKDRRVSDNLHKMEKVKFPKGMPAKYFLANESAEDIKMRKKIFPKLKSWEQQHIDLSEDPKDVSVETLDASHLIYHTQYKHMAKAIDEWIQSHEK

SEQ ID NO: 8761 - DNA, 819 bp, Streptococcus agalactiae
atgaagaatataacaaagctatcaactgttgctttaagcctactactttgtacggcgtgtgctgcatcaaacacgtctacatctaaaacacagtctcatcatcctaaacaaactaaactcacagataagcaaaaagaagaacccaaaaacaaagaagctgctgatcaagagatgcatccccaaggcgctgttgatttgacaaaatataaggcaaaaccggtcaaagattatggtaaaaaaatcgatgttggtgatggcaagaaaatgaacatttatgaaactggtcagggaaaaattccaattgtttttattcctggtcaagctgagatttcgccacgctatgcttataagaatttaattgagcggttaagtaaaaaatataaaatttatacagtagaaccattaggctatggtctcagtgatattcctactaaaccacgtacgctagaaaacattacaaaagaaattcacacaggcctaaataaaattggagttaaaaatttctaccttgcagctcactcacttggcggtatgtattctttaaattatgctaaaaattatccagaagaagtcagaggatttattggtatggataccagtacaccttggatggaaggggaacaaaaaacaaagtatgaccctgaaagtgctaaatgggcaatgaaatwmccagatgttgatgataagactaacgaacagtatctgtcaattgcgaaaaaaattaacggcaataagtctcaacgagatgaagatgagcgcttaggtgataatcttggtaaattgaagaatgtaaaattccctaaaagggatgccaactaa

SEQ ID NO: 8762 - protein, 272 aa, Streptococcus agalactiae
  MISC_FEATURE (1)..(272): Xaa = Any Amino Acid
MKNITKLSTVALSLLLCTACAASNTSTSKTQSHHPKQTKLTDKQKEEPKNKEAADQEMHPQGAVDLTKYKAKPVKDYGKKIDVGDGKKMNIYETGQGKIPIVFIPGQAEISPRYAYKNLIERLSKKYKIYTVEPLGYGLSDIPTKPRTLENITKEIHTGLNKIGVKNFYLAAHSLGGMYSLNYAKNYPEEVRGFIGMDTSTPWMEGEQKTKYDPESAKWAMKXPDVDDKTNEQYLSIAKKINGNKSQRDEDERLGDNLGKLKNVKFPKRDAN

SEQ ID NO: 8763 - DNA, 1086 bp, Streptococcus agalactiae
atgcaaagaaaatcctatttaaaatccatgagtgttcttactttaacagcttgtcttatatcaggatatgtggttaaagatattgctatgttacatgcagtatctgccagtgagaagaaagcaaataatgtcagtccgagagaaaatctctacagggctgtcaatgataattggctagccaatacaaaactcaaacaagggcagactagtgttaatagtttttcagaaattgaggataaattaaagcaactgttagtgtctgatatggctaaaatggcctcaggaaagattgaaacaaccaatgatgaacagaaaaaaatggttgcatactataaacaaggtatggactttaaaacaagagataaaaatggtctcaaacctctaaaaccagttttacaaaaacttgaagcagtctcttcaatgaaagactttcaaagtttggcccatgattttgtgatgagtggttttgttttaccatttggtttgactgtggaaaccaatgctcgagataatagccaaaagcaattggtgcttcgtcaagcacccgcattacttgaatcacctgaccaatataagaagggcaataaagaaggtgaggctaaattatcagcttaccgtacttcagcaatggctttgcttaaacaagctggaaaaagtaacattgaagatagaaaactagttaaacaagctatagcatttgatagactcttatcagaaaaaacgcaagttgatcaaagtaaaatcacagctgaaagtgagacagctgcggggcgatataaccctgaaagtatggaaacggttcacaattacgccaaggaatttgactttaaagaattgattgaaaaactagttgggccaacgaataaggcagtcaatgtagaagataaaacttattttaaacaggttaatgatgttataaatagtaaacaattagccaatatgaaagcatggatgatgatttctatgctagttgatcaatcagattttctaggagaacaaaatcgtcaagcagcgagtgcttttaagaatgttgcgtctggtttgactcagattgaatcgaaagaaaaaatgcttacacccaattag

SEQ ID NO: 8764 - protein, 361 aa, Streptococcus agalactiae
MQRKSYLKSMSVLTLTACLISGYVVKDIAMLHAVSASEKKANNVSPRENLYRAVNDNWLANTKLKQGQTSVNSFSEIEDKLKQLLVSDMAKMASGKIETTNDEQKKMVAYYKQGMDFKTRDKNGLKPLKPVLQKLEAVSSMKDFQSLAHDFVMSGFVLPFGLTVETNARDNSQKQLVLRQAPALLESPDQYKKGNKEGEAKLSAYRTSAMALLKQAGKSNIEDRKLVKQAIAFDRLLSEKTQVDQSKITAESETAAGRYNPESMETVHNYAKEFDFKELIEKLVGPTNKAVNVEDKTYFKQVNDVINSKQLANMKAWMMISMLVDQSDFLGEQNRQAASAFKNVASGLTQIESKEKMLTPN

SEQ ID NO: 8765 - DNA, 750 bp, Streptococcus pyogenes
ttgttttatttatgtaaaggagacaaaatgattacaactaacaatctttgtgtgacctacgatggcaacagtaatgctttagaagcgattaatgtgacaattgaaggtccttctatcgttggtattattggtcctaatggagctggaaaatcaacctttatgaaagctatcttaaatcttattgattatcaaggtcacgtaacggttgatggcaaagatggtcgtaagcttgggcatacagtagcttacgtagaacaacgaagcatgattgactataattttcctattactgttaaagaatgtgttgcgctagggacttatagtaaattaggcctttttcgccgagtaggaaaaaaacaatttgagcaggttgataaggttctcaaacaagttggtttagaagactttggccatcgaccgataaaatccttatctggtggtcagtttcagcggatgttggttgcgcgttgcttgattcaagaatcagactatattttcttagatgaaccgtttgttggcattgactcggtcagcgaaaaaatcattgtagatcttttgaaagagctcaaaatggctggcaaaacgattttaattgtacatcatgatttgagcaaagtagagcattattttgacaaactcatgattttaaataaacatttggtggcttatggcaacgtttgtgaggtatttactgttgataccttgtcaaaagcttatggcaatcatttgattttaggaaaggagatggtg

SEQ ID NO: 8766 - protein, 250 aa, Streptococcus pyogenes
LFYLCKGDKMITTNNLCVTYDGNSNALEAINVTIEGPSIVGIIGPNGAGKSTFMKAILNLIDYQGHVTVDGKDGRKLGHTVAYVEQRSMIDYNFPITVKECVALGTYSKLGLFRRVGKKQFEQVDKVLKQVGLEDFGHRPIKSLSGGQFQRMLVARCLIQESDYIFLDEPFVGIDSVSEKIIVDLLKELKMAGKTILIVHHDLSKVEHYFDKLMILNKHLVAYGNVCEVFTVDTLSKAYGNHLILGKEMV

SEQ ID NO: 8767 - DNA, 2655 bp, Streptococcus agalactiae; identical to SEQ ID NO: 3839

SEQ ID NO: 8768 - protein, 885 aa, Streptococcus agalactiae
VTKPQGAVAEKATPAVPKPQKVRVIVEFNKESILDYATEQKKTVAQLNQADVEKKLQSIKQEQDKVLKNIEKSVHFDSSKVKRYDAIINGVALDIQAQEIEKLKTIADVRRVYVSQEYVQTKPLLSSSGQLIGLPEVWNNSQYKGEGTVVAVIDSGVDFKHQALKIKEPNRAKYNKTSIEKLIHEKNLKGKFYSEKVPYGYNYYDYNDNLKDSYGVMHGMHVTGIVGANDDNQKLYGVAPNAQILAMKVFSDDQQNPTTFTDVWLKALDDAILLKADVVNMSLGTPAGFVHEGKDYPELEVIARACKAGIVIAVAAGNEGNITDGNTYGVKPLAENYDTALIANPALDDNTLAVASMENLKKHAHVLKFKDKKSGTEVTEVINLHVAPNASKTIIGLAVDLGAGAPSELSKHFDLSGKIAMLEIPEDNKSNGFLEKVQAITKLNPAAILLYNNAKVKDDLGSQLLVESEAAKFNIARITRSTYNNIKNNSNKIITILTERQAIDNSLAGQLSSYSSWGPTPDLRLKPEITAPGGHIFSTVEDNQYADKSGTSMAAPQVAGAAAVLKQYITDKKIPVDNAADFIKLLLMNTAQPIINKQSKDGKTPYFVRQQGSGAMNLAKALVTTVVATVTGTNDNNADGKLELRELKEKKFKARILLRNFGKTNKTYIISSEAIADPVDEKGFRTQNSEHLVSKKADAVTRKVTVEAGKTLAVDLDVDYSDAEALTRNNFLEGYLNLKDTEGVADLHLPFLGFYGSWTEQKAIDAFEGISEIGNGDKKRRVQFYVNKETNKTSSTFTTNGMLSLPIYNNTVFFSPNSPFYDKAGVRIAALRNMEYVQYSIIDPDTNKEVRVLGRSHDVRKLYRLDYRNSFAMMPDSIWDGKIKD

SEQ ID NO: 8769 - DNA, 2193 bp, Streptococcus agalactiae
atgagcgtatatgttagtggaataggaattatttcttctttgggaaagaattatagcgagcataaacagcatctcttcgacttaaaagaaggaatttctaaacatttatataaaaatcacgactctattttagaatcttatacaggaagcataactagtgacccagaggttcctgagcaatacaaagatgagacacgtaattttaaatttgcttttaccgcttttgaagaggctcttgcttcttcaggtgttaatttaaaagcttatcataatattgctgtgtgtttagggacctcacttgggggaaagagtgctggtcaaaatgccttgtatcaatttgaagaaggagagcgtcaagtagatgctagtttattagaaaaagcatctgtttaccatattgctgatgaattgatggcttatcatgatattgtgggagcttcgtatgttatttcaaccgcctgttctgcaagtaataatgccgtaatattaggaacacaattacttcaagatggcgattgtgatttagctatttgtggtggctgtgatgagttaagtgatatttctttagcaggcttcacatcactaggagctattaatacagaaatggcatgtcagccctattcttctggaaaaggaatcaatttgggtgagggcgctggttttgttgttcttgtcaaagatcagtccttagctaaatatggaaaaattatcggtggtcttattacttcagatggttatcatataacagcacctaagccaacaggtgaaggggcggcacagattgcaaagcagctagtgactcaagcaggtattgactacagtgagattgactatattaacggtcacggtacaggtactcaagctaatgataaaatggaaaaaaatatgtatggtaagtttttcccgacaacgacattgatcagcagtaccaaggggcaaacgggtcatactctaggggctgcaggtattatcgaattgattaattgtttagcggcaatagaggaacagactgtaccagcaactaaaaatgagattgggatagaaggttttccagaaaattttgtctatcatcaaaagagagaatacccaataagaaatgctttaaatttttcgtttgcttttggtggaaataatagtggtgtcttattgtcatctttagattcacctctagaaacattacctgctagagaaaatcttaaaatggctatcttatcatctgttgcttccatttctaagaatgaatcactttctataacctatgaaaaagttgctagtaatttcaacgactttgaagcattacgctttaaaggggctagaccacccaaaactgtcaacccagcacaatttaggaaaatggatgatttttccaaaatggttgccgtaacaacagctcaagcactaatagaaagcaatattaatctaaaaaaacaagatacttcaaaagtaggaattgtatttacaacactttctggaccagttgaggttgttgaaggtattgaaaagcaaatcacaacagaaggatatgcacatgtttctgcttcacgattcccgtttacagtaatgaatgcagcagctggtatgctttctatcatttttaaaataacaggtcctttatctgtcatttcgacaaatagtggagcgcttgatggtatacaatatgccaaggaaatgatgcgtaacgataatctagactatgtgattcttgtttctgctaatcagtggacagacatgagttttatgtggtggcaacaattaaactatgatagtcaaatgtttgtcggttctgattattgttcagcacaagtcctctctcgtcaagcattggataattctcctataatattaggtagtaaacaattaaaatatagccataaaacattcacagatgtgatgactatttttgatgctgcgcttcaaaatttattatcagacttaggactaaccataaaagatatcaaaggtttcgtttggaatgagcggaagaaggcagttagttcagattatgatttcttagcgaacttgtctgagtattataatatgccaaaccttgcttctggtcagtttggattttcatctaatggtgctggtgaagaactggactatactgttaatgaaagtatagaaaagggctattatttagtcctatcttattcgatcttcggtggtatctcttttgctattattgaaaaaagg

SEQ ID NO: 8770 - protein, 731 aa, Streptococcus agalactiae
MSVYVSGIGIISSLGKNYSEHKQHLFDLKEGISKHLYKNHDSILESYTGSITSDPEVPEQYKDETRNFKFAFTAFEEALASSGVNLKAYHNIAVCLGTSLGGKSAGQNALYQFEEGERQVDASLLEKASVYHIADELMAYHDIVGASYVISTACSASNNAVILGTQLLQDGDCDLAICGGCDELSDISLAGFTSLGAINTEMACQPYSSGKGINLGEGAGFVVLVKDQSLAKYGKIIGGLITSDGYHITAPKPTGEGAAQIAKQLVTQAGIDYSEIDYINGHGTGTQANDKMEKNMYGKFFPTTTLISSTKGQTGHTLGAAGIIELINCLAAIEEQTVPATKNEIGIEGFPENFVYHQKREYPIRNALNFSFAFGGNNSGVLLSSLDSPLETLPARENLKMAILSSVASISKNESLSITYEKVASNFNDFEALRFKGARPPKTVNPAQFRKMDDFSKMVAVTTAQALIESNINLKKQDTSKVGIVFTTLSGPVEVVEGIEKQITTEGYAHVSASRFPFTVMNAAAGMLSIIFKITGPLSVISTNSGALDGIQYAKEMMRNDNLDYVILVSANQWTDMSFMWWQQLNYDSQMFVGSDYCSAQVLSRQALDNSPIILGSKQLKYSHKTFTDVMTIFDAALQNLLSDLGLTIKDIKGFVWNERKKAVSSDYDFLANLSEYYNMPNLASGQFGFSSNGAGEELDYTVNESIEKGYYLVLSYSIFGGISFAIIEKR

SEQ ID NO: 8771 - DNA, 927 bp, Streptococcus agalactiae
atggaaattaaactcaaaaatattggaaaaaaatatggttcttttgaagcattgagagacattaatctcatctttgaagagggaaaattttatggccttcttggacctaatggagctggtaaaacaactttatttaaccttttaattcaaaattttaagcaaacgtcaggcgatattaagtgggaggtggatggaaaacctctatctattaaagatttttatcgtcacattggtattgtcttccaaagtaatcgcttagatgataatttaacggttgaggaaaatctaatttctagaggtgctttgtacggtttatctaaatcacaagtacgtaatcgccttaaagatcttcaaacgtatctagatatcacagcaataaaaaaacaaaaatatggcagtttatcaggaggtcaaaaacgaaaagttgatattgcacgcgccttgctgccacaaccttctctattattattagatgaaccaacgactggtttagaccctcaatctcgtcgcgatttatgggatgctatcgcacaactaaatcaacaatcgcagatgacagttgtactaattactcattatcttgaagaaatgtctgcttgtgatgttttaaatgttcttattgaaggaaacatttattattcgggagatattaaaagctttattgagcaacattccacaacaaacttgaatgtggtattgaaaccagaaaagtcattagaccaactttcgatagctgattttgttaataaatgtcaagtcctttcagaaagggagatagtatttaaggatatttctgttgaggaaatgatgcaggttatctcagacaatcaagataaatctattattgagacatttaatgttgaatattcgaacttagaggcggcgtatctcaacttgcttagagaaaaagaaaggaaaaacaatgtt

SEQ ID NO: 8772 - protein, 309 aa, Streptococcus agalactiae
MEIKLKNIGKKYGSFEALRDINLIFEEGKFYGLLGPNGAGKTTLFNLLIQNFKQTSGDIKWEVDGKPLSIKDFYRHIGIVFQSNRLDDNLTVEENLISRGALYGLSKSQVRNRLKDLQTYLDITAIKKQKYGSLSGGQKRKVDIARALLPQPSLLLLDEPTTGLDPQSRRDLWDAIAQLNQQSQMTVVLITHYLEEMSACDVLNVLIEGNIYYSGDIKSFIEQHSTTNLNVVLKPEKSLDQLSIADFVNKCQVLSEREIVFKDISVEEMMQVISDNQDKSIIETFNVEYSNLEAAYLNLLREKERKNNV

SEQ ID NO: 8773 - DNA, 1026 bp, Streptococcus agalactiae
atggtacgtaaatttttaaaatcgctcctatctctctttcttatagcagtaatcgccaccggtatttcagtggcatgtttcttttttattccagaaaataaagggaatattacaccgattttattgcatcgctttatgcgaaaaaataatgttaatggaatgatgattgttagcgataatactggtaaaccgattaccatctcgcatgggattaaccgtggggaagttgaaacggatattgaaaataataaattatttccaatggcttctctccaaaaactcatgacaggaattattatccaaagattaattgatcaagatgtcttgagtgaagacgaccgattgtctcagttctttccccaagtaaaaggtagtaatagtattaccatccaccaattgttgacccatacgagtgggttaagagaaaaaggtgttaaggtgtctccttatctaaaaaatgagagagaacaattacaattttgcttaaaacactataactttgttaataagaaatcgtggtattattctaatatcaactttagtttcctaacaggtatagccactcaagttacgggaaggacctacgctgaacttgttgatgatgtgataaaaaatcctttgcgattagatgatacccaaagttaccaatcagttgttaatcatgacttagttagcccaatgcgaaagaacggcaagttaaataaaattaatatctttaatcaagtatccacagcatatggagctggagattttttcacaactccgctgaacttttgggtgttgatgcggtctttttctaaagggtactttttcccaacggatgaatataccaaacatcaaaatgatgcgatatcacattattatggtgggctttacatgcatggtcgtatagttaattctaatgggacctttttccagtattcaagttttggttatgcagatctaaagacgcatgatacaatggtgctttttatgaataacaaagtctatagtgatgctagtcacgtggccaccaaaagcatttga

SEQ ID NO: 8774 - protein, 341 aa, Streptococcus agalactiae
MVRKFLKSLLSLFLIAVIATGISVACFFFIPENKGNITPILLHRFMRKNNVNGMMIVSDNTGKPITISHGINRGEVETDIENNKLFPMASLQKLMTGIIIQRLIDQDVLSEDDRLSQFFPQVKGSNSITIHQLLTHTSGLREKGVKVSPYLKNEREQLQFCLKHYNFVNKKSWYYSNINFSFLTGIATQVTGRTYAELVDDVIKNPLRLDDTQSYQSVVNHDLVSPMRKNGKLNKINIFNQVSTAYGAGDFFTTPLNFWVLMRSFSKGYFFPTDEYTKHQNDAISHYYGGLYMHGRIVNSNGTFFQYSSFGYADLKTHDTMVLFMNNKVYSDASHVATKSI

SEQ ID NO: 8775 - DNA, 1149 bp, Streptococcus agalactiae
atggtacgtaaatttttaaaatcgctcctatctctctttcttatagcagtaatcgccaccggtatttcagtggcatgtttcttttttattccagaaaataaagggaatattacaccgattttattgcatcgctttatgcgaaaaaataatgttaatggaatgatgattgttagcgataatactggtaaaccgattaccatctcgcatgggattaaccgtggggaagttgaaacggatattgaaaataataaattatttccaatggcttctctccaaaaactcatgacaggaattattatccaaagattaattgatcaagatgtcttgagtgaagacgaccgattgtctcagttctttccccaagtaaaaggtagtaatagtattaccatccaccaattgttgacccatacgagtgggttaagagaaaaaggtgttaaggtgtctccttatctaaaaaatgagagagaacaattacaattttgcttaaaacactataactttgttaataagaaatcgtggtattattctaatatcaactttagtttcctaacaggtatagccactcaagttacgggaaggacctacgctgaacttgttgatgatgtgataaaaaatcctttgcgattagatgatacccaaagttaccaatcagttgttaatcatgacttagttagcccaatgcgaaagaacggcaagttaaataaaattaatatctttaatcaagtatccacagcatatggagctggagattttttcacaactccgctgaacttttgggtgttgatgcggtctttttctaaagggtactttttcccaacggatgaatataccaaacatcaaaatgatgcgatatcacattattatggtgggctttacatgcatggtcgtatagttaattctaatgggacctttttccagtattcaagttttggttatgcagatctaaagacgcatgatacaatggtgctttttatgaataacaaagtctatagtgatgctagtcacgtggcaccaaaagcatttgaatattatcaaaaatttatgttccttaataagattttccacttagtcttttactttgtattttctttctttttaatgcttttaatacgtcattcgtttaggaaaagaaggtataagaaacgtctc

SEQ ID NO: 8776 - protein, 383 aa, Streptococcus agalactiae
MVRKFLKSLLSLFLIAVIATGISVACFFFIPENKGNITPILLHRFMRKNNVNGMMIVSDNTGKPITISHGINRGEVETDIENNKLFPMASLQKLMTGIIIQRLIDQDVLSEDDRLSQFFPQVKGSNSITIHQLLTHTSGLREKGVKVSPYLKNEREQLQFCLKHYNFVNKKSWYYSNINFSFLTGIATQVTGRTYAELVDDVIKNPLRLDDTQSYQSVVNHDLVSPMRKNGKLNKINIFNQVSTAYGAGDFFTTPLNFWVLMRSFSKGYFFPTDEYTKHQNDAISHYYGGLYMHGRIVNSNGTFFQYSSFGYADLKTHDTMVLFMNNKVYSDASHVAPKAFEYYQKFMFLNKIFHLVFYFVFSFFLMLLIRHSFRKRRYKKRL

SEQ ID NO: 8777 - DNA, 2670 bp, Streptococcus agalactiae
atgaaaaagagacaaaaaatatggagagggttatcagttactttactaatcctgtcccaaattccatttggtatattggtacaaggtgaaacccaagataccaatcaagcacttggaaaagtaattgttaaaaaaacgggagacaatgctacaccattaggcaaagcgacttttgtgttaaaaaatgacaatgataagtcagaaacaagtcacgaaacggtagagggttctggagaagcaacctttgaaaacataaaacctggagactacacattaagagaagaaacagcaccaattggttataaaaaaactgataaaacctggaaagttaaagttgcagataacggagcaacaataatcgagggtatggatgcagataaagcagagaaacgaaaagaagttttgaatgcccaatatccaaaatcagctatttatgaggatacaaaagaaaattacccattagttaatgtagagggttccaaagttggtgaacaatacaaagcattgaatccaataaatggaaaagatggtcgaagagagattgctgaaggttggttatcaaaaaaaattacaggggtcaatgatctcgataagaataaatataaaattgaattaactgttgagggtaaaaccactgttgaaacgaaagaacttaatcaaccactagatgtcgttgtgctattagataattcaaatagtatgaataatgaaagagccaataattctcaaagagcattaaaagctggggaagcagttgaaaagctgattgataaaattacatcaaataaagacaatagagtagctcttgtgacatatgcctcaaccatttttgatggtactgaagcgaccgtatcaaagggagttgccgatcaaaatggtaaagcgctgaatgatagtgtatcatgggattatcataaaactacttttacagcaactacacataattacagttatttaaatttaacaaatgatgctaacgaagttaatattctaaagtcaagaattccaaaggaagcggagcatataaatggggatcgcacgctctatcaatttggtgcgacatttactcaaaaagctctaatgaaagcaaatgaaattttagagacacaaagttctaatgctagaaaaaaacttatttttcacgtaactgatggtgtccctacgatgtcttatgccataaattttaatccttatatatcaacatcttaccaaaaccagtttaattcttttttaaataaaataccagatagaagtggtattctccaagaggattttataatcaatggtgatgattatcaaatagtaaaaggagatggagagagttttaaactgttttcggatagaaaagttcctgttactggaggaacgacacaagcagcttatcgagtaccgcaaaatcaactctctgtaatgagtaatgagggatatgcaattaatagtggatatatttatctctattggagagattacaactgggtctatccatttgatcctaagacaaagaaagtttctgcaacgaaacaaatcaaaactcatggtgagccaacaacattatactttaatggaaatataagacctaaaggttatgacatttttactgttgggattggtgtaaacggagatcctggtgcaactcctcttgaagctgagaaatttatgcaatcaatatcaagtaaaacagaaaattatactaatgttgatgatacaaataaaatttatgatgagctaaataaatactttaaaacaattgttgaggaaaaacattctattgttgatggaaatgtgactgatcctatgggagagatgattgaattccaattaaaaaatggtcaaagttttacacatgatgattacgttttggttggaaatgatggcagtcaattaaaaaatggtgtggctcttggtggaccaaacagtgatgggggaattttaaaagatgttacagtgacttatgataagacatctcaaaccatcaaaatcaatcatttgaacttaggaagtggacaaaaagtagttcttacctatgatgtacgtttaaaagataactatataagtaacaaattttacaatacaaataatcgtacaacgctaagtccgaagagtgaaaaagaaccaaatactattcgtgatttcccaattcccaaaattcgtgatgttcgtgagtttccggtactaaccatcagtaatcagaagaaaatgggtgaggttgaatttattaaagttaataaagacaaacattcagaatcgcttttgggagctaagtttcaacttcagatagaaaaagatttttctgggtataagcaatttgttccagagggaagtgatgttacaacaaagaatgatggtaaaatttattttaaagcacttcaagatggtaactataaattatatgaaatttcaagtccagatggctatatagaggttaaaacgaaacctgttgtgacatttacaattcaaaatggagaagttacgaacctgaaagcagatccaaatgctaataaaaatcaaatcgggtatcttgaaggaaatggtaaacatcttattaccaacactcccaaacgcccaccaggtgtttttcctaaaacagggggaattggtacaattgtctatatattagttggttctacttttatgatacttaccatttgttctttccgtcgtaaacaattg

SEQ ID NO: 8778 - protein, 890 aa, Streptococcus agalactiae
MKKRQKIWRGLSVTLLILSQIPFGILVQGETQDTNQALGKVIVKKTGDNATPLGKATFVLKNDNDKSETSHETVEGSGEATFENIKPGDYTLREETAPIGYKKTDKTWKVKVADNGATIIEGMDADKAEKRKEVLNAQYPKSAIYEDTKENYPLVNVEGSKVGEQYKALNPINGKDGRREIAEGWLSKKITGVNDLDKNKYKIELTVEGKTTVETKELNQPLDVVVLLDNSNSMNNERANNSQRALKAGEAVEKLIDKITSNKDNRVALVTYASTIFDGTEATVSKGVADQNGKALNDSVSWDYHKTTFTATTHNYSYLNLTNDANEVNILKSRIPKEAEHINGDRTLYQFGATFTQKALMKANEILETQSSNARKKLIFHVTDGVPTMSYAINFNPYISTSYQNQFNSFLNKIPDRSGILQEDFIINGDDYQIVKGDGESFKLFSDRKVPVTGGTTQAAYRVPQNQLSVMSNEGYAINSGYIYLYWRDYNWVYPFDPKTKKVSATKQIKTHGEPTTLYFNGNIRPKGYDIFTVGIGVNGDPGATPLEAEKFMQSISSKTENYTNVDDTNKIYDELNKYFKTIVEEKHSIVDGNVTDPMGEMIEFQLKNGQSFTHDDYVLVGNDGSQLKNGVALGGPNSDGGILKDVTVTYDKTSQTIKINHLNLGSGQKVVLTYDVRLKDNYISNKFYNTNNRTTLSPKSEKEPNTIRDFPIPKIRDVREFPVLTISNQKKMGEVEFIKVNKDKHSESLLGAKFQLQIEKDFSGYKQFVPEGSDVTTKNDGKIYFKALQDGNYKLYEISSPDGYIEVKTKPVVTFTIQNGEVTNLKADPNANKNQIGYLEGNGKHLITNTPKRPPGVFPKTGGIGTIVYILVGSTFMILTICSFRRKQL

SEQ ID NO: 8779 - DNA, 1662 bp, Streptococcus agalactiae
atgaaattatcgaagaagttattgttttcggctgctgttttaacaatggtggcggggtcaactgttgaaccagtagctcagtttgcgactggaatgagtattgtaagagctgcagaagtgtcacaagaacgcccagcgaaaacaacagtaaatatctataaattacaagctgatagttataaatcggaaattacttctaatggtggtatcgagaataaagacggcgaagtaatatctaactatgctaaacttggtgacaatgtaaaaggtttgcaaggtgtacagtttaaacgttataaagtcaagacggatatttctgttgatgaattgaaaaaattgacaacagttgaagcagcagatgcaaaagttggaacgattcttgaagaaggtgtcagtctacctcaaaaaactaatgctcaaggtttggtcgtcgatgctctggattcaaaaagtaatgtgagatacttgtatgtagaagatttaaagaattcaccttcaaacattaccaaagcttatgctgtaccgtttgtgttggaattaccagttgctaactctacaggtacaggtttcctttctgaaattaatatttaccctaaaaacgttgtaactgatgaaccaaaaacagataaagatgttaaaaaattaggtcaggacgatgcaggttatacgattggtgaagaattcaaatggttcttgaaatctacaatccctgccaatttaggtgactatgaaaaatttgaaattactgataaatttgcagatggcttgacttataaatctgttggaaaaatcaagattggttcgaaaacactgaatagagatgagcactacactattgatgaaccaacagttgataaccaaaatacattaaaaattacgtttaaaccagagaaatttaaagaaattgctgagctacttaaaggaatgacccttgttaaaaatcaagatgctcttgataaagctactgcaaatacagatgatgcggcatttttggaaattccagttgcatcaactattaatgaaaaagcagttttaggaaaagcaattgaaaatacttttgaacttcaatatgaccatactcctgataaagctgacaatccaaaaccatctaatcctccaagaaaaccagaagttcatactggtgggaaacgatttgtaaagaaagactcaacagaaacacaaacactaggtggtgctgagtttgatttgttggcttctgatgggacagcagtaaaatggacagatgctcttattaaagcgaatactaataaaaactatattgctggagaagctgttactgggcaaccaatcaaattgaaatcacatacagacggtacgtttgagattaaaggtttggcttatgcagttgatgcgaatgcagagggtacagcagtaacttacaaattaaaagaaacaaaagcaccagaaggttatgtaatccctgataaagaaatcgagtttacagtatcacaaacatcttataatacaaaaccaactgacatcacggttgatagtgctgatgcaacacctgatacaattaaaaacaacaaacgtccttcaatccctaatactggtggtattggtacggctatctttgtcgctatcggtgctgcggtgatggcttttgctgttaaggggatgaagcgtcgtacaaaagataac

SEQ ID NO: 8780 - protein, 554 aa, Streptococcus agalactiae
MKLSKKLLFSAAVLTMVAGSTVEPVAQFATGMSIVRAAEVSQERPAKTTVNIYKLQADSYKSEITSNGGIENKDGEVISNYAKLGDNVKGLQGVQFKRYKVKTDISVDELKKLTTVEAADAKVGTILEEGVSLPQKTNAQGLVVDALDSKSNVRYLYVEDLKNSPSNITKAYAVPFVLELPVANSTGTGFLSEINIYPKNVVTDEPKTDKDVKKLGQDDAGYTIGEEFKWFLKSTIPANLGDYEKFEITDKFADGLTYKSVGKIKIGSKTLNRDEHYTIDEPTVDNQNTLKITFKPEKFKEIAELLKGMTLVKNQDALDKATANTDDAAFLEIPVASTINEKAVLGKAIENTFELQYDHTPDKADNPKPSNPPRKPEVHTGGKRFVKKDSTETQTLGGAEFDLLASDGTAVKWTDALIKANTNKNYIAGEAVTGQPIKLKSHTDGTFEIKGLAYAVDANAEGTAVTYKLKETKAPEGYVIPDKEIEFTVSQTSYNTKPTDITVDSADATPDTIKNNKRPSIPNTGGIGTAIFVAIGAAVMAFAVKGMKRRTKDN

SEQ ID NO: 8781 - DNA, 735 bp, Streptococcus agalactiae
atgaagaaagtgttagtgagtagtcttttggttttagggattacgataacgttacaaacagtagttgaggctaaggggccaaaagtagcttatacacaagagggaatgactgctctttcggacacaaataaagataaagtcactactatttctattgacgagattcaaaaaagcttagaaggtaagaagccgattactgttagttttgatattgatgatacactgcttttcagtagtcaatattttcaatatggtaaagaatatgtaactcctggatcgtttgattttcttcataaacaaaaattctgggatcttgttgcaaaacgaggagatcaagattccattcccaaagaatatgctaaaaaattaattgctatgcatcaaaaacgaggagataaaattgtttttataacaggtaggacaagagggtcaatgtataaggagggcgaggttgataaaacagctaaagccttagctaaagattttaaattagacaaaccaattgctgtaaattatacaggcgataaacctaaaaagccatacaaatatgataaatcatattatattaagaaatatggttcagacattcattatggagatagtgatgacgatattcatgcagctagggaggccggtgctagaccaattagaattttaagagcacctaattctacaaatctacctttaccagaagctggaggctacggtgaagaggttctcgaaaattcagcttac

SEQ ID NO: 8782 - protein, 245 aa, Streptococcus agalactiae
MKKVLVSSLLVLGITITLQTVVEAKGPKVAYTQEGMTALSDTNKDKVTTISIDEIQKSLEGKKPITVSFDIDDTLLFSSQYFQYGKEYVTPGSFDFLHKQKFWDLVAKRGDQDSIPKEYAKKLIAMHQKRGDKIVFITGRTRGSMYKEGEVDKTAKALAKDFKLDKPIAVNYTGDKPKKPYKYDKSYYIKKYGSDIHYGDSDDDIHAAREAGARPIRILRAPNSTNLPLPEAGGYGEEVLENSAY

SEQ ID NO: 8783 - DNA, 1227 bp, Streptococcus agalactiae; identical to SEQ ID NO: 3985

SEQ ID NO: 8784 - protein, 409 aa, Streptococcus agalactiae
LKLLYIFEKNIILRKILITFSLIIIFLLGRYVPIPGVLISAYKGQDNNFATLYSTVTGGNLSQVGVFSLGIGPMMTTMILLRLFTIGKYSSGVSQKVQQFRQNVVMLVIAIIQGLAITISFQYHNGFSLTKLLLATMILVTGAYIISWIGNLNAEYGFGGMTILVVVGMLVGQFNNIPLIFELFQDGYQLAIILFLLWTLVAMYLMITFERSEYRIPVMRTSIHNRLVDDAYMPIKVNASGGMAFMYVYTLLMFPQYIIILLRSIFPTNPDITSYNDYFSLSSIQGVVIYMILMLVLSVAFTFVNIDPTKISEAMRESGDFIPNYRPGKETQSYLSKICYLFGTFSGFFMAFLGGVPLLFALGNDDLRTVSSMTGIFMMITGMSFMILDEFQVIRIRKQYTSVFENEEN

SEQ ID NO: 8785 - DNA, 579 bp, Streptococcus agalactiae
atgaaagtgaaaaataagattttaacgatggtagcacttactgtcttaacatgtgctacttattcatcaatcggttatgctgatacaagtgataagaatactgacacgagtgtcgtgactacgaccttatctgaggagaaaagatcagatgaactagaccagtctagtactggttcttcttctgaaaatgaatcgagttcatcaagtgaaccagaaacaaatccgtcaactaatccacctacaacagaaccatcgcaaccctcacctagtgaagagaacaagcctgatggtagaacgaagacagaaattggcaataataaggatatttctagtggaacaaaagtattaatttcagaagatagtattaagaattttagtaaagcaagtagtgatcaagaagaagtggatcgcgatgaatcatcatcttcaaaagcaaatgatgggaaaaaaggccacagtaagcctaaaaaggaacttcctaaaacaggagatagccactcagatactgtaatagcatctacgggagggattattctgttatcattaagtttttacaataagaaaatgaaactttattaa

SEQ ID NO: 8786 - protein, 192 aa, Streptococcus agalactiae; identical to SEQ ID NO: 2

SEQ ID NO: 8787 - DNA, 2040 bp, Streptococcus agalactiae
atgaaacgtaaatactttattcttaatacggtgacggttttaacgttagctgctgcaatgaatactagcagtatctatgctaatagtactgagacaagtgcttcagtagttcctactacaaatactatcgttcaaactaatgacagtaatcctaccgcaaaatttgtatcagaatcaggacaatctgtaataggtcaagtaaaaccagataattctgcggcgcttacaacagttgacacgcctcatcatatttcagctccagatgctttaaaaacaactcaatcaagtcctgtcgttgagagtacttctactaagttaactgaagagacttacaaacaaaaagatggtcaagatttagccaacatggtgagaagtggtcaagttactagtgaggaactcgttaatatggcatacgatattattgctaaagaaaacccatctttaaatgcagtcattactactagacgccaagaagctattgaagaggctagaaaacttaaagataccaatcagccgtttttaggtgttcccttgttagtcaaggggttagggcacagtattaaaggtggtgaaaccaataatggcttgatctatgcagatggaaaaattagcacatttgacagtagctatgtcaaaaaatataaagatttaggatttattattttaggacaaacgaactttccagagtatgggtggcgtaatataacagattctaaattatacggtctaacgcataatccttgggatcttgctcataatgctggtggctcttctggtggaagtgcagcagccattgctagcggaatgacgccaattgctagcggtagtgatgctggtggttctatccgtattccatcttcttggacgggcttggtaggtttaaaaccaacaagaggattggtgagtaatgaaaagccagattcgtatagtacagcagttcattttccattaactaagtcatctagagacgcagaaacattattaacttatctaaagaaaagcgatcaaacgctagtatcagttaatgatttaaaatctttaccaattgcttatactttgaaatcaccaatgggaacagaagttagtcaagatgctaaaaacgctattatggacaacgtcacattcttaagaaaacaaggattcaaagtaacagagatagacttaccaattgatggtagagcattaatgcgtgattattcaaccttggctattggcatgggaggagctttttcaacaattgaaaaagacttaaaaaaacatggttttactaaagaagacgttgatcctattacttgggcagttcatgttatttatcaaaattcagataaggctgaacttaagaaatctattatggaagcccaaaaacatatggatgattatcgtaaggcaatggagaagcttcacaagcaatttcctattttcttatcgccaacgaccgcaagtttagcccctctaaatacagatccatatgtaacagaggaagataaaagagcgatttataatatggaaaacttgagccaagaagaaagaattgctctctttaatcgccagtgggagcctatgttgcgtagaacaccttttacacaaattgctaatatgacaggactcccagctatcagtatcccgacttacttatctgagtctggtttacccatagggacgatgttaatggcaggtgcaaactatgatatggtattaattaaatttgcaactttctttgaaaaacatcatggttttaatgttaaatggcaaagaataatagataaagaagtgaaaccatctactggcctaatacagcctactaactccctctttaaagctcattcatcattagtaaatttagaagaaaattcacaagttactcaagtatctatctctaaaaaatggatgaaatcgtctgttaaaaataaaccatccgtaatggcatatcaaaaagcacttcctaaaacaggtgatacagaatcaagcctatctccagttttagtagtaacccttttattagcttgttttagctttgtaacaaaaaagaatcagaaaagt

SEQ ID NO: 8788 - protein, 680 aa, Streptococcus agalactiae
MKRKYFILNTVTVLTLAAAMNTSSIYANSTETSASVVPTTNTIVQTNDSNPTAKFVSESGQSVIGQVKPDNSAALTTVDTPHHISAPDALKTTQSSPVVESTSTKLTEETYKQKDGQDLANMVRSGQVTSEELVNMAYDIIAKENPSLNAVITTRRQEAIEEARKLKDTNQPFLGVPLLVKGLGHSIKGGETNNGLIYADGKISTFDSSYVKKYKDLGFIILGQTNFPEYGWRNITDSKLYGLTHNPWDLAHNAGGSSGGSAAAIASGMTPIASGSDAGGSIRIPSSWTGLVGLKPTRGLVSNEKPDSYSTAVHFPLTKSSRDAETLLTYLKKSDQTLVSVNDLKSLPIAYTLKSPMGTEVSQDAKNAIMDNVTFLRKQGFKVTEIDLPIDGRALMRDYSTLAIGMGGAFSTIEKDLKKHGFTKEDVDPITWAVHVIYQNSDKAELKKSIMEAQKHMDDYRKAMEKLHKQFPIFLSPTTASLAPLNTDPYVTEEDKRAIYNMENLSQEERIALFNRQWEPMLRRTPFTQIANMTGLPAISIPTYLSESGLPIGTMLMAGANYDMVLIKFATFFEKHHGFNVKWQRIIDKEVKPSTGLIQPTNSLFKAHSSLVNLEENSQVTQVSISKKWMKSSVKNKPSVMAYQKALPKTGDTESSLSPVLVVTLLLACFSFVTKKNQKS

SEQ ID NO: 8789 - DNA, 558 bp, Streptococcus agalactiae
atggttaaacgcgattttattagaaatattattttagcattgattgctgtattgattttgattctcttgagatattttgtttttgcaacctttaaagtacataaggatgctacaaattcttattttagcaacggagatgttgttgttgttaatcgtaataggacgcctaagtacaaagactttattgtctataaggttggaaagattttctatattagtcgtgttattggtgagccaaatcaaaaagtgagagtaatggatgatattttatatttgaatgatgttttcaaggatgagccttacattgaaaaaatgaaaaatgcttattctgaaaagaaagacggtcaaatgccctttacttccgacttctcagttgaaacattaacacgaaataaagaaagcagagttcctaagggttcttatcttgtgttaaatgataatcgacaaaataaaaatgatagtcgaaaatttggattaatcaaagagaaagatattcgtggtgttattacctttaaagtataccctctaagtgaatttggttttacagcttcagagtag

SEQ ID NO: 8790 - protein, 185 aa, Streptococcus agalactiae
MVKRDFIRNIILALIAVLILILLRYFVFATFKVHKDATNSYFSNGDVVVVNRNRTPKYKDFIVYKVGKIFYISRVIGEPNQKVRVMDDILYLNDVFKDEPYIEKMKNAYSEKKDGQMPFTSDFSVETLTRNKESRVPKGSYLVLNDNRQNKNDSRKFGLIKEKDIRGVITFKVYPLSEFGFTASE

SEQ ID NO: 8791 - DNA, 1500 bp, Streptococcus agalactiae
atgaataaacgcgtaaaaatcgttgcaacacttggtcctgcggttgaattccgtggtggtaagaagtttggtgagtctggatactggggtgaaagccttgacgtagaagcttcagcagaaaaaattgctcaattgattaaagaaggtgctaacgttttccgtttcaacttctcacatggagatcatgctgagcaaggagctcgtatggctactgttcgtaaagcagaagagattgcaggacaaaaagttggcttcctccttgatactaaaggacctgaaattcgtacagaactttttgaagatggtgcagatttccattcatatacaacaggtacaaaattacgtgttgctactaagcaaggtatcaaatcaactccagaagtgattgcattgaatgttgctggtggacttgacatctttgatgacgttgaagttggtaagcaaatccttgttgatgatggtaaactaggtcttactgtgtttgcaaaagataaagacactcgtgaatttgaagtagttgttgagaatgatggccttattggtaaacaaaaaggtgtaaacatcccttatactaaaattcctttcccagcacttgcagaacgcgataatgctgatatccgttttggacttgagcaaggacttaactttattgctatctcatttgtacgtactgctaaagatgttaatgaagttcgtgctatttgtgaagaaactggsmatggacacgttaagttgtttgctaaaattgaaaatcaacaaggtatcgataatattgatgagattatcgaagcagcagatggtattatgattgctcgtggtgatatgggtatcgaagttccatttgaaatggttccagtttaccaaaaaatgatcattactaaagttaatgcagctggtaaagcagttattacagcaacaaatatgcttgaaacaatgactgataaaccacgtgcgactcgttcagaagtatctgatgtcttcaatgctgttattgatggtactgatgctacaatgctttcaggtgagtcagctaatggtaaatacccagttgagtcagttcgtacaatggctactattgataaaaatgctcaaacattactcaatgagtatggtcgcttagactcatctgcattcccacgtaataacaaaactgatgttattgcatctgcggttaaagatgcaacacactcaatggatatcaaacttgttgtaacaattactgaaacaggtaatacagctcgtgccatttctaaattccgtccagatgcagacattttggctgttacatttgatgaaaaagtacaacgttcattgatgattaactggggtgttatccctgtccttgcagacaaaccagcatctacagatgatatgtttgaggttgcagaacgtgtagcacttgaagcaggatttgttgaatcaggcgataatatcgttatcgttgcaggtgttcctgtaggtacaggtggaactaacacaatgcgtgttcgtactgttaaa

SEQ ID NO: 8792 - protein, 500 aa, Streptococcus agalactiae
  MISC_FEATURE (1)..(500): Xaa = Any Amino Acid
MNKRVKIVATLGPAVEFRGGKKFGESGYWGESLDVEASAEKIAQLIKEGANVFRFNFSHGDHAEQGARMATVRKAEEIAGQKVGFLLDTKGPEIRTELFEDGADFHSYTTGTKLRVATKQGIKSTPEVIALNVAGGLDIFDDVEVGKQILVDDGKLGLTVFAKDKDTREFEVVVENDGLIGKQKGVNIPYTKIPFPALAERDNADIRFGLEQGLNFIAISFVRTAKDVNEVRAICEETGXGHVKLFAKIENQQGIDNIDEIIEAADGIMIARGDMGIEVPFEMVPVYQKMIITKVNAAGKAVITATNMLETMTDKPRATRSEVSDVFNAVIDGTDATMLSGESANGKYPVESVRTMATIDKNAQTLLNEYGRLDSSAFPRNNKTDVIASAVKDATHSMDIKLVVTITETGNTARAISKFRPDADILAVTFDEKVQRSLMINWGVIPVLADKPASTDDMFEVAERVALEAGFVESGDNIVIVAGVPVGTGGTNTMRVRTVK

SEQ ID NO: 8793 - DNA, 390 bp, Streptococcus agalactiae
atgaagaaaatacgaagctataccagtatctggtctgtggaaaaggtactgtattctatcaatgattttagacttccgtttcccataacctttacgcaaatgacatggtttgtcgtgtcactctttgcagtgatgatacttggcaacttgccccctctttccatgatagagggagcatttctcaaatactttgggattcctgtggctttcacatggtttatgtctacaaaaacttttgatggtaaaaagccttatggatttttgaagtctgtcattgcttatgcactgcgaccaaagctgacctatgcaggaaaaaaagtaacgcttggcagaaaccagccacaagaagccattacagcagttaggagtgaattttatggcatatccaat

SEQ ID NO: 8794 - protein, 130 aa, Streptococcus agalactiae
MKKIRSYTSIWSVEKVLYSINDFRLPFPITFTQMTWFVVSLFAVMILGNLPPLSMIEGAFLKYFGIPVAFTWFMSTKTFDGKKPYGFLKSVIAYALRPKLTYAGKKVTLGRNQPQEAITAVRSEFYGISN

SEQ ID NO: 8795 - DNA, 999 bp, Streptococcus agalactiae
atgaagttgaaaactttagtgattggtggttctggattattcttgatggtcttctcactgcttctgtttgttgccattttattttcagatgaacaggacagcggaatttccaatattcattatggaggtgtgaatgtttccgcagaagtgctggctcataagcctatggtagaaaaatatgccaaagaatatggcgttgaagaatatgtcaacatacttcttgcgattatacaggtggaatcgggcggtactgcggaagatgttatgcagtcctcggaatccctcggtcttccacctaattcattgagtacagaagaatccattaagcaaggtgtgaagtatttcagtgaattattagccagtagcgaaaggctcagtgtagatttagaatcggttatccagtcctacaattatggtggtggtttcttagggtatgtggctaatcgtggaaataaatatacctttgaactggctcaaagtttctcaaaagagtattcaggtggcgaaaaagtgtcttaccccaatcccatagccatacctatcaatgggggctggcgatacaactatggcaatatgttttatgtgcaactggtaacgcagtatcttgtcacaacagagtttgatgatgatacggtacaagccatcatggacgaagcactgaaatatgagggctggcgatacgtttacggtggagcttccccgactacttcttttgattgtagcggactgacacaatggacgtatggaaaagctggaattaacttaccacgaaccgcacaacagcaatatgatgtgacccagcatatcccactatcggaagcacaagctggcgatttggttttctttcattctacctataacgctggctcttatattactcatgttgggatataccttggcaataaccgtatgtttcatgcaggcgacccaatcggttatgccgacttaacaagcccctactggcaacagcatttagtgggagcaggacgaatcaaacaa

SEQ ID NO: 8796 - protein, 333 aa, Streptococcus agalactiae
MKLKTLVIGGSGLFLMVFSLLLFVAILFSDEQDSGISNIHYGGVNVSAEVLAHKPMVEKYAKEYGVEEYVNILLAIIQVESGGTAEDVMQSSESLGLPPNSLSTEESIKQGVKYFSELLASSERLSVDLESVIQSYNYGGGFLGYVANRGNKYTFELAQSFSKEYSGGEKVSYPNPIAIPINGGWRYNYGNMFYVQLVTQYLVTTEFDDDTVQAIMDEALKYEGWRYVYGGASPTTSFDCSGLTQWTYGKAGINLPRTAQQQYDVTQHIPLSEAQAGDLVFFHSTYNAGSYITHVGIYLGNNRMFHAGDPIGYADLTSPYWQQHLVGAGRIKQ

SEQ ID NO: 8797 - DNA, 978 bp, Streptococcus agalactiae; identical to SEQ ID NO: 4273

SEQ ID NO: 8798 - protein, 326 aa, Streptococcus agalactiae
LEVRMVTLSKEQHLDMFLKMQRIRDVDMKFNKLVRRGFVQGMTHFSVGEEAASVGAIQDLTDSDIIFSNHRGHGQTIAKGIDIGGMFAELAGKATGTSKGRGGSMHLANLEKGNYGTNGIVGGGYALAVGAALTQQYEGTDNIVIAFSGDSATNEGSFHESVNLAAVWNLPVIFFIINNRYGISTDITYSTKIPHLYMRADAYGIPGHYVEDGNDLMAVYEKMHEVINYVRSGNGPAIVEVESYRWFGHSTADAGVYRTKEEVDSWKAKDPVKRYRAYLIENEIATEEELAAIEAQVIKEVEEGVKFAEESPFPDMSVAFEDVFVD

SEQ ID NO: 8799 - DNA, 900 bp, Streptococcus agalactiae
atgaaaatagatgacctaagaaaaagcgacaatgttgaagatcgtcgctccagtagcggaggttcattctctagcggaggaagtggattaccgattcttcaacttttattgctgcgagggagttggaaaaccaagcttgtggttttaatcatcttactgctacttggcggagggggactaaccagcatttttaatgactcatcctcaccttctagttaccaatctcagaatgtctcacgttctgttgataatagcgcaacgagagaacaaatcgatttcgttaataaagtccttggctcaactgaggatttctggtcacaagaattccaaacccaaggttttggaaattataaggaaccaaaacttgttctttacaccaattcaattcaaacaggttgtggtataggtgaatctgcttcaggaccattttattgttcagcagataaaaaaatctatcttgatatttctttttacaatgaattatcacataaatatggtgctactggtgattttgctatggcctacgtcatcgcccacgaagttggtcaccacattcaaacagagttaggcattatggataagtataatagaatgcgacacggacttactaagaaagaagcaaatgctttaaatgttcggctagaacttcaagcagattattatgcaggggtatgggctcactacatcaggggaaaaaatctcttagaacaaggagactttgaagaggccatgaatgctgcccacgccgtcggagacgatacccttcagaaagaaacctacggaaaattagtgcctgatagctttacccatggaacagctgaacaacgccaacgttggtttaacaaaggctttcaatatggtgacatccaacacggtgatactttctccgtagaacatcta

SEQ ID NO: 8800 - protein, 300 aa, Streptococcus agalactiae
MKIDDLRKSDNVEDRRSSSGGSFSSGGSGLPILQLLLLRGSWKTKLVVLIILLLLGGGGLTSIFNDSSSPSSYQSQNVSRSVDNSATREQIDFVNKVLGSTEDFWSQEFQTQGFGNYKEPKLVLYTNSIQTGCGIGESASGPFYCSADKKIYLDISFYNELSHKYGATGDFAMAYVIAHEVGHHIQTELGIMDKYNRMRHGLTKKEANALNVRLELQADYYAGVWAHYIRGKNLLEQGDFEEAMNAAHAVGDDTLQKETYGKLVPDSFTHGTAEQRQRWFNKGFQYGDIQHGDTFSVEHL

SEQ ID NO: 8801 - DNA, 855 bp, Streptococcus agalactiae
atgacaaaaaaacaaaaacaaataacagcttcgattgtaactttgcttttttcattactggcaatagggttaggtgaaagcaaatctttgcctaatgatcacattttaaaacaggtgacagatttaattattagtaatgaatctggcaaaaatacttcccttaaaaatgtatcaggaactcctagtagagagttatctgaatctgttttgactagcaatgttaaaaaacaattgggaacaaatatagcttggaaccagtcaggtgcttttatcattaatcaaaataaaacagatttgaatgctaaagtgtcaagtgcaccatatgctattaatgaaataaagaaggttaataaccaaattgttccgactaaagcaaatgccttattaacaaaagcaactcgtcaatatcgaaatcgagaagaaacagggaatggtagaacttattggaaaccagctggatggcatcagataaatggattaaaagggagctataaccacgctgtggacagaggccatttaattggttatgctttagtagggagtttaagaggatttgatgcctccacaagtaatcctaaaaatattgccacacaagcagcttgggcaaaccaagctaatagcaaccaatcaacagggcaaaattattatgaaactttagttcgtaaagcattggatcgtcataaaactgttaggtatcgtgtgactttaatttatgacagagataatcttttatcttcgggatcacatattgaggctaaatcttcagatggaagtttagaatttaacgtttttattcctaatgtacaatcgggattattatttgattatgcaacaggaaaagtgaagcagacaaag

SEQ ID NO: 8802 - protein, 285 aa, Streptococcus agalactiae
MTKKQKQITASIVTLLFSLLAIGLGESKSLPNDHILKQVTDLIISNESGKNTSLKNVSGTPSRELSESVLTSNVKKQLGTNIAWNQSGAFIINQNKTDLNAKVSSAPYAINEIKKVNNQIVPTKANALLTKATRQYRNREETGNGRTYWKPAGWHQINGLKGSYNHAVDRGHLIGYALVGSLRGFDASTSNPKNIATQAAWANQANSNQSTGQNYYETLVRKALDRHKTVRYRVTLIYDRDNLLSSGSHIEAKSSDGSLEFNVFIPNVQSGLLFDYATGKVKQTK

SEQ ID NO: 8803 - DNA, 714 bp, Streptococcus agalactiae; identical to SEQ ID NO: 4349

SEQ ID NO: 8804 - protein, 238 aa, Streptococcus agalactiae
LESTSNPTVSFLGIDFDLTILAMSLLTITIIFILVFWASRKMTIKPKGKQNVLEYVYELVNNTISQNLGHYTKNYSLLMFILFSFVFIANNLGLMTSLKTHEHNFWTSPTANFGVDITLSLLVAFICHIEGIRKKGIGGYLKGFLSPTPAMLPMNLLEEVTNVASLALRLFGNIFSGEVVTGLLLQLAVLSPFTGPLAFALNIVWTAFSMFIGFIQAYVFIILSSSYIGHKVHGDEEE

SEQ ID NO: 8805 - DNA, 768 bp, Streptococcus agalactiae
atgtatttagaacaattaaaagaggtaaatcctttaaccatttgtatcactaataatgtggtcaaaaactttacagccaatggtttattagctttaggagcttctccggctatgagcgagtgcatagaggacttagaagacttgttaaaagttgcagatgcattattaattaatataggaacactaacaaaagaaagttggcaactttaccaagaagcaatcaaaatagcaaataaaaaccaagttccagttgtattagatcctgtagcggcaggagcaagtcgttttcgattagaagtgtcacttgatttattgaagaattattctattagtttacttacaggaaatggtagtgaaatcgctgctttgattggtgaaaaacaagcgtctaaaggggcagatggcggaaaagtggctgatttagaatcaattgctgtaaaagccaatcaagtttttgatgtgccagtggttgtcacaggagaaactgatgctatcgctgttagaggagaagttcgcttattacaaaatggtagtcctttaatgccacttgttacaggaactggatgtctattaggggcagtattggctgcttttattggtagttctgacagaagcgatgatcttgcttgtctgacagaggccatgactgtttataatgttgctggagaaattgcagagaaggtggcaaaaggtaagggggtgggaagtttccaagttgcatttttagatgccctttcccagatgaaatcagaaatgattatggacaaa

SEQ ID NO: 8806 - protein, 256 aa, Streptococcus agalactiae
MYLEQLKEVNPLTICITNNVVKNFTANGLLALGASPAMSECIEDLEDLLKVADALLINIGTLTKESWQLYQEAIKIANKNQVPVVLDPVAAGASRFRLEVSLDLLKNYSISLLTGNGSEIAALIGEKQASKGADGGKVADLESIAVKANQVFDVPVVVTGETDAIAVRGEVRLLQNGSPLMPLVTGTGCLLGAVLAAFIGSSDRSDDLACLTEAMTVYNVAGEIAEKVAKGKGVGSFQVAFLDALSQMKSEMIMDK

SEQ ID NO: 8807 - DNA, 699 bp, Streptococcus agalactiae; identical to SEQ ID NO: 4411

SEQ ID NO: 8808 - protein, 233 aa, Streptococcus agalactiae
VFCNTFLGGVILFNLKNYHPAITFLCLLIPTFSFSFTLRLRTSLLFLIIVVTLQCFVKVSLKTWAKVNLISFVMGLSLFLGTYFWGKLPHQFVLASLVACRPLIFMNVGLLFHASHSNYDFIESLYQTFKVPSHFAYGIFAVFNLLPLIKLQYQRNRLAFRLKNQVTWALSPRLILSVLLKTIYWVEQLELAMLSKGFEVGKERTHASTYPVRFRDYSLLGMSILLSIGMIFK

SEQ ID NO: 8809 - DNA, 639 bp, Streptococcus agalactiae; identical to SEQ ID NO: 4419

SEQ ID NO: 8810 - protein, 213 aa, Streptococcus agalactiae
LQMEFFVVKIFCRLLPLICHREGVMMTNHKTKKLTVLAIMIALDVFLTPIFRIEGMAFMSSVVNIIAGVIMGPIYALVMALVTAFIRILTQAGVASVAPLAILGAGPGAFLAGWFYRFYAKDWMSWVGEFIGTGIIGALLSAPIMVWFWTWTADGNHEVLAKASAAQSIFLFMPRFIGATIIGGVIALLLLQGLKRVPVFMTIQALFKGEKVK

SEQ ID NO: 8811 - DNA, 546 bp, Streptococcus agalactiae
atgaaaaaaataacaactttaatcttagctagtagcttattactagttgcaacgacatcggttaaagctgatgataactttgaaatgccaacgcgttatgttaaaatgagtgaaaaatcaaaagcattttatcaaagactacaagaaaaacaacgtaaggcacatactactgtgaagacttttaataattcagaaataaggcatcaactacctcttaaacaagaaaaggctagaaatgatatctacaatttaggcattcttatttctcaggagtctaaagggttcatccaacgtattgataatgcctattctttggaaaatgtctcagatattgttaatgaagctcaggctttgtataaacgtaactatgatttatttgaaaaaatcaaatctacacgtgataaggttcaagtcttacttgcatcgcatcaagataatacagacttaaaaaacttttatgctgagttggacgatatgtatgaacatgtttatctcaatgaaagtagagtggaggcgataaacagaaatatccaaaaatataattag

SEQ ID NO: 8812 - protein, 181 aa, Streptococcus agalactiae; identical to SEQ ID NO: 4422

SEQ ID NO: 8813 - DNA, 2259 bp, Streptococcus agalactiae
atgaaaaaacaatttttaaaatcagcagcgattctatcgctagcagtaacagcagtatctacaagtcagccggtaggggcgatagtgggaaaagatgaaacgaaattaagacagcaacttgggtatattgattcaaaaaaatctggaaagaaaattgatgagagatggggtgaaaaaatttataactatctaagttatgagctcattgaagcaaacgaatggattaaccgaagtgagtttcaggaacctgagtatagaactattttatcagaatttaaagataaaatagatagtattgaatactacttaattaacttaagtaatattgctaaagaagatgcgcatcaaagaaatattcttcaatcattagataaatatgaaaaaagtggaatatataatttagaccaaggtgtttataattatatatatcaagaaattagttcagcgaagcacaagttttcggatggggtagataaaatttatcgtttagatagtactttatttcctttctctgtatggtatgataaacatttagataataatgataactacaaggataataaagattttaaagagtacattgctttattaaatgaaattacacgaaaagcaaggttaggatatcaaattgtaaataaccataaagatggggagcataaagatgaagcagaaatactggatattttaatcagagatataacttttgtttcaaaagatgctcctggatataaatatattccaaataaaagaattgcagcgaaaataattgaagatttagatggaattatcaatgacttttttaagaatacaggaaaagataagccttctcttgaaaagttaaaggacacagaattccataaaaaatatcttaattcaactgaaccgtatagtattgaaactaacttaccttcaaattataaagaattgaaggaaaagcaaataaaaaaattggaatatggatacaaaaagtcttctaaaatttatacgtctgctcattatgcactatatagtgaagaaattgatgctgcaaaagaattgcttcaaaaagtgaagattgcaaaagataattataatgaaattaagtccatgaatctaagcccttcaatttttaatcagtatttacaacttcttcaaatagttataagttcagagataaatctaaaaaaggcactcgataacactgtggatttacccatagaaaataattttaatacattggacattcaatataataaattagacactgctattaagtcacttcgaaaatttgtaactaagtataaacaagaagtaagaaaagctactaagagttattctaaaaaagaattagtaaatgcagagttaacaaaagtaatttctaatgacaatattttattagacatgcaagcaattagttccaattatgggtctactaaaaagtttgtttattcagtcaaaagattaccttacgtcccgcaagtaattatgacaacaacgtctaatgtacttatgcctcaaaagcaagttgaaaaagtgaagctactcaccccatttacaatttctaataaagaagtattgaatcatgactcactagtagaaaatgatgctcaaaaacaaaaagtagaacaggaaaaaactaaatcgctagctcctcaaaaaggggctgtaaaagaacaaactgagcaaaaagtatctggaaatactcaagagatagaaaagaaatctgaaactgtggcaactccacaacaaagttcagttgcgcaaacttctgtccaacagccggctccggttcaatcagttgttcaagaatccaaagcttctcaagaggagattaatgcagcacacgatgctatttcggcgtataaatcaacagtcaatattgctaatacagccggtgtaacaactgcggaaatgaccacgctcattaatactcaaacttctaatctttctgatgttgagaaagctttaggaaataataaggttaataatggtgcagtcaatgtattgagagaagatacagctcgtcttgagaatatgatttggaatcgtgcttaccaagctattgaagaattcaacgtcgctcgtaatacttataataaccaaatcaagacagaaacagttccagttgataatgatattgaagctattttagcaggttctcaagctaaaattagccatttggacaatcgtatcggagcgcgccacatggatcaagcttttgtagctagtttattagaagttactgagatgagtaaatcaatctcatcgcgtataaaagag

SEQ ID NO: 8814 - protein, 753 aa, Streptococcus agalactiae
MKKQFLKSAAILSLAVTAVSTSQPVGAIVGKDETKLRQQLGYIDSKKSGKKIDERWGEKIYNYLSYELIEANEWINRSEFQEPEYRTILSEFKDKIDSIEYYLINLSNIAKEDAHQRNILQSLDKYEKSGIYNLDQGVYNYIYQEISSAKHKFSDGVDKIYRLDSTLFPFSVWYDKHLDNNDNYKDNKDFKEYIALLNEITRKARLGYQIVNNHKDGEHKDEAEILDILIRDITFVSKDAPGYKYIPNKRIAAKIIEDLDGIINDFFKNTGKDKPSLEKLKDTEFHKKYLNSTEPYSIETNLPSNYKELKEKQIKKLEYGYKKSSKIYTSAHYALYSEEIDAAKELLQKVKIAKDNYNEIKSMNLSPSIFNQYLQLLQIVISSEINLKKALDNTVDLPIENNFNTLDIQYNKLDTAIKSLRKFVTKYKQEVRKATKSYSKKELVNAELTKVISNDNILLDMQAISSNYGSTKKFVYSVKRLPYVPQVIMTTTSNVLMPQKQVEKVKLLTPFTISNKEVLNHDSLVENDAQKQKVEQEKTKSLAPQKGAVKEQTEQKVSGNTQEIEKKSETVATPQQSSVAQTSVQQPAPVQSVVQESKASQEEINAAHDAISAYKSTVNIANTAGVTTAEMTTLINTQTSNLSDVEKALGNNKVNNGAVNVLREDTARLENMIWNRAYQAIEEFNVARNTYNNQIKTETVPVDNDIEAILAGSQAKISHLDNRIGARHMDQAFVASLLEVTEMSKSISSRIKE

SEQ ID NO: 8815 - DNA, 1425 bp, Streptococcus agalactiae
ttgacaaaagaatatcaaaattatgtcaatggcgaatggaaatcatctgttaatcagattgagattttgtcaccaattgatgattcttcattgggattcgtgccagcgatgactcgagaagaagttgatcatgctatgaaagcgggtcgtgaggctttaccagcctgggctgctttgacagtatatgaacgtgcacaataccttcataaagccgcagacattattgaacgtgataaagaagaaattgctactgttttagcaaaagaaatttctaaagcttacaatgcttcagtaactgaggttgtaaggacagctgatcttattcgttatgcagcagaagaaggaattcgtttatcaacttcagctgacgaaggtggaaaaatggatgcttcaacaggtcataagttggctgttattcgtcgtcaaccagtaggtatcgttttagcaatcgcaccttataattaccctgttaacctctcaggatcaaaaattgcgccagctctaattggtggaaacgttgtgatgtttaaaccaccaacacaaggttcagtctcaggacttgttttagcaaaagcttttgcagaagcaggtcttccagcaggtgtctttaatactattacaggacgcggttctgagattggagattacattgttgagcatgaagaagttaattttattaactttacaggatcaacgccagttggaaaacgtattggtaagttagcaggaatgcgtccaattatgcttgagttgggtggtaaggatgcaggtgtcgtcttagctgatgctgaccttgacaacgctgctaaacaaatcgttgcaggtgcttatgattactccggacaacgctgtacggcaattaagcgtgtacttgtcgttgaagaagttgcagatgaattggcagaaaaaatatctgaaaatgtagcaaaattatcagtaggkkatccatttgataatgcaacggtgacaccggttattgatgataattcagccgactttattgaaagcttagtagtagatgcacgtcaaaaaggtgcgaaagaattgaatgaatttaaacgtgatggtcgtctattaactccaggattgtttgatcatgttactttagatatgaaactagcttgggaagagccttttggaccaattctcccaattattcgtgtcaaggatgcagaagaagctgttgctattgccaacaaatytgattttggattacaatcatcagtctttacacgtgatttccaaaaagcatttgatatagcaaataaacttgaagttggtacagttcacattaacaataagactggacgtggtcctgataatttcccattcttaggactcaaaggatctggtgcaggtgttcaaggtatcagatattcaattgaagcaatgacaaatgtaaaatcgatagtttttgatatgaaa

SEQ ID NO: 8816 - protein, 475 aa, Streptococcus agalactiae
  MISC_FEATURE (1)..(475): Xaa = Any Amino Acid
LTKEYQNYVNGEWKSSVNQIEILSPIDDSSLGFVPAMTREEVDHAMKAGREALPAWAALTVYERAQYLHKAADIIERDKEEIATVLAKEISKAYNASVTEVVRTADLIRYAAEEGIRLSTSADEGGKMDASTGHKLAVIRRQPVGIVLAIAPYNYPVNLSGSKIAPALIGGNVVMFKPPTQGSVSGLVLAKAFAEAGLPAGVFNTITGRGSEIGDYIVEHEEVNFINFTGSTPVGKRIGKLAGMRPIMLELGGKDAGVVLADADLDNAAKQIVAGAYDYSGQRCTAIKRVLVVEEVADELAEKISENVAKLSVGXPFDNATVTPVIDDNSADFIESLVVDARQKGAKELNEFKRDGRLLTPGLFDHVTLDMKLAWEEPFGPILPIIRVKDAEEAVAIANKXDFGLQSSVFTRDFQKAFDIANKLEVGTVHINNKTGRGPDNFPFLGLKGSGAGVQGIRYSIEAMTNVKSIVFDMK

SEQ ID NO: 8817 - DNA, 462 bp, Streptococcus agalactiae
atgaattacattattacatttttgatttcaatgattcccttagtggaactacgaggagctgtgccatttgcaatcgctaatggaatacctttgtgggaagcgctagctatcggtgttgttggaaacatgctacctgtacctatcatcttcttctttgctcgcaaagttctagaatggggagcagataaaccttatactggtaagtttttcacatggtgccttaaaaaaggacatagcggtggtcaaaaacttgaaaaagtagctggagaaaaaggattgtttattgccttgctattgtttgtaggcattcccttacccggaacaggagcctggactggcacgcttgcagctagcctyctagattgggaatttaaacatagtgttattgctgttatgctaggtgttatactagctggatgcatcatgggaacattatccattatcggcttcaacctattctag

SEQ ID NO: 8818 - protein, 153 aa, Streptococcus agalactiae; identical to SEQ ID NO: 4530

SEQ ID NO: 8819 - DNA, 2448 bp, Streptococcus agalactiae
atgagtcattattccataaaattacaagaagtattcagattggcgcaatttcaagcagcacgctatgaaagtcactatttagaaagctggcatcttcttttagcaatggttttagttcatgattcagtagctggtttgacatttgctgaatatgagtctgaagttgcaattgaagagtacgaagcagcaacaattttagctttaggtagagcaccgaaagaagagattaccaattatcaatttttagagcaatcaccagctttgaaaaagatcttaaagttagcagaaaatattagtatcgtagtaggagctgaagatgtgggtactgaacatgtcttgcttgctatgttggttaataaagatttattagccacacgtatcttaragttagttggctttagaggtcaagacgatggtgaatcagttcgtatggttgatttacgtaaggctctagaacgtcatgccggttttacaaaagatgatatcaaagcaatttatgaattacgtaatcctaaaaaagcaaagtcgggtgcttctttttctgatatgatgaaaccaccgagtactgctggtgatttagctgatttcacacgtgatttatcacagatggcggttgatggggaaattgaacctgttattgggcgtgataaagaaatttcacgtatggtccaagtcttaagtcgtaaaacaaagaataatcctgtcttagttggagatgcgggtgtcggtaaaacagctttggcgtacggtctagcacaacgtattgctaatggaaatattccttatgagcttagagatatgcgtgttctagagttagatatgatgagcgttgttgctggaactcgttttcgtggtgattttgaggaacgtatgaatcaaatcattgcagatattgaagaagacggtcatattattcttttcattgatgaactgcatactattatgggttctggctctggtattgatagcacacttgatgctgctaatattttaaaaccagctttggcccgaggcactttacgcactgttggagcaacaactcaagaggaatatcaaaagcatattgaaaaagatgctgctttatctcgtcgctttgcaaaagttttagtagaagaaccaaatcttgaagacgcatatgaaattctacttggattgaagccagcgtatgaagcctttcataatgttactatttcagatgaagcagttatgactgctgtaaaagtggctcatcgttatttgacaagtaagaatttaccagactcagctatagacttacttgatgaagcttctgccactgtgcaaatgatgattaagaaaaatgctccttcgcttttaacagaagttgaccaagctattttagatgatgatatgaaatctgcttctaaagctctaaaagcaagttataagggtaaaaagcgtaagcctattgccgtaacagaagatcatattatggcaactctcagtcgtctatctggtattcctgttgaaaaattgacacaagctgatagtaaaaaatacctcaatttagaaaaagaattgcataaacgtgttatcggtcaagatgatgcagttactgccattagtcgtgctatccgtcgcaatcaatctggcattcgtactggtaagcgtcctattggttcctttatgttcttgggaccaactggtgttggtaagacagagttagcaaaagccttggcagaagtgttgtttgatgatgaatcagccctaattcgttttgatatgtcggaatatatggaaaaattcgcagcttctcacctgaatggggcacctccaggttatgttggttatgatgaaggaggagagttgactgaaaaagtacgcaataaaccatattcagttttactttttgatgaagttgaaaaagctcatccagatatttttaatgtattattacaagtgcttgatgatggcgttttaacagatagtcgaggacgaaaagttgatttttcaaatactataatcattatgacttctaatttaggagcaactgcattacgtgacgataaaacagttggttttggagctaaggatatcagccatgattatactgctatgcaaaaacgtattatggaggagcttaaaaaagcttatcgaccagagtttatcaatcgtattgatgagaaagttgtattccatagtctcagtcaagataatatgcgtgaagttgtgaaaattatggttaaacctttaattttagcgcttaaagataaaggtatggatctgaaattccagccttcagccttgaaacacttggcagaggatggctatgatatagaaatgggtgctcgtccactgcgtagaactattcaaacgcaagtagaggatcatttatcagaactactattggcaaatcaagtgaaagaggggcaagtaattaagattggcgtatccaaaggcaaattgaaatttgatattgcaaaatcataa

SEQ ID NO: 8820 - protein, 815 aa, Streptococcus agalactiae
  MISC_FEATURE (1)..(815): Xaa = Any Amino Acid
MSHYSIKLQEVFRLAQFQAARYESHYLESWHLLLAMVLVHDSVAGLTFAEYESEVAIEEYEAATILALGRAPKEEITNYQFLEQSPALKKILKLAENISIVVGAEDVGTEHVLLAMLVNKDLLATRILXLVGFRGQDDGESVRMVDLRKALERHAGFTKDDIKAIYELRNPKKAKSGASFSDMMKPPSTAGDLADFTRDLSQMAVDGEIEPVIGRDKEISRMVQVLSRKTKNNPVLVGDAGVGKTALAYGLAQRIANGNIPYELRDMRVLELDMMSVVAGTRFRGDFEERMNQIIADIEEDGHIILFIDELHTIMGSGSGIDSTLDAANILKPALARGTLRTVGATTQEEYQKHIEKDAALSRRFAKVLVEEPNLEDAYEILLGLKPAYEAFHNVTISDEAVMTAVKVAHRYLTSKNLPDSAIDLLDEASATVQMMIKKNAPSLLTEVDQAILDDDMKSASKALKASYKGKKRKPIAVTEDHIMATLSRLSGIPVEKLTQADSKKYLNLEKELHKRVIGQDDAVTAISRAIRRNQSGIRTGKRPIGSFMFLGPTGVGKTELAKALAEVLFDDESALIRFDMSEYMEKFAASHLNGAPPGYVGYDEGGELTEKVRNKPYSVLLFDEVEKAHPDIFNVLLQVLDDGVLTDSRGRKVDFSNTIIIMTSNLGATALRDDKTVGFGAKDISHDYTAMQKRIMEELKKAYRPEFINRIDEKVVFHSLSQDNMREVVKIMVKPLILALKDKGMDLKFQPSALKHLAEDGYDIEMGARPLRRTIQTQVEDHLSELLLANQVKEGQVIKIGVSKGKLKFDIAKS

SEQ ID NO: 8821 - DNA, 642 bp, Streptococcus agalactiae
atgttgattgttttagctggaaccattggagcaggtaaaagctcccttgcagctgctctaggacaacacctagggacagatgttttctatgaggcggttgataataacccagttttagatctttactatcaagatccccaaaaatatgcttttttactacaaatattctttttaaataaacgattccaatctataaaagaagcctataaggctaacaacaatgttttggatcgttctatttttgaagatgaactattcctcactctaaattataagaatggaaatgtgactaaaacagagctagatatctataaagaacttcttgcaaatatgttggaagaattagaaggtatgcctaagaagagacctgatttgctagtctacattgatgtttcatttgataaaatgttagaacgtattgacaaacgaggacgcagctttgagcaagttgattctaacccagagttatacgactactacaaacaagtccattctgaatatccagaatggtatgaaaattacgacgtttcacctaaaattcggatcgatggtaacaaacttgatttcgtcaaaaatccagaggatcttcaacacgtccttgacactattgattccgaattgcaaaaacttgatttactataa

SEQ ID NO: 8822 - protein, 213 aa, Streptococcus agalactiae; identical to SEQ ID NO: 4540

SEQ ID NO: 8823 - DNA, 615 bp, Streptococcus agalactiae
atgcgtaaatttttccaagatgttattgtagaggtggcttattatttagagattgctttgtcagttattctggcaacagctattattttttttagtttagcactctttcatgatttgtttagcatgttgtctgttgatcaaaatgttgataagttgttccagactttccttgctcgcgccatgacaatagcagtcgggattgagttgatcaaaatgttttcaaaaccttccccagatactttaattgaagtgttattgtttgccttagctcgtcaacttgtaattgaacatggtagtgtttcagattaccttatggggattgcttcagttgctattttgtttgctgttcgtaaatatcttttcacccattttgatgggtcaagcaacattgttttacgtgctaataacaaagtcaaaaaagctaatattttagctagggttcaactaccttgtcaacccaatgaaactttaggagacttacttgttcgtcatttaaatgatgaggaaaaggacgttgctattggttcagtagtctatattaataacgttgcattgcgtgttgatagtatgcacgatggtcttgtgacgcgtgtagaaatcattaggagtctacat

SEQ ID NO: 8824 - protein, 205 aa, Streptococcus agalactiae
MRKFFQDVIVEVAYYLEIALSVILATAIIFFSLALFHDLFSMLSVDQNVDKLFQTFLARAMTIAVGIELIKMFSKPSPDTLIEVLLFALARQLVIEHGSVSDYLMGIASVAILFAVRKYLFTHFDGSSNIVLRANNKVKKANILARVQLPCQPNETLGDLLVRHLNDEEKDVAIGSVVYINNVALRVDSMHDGLVTRVEIIRSLH

SEQ ID NO: 8825 - DNA, 1449 bp, Streptococcus agalactiae
atgctagaagctttacataaattctttgaagtctttggtgcagcaactgttgtacccgctatgatttttattgtcagcctttttctaaaggtcaatccaaggcgagctttctttagcgccttacgagctggtgttggactcacaggctttggttggattatatcagcttttgctcctatggtgactaagtatatccagcagatggttaaaactactggtctccatttaccaattgtagatattggttggcaggctggttctctcaccgccttttcttctgagattggcctctctttctttgtttttggcttgctaattgaattggggcttttcttgcttgggattacccgagtatttgtcccatctaatctttggaataactttggctatatgatttggggtacaatggcctatgcagcaacaggtaattttatattgtctttcgcatttatggtttttgtcttactctattcattagtgatgtcagaagtattggcagatcgatggtcggagtattacggtgttaaaaatgcaacgatcaactcgattcataatattgaaacccttattccagctcttattcttgatcctctttggaacctacttggtgtcaataaggtaaagttgaacccagaatcattaaagactaagttagggatatttggtgagccaatgacacttggttttatacttggtgtgattattggtgtattaggtagtttacgtaaccttgcaagtattgatacttggggaggtatacttggttttgcagttgctcttgcagcggttatgactatttttcctttgattacgggggtatttgctagtgcttttgctcctcttgctgaagcagttgaacgcaataagaaaaaagaaagtcaagctgagcaaggagcactggataaaaaacgttggtttattgcagttgatgacggtgttggttttggtgaaccagcaactattatcgcaggtctcattttagtaccaataatggttgttatttccttgattttacctggaaatgaagctttaccagtcgttgaccttattgctatcccttttatgattgaagctatgatagctgtgtcaaaaggaaatattcttaaagctattttgaatggaatcatatggttttcactaggtctttatgctgctagtgccctaggtccaatctacacagaagctgttaagcattttggaactgctttaccagcaggggtaactttgattatgagctttaatctcctagctcatcctttgacagctctagtcttctttgcttggatatctgggaacccactctatattggtgtgacagttgttatctatcttgctttcttgttcttgcttcgtactcatcgtgaatctatttacgcataccttaaaactatggctgataagaatagcggatatgaaggtagttgtgaaaaaatctttattgctgaagat

SEQ ID NO: 8826 - protein, 483 aa, Streptococcus agalactiae
MLEALHKFFEVFGAATVVPAMIFIVSLFLKVNPRRAFFSALRAGVGLTGFGWIISAFAPMVTKYIQQMVKTTGLHLPIVDIGWQAGSLTAFSSEIGLSFFVFGLLIELGLFLLGITRVFVPSNLWNNFGYMIWGTMAYAATGNFILSFAFMVFVLLYSLVMSEVLADRWSEYYGVKNATINSIHNIETLIPALILDPLWNLLGVNKVKLNPESLKTKLGIFGEPMTLGFILGVIIGVLGSLRNLASIDTWGGILGFAVALAAVMTIFPLITGVFASAFAPLAEAVERNKKKESQAEQGALDKKRWFIAVDDGVGFGEPATIIAGLILVPIMVVISLILPGNEALPVVDLIAIPFMIEAMIAVSKGNILKAILNGIIWFSLGLYAASALGPIYTEAVKHFGTALPAGVTLIMSFNLLAHPLTALVFFAWISGNPLYIGVTVVIYLAFLFLLRTHRESIYAYLKTMADKNSGYEGSCEKIFIAED

SEQ ID NO: 8827 - DNA, 1725 bp, Streptococcus agalactiae; identical to SEQ ID NO: 4635

SEQ ID NO: 8828 - protein, 575 aa, Streptococcus agalactiae
LENLLQHKLPVAPFVESTTNWITKTFSGLFDFIQTIGNALMDWMTKTLLFINPLLFIVLITIAVFFLAKKKWQLPTFTFIGLLFIYNQGLWEQLINTFNLVLVASLISIIIGVPLGIWMAKSDKVKQVVNPILDFMQTMPAFVYLIPAVAFFGIGMVPGVFASVVFALPPTVRFTNLAIREIPLELIEASDSFGSTVKQKLFKVELPLAKNTIMAGINQTMMLALSMVVTGSMIGAPGLGREVLSALQHADIGTGFVSGLSLVILAIVLDRVSQFFNSKPGEKQAKTSKVKKWVGLGALALFILAALGRIVVNMTSGNEAKGQKVKIAYVQWDSEVASTNVIAEVLKSKGYDVELTPLDNAVMWQTVANGNADFTTSAWLPKTHGQYFNKYKNSLDDLGPHVENVKIGLVVPKYMNVNSIEELSNQADKQITGIEPGAGIMKSAKQSLKDYPNLSSWKLLSASTGAMTTTLGKAIKNKDQVVITGWSPHWMFAKYDLKYLKDPKKSFGGEEHINTIARKNLKKDMPKVYKIIDKFKWTKEDMESIMLDMDKGMEPAKAAQKWIKNHKKEVSEWTK

SEQ ID NO: 8829 - DNA, 966 bp, Streptococcus agalactiae; identical to SEQ ID NO: 4669

SEQ ID NO: 8830 - protein, 322 aa, Streptococcus agalactiae
VVSKLSLTTIFALLFSSMLIYATPLIFTSIGGTFSERGGIVNVGLEGIMVIGAFSGVVFNLEFASVFGDATPWISVLVGGLVGLIFSVIHAVATVNFRADHIISGTVLNLMAPSLAVFLIKVLYNKGQTDNIQESFGKFNFPILSDIPFVGDIFFKGTSLVGYIAILFSFLAWFILYKTRFGLRLRSVGEHPQAADTLGINVYLMRYSGVLISGFLGGIGGAVYAQSISVNFAATTILGPGFISLAAMIFGKWNPIGAMLASLFFGLSQSLAVIGSHLPLLSNIPTVYLQIAPYVLTIIVLAAFFGQAVAPKADGINYIKTK

SEQ ID NO: 8831 - DNA, 1059 bp, Streptococcus agalactiae
atgtctaagaaggcgcaaaaaattgcagttcctctgatttcagttgtactaggaatcattctaggagctattattatgctgatatttggttatgatccactttggggttatgagggattgttccaaacagcattcggtagtataaaaaatattggtgaaattttccgtgcaatgggaccattaattttaattgctctaggtttctcagttgccagtcgtgcaggtttctttaatattggacttccagggcaagccttatcaggatggattgccgcaggttggttcgctctttcacacccagatatgccacgtccagcaatgattctttgtactattattattggtatcgttgctgggggaatcactggagctattccaggtattctcagagcataccttggaacaagtgaagttattgtaactattatgatgaactatattgttctttattcaggaaatgctattgtacaacgtgttttcccaaaaagcattatgcgtacaagtgactcgagtgtatatgtttctgccaatgcatcataccagacagattggttatctagtttaacgaataattcacgtatcaatattggtatcttcattgctattattgcagttgtgttagtttggttcctattaaataaaacaacgcttggatttgaaattcgttcagttggtttaaatccaaatgctagtgagtacgctggtatgtctgcaaagcgtacaattattctatcaatgattatttctggagcttttgcaggacttggtggtgttgttgaaggactaggtacatttgagaatgtatttgtacagccatcctcgttagctattggctttgacggtatggcagtaagtctactcgcagcgaatagtccaataggtattttatttgcagcatttctatttggtgttctaagtgttggtgcgcctggtatgaacattgcaggtattccacctgagttaattaaagttgtaacagcttcaatcatcttcttcgtaggtgtccattacattattgagtatgttattaaacctaaaaaacaaatgaaaggtggtaag

SEQ ID NO: 8832 - protein, 353 aa, Streptococcus agalactiae
MSKKAQKIAVPLISVVLGIILGAIIMLIFGYDPLWGYEGLFQTAFGSIKNIGEIFRAMGPLILIALGFSVASRAGFFNIGLPGQALSGWIAAGWFALSHPDMPRPAMILCTIIIGIVAGGITGAIPGILRAYLGTSEVIVTIMMNYIVLYSGNAIVQRVFPKSIMRTSDSSVYVSANASYQTDWLSSLTNNSRINIGIFIAIIAVVLVWFLLNKTTLGFEIRSVGLNPNASEYAGMSAKRTIILSMIISGAFAGLGGVVEGLGTFENVFVQPSSLAIGFDGMAVSLLAANSPIGILFAAFLFGVLSVGAPGMNIAGIPPELIKVVTASIIFFVGVHYIIEYVIKPKKQMKGGK

SEQ ID NO: 8833 - DNA, 828 bp, Streptococcus agalactiae
ttgactcacaaaaatatattattaaccattatatttggattatttatgattatattatcagcatgtggtatgtctaataaggaaatggctggtattgataattgggaacattatcaaaaggaaaagaaaattactattggatttgataatacttttgttcctatgggatttgaaagtcgttctggtgactataccggctttgatattgatttagctaatgctgtttttaaagaatacggtatttcagtgaaatggcagcctattaactgggatatgaaagaaactgaacttaataatggtaatatagaccttatttggaatggttattcaaaaacggcagaacgtgctaaaaaagtcgcttttacaaacccatatatgaataatcatcaagtaattgttactaaaacttcatcacatattaatagtattaaggatatgaaggggaaaaaactaggagcccagtcgggttcatctggttttgatgcttttaacgctaaacctgatattttaaaaaagtttgtaaaaggaaaagaagcagttcaatacgatactttcactcaggctttgattgatttaaaaaataaccgtattgatggtcttttgattgatgaagtttatgctaactattatttaaagcaagaaggaaatataaaagcttattattttgttaaaactgcttatcaaggagaaaattttgtagtaggagctcgtaaagttgatcgtagactaattgaaaagattaacaaagctttcaaacagcttcataataaggggagatttcaaaaaatctcttacaaatggtttggtgaagatgtttatagtaaagaa

SEQ ID NO: 8834 - protein, 276 aa, Streptococcus agalactiae
LTHKNILLTIIFGLFMIILSACGMSNKEMAGIDNWEHYQKEKKITIGFDNTFVPMGFESRSGDYTGFDIDLANAVFKEYGISVKWQPINWDMKETELNNGNIDLIWNGYSKTAERAKKVAFTNPYMNNHQVIVTKTSSHINSIKDMKGKKLGAQSGSSGFDAFNAKPDILKKFVKGKEAVQYDTFTQALIDLKNNRIDGLLIDEVYANYYLKQEGNIKAYYFVKTAYQGENFVVGARKVDRRLIEKINKAFKQLHNKGRFQKISYKWFGEDVYSKE

SEQ ID NO: 8835 - DNA, 1347 bp, Streptococcus agalactiae
atgagaataattgttgtcggcggaggtaaagtcggaaccgcactttgtcgctcacttgttgctgaaaagcacgatgttgttttaattgagaaaaaagaaaacgtccttaaacgtgtcactaaacagcatgatattatgggaattgttgggaatggagcaaactataaaattttagaacaagccgaagtcaaaaattgtgatatttttatcgctatcactgatcgagatgaagttaatatgatttcagcagttcttgccaaaaaaatgggggcaaaagagactgttgttcgcatgcgtaatcctgagtattctaatccttacttcaaagataaaaactttcttggcttctcttcagttgtcaaccctgaattgttagcagcacaatatatcgctaataccatagaatttccaaatgcaacttcagttgaacacttcgccaacgggcgtgtgatgttaatggaatttaaaattttagaaggaaataaactctgtcatacttcaatgagtcaaattcgtaaaaaatttggtaatattgttatttgcgcaattgaacgcgatggcaaattgattattcctgatggcgatgcaactatccaagtcaaagataaaatctttgtaactggaaatcgtattgaaatgatacttttccataattacgttaaaaataaagttgtcaaaaacttgatggttatcggtgcaggacgcatcgcctactacctactcaatatccttaaaaataccaatacacacgtcaaactagttgaactcaaccaagagcaagctgaatattttagtcaagaatttcccaatgttcctgtcgttcatggggatggtactgctaaaaatattttgttagaagaaagcgttacaagttttgacgcagttgctactttgactggtgttgatgaagaaaatatcattacctcaatgttcttagaaagtatcggtatccctaaaaacattaccaaagttaatcgaactagcctactagaaatcattgacgataaacaactatcaagcattatcacacccaagcgtattgccgtagaccatgtgatgcactttgtacgcgggcgtgtaaatgctcaggattccaacctagaagctatgcatcatattgctaacgatcgcattgaaaccttacaatttgaaataaaagaaactagcaaattagcaaatcgtagccttgcatctttaaaattaaagcaaaatattttaattgcagcgattattcgcaataataaaacgattttcccaactggtgaggatgttttaacagtgggtgatcgtatcgttgttatcaccttattaaaaaatattactagaactagtgatatgttagcgagg

SEQ ID NO: 8836 - protein, 449 aa, Streptococcus agalactiae
MRIIVVGGGKVGTALCRSLVAEKHDVVLIEKKENVLKRVTKQHDIMGIVGNGANYKILEQAEVKNCDIFIAITDRDEVNMISAVLAKKMGAKETVVRMRNPEYSNPYFKDKNFLGFSSVVNPELLAAQYIANTIEFPNATSVEHFANGRVMLMEFKILEGNKLCHTSMSQIRKKFGNIVICAIERDGKLIIPDGDATIQVKDKIFVTGNRIEMILFHNYVKNKVVKNLMVIGAGRIAYYLLNILKNTNTHVKLVELNQEQAEYFSQEFPNVPVVHGDGTAKNILLEESVTSFDAVATLTGVDEENIITSMFLESIGIPKNITKVNRTSLLEIIDDKQLSSIITPKRIAVDHVMHFVRGRVNAQDSNLEAMHHIANDRIETLQFEIKETSKLANRSLASLKLKQNILIAAIIRNNKTIFPTGEDVLTVGDRIVVITLLKNITRTSDMLAR

SEQ ID NO: 8837 - DNA, 540 bp, Streptococcus agalactiae
atgtcaaaaaaaacaacacaaatggtttcttatacttctattttagtagcttttgcaatcatgattcctataatcatgcctgctaaaataattattgggcctgcttctttcaccttagcaagccatgtacctttatttttaagtatttttatatctgttccagttgcaatattggtagctttagggacaggacttggatttctactagctggttttccgattgtaatcgttcttagagctttatcacatatcggatttgcattaattgcggctttcttgattaagtcaaagccctctttattgatgagtaaatggcaaacattgttatttgctgtagctattaacataattcatggtctgctcgaatttattactgtttatataatcacaatgacttctaacagtagttcaacttatttatggtcactattttctttgataggactaggctctttgctacatggattggtagatttttacatagctctcttcatttggaaatggatgacacaaaagttggggaaaacacttaggataaga

SEQ ID NO: 8838 - protein, 180 aa, Streptococcus agalactiae
MSKKTTQMVSYTSILVAFAIMIPIIMPAKIIIGPASFTLASHVPLFLSIFISVPVAILVALGTGLGFLLAGFPIVIVLRALSHIGFALIAAFLIKSKPSLLMSKWQTLLFAVAINIIHGLLEFITVYIITMTSNSSSTYLWSLFSLIGLGSLLHGLVDFYIALFIWKWMTQKLGKTLRIR

SEQ ID NO: 8839 - DNA, 687 bp, Streptococcus agalactiae; identical to SEQ ID NO: 4779

SEQ ID NO: 8840 - protein, 229 aa, Streptococcus agalactiae
LLQKKYRKSSYLIEGWHLFEEAEKYGAQFLNIFVTETAIDRLRKPERAIVVTDDVLKELTDSQTPQGIVAEIAFQETRWTDIKKGRFLVLEDVQDPGNLGTMVRTADAANFDAVFLSQKSADLYNQKTLRSMQGSHFHLPVFRVEIEQFVNFCKAEGITMIATTLSEQSVNYKNLPKYDYFALIMGNEGQGISKTMTEEADVLAHIEMPGQAESLNVAVAAGVVIFSLI

SEQ ID NO: 8841 - DNA, 930 bp, Streptococcus agalactiae; identical to SEQ ID NO: 4787

SEQ ID NO: 8842 - protein, 310 aa, Streptococcus agalactiae
LKKTLKRILFSSLSLSMLLLLTGCVSVDKAGKPYGVIWNTLGVPMANLITYFAQHQGLGFGVAIIIVTVIVRVVILPLGLYQSWKASYQAEKMAYFKPLFEPINERLRNAKTQEEKLAAQTELMTAQRENGLSMFGGIGCLPLLIQMPFFSAIFFAARYTPGVSSATFLGLNLGQKSLTLTVIIAILYFVQSWLSMQGVPDEQRQQMKTMMYLMPIMMVFMSISLPASVALYWFIGGIFSIIQQLVTTYVLKPKLRRKVEEEYTKNPPKAYKANNARKDVTNSTKATESNQAIITSKKTNRNAGKQKRRG

SEQ ID NO: 8843 - DNA, 1800 bp, Streptococcus agalactiae; identical to SEQ ID NO: 4803

SEQ ID NO: 8844 - protein, 600 aa, Streptococcus agalactiae
LTEFNDDQHSNHDQKSFKEQILAELEEANRLRKLREEELYQKEQEAKEAARRTAQLMADYEAQRLKDEREARAKALETKQRLEEQEKARIEAKLLAEAAREEERRQAEQALASQEEQVINQGMEPSRELDSGSKSSEFRTTENVPDIDLKADKTDVATAVPNQETEEIFLVRATDIPTEGENVKLGEISELEPVAKEPIRVEDLSKEEEGIALSAKNKHNKRERRQKADNVAKRIARILISIIILVLLLTAFVGYRFVDSAIKPVDSNSNKFVQVEIPIGSGNKLIGQILEKAGVIKSATVFNYYSKFKNYSNFQSGYYNLKKSMTLDQIAAELEKGGTAEPTKPALGKILITEGYTIKQIAKAIESNKIDTKTTSTPYKADDFLKLVQDETFIKKMVAKYPNLLGSLPDKSKAIYQLEGYLFPATYNYYKDTTLEGLVEDMISTMNTKMAPYYNTIKAKNMSVNDVLTLSSLVEKEGSTDEDRRKIASVFYNRLSAGQALQSNIAILYAMGKLGDKTSLAEDAQINTSIKSPYNIYTNTGLMPGPVDSPSISAIEATIKPASTDYLYFVADVKTGNVYYAKDFETHKANVEKYINSQIN

SEQ ID NO: 8845 - DNA, 1503 bp, Streptococcus agalactiae; identical to SEQ ID NO: 4843

SEQ ID NO: 8846 - protein, 501 aa, Streptococcus agalactiae
VKNKKDQFIGVKQPLSKKLSQLVFILFFSLFTVFSVLVYTSATRYVLHREKINVGRSLEKTRVRLSQANSSLTSDDILEILYNQVFADDIYPHKRQNGIVRTGESIDSILYVNQEMTLYDVNRKPVFSTLRTGMPTIGKSMGKVIISKVADMEGFVGTKAIYSQKTGQLLGYVQIFYNLGRYYSMRQNIIVFLIMMEVLGTVLALVVINSATKRIVRPVKNLHDLMHQISENPSNLEIRSKVRSEDEIGELSRIFDGMLDQLEDYTRRQSQFISDVSHELRTPVAVVKGHIGLLQRWGKDDPEILEESLAAAYHEADRMSLMINDMLNMIRVQGSLELHQDEVTDLSSSISVVIENFRILREDFQFIFENNISDIVWGKIYKIHFEQALMILIDNAIKYSPSYKEVSVVLSVDNDFATVVVKDKGEGISDEDIEFIFDRFYRTDKSRNRESTQAGLGIGLSVFKQIMDAYHLKVDIKSELNQGTEFIVRIPIKKFEETKEI

SEQ ID NO: 8847 - DNA, 888 bp, Streptococcus agalactiae; identical to SEQ ID NO: 4851

SEQ ID NO: 8848 - protein, 296 aa, Streptococcus agalactiae
LLYQQIASNKRKTVVLLIVFFCLLAAIGAAVGYLVLGSYQFGLVLALIIGVIYAVSMIFQSTNVVMSMNNAREVTEDEAPNYFHIVEDMAMIAQIPMPRVFIVEDDSLNAFATGSKPENAAVAATTGLLAVMNREELEGVIGHEVSHIRNYDIRISTIAVALASAVTLISSIGSRMLFYGGGRRRDDDREDGGNILVLIFSILSLILAPLAASLVQLAISRQREYLADASSVELTRNPQGMISALEKLDRSEPMGHPVDDASAALYINDPTKKEGLKSLFYTHPPIADRIERLRHM

SEQ ID NO: 8849 - DNA, 555 bp, Streptococcus agalactiae
atgggaactatgattttaatagcaattattgctttgtttgttatttggttgattgttgcttataacagtttagttagaagtcgcatgcatactaaagaatcatggagtcaaatagacgttcaattgaaacgtcgtaacgatttaattccaaacctaatcgaaactgttaaaggctatgctgcgtacgaagggaaaacacttgagaagattgcagaactgcgtgctcaagttgctaaagctaacacacctgctgaagcaatgacagcaagtaatgagctaacaagacagctttcaagtattttagcggttgctgaaaattacccagatttaaaagccaacaatagctttgttaaacttcaagaagaactaactaatacggaaaataaaatttcttattcacgtcagttatataacacaacaacatccaattataatgtgaaattagaaactttcccaagtaatattgttggaaaactatttgggttcaaaccaagccaattcttagaaactcctgaagaagaaaaagaagtgccaaaagtttcctttgacttttaa

SEQ ID NO: 8850 - protein, 184 aa, Streptococcus agalactiae; identical to SEQ ID NO: 4856

SEQ ID NO: 8851 - DNA, 1389 bp, Streptococcus agalactiae; identical to SEQ ID NO: 4865

SEQ ID NO: 8852 - protein, 463 aa, Streptococcus agalactiae
LGASMKHFFDYKTMSVARKLSISFIAVILLGSILLSLPIFQYANAPKTHYIDHLFTTVSMVCVTGLSVFPISKVYNGWGQIVAILLMQTGGLGLVTLMSLSYYTLRRKMSLNDQTLLQSAITYNSSTDLKKYLYMIFKVTLTLEVLAASILAIDFIPRFGLGHGIFNSIFLAVSAFCNAGFDNLEATSLAQFKLNPLVNIIVCFLIISGGLGFAVWKDLIEATIQTSHKGPKLIKTFPKRLSNHSKLVLKTTTIILLTGTLLSWLLEFGNFRTIANLSLPKQLMVSFFQTVTMRTAGFSTIDYTQTDFATNLVYIIQMLIGGAPGGTAGGFKVTVIAILLLLFKAELSGQSQVTFHYRTIPSSIIKQTLSILTFFFIILISGYLLLLELNPHIDPFSLFFEASSALATVGVTMNTTNQLTLGGRIVIMFLMFIGRVGPITVLLSILQKKEKEIHYAETEIILG

SEQ ID NO: 8853 - DNA, 669 bp, Streptococcus agalactiae
atgaaaacaaaaattattggtgtacttggtctaggaatatttggacaaacactcgcacaagaactaagtaactttgaacaagatgttattgctattgacagcaatcctgaaaatgtacaagctgtcgccgaagttgttacaaaagcagctatcggagacattactgatttagctttcctaaaacacatcgggatcagtgactgtgatactgttattattgctacaggaaacagtttagagagctcagtattggccgtaatgcactgtaaaaagttaggcgtcccacaagttattgctaaagctcgaaaccttgtatmcgaagaagtactttatgaaattggtgctgatttggttatctctccggagcgagaatctgggcaaaatgttgctgcaaacctcatgagaaataaaattacagatgtcttccagattgaatctgatatttctgtcattgaatttaaaattcccaaatcatgggtagggaaaactgtcgaacaattaaatatccgtcacaagtttgatcttaacctcataggtatcagaaaagcaaaaaacaaacctgtcgataccgaagttccaatcaatagtccacttgaagaargtattattctagtggctatcgctaactcagatgccttccaacgctatgactatttaagatacttttac

SEQ ID NO: 8854 - protein, 223 aa, Streptococcus agalactiae
  MISC_FEATURE (1)..(223): Xaa = Any Amino Acid
MKTKIIGVLGLGIFGQTLAQELSNFEQDVIAIDSNPENVQAVAEVVTKAAIGDITDLAFLKHIGISDCDTVIIATGNSLESSVLAVMHCKKLGVPQVIAKARNLVXEEVLYEIGADLVISPERESGQNVAANLMRNKITDVFQIESDISVIEFKIPKSWVGKTVEQLNIRHKFDLNLIGIRKAKNKPVDTEVPINSPLEEXIILVAIANSDAFQRYDYLRYFY

SEQ ID NO: 8855 - DNA, 828 bp, Streptococcus agalactiae
atggctaaacaattaattggttatcaagagggttatggctttctatacaggctatcaggtgccagtaagttactattttttattttagtttctgttgcttgcatgaccacttatgatacaagatttttaattgttgtttcattgggatcgctagtcttatttagattagcaaaaatcaaatggcaacaggtgtcctttgttatgactttagttgttgtattcgctgttttaaatattataatggtctatctttttgctccccattatggtgataagatttatggtagttcttctttattgttaaaaggaattggcccatatgatgtgactagccaagagttgttttacctctttaatctgattttaaaatacttttgtacagtgcctttagctcttttgtttttgatgacaactaatcctagtcagttcgcatcaagtttaaatcaattaggtttatcatataaaatagcttatgctgttagtttgacccttagatatatacctgatgttcaagaagaattttatacaatacgtcgagcacaagaggcaagaggaatagaattatcaaaaaaatcgaacttagtagcacgcattaaggggaatttgcagattgtcacaccattaatttttagctctctagaacgtattgatacagtagcaactgctatggaacttcgacgatttggtaaaaataaaagacgtacttggtactctaagcaatctttggaaaaaagtgacattgtcttaatcatacttgctctagctagtctgtttgtaagcctttatttaattcaccttaatcatggacgtttctataacccatggcaa

SEQ ID NO: 8856 - protein, 276 aa, Streptococcus agalactiae
MAKQLIGYQEGYGFLYRLSGASKLLFFILVSVACMTTYDTRFLIVVSLGSLVLFRLAKIKWQQVSFVMTLVVVFAVLNIIMVYLFAPHYGDKIYGSSSLLLKGIGPYDVTSQELFYLFNLILKYFCTVPLALLFLMTTNPSQFASSLNQLGLSYKIAYAVSLTLRYIPDVQEEFYTIRRAQEARGIELSKKSNLVARIKGNLQIVTPLIFSSLERIDTVATAMELRRFGKNKRRTWYSKQSLEKSDIVLIILALASLFVSLYLIHLNHGRFYNPWQ

SEQ ID NO: 8857 - DNA, 612 bp, Streptococcus agalactiae
ttgaaatatgataaaatagaacagattgtaagtgactgtttaagcttgtttttcagagaggtttttatgaatacaaacacaataaaaaaggttgtagcgactggaattggagctgcactttttatcattataggtatgctagttaatataccaacaccaattccaaatactaatattcaattgcagtatgcagttttagcattatttgcagttatttatggaccaggagttggtttttttactggttttatcggacacgcattgaaagattcgattcaatatggttctccgtggtggacttgggttttagttagtggtcttttaggtttgatgataggcttttttgctaaaaaattagctattcaattatctggcatgactaagaaggatttgcttctatttaatgtagttcaagttattgctaaccttataggttggtctgtcgttgcaccgtatggtgatattttcttttatagcgaacctgcaagcaaagtttttgcacaaggtttcttatcaagccttgtgaattccattactattggagtaggtggtacgcttttgttgctagcatacgctaaatcacgaccacaaaaaggtagtttatccaaagat

SEQ ID NO: 8858 - protein, 204 aa, Streptococcus agalactiae
LKYDKIEQIVSDCLSLFFREVFMNTNTIKKVVATGIGAALFIIIGMLVNIPTPIPNTNIQLQYAVLALFAVIYGPGVGFFTGFIGHALKDSIQYGSPWWTWVLVSGLLGLMIGFFAKKLAIQLSGMTKKDLLLFNVVQVIANLIGWSVVAPYGDIFFYSEPASKVFAQGFLSSLVNSITIGVGGTLLLLAYAKSRPQKGSLSKD

SEQ ID NO: 8859 - DNA, 498 bp, Streptococcus agalactiae
atgaacataaaacaattaaagtctaaaacaatgcttggaacagtggctttggtgtccgctttttcatttgcttcaacaaatgcagatgcgaatacatataactatgcagtagatgtagactacctagcaagtgcggaggaaattgctcaagcacatccagctagtaatacgtttccactaggtcaatgcacatggggtgtaaaggagatggcaacatgggcaggtaactggtggggaaacggtggtgattgggctgcgagcgccgcatcagctgattatacagtagggacacaaccgcgcgtgggttctatcgtatgttggactgatggtagttatggacatgtggcttatgttacagctgtagatcctgtcactaataaaattcaggttttagaatctaattatgcaggtcatcaatggattgataattatcgtggttggtttgatccacaaaatacagtaacaccaggggtagttagctacatttatccgaattaa

SEQ ID NO: 8860 - protein, 165 aa, Streptococcus agalactiae
MNIKQLKSKTMLGTVALVSAFSFASTNADANTYNYAVDVDYLASAEEIAQAHPASNTFPLGQCTWGVKEMATWAGNWWGNGGDWAASAASADYTVGTQPRVGSIVCWTDGSYGHVAYVTAVDPVTNKIQVLESNYAGHQWIDNYRGWFDPQNTVTPGVVSYIYPN

SEQ ID NO: 8861 - DNA, 1764 bp, Streptococcus agalactiae
  misc_feature (1)..(1764): n = a, c, g, or t
atgctatgggaggaaatgatgtttaaaatccctttgtttaaagaattaaagacagatcaatggataaaaccatttttcaaacaatataaagtttccttagtaattgctcttttccttggttttatgactttcttttctgccagtgctcttatgtttaattcgggctatctgattagtaagtcagcttcactaccgagtaatattcttctagtatatgttccaattgtactaacacgtgcttttggcattggacgtcctgtttttcgttatatagaacgcctaacgagtcacaattgggtattacgaatgacttcacagctgcgcttgaagctttaccattccttagaaagcaatgctatctttatgaagcgtgattttcgtttaggagatgttatggggcttttagcggaggatattaattatttgcaaaatttgtatcttaggacaatatttccaacgattatagcgtggatattatatagctttattattattgcaacaggcttcttttctctatggtttgctttaatgatgttgctttatttagctattatgatttttctttttccactttggtcgattttagctaatggtgctcgtcagactcgtgaaaaagaattaaaaaatcatctttatactgatttgacggataatgtcttaggtatttcagactggatttttagtcaacgtggtcaagagtacgtcgccttgcatgagcgttcggaaagtgaactcatggctgttcagaaaaaaattcgttcctttgataatcgtagagctcttattgtggaattagtttttggctttctagctattttggttattatttgggctagtaatcagtttattggtcacagaggtggcgaagctaactggattgcagcatttgttctaacagtatttcccttgtcagaggcatttgctggtttgtctgctgctgctcaagaaacaaataaatattctgattcaattcatcgtcttaatgaattatcagaaacgtattttgaaacaactcaaaatcagttgcctaataagccatacgatttttccgtcaagaatttaagtttccagtataagccacaagagaaatgggttttgcatcatttagatttggatattaaagaaggagaaaaaattgctattttagggcgtagtggttctggcaagagtaccttagccagtctacttcgtggcgacttgaaagcaagtcaaggggagattaccctaggcgatgctgatgtttcaatagttggtgattgcatttctaactatattggagtgatacaacaagcgccctacntttttaatacaaccctgctaaatacatttcgcattggaaaccaagatgctagtgaagaagatgtatggaaagttcttgaacgagttggattgaaagagatggtcactgatttatcagatggtctctatacaatggttgatgaagctggacttaggttttcaggtggcgaaaggcatagaattgctttggctagaatcttactaaaagatgtcccaattgttatcttagatgagccaactgttggacttgatcctattactgaacaagccttactaagggtatttatgaaagaattggaaggtaagaccttagtttggattacacatcacttaaaaggtattgaacatgctgatcgtatcttatttatagaaaatgggcaattagagttggaaggttctcctcaagaattgtctcaaagtagccaacgttaccgtcagctgaaagcctctgatgatggtgatcta

SEQ ID NO: 8862 - protein, 588 aa, Streptococcus agalactiae
  MISC_FEATURE (1)..(588): Xaa = Any Amino Acid
MLWEEMMFKIPLFKELKTDQWIKPFFKQYKVSLVIALFLGFMTFFSASALMFNSGYLISKSASLPSNILLVYVPIVLTRAFGIGRPVFRYIERLTSHNWVLRMTSQLRLKLYHSLESNAIFMKRDFRLGDVMGLLAEDINYLQNLYLRTIFPTIIAWILYSFIIIATGFFSLWFALMMLLYLAIMIFLFPLWSILANGARQTREKELKNHLYTDLTDNVLGISDWIFSQRGQEYVALHERSESELMAVQKKIRSFDNRRALIVELVFGFLAILVIIWASNQFIGHRGGEANWIAAFVLTVFPLSEAFAGLSAAAQETNKYSDSIHRLNELSETYFETTQNQLPNKPYDFSVKNLSFQYKPQEKWVLHHLDLDIKEGEKIAILGRSGSGKSTLASLLRGDLKASQGEITLGDADVSIVGDCISNYIGVIQQAPYXFNTTLLNTFRIGNQDASEEDVWKVLERVGLKEMVTDLSDGLYTMVDEAGLRFSGGERHRIALARILLKDVPIVILDEPTVGLDPITEQALLRVFMKELEGKTLVWITHHLKGIEHADRILFIENGQLELEGSPQELSQSSQRYRQLKASDDGDL

SEQ ID NO: 8863 - DNA, 1200 bp, Streptococcus agalactiae; identical to SEQ ID NO: 4997

SEQ ID NO: 8864 - protein, 400 aa, Streptococcus agalactiae
LEDKLFNKHFIGITILNFIVYMVYYLFTVIIAFIATKELGVSTSQAGLATGIYIVGTLIARLIFGKQLEVLGRKLVLRGGAIFYLLTTLAYFYMPSIGVMYLVRFLNGFGYGVVSTATNTIVTAYIPADKRGEGINFYGLSTSLAAAIGPFVGTFMLDNLHINFKMVIVLCSILIAIVVLGAFVFPVKNITLNPEQLAKSKSWTIDSFIEKKAIFITIIAFLMGISYASVLGFQKLYTTEINLMTVGAYFFIVYALVITLTRPSMGRLMDAKGDKWVLYPSYLFLTLGLALLGSAMGSVTYLLSGALIGFGYGTFMSCGQAASIKGVEEHRFNTAMSTYMIGLDLGLGAGPYILGLVKDGFLGAGVQSFRELFWIAAIIPVVCGILYFLKSSRQVETKTI

SEQ ID NO: 8865 - DNA, 846 bp, Streptococcus agalactiae; identical to SEQ ID NO: 5003

SEQ ID NO: 8866 - protein, 282 aa, Streptococcus agalactiae
LIEITWTVKYITEFIATAFLIILGNGAVANVDLKGTKGNNSGWIIIAIGYGLGVMMPALMFGNVSGNHINPAFTLGLAFSGLFPWAHVGQYILAQILGAMFGQLVVVMVYQPYFVKTENPNHVLGSFSTISALDDGQKSSRKAAYINGFLNEFVGSFVLFFGALALTKNYFGVELVGKLVQAGYDQTTAATRISPYVTGSLAVAHLGIGFLVMTLVASLGGPTGPALNPARDLGPRIVHRLLPKQILGQAKEDSKWWYAWVPVLAPIVASILAVALFKLLYL

SEQ ID NO: 8867 - DNA, 957 bp, Streptococcus agalactiae; identical to SEQ ID NO: 5007

SEQ ID NO: 8868 - protein, 319 aa, Streptococcus agalactiae
LCSQYHKVKLTVSLFFCRLDIMNETLLLHGIQLILIIAMIITFYQIVRHIRSQKINPFKRFFTGLWIGFVTDALDTLGIGSFATTTTFFKLTKLVEDDRKIPATMTAAHVLPVLLQSLCFIFVVKVEALTLITMAGAAFIGAFVGAKMTKNWHAPTVQRILGTLLITAAIIMLYRMITNPGAGISDSVHGLHGIWLFVGIGFNFIIGVLMTMGLGNYAPELIFFSLMGLSPAVAMPVMMLDAAMIMTASSTQFIKSGRVNWNGFAGLVTGGILGVIVAVLFLTNLDLNSLKTLVVGIVLFTGAMLIRSSFKKTMPKSHH

SEQ ID NO: 8869 - DNA, 1368 bp, Streptococcus agalactiae
atgaataaaaaactgatctcacttgatggtatgtccctaaaagaggtctttcaaaaaggtgatttagcaactaaactatcattcttaattatgggacttgctaacctcaaaaataaacaaattgtcaagggacttttatttttaatcagtgaaattctgtttttaattacctttgtttaccaagttatcccagctgtaaaaggtcttatttccttagggacccaagaacaaggtatgacaactaaaactgtggatggtattaaaatccaagttgcgacacaaggtgataactctatgttaatgctaatttttggattagcttcgcttatcttctgktgcgtatttgcctatatttactggtcaaacattwaaagcgcagcacatttattgaccttgaaagaagaaggaagagaaattccatccttcaaaaaagatattaaaagcttgacagatggacgcttccatatgactttaatgtctatycctttaataggggtgcttctatttacaatccttccgttagtttatatgatttgtttggcatttactaactatgatcataaccacttaccgccaaaaagtttatttgactgggttggttttgctaacttcggtaatatctttagcgggcgtatggccagtactttcttccctgttctatcttggacattaatttgggctgttttcgctactgtaacgaatttcttctttggtattattcttgccttactaattaatacaaaaggtttgaaattcaaaaagatgtggcgtactatttttgttattaccatggctgtccctcaatttatctctctcttaatcatgagaaacctcttaagtgacgctggaccggttaacgccttgttaataaaatggggacttatttcttcagcacatccccttccattcctttctgatccggtctgggcgaaattctcaatcatctttgttaatatgtgggttggtattcctgtaacaatgcttgttgctactggtatcatcatgaatttacctgcagaacaaattgaagctgctgaaattgatggggcgaataagttccaagtctttcaatcaattactttcccacaaattttgttgattatgactcctactttaattcaacaatttatcggaaatattaacaacttcaacgttatctacctactcactcaaggtggaccaacaaactcaacatactaccaagcaggtagcaccgatttacttgtcacttggctatacaatttgacagtaactgctgcagattataacttagcatctgttgttggtatcttaatctttattctttcagcagtatttagtttactagcttacacaagaacaaattcttacaaggaaggggcagctaaa

SEQ ID NO: 8870 - protein, 456 aa, Streptococcus agalactiae
  MISC_FEATURE (1)..(456): Xaa = Any Amino Acid
MNKKLISLDGMSLKEVFQKGDLATKLSFLIMGLANLKNKQIVKGLLFLISEILFLITFVYQVIPAVKGLISLGTQEQGMTTKTVDGIKIQVATQGDNSMLMLIFGLASLIFXCVFAYIYWSNIXSAAHLLTLKEEGREIPSFKKDIKSLTDGRFHMTLMSIPLIGVLLFTILPLVYMICLAFTNYDHNHLPPKSLFDWVGFANFGNIFSGRMASTFFPVLSWTLIWAVFATVTNFFFGIILALLINTKGLKFKKMWRTIFVITMAVPQFISLLIMRNLLSDAGPVNALLIKWGLISSAHPLPFLSDPVWAKFSIIFVNMWVGIPVTMLVATGIIMNLPAEQIEAAEIDGANKFQVFQSITFPQILLIMTPTLIQQFIGNINNFNVIYLLTQGGPTNSTYYQAGSTDLLVTWLYNLTVTAADYNLASVVGILIFILSAVFSLLAYTRTNSYKEGAAK

SEQ ID NO: 8871 - DNA, 756 bp, Streptococcus agalactiae
ttggcagttagttttyatgaagtatttggttgggattctgctttttttattatgattatcaatattccattgctccttctttgctactttggcttaggtaaacaaacctttttaaaaactgtctatggttcttggatttttcctgtttttattaagttaacacaaagtgtaccaactttgacccacaacccactcctcgcagcactttttggaggtgttattgtaggatgtggtttggggattgttttttggagcgactcttcaactggtggaacggggattatcattcaattcttaggaaaatatactcctataagccttggacaaggggttatattgattgatggacttgttacaattgttggtttcctagcttttgacagtgatacggttatgttttctattattgggttgataactattagttatattattaatgctatccaaactggatttacaaccttaagcactgtcttaatcgtttctcaagagcaccaaaaaattaagacatatatcaatactgtcgcagatagaggagtaacagaaattcccgttaaagggggatattctggaactaatcaaatcatgcttatgacaactattgctggttatgagtttgctaaattacaagaggcaatagcagaaattgacgaaacagccttcataacagtaactccaacatcacaagcttctggacgtggatttagtcttcaaaaaaatcatggacgtcttgatgaagacattcttatgccaatg

SEQ ID NO: 8872 - protein, 252 aa, Streptococcus agalactiae
  MISC_FEATURE (1)..(252): Xaa = Any Amino Acid
LAVSFXEVFGWDSAFFIMIINIPLLLLCYFGLGKQTFLKTVYGSWIFPVFIKLTQSVPTLTHNPLLAALFGGVIVGCGLGIVFWSDSSTGGTGIIIQFLGKYTPISLGQGVILIDGLVTIVGFLAFDSDTVMFSIIGLITISYIINAIQTGFTTLSTVLIVSQEHQKIKTYINTVADRGVTEIPVKGGYSGTNQIMLMTTIAGYEFAKLQEAIAEIDETAFITVTPTSQASGRGFSLQKNHGRLDEDILMPM

SEQ ID NO: 8873 - DNA, 1227 bp, Streptococcus agalactiae
gtgaaaaaaaaattagtctcatcacttctaaagtgttctctaatcattattgttagctttgctggtggagcatttgctagttttgtcatgaatcataatgacaatattccaaatggtggtgtcactaaaactagtaaagtaaattataataacataacgcctacaacaaaagctgttaaaaaggtacaaaatagtgttgtttctgttatcaattataaacaacaagagagtcgttctgacctatcagacttctatagtcatttttttggtaatcaggggggcaacactgataagggcttacaagtttacggtgaaggctctggagtcatctataaaaaagatggtaaaaatgcctatgttgtcactaataaccacgtcattgatggggctaaacaaattgaaattcaactagctgatggctcaaaagcagttgggaaacttgttgggtcagatacctactctgatttagccgtcgtcaaaattccatcagataaggtttcaaatattgcagaatttgctgattcatcaaaactcaacattggtgaaactgctatagcgatcggaagccctcttggaactgagtatgcaaattctgtaactcaaggtattgtatctagtttaaaaagaactgtaacaatgactaatgaagaaggacaaacagtttctacaaatgctatccagactgatgctgctatcaatcctggtaattcaggtggagcacttatcaatattgaaggacaggttattggaattaattctagtaaaatttcttctacatcaaatcaaacctcaggacaatcgtcaggaaatagcgttgaaggtatgggatttgccattccttcaaatgatgttgttaagattatcaatcaacttgagagtaacggacaagtagagagacctgctctaggtatttctatggctggattaagtaatttaccatccgatgttattagtaaactgaaaatcccaagtaatgttactaatggtattgtagtagcatctatccaatctggcatgccagctcaaggcaaactaaagaaatacgatgtcattactaaagttgacgataaagaagtagtatctccaagtgatttacaaagtttactctatggccaccaggtaggggattccataacagtaaccttttatcgtggtgaaaataaacaaacagtcactataaaacttactaaaactagtaaagatttagctaaacaacgagcaaataac

SEQ ID NO: 8874 - protein, 409 aa, Streptococcus agalactiae
VKKKLVSSLLKCSLIIIVSFAGGAFASFVMNHNDNIPNGGVTKTSKVNYNNITPTTKAVKKVQNSVVSVINYKQQESRSDLSDFYSHFFGNQGGNTDKGLQVYGEGSGVIYKKDGKNAYVVTNNHVIDGAKQIEIQLADGSKAVGKLVGSDTYSDLAVVKIPSDKVSNIAEFADSSKLNIGETAIAIGSPLGTEYANSVTQGIVSSLKRTVTMTNEEGQTVSTNAIQTDAAINPGNSGGALINIEGQVIGINSSKISSTSNQTSGQSSGNSVEGMGFAIPSNDVVKIINQLESNGQVERPALGISMAGLSNLPSDVISKLKIPSNVTNGIVVASIQSGMPAQGKLKKYDVITKVDDKEVVSPSDLQSLLYGHQVGDSITVTFYRGENKQTVTIKLTKTSKDLAKQRANN

SEQ ID NO: 8875 - DNA, 1113 bp, Streptococcus agalactiae
atggctttaacagcaggtattgtaggcttaccaaatgttggtaaatcaactttatttaacgcaattacaaaagcaggagcagaagctgctaattatccttttgcgactattgatcccaatgttggtatggtagaagtaccagatgagcgtctacaaaaattgacagaattgattacgcctaaaaaaacagttccgacaacctttgaatttactgatattgcaggtattgttaaaggtgcttcgaagggggaaggtctaggtaataaatttttagctaatattcgtgaagtggatgctattgttcatgtggtacgtgcgtttgatgatgaaaatgttatgcgtgaacaaggtcgtgaggatgctttcgttgatcctatagcagatattgatactattaatcttgaattaatcttagctgatttagagtcaatcaataaacgttatgcgcgtgttgaaaaaatggcacgaactcaaaaagataaagaatcagtagcagagttcaatgttttacaaaagattaaacctgttttggaagatgggaaatcagctcgtaccattgagtttacagaagaggaagcaaaagttgttaaaggtctttttttattaacaactaaacctgttttatatgttgctaatgttgatgaggacaaagtagctgatcctgatgatatcgactatgttaatcaaattcgtgcatttgcagaaacagagaatgcagaagtagtcgtgatttctgctcgagctgaagaagaaatatctgaacttgatgatgaagataagttagaatttttagaagctattggattaacagaatctggtgttgataaattaacacgagctgcttatcatcttttaggccttggaacttactttactgctggtgaaaaagaggttcgcgcttggacgtttaagcgtggtataaaagctccacaagctgctagtattatccattcagattttgaaagaggttttattcgtgcagtaacgatgtcatatgatgaccttattcaatatggatctgaaaaagcagtaaaagaagctggccggttacgtgaagaaggaaaagagtatattgttcaagatggcgatatcatggaattccgtttcaatgtc

SEQ ID NO: 8876 - protein, 371 aa, Streptococcus agalactiae
MALTAGIVGLPNVGKSTLFNAITKAGAEAANYPFATIDPNVGMVEVPDERLQKLTELITPKKTVPTTFEFTDIAGIVKGASKGEGLGNKFLANIREVDAIVHVVRAFDDENVMREQGREDAFVDPIADIDTINLELILADLESINKRYARVEKMARTQKDKESVAEFNVLQKIKPVLEDGKSARTIEFTEEEAKVVKGLFLLTTKPVLYVANVDEDKVADPDDIDYVNQIRAFAETENAEVVVISARAEEEISELDDEDKLEFLEAIGLTESGVDKLTRAAYHLLGLGTYFTAGEKEVRAWTFKRGIKAPQAASIIHSDFERGFIRAVTMSYDDLIQYGSEKAVKEAGRLREEGKEYIVQDGDIMEFRFNV

SEQ ID NO: 8877 - DNA, 789 bp, Streptococcus agalactiae
ttgaagttcgaaaatataatatatggtattgatggcaacgtggccactattatgcttaatcgaccagatatttcaaatggttttaacatcccaatgtgtcaagaaattattgatgcaataaggcttgtgtctgaaaataaagatgtcatgtttttagtgattgaagcacaaggaccaatcttttcaatcggaggagatttaaaagtgatgaaagctgctgttgagagcgatgatattagctcattaactaaaattgctgagttagttaatcagatatcgtatgatttactacagctagagaaacctgttgttatgtgtgtagatggggctgtagctggtgccgcagctaatattgcattagcagctgattttgttatcgcaagcaagaagagtaaatttatccaggcttttgtgggtgtcggtttagctccagatgcaggaggtttattgttacttagtaaatcaatcggtataactcgtgcagtgcaactagctttaactggagaaagcttatctgctgaaaaagctgaagctttgggaattgtttataaactttgtgaatcagataaaataggtaaaattaaggatcaactattaaagcgtttaagtagacattctataaactcatatcaagccataaaatcattagcttgggaagctgcttttaaagattgggaacaatataaaaagcttgaattacaactgcaagaatcattagcctttaagcaagattttaaagaaggtgttcgggcacacgctgatagaaggcgtcctaattttttaggcaaa

SEQ ID NO: 8878 - protein, 263 aa, Streptococcus agalactiae
LKFENIIYGIDGNVATIMLNRPDISNGFNIPMCQEIIDAIRLVSENKDVMFLVIEAQGPIFSIGGDLKVMKAAVESDDISSLTKIAELVNQISYDLLQLEKPVVMCVDGAVAGAAANIALAADFVIASKKSKFIQAFVGVGLAPDAGGLLLLSKSIGITRAVQLALTGESLSAEKAEALGIVYKLCESDKIGKIKDQLLKRLSRHSINSYQAIKSLAWEAAFKDWEQYKKLELQLQESLAFKQDFKEGVRAHADRRRPNFLGK

SEQ ID NO: 8879 - DNA, 837 bp, Streptococcus agalactiae; identical to SEQ ID NO: 5249

SEQ ID NO: 8880 - protein, 279 aa, Streptococcus agalactiae
VMTQMNFTDRATRVAIIANGKYQSKRVASKLFAAFKHDPDFYLSKKDPDIVISIGGDGMLLSAFHMYEKQLDKVRFVGVHTGHLGFYTDYRDFEVDTLINNLKNDKGEQISYPILKVTITLEDGRVIRARALNESTIKRIEKTMVADVVINQVVFERFRGDGILVSTPTGSTAYNKSLGGAVLHPTIEALQLTEISSLNNRVYRTLGSSVIIPKKDAIEIVPKRVGVYTISIDNKTVHYKNVTKIEYSIDEKSINFVSTPSHTSFWERVNDAFIGEPEH

SEQ ID NO: 8881 - DNA, 1071 bp, Streptococcus agalactiae
atgcgtagagtttattcctttttaggcggtattgttcttgttatcctgatcctctttggtttaaccacttacttagaaaaaaagagtagttcaacacctaactcagataagttagttatttataactggggagactatattgatccagccttattaaaaaaatttacaaaagaaactggaattgaagtacaatacgaaacgtttgactctaatgaggctatgcacaccaaaattaagcagggtgggacgacatatgatattgctgtacctagtgattatatgattgacaaaatgataaaagaaaaccttctggttaaacttgatcattcaaagatagctaattgggatgctattggagccaggtttaaaaatttgagtttcgatcctaaaaataaatattcgattccttatttctggggaactgttgggattgtttataatgatcaattagttaaaactcctcctaaacattgggatgatttatggcgtccagagtttcgaaataaaatcatgctagttgatagtgcacgtgaggttattggagttggtttaaattccttgggatatggattgaatacaaagaacatatcagaattaaaagccgcttctaaaaagttagatgctctaacaccaaacgttaaggctattgttgctgatgagatgaaaggctatatgattcagggagatgcagcgattggtgttacattctctggagaagcacgagaaatgcttgatgggaacaagcatttgcattacgttgttcctagtgaaggatcgaacctttggtttgataatattgtaatccccaaaacagtaaagcatcgcaaagaagcctatgcctttattaatttcatgatggaacctaaaaatgcggcacaaaatgcagaatatattggttatgcgacccctaatctcaaagcaaaagcgctgttaccagcagatatcaaaaatgataaagcattttatcctcctgataaaacaattgatcatttagaagtttataataacttgggtcaaaaatggcttggtatttacaatgatttgtacttacaatttaaaatgtatcgtaag

SEQ ID NO: 8882 - protein, 357 aa, Streptococcus agalactiae
MRRVYSFLGGIVLVILILFGLTTYLEKKSSSTPNSDKLVIYNWGDYIDPALLKKFTKETGIEVQYETFDSNEAMHTKIKQGGTTYDIAVPSDYMIDKMIKENLLVKLDHSKIANWDAIGARFKNLSFDPKNKYSIPYFWGTVGIVYNDQLVKTPPKHWDDLWRPEFRNKIMLVDSAREVIGVGLNSLGYGLNTKNISELKAASKKLDALTPNVKAIVADEMKGYMIQGDAAIGVTFSGEAREMLDGNKHLHYVVPSEGSNLWFDNIVIPKTVKHRKEAYAFINFMMEPKNAAQNAEYIGYATPNLKAKALLPADIKNDKAFYPPDKTIDHLEVYNNLGQKWLGIYNDLYLQFKMYRK

SEQ ID NO: 8883 - DNA, 774 bp, Streptococcus agalactiae
atgaaaaaattcgcaaatatctatttagcacttgtttttattatcctttatattcctattatttatttgattttttattctttcaataaaggtggggatatgaattcttttactggattcacctttagtcactatggagaactgtttcaggatagccgcttaatgctaattttagtgcaaacattctttttggcttttcttagcgccttattagctacaattattggtacctttggagctatttggatttatcaggtaagacgtagacatcaaacctctattttatcgcttaataatatccttttagtagcaccagatgttatgattggtgcaagttttctcttagtatttactgttattggtttacagttaggtttcacttctgtattattgagccatgttgcattctctattcctattgttgttttaatggtcttacctcgtttaaaagaaatgaatgatgatatgattaatgcttcctatgatttaggagcttcaacttggcaaatgcttaaagaagttatgttaccctatttgtcgtcgggtattatttcaggtttctttatggctttcacttactcgctagatgattttgcggttactttctttgttacaggtaatggcttttcaacgctttcagtagaaatctattcacgcgcacgtcgcggtatatcattggaaattaacgccttgtcaactattgtctttttatttagtattttattggtaattggttattactatatttcgaaagagaagggagaaaagaatgcg

SEQ ID NO: 8884 - protein, 258 aa, Streptococcus agalactiae
MKKFANIYLALVFIILYIPIIYLIFYSFNKGGDMNSFTGFTFSHYGELFQDSRLMLILVQTFFLAFLSALLATIIGTFGAIWIYQVRRRHQTSILSLNNILLVAPDVMIGASFLLVFTVIGLQLGFTSVLLSHVAFSIPIVVLMVLPRLKEMNDDMINASYDLGASTWQMLKEVMLPYLSSGIISGFFMAFTYSLDDFAVTFFVTGNGFSTLSVEIYSRARRGISLEINALSTIVFLFSILLVIGYYYISKEKGEKNA

SEQ ID NO: 8885 - DNA, 885 bp, Streptococcus agalactiae; identical to SEQ ID NO: 5343

SEQ ID NO: 8886 - protein, 295 aa, Streptococcus agalactiae
LRKDNLGIILGLSAYVLWGLLSLYWKLLSGIEAYSTFAYRIIFTVLTMLIYMLVSGRKTVYLKDLKGLVNNKKSFWTMFVASILISINWLVYIFAVTHGHATEASLGYYMMPIISILLSVLVLREHLARVVSLAILIAIMGVGILVYQTGHFPLISLTLALSFGFYGLLKKSISLSSDFSMLVESSFIAPFALIYIVFFAKDFLTDYNILQLVLLSLSGIITAVPLLLFAEAIKRAPLNIIGFIQYINPTIQLLLALFIFKETIVSGEVIGFIFIWLAILVFSIGQVHTMLKKGK

SEQ ID NO: 8887 - DNA, 1545 bp, Streptococcus agalactiae; identical to SEQ ID NO: 5361

SEQ ID NO: 8888 - protein, 515 aa, Streptococcus agalactiae
LSKKHITPVFTGSLIVSLILVLLGIIVPRGFQSWTQILREQVSTNFGWLYLLLVTSILALCVFFIMSPLGQIRLGQPHSRPEYSTVSWIAMMFSAGMGIGLVFYGAAEPLSHFAISTPGAPKESQTALADAFRFTFFHWGIHAWAVYALVALALAYFGFRKQEKYLLSVTLKPLFGDKTDGWLGKIVDITTVVATVIGVATTLGFGAAQINGGLSFLLGVPNNAFVQIVIILITTALFVMSALSGLGKGVKILSNLNLILAVALLALVIVLGPTVRIFDTLTESLGSYLQNFFGMSFRAAAFDNTKRSWIDNWTIFYWAWWISWSPFVGVFIARISKGRSIREFLTVVLLIPTLLSFVWFAAFGTLSTQVQQLGTNLTKFATEEVLFATFNHYTLGWLLSIIAIILIFSFFITSADSATYVLAMLTEDGNLNPKNRTKVIWGLVLAVIAIVLLLSGGLLALQNVLIIVALPFSFVMILMMLALLVELFHEKKEMGLSISPDRYPRKNEPFKSYEE

SEQ ID NO: 8889 - DNA, 1020 bp, Streptococcus agalactiae; identical to SEQ ID NO: 5369

SEQ ID NO: 8890 - protein, 340 aa, Streptococcus agalactiae
VRRTIMLFKEKIPGLILCFIIAIPSWLLGLYLPLIGAPVFAILIGIIVGSFYQNRQLFNKGIAFTSKYILQTAVVLLGFGLNLMQVMKVGISSLPIIIMTISISLIIAYVLQKLFKLDKTIATLIGVGSSICGGSAIAATAPVINAKDDEVAQAISVIFLFNILAALIFPTLGNFIGLSDHGFALFAGTAVNDTSSVTATATAWDAINHSNTLGGATIVKLTRTLAIIPITIVLSIYHMKQTQKEQSVSVTKIFPKFVLYFILASLLTTIVASLGFSLRIFEPLKVLSKFFIVMAMGAIGINTNVSKLIKTGGKSILLGAACWLGIIIVSLTMQAILGTW

SEQ ID NO: 8891 - DNA, 195 bp, Streptococcus agalactiae
atgtcagaattcgtgaggaaatacagatatccactaggaggtgcagttattgggctcgttttagctgcaatgattgtaaccattggattctttaaaacaattcttgctcttgttatcattgtgctaggtgcttatgctggactttatgtgcaaagaacaggtatgcttgaccaattctttaataagagaaaataa

SEQ ID NO: 8892 - protein, 64 aa, Streptococcus agalactiae; identical to SEQ ID NO: 5406

SEQ ID NO: 8893 - DNA, 693 bp, Streptococcus agalactiae
atggcaactttaacgaataaccctatctttggtattatgttaaccgtatgggcgtattacattggcataaggatttttagaaaatatccttcccctgcaacaactccacttcttttggcgactattttattaattgcttttttaaaattaacacatatctcctataaagattactacaatggcggttcatttctaacgatgttaattacgccttcaacggttgtattggctattcctctctatagaacctttcatttaatgaagcatcacattaaaagcattagcattagcatcatcttagcttctgttatcaacacagtttttaccgcaatagttgctaagttttttggtatgaaatatttcttagcaatctcacttttcccaaagtccgtaactacagctatggccgttggaattacaagtaaagcaggtggattagctactatcactctggtcgtagttgttattacaggcatcttaacaagcgttttgggtcctatttttctaaaattattaaggatagaagatcctgttgctatagggctcgcgctaggaggaactgggcatgctataggaactggacaagccttaaaatatggccaagttcaaggcgccatggctggactagcaattggtatcacagggatttgctatgttattgtcagtcctttagttgcaggcttaatattgaaa

SEQ ID NO: 8894 - protein, 231 aa, Streptococcus agalactiae
MATLTNNPIFGIMLTVWAYYIGIRIFRKYPSPATTPLLLATILLIAFLKLTHISYKDYYNGGSFLTMLITPSTVVLAIPLYRTFHLMKHHIKSISISIILASVINTVFTAIVAKFFGMKYFLAISLFPKSVTTAMAVGITSKAGGLATITLVVVVITGILTSVLGPIFLKLLRIEDPVAIGLALGGTGHAIGTGQALKYGQVQGAMAGLAIGITGICYVIVSPLVAGLILK

SEQ ID NO: 8895 - DNA, 1233 bp, Streptococcus agalactiae
  misc_feature (1)..(1233): n = a, c, g, or t
atggcgcttaaagaattaacagctaaagagttcgaaagttattcaggaaattacgatttacaatcgtttatgcaaacccctgagatggcaaagcttctaaaaaaacgtgggtatgacattacctacatgggctaccaaatcgatgggaaaatggaaatcatcagtattgtttataccatcccaatgactggtggacttcatatggaagtcaattctggtccagcccattccaattctaaatatctgaaacatttttataaagaactacagaactatgccaaatctcagggcgctttagaattattaattaaaccttatgatacctaccaagagtttactggtgaaggtaagcctaaaggtgcaccgaacacctatcttattgatgacctgactagtataggttatcaccacgatgggcttcatattggttatcctggcggtgaacctgattggcattatgttaaaaatctagaaggtatcactcctcaaaatcttcttaaatctttctctaaaaaaggacgccccttggttaaaaaagccatgtcttttggtataaaaatacgtgtcctcaagcgggaagaactacatatctttaaggatattacttcttctacttctgatcgccgggactatatggataaatctctagattattatcaagatttttatgatagtttcggagataaggcggaatttgtcattgcaactctaaactttagggaatatgatcataacctacaattaaatgcaaagaaattggaagaacagattacagtccttgataatcgccatcaaaataatacagattctgccaaataccatcgtcaacgtactgagcttgtcaatcaactagctagtttagataaacgtcgcaaagaagtcgaaccttttattcaaaaatttggaaatcaagatgttgttttagctggtagcctctttatttatagcccgaaagaaactgtctatcttttctctggctcatacacagaatttaataaattttatgcgcctgcagttcttcaagaatatgttatgcaagaggctttaaagcgtcaatcaactttctatanttttttaggtattcaaggaaattttgatggttcaratggcgtacttcrctttaaacagaattttaatggttacattgttcgtaaaatgggtactttccgctactatccaaatccattaaaatataagagtattcaattactaaagaaaatcttacgccgaaca

SEQ ID NO: 8896 - protein, 411 aa, Streptococcus agalactiae
  MISC_FEATURE (1)..(411): Xaa = Any Amino Acid
MALKELTAKEFESYSGNYDLQSFMQTPEMAKLLKKRGYDITYMGYQIDGKMEIISIVYTIPMTGGLHMEVNSGPAHSNSKYLKHFYKELQNYAKSQGALELLIKPYDTYQEFTGEGKPKGAPNTYLIDDLTSIGYHHDGLHIGYPGGEPDWHYVKNLEGITPQNLLKSFSKKGRPLVKKAMSFGIKIRVLKREELHIFKDITSSTSDRRDYMDKSLDYYQDFYDSFGDKAEFVIATLNFREYDHNLQLNAKKLEEQITVLDNRHQNNTDSAKYHRQRTELVNQLASLDKRRKEVEPFIQKFGNQDVVLAGSLFIYSPKETVYLFSGSYTEFNKFYAPAVLQEYVMQEALKRQSTFYXFLGIQGNFDGSBGVLXFKQNFNGYIVRKMGTFRYYPNPLKYKSIQLLKKILRRT

SEQ ID NO: 8897 - DNA, 2682 bp, Streptococcus agalactiae; identical to SEQ ID NO: 5481

SEQ ID NO: 8898 - protein, 894 aa, Streptococcus agalactiae
LLKEQKKSLFYTQGQEEVLTSLESSREGLSTTEAKNRLEMYGRNELEEGKKRSLIAKFFDQFKDLMIIILLVAAALSVITEGMHGLTDALIILAVVILNAAFGVYQEGQAEAAIEALKDMSSPIARVRRDGHTIEVDSKELVPGDLVMLEAGDVVPADLRLLEAASLKIEEAALTGESVPVEKDISQVVAEDAGIGDRVNMAYQNSNVTYGRGYGVVTNTGMYTEVGKIADMLANADESETPLKQSLVQLSKLLTYLIVIIAVITFLVGIFVRKEGWIEGLMTSVALAVAAIPEGLPAIVTIVLSMGTKTLAKRNSIVRKLPAVETLGSTEIIASDKTGTLTMNQMTVEKVYTNGVLQSSSEEISVDNNTLRIMNFSNDTKIDPSGKLIGDPTETALVQFGLDKNFDVREVLKNEPRVAELPFDSDRKLMSTIHKESDGRYFIAVKGAPDQLLKRVTKIEDNGLVRDITAEDKEAILNTNKELAKQALRVLMMAYKYETQIPSLETDIVESDLVFSGLVGMIDPERPEAAEAVRVAKEAGIRPIMITGDHQDTAEAIAKRLGIIDANDTEDHVFTGAELNELSDEEFQKVFKQYSVYARVSPEHKVRIVKAWQNDGKVVAMTGDGVNDAPSLKTADIGIGMGITGTEVSKGASDMVLADDNFATIIVAVEEGRKVFSNIQKSIQYLLSANMAEVFTIFFATLLGWDVLAPVHLLWINLVTDTLPAIALGVEPAEPGVMTHKPRGRQSNFFDGGVMGAIIYQGILQTILVLGVYGWALMYPEHAGYRMIHADALTMAFATLGLIQLVHAFNVKSVYQSIFTVGAFKNRTFNWSIPVAFILLMVTIVVPGFNKLFHVTHLSSTQWLTVVIGSLLMVVLTEIVKFIQRKLGQDEKAI

SEQ ID NO: 8899 - DNA, 1518 bp, Streptococcus agalactiae
atgagaaagaaatttcttttattgatgagctttgtagctatgtttgcagcttggcaacttgttcaagttaaacaagtttgggctgatagtaaacttaaagtggtaacaactttttacccagtttatgagtttacaaaaaatgtcgttggtgataaagctgatgtatctatgttaattaaagcaggtacagaaccgcatgattttgaaccatcaactaaaaacatcgctgccatccaagattcaaatgcttttgtttacatggatgataacatggaaacttgggctccaaaagtagctaagtcagttaaatccaaaaaagtaacaactattaaaggtactggcgatatgttacttactaaaggcgtcgaagaagaaggtgaagaacatgaaggacatggtcatgaagggcatcatcatgaacttgacccacacgtatggttgtctccagaacgtgcgatttctgttgtagaaaacatccgtaataaatttgtcaaagcttatccaaaagatgcagcttcatttaacaaaaatgcagatgcttacattgcaaaattaaaagagcttgacaaagaatacaaaaatggtttgtcaaatgctaaacaaaagagttttgtgactcaacacgcagcgtttggttacatggcgcttgattacggtttaaatcaagttccaattgctggtcttactccagatgcagaaccttcatcaaaacgtttaggcgaattagctaaatacatcaagaaatataacatcaactacatttattttgaagaaaatgcttcaaataaagttgctaaaactttagcagatgaagttggcgtgaaaacagctgtgcttagtccacttgaaggactttctaaaaaagaaatggcagctggcgaagattacttctcagttatgagacgtaatttgaaagttcttaaaaagacaacagatgttgcaggtaaagaagtagctcctgaagaagataaaactaaaacagttgaaacaggttactttaaaactaaagatgttaaagaccgtaaattgacagattactctggtaattggcaatcagtatatcctcttcttcaagatgggacacttgatccagtttgggattacaaagctaaatctaaaaaagatatgactgctgcagagtacaaaaaatattatacagcaggttacaagactgacgtagaatcaatcaagattgatggtaaaaamcatcaaatgacctttgtacgtaatggtaaatcacaaacatttacatacaaatatgcaggttacaaaatcttaacttataaaaaaggtaatcgtggagtacgttatctctttgaagctaaagaaaaagatgctggtcaattcaaatatatccaatttagtgaccatggtattaaaccgaataaagctgaacacttccatatcttctggggttcagaaagccaagaaaaattatttgaggaaatggaaaactggccaacatacttcccagctaaaatgtctggacgtgaagttgcccaagaccttatgtctcat

SEQ ID NO: 8900 - protein, 506 aa, Streptococcus agalactiae
  MISC_FEATURE (1)..(506): Xaa = Any Amino Acid
MRKKFLLLMSFVAMFAAWQLVQVKQVWADSKLKVVTTFYPVYEFTKNVVGDKADVSMLIKAGTEPHDFEPSTKNIAAIQDSNAFVYMDDNMETWAPKVAKSVKSKKVTTIKGTGDMLLTKGVEEEGEEHEGHGHEGHHHELDPHVWLSPERAISVVENIRNKFVKAYPKDAASFNKNADAYIAKLKELDKEYKNGLSNAKQKSFVTQHAAFGYMALDYGLNQVPIAGLTPDAEPSSKRLGELAKYIKKYNINYIYFEENASNKVAKTLADEVGVKTAVLSPLEGLSKKEMAAGEDYFSVMRRNLKVLKKTTDVAGKEVAPEEDKTKTVETGYFKTKDVKDRKLTDYSGNWQSVYPLLQDGTLDPVWDYKAKSKKDMTAAEYKKYYTAGYKTDVESIKIDGKXHQMTFVRNGKSQTFTYKYAGYKILTYKKGNRGVRYLFEAKEKDAGQFKYIQFSDHGIKPNKAEHFHIFWGSESQEKLFEEMENWPTYFPAKMSGREVAQDLMSH

SEQ ID NO: 8901 - DNA, 693 bp, Streptococcus agalactiae
atggcggctcaattagctgatattattgactgtaacgcatgtattattaatggtggtggtaacttacttggctatgccatgaaatataaaacaaacactgaccgtgtggaagaattttttgaaacaaaacaattcccagattactatgttaaatctgctagtcgtgtttatgatacagaagctaacttatcagtagataatgatttgtcaattttcccagttgagacaaaggaaaacttccaagatggtattacaacaatcgctccaatttatggtggtggaatgcgcttgggaacatttattatctggcgtaatgataaagaatttagcgacgatgatttgattttagttgaaattgcaagcaccgttgttggtattcaattacttaaccttcaaacagaaaatctagaagaaaatattcgtaaacaaacagcggtgacaatggctatcaacactctatcttattcagaaatgaaagctgtagctgctatcttaggagaattagatggacttgaaggacgcctaacggcatctgttattgcagaccgtattggaattacacgttccgttattgtaaatgctcttcgtaaattggagtctgcgggaatcattgagagccgctcactcggtatgaagggaacatacctcaaagttattaacgaaggtatttttgacaaattaaaagaatataat

SEQ ID NO: 8902 - protein, 231 aa, Streptococcus agalactiae
MAAQLADIIDCNACIINGGGNLLGYAMKYKTNTDRVEEFFETKQFPDYYVKSASRVYDTEANLSVDNDLSIFPVETKENFQDGITTIAPIYGGGMRLGTFIIWRNDKEFSDDDLILVEIASTVVGIQLLNLQTENLEENIRKQTAVTMAINTLSYSEMKAVAAILGELDGLEGRLTASVIADRIGITRSVIVNALRKLESAGIIESRSLGMKGTYLKVINEGIFDKLKEYN

SEQ ID NO: 8903 - DNA, 963 bp, Streptococcus agalactiae
atgacaattaaaaatctcactgttgcaggaagtggcgttctaggtagtcaaatcgcctttcaagcagcttacaaaggaatgtctgtcaccatatatgacattaacgatgaagctttaaataagggaaaagaacgcatcaaaaaattagctaaagtctatcaatcagaaattgaaacagcaaaagaagcatatagtgataaagctaaaagtatcaagtataataaaaacttattgcctagcttagaccatatttttctttcaaaagttgccgattcattagacttgattgctgatttaccaaaccaaattactttttcaaaaaacttagaccaagctgtaagtgacgccgatttagtaatcgaagctgtcccagaaacagttagtataaaagaagatttttataaacaattagctaaagtggcaccttcaaagacaatctttgcaacaaattcttcaacacttgttccaagtcagtttgctgatataacaggacggcctgacaaatttttagcaatgcatttcgctaacaatatttggcaaaataatattgttgaaattatgggacataagggaactgacgacgaggttatcaaagaagctttggcattctcaaaagatattggtatggtgcctttacatattcataaagaacaacctggctatattcttaattcaatactagttccattcttagagagtgcactagcattgtactatgataaggtttctgattctgaaactattgataaaacctggaagttaggaacaggagcaccgatgggacctttagaaattttagatattattggcatcgataccgcttataatatcatgaagaattattcagataccaacagcgatcctaatagtcttcatgctcaccttgcaaaaatgcttaaagaagaattcattgataaaggacgtaccggtaaagctgctggacacggcttttatgattacgac

SEQ ID NO: 8904 - protein, 321 aa, Streptococcus agalactiae
MTIKNLTVAGSGVLGSQIAFQAAYKGMSVTIYDINDEALNKGKERIKKLAKVYQSEIETAKEAYSDKAKSIKYNKNLLPSLDHIFLSKVADSLDLIADLPNQITFSKNLDQAVSDADLVIEAVPETVSIKEDFYKQLAKVAPSKTIFATNSSTLVPSQFADITGRPDKFLAMHFANNIWQNNIVEIMGHKGTDDEVIKEALAFSKDIGMVPLHIHKEQPGYILNSILVPFLESALALYYDKVSDSETIDKTWKLGTGAPMGPLEILDIIGIDTAYNIMKNYSDTNSDPNSLHAHLAKMLKEEFIDKGRTGKAAGHGFYDYD

SEQ ID NO: 8905 - DNA, 831 bp, Streptococcus agalactiae
atgacaataaaaaaagtgttaagtgtaacaggaattattttagtgacagtagcgtctctagctgcttgtagctcaaaatctcatactactaagacgggcaaaaaagaagttaattttgcaactgttggaacaacggcacctttttcttatgtgaaggatgggaaactgactggctttgatattgaagtagccaaagctgtttttaaaggttcagataactataaagtcacttttaaaaaaacagaatggtcatcggtatttaccggcattgattcaggaaagtttcaaatgggtggaaataatatttcttattcatcagagagatctcaaaaatatttattttcatacccaataggctctactccttcagttttagcagttcctaagaatagtaatatcaaagcttataatgatattagtggtcataaaacacaggttgtccaaggaacgacaactgccaagcaattagaaaatttcaataaagagcatcagaaaaatcctgttactctaaaatatactaatgaaaatattacacagattctaacgaatttgagtgatggaaaagctgattttaaactttttgacggaccaactgttaacgctatcataaagaatcaaggtctcacgaatttaaaaaccatccctttgactatgagagatcagccttatatttatttcatctttggtcaggatcaaaaagacttgcaaaagtatgtgaataatcgccttaaacaattacgtaaagatgggacactttcaaaaatagctaaagaataccttggaggtgattacgtaccaaatgagaaagatctcgttactcctaaggagaag

SEQ ID NO: 8906 - protein, 277 aa, Streptococcus agalactiae
MTIKKVLSVTGIILVTVASLAACSSKSHTTKTGKKEVNFATVGTTAPFSYVKDGKLTGFDIEVAKAVFKGSDNYKVTFKKTEWSSVFTGIDSGKFQMGGNNISYSSERSQKYLFSYPIGSTPSVLAVPKNSNIKAYNDISGHKTQVVQGTTTAKQLENFNKEHQKNPVTLKYTNENITQILTNLSDGKADFKLFDGPTVNAIIKNQGLTNLKTIPLTMRDQPYIYFIFGQDQKDLQKYVNNRLKQLRKDGTLSKIAKEYLGGDYVPNEKDLVTPKEK

SEQ ID NO: 8907 - DNA, 825 bp, Streptococcus agalactiae
atgaagttaaaacatattgtcttaggattagccttaacaacacttttaggagtcacatttagtaatcaagaagtttcagcaagctcaacttcaagtaaagttgttaaagttggtgttatgaccttttctgacactgaaaaagcacgttgggataaaattgaaaagctagtaggtgataaagctaaaatcaaatttacagaatttacagattatacacaaccaaatcaagcgacagccaataaggatgtggatattaatgcctttcaacattacaatttcttagaaaactggaataaggaaaataagaaaaacttaattccacttgaaaagacttacttagctccaattcgtatctattctgagaaggtaaaatctcttaaaaaattgaaaaaaggagccactattgcaattccaaatgatgcaacaaatggtagccgtgcattgtatgtccttcagtcagcaggtttaatcaaattgaatgtttctggtaagaaggttgcaacagttgctaatatcacatctaataaaaaggatattaatattcaggagttagatgcgagtcaaacaccacgtgcactcaaagatgtagatgcagctattattaataatacatacattgagcaagctaatttaaaaccttcagatgctatctttgttgagaaatcagataaaaattcaaaacaatggattaatatcattgcgggacgtaaaaattggaaaaagcaaaagaacgctaaagctatccaagctatcttggatgcttatcacacagatgaagtgaaaaaagttatcaaagatacttcagctgatattccacaatggtaa

SEQ ID NO: 8908 - protein, 274 aa, Streptococcus agalactiae
MKLKHIVLGLALTTLLGVTFSNQEVSASSTSSKVVKVGVMTFSDTEKARWDKIEKLVGDKAKIKFTEFTDYTQPNQATANKDVDINAFQHYNFLENWNKENKKNLIPLEKTYLAPIRIYSEKVKSLKKLKKGATIAIPNDATNGSRALYVLQSAGLIKLNVSGKKVATVANITSNKKDINIQELDASQTPRALKDVDAAIINNTYIEQANLKPSDAIFVEKSDKNSKQWINIIAGRKNWKKQKNAKAIQAILDAYHTDEVKKVIKDTSADIPQW

SEQ ID NO: 8909 - DNA, 393 bp, Streptococcus agalactiae
atgaagtcaataaaattacttagttttattgtaataatccttttagggcttggtttcactgtaggaggtttaaaagtgactgaaaacaataaacaacaagaattatgggaaatagctaatagcaaagacgctaaaaatgcttatcaaaagtggatttatgcagaagatgaagatgctttcaaagagaatgctgttattaagtcgtatgatattgacaaagaaagtatcaaaaaaaatcctatgggagggatttcggtaaggttaatcattaataaagatcctaacttatatattacttgtaatttggatagggataatcaagggcatttggtcagtcaaagtagccatcaatctccccagttaactcatttattggaaagtagaggtcattaa

SEQ ID NO: 8910 - protein, 130 aa, Streptococcus agalactiae
MKSIKLLSFIVIILLGLGFTVGGLKVTENNKQQELWEIANSKDAKNAYQKWIYAEDEDAFKENAVIKSYDIDKESIKKNPMGGISVRLIINKDPNLYITCNLDRDNQGHLVSQSSHQSPQLTHLLESRGH

SEQ ID NO: 8911 - DNA, 1263 bp, Streptococcus agalactiae
atgcttaaacgtctaggtaaagtatttggacctctagtttgtgctttactattgttggtaggattatattttgtttttcctgtttctcagcctcatcatttaggtaaggaaaaaaacagtgcagtagcgttgacgaaggcaggttttaaaagcagagttcaaaaagttagagctttcagtgatcctaaagccaattttgtccctttctttggttcaagtgagtggctaagatttgacgcaatgcatccatcagttttagcagaggcttacaataggtcttatatcccatatcttttaggtcaaaaaggggcggcttctctgacacaatactatggcattcaacagattaaaggacaaatcaaaaataaaaaagctatctatgttatttctccgcaatggtttgttcgcaagggagccaacaaaggtgcttttcaaaactatttcagcaacgatcaaaccattcgatttttgcaaaatcaaacagggacaacctacgataggtatgctgctcgtcgattgttaaaattatatcctgaagcttctatgtcagatttgatagaaaaagttgcagatggccaaaaactatcaaataaagacaaacaaagactaaagtttaatgattgggtatttgagaagacagatgctatttttagctatctaccactaggaaaaacttataatcaggcaataatgcctcatgttggtaaattaccgaaagcattctcatataatcatttatcgcgtattgcatcacaagatgctaaagtagcaacgagatcaaatcaatttggtattgatgatcgcttttaccaaacaagaattaaaaagcacttaaaaaaattgaaagggtcacaacgacatttcaattatactaagtcaccagaatttaatgatttacagttggttcttaatgaattctcaaaacaaaatacagatgtcctttttgtcataccaccagtaaataaaaagtggacagactacacagggcttgatcaaaaaatgtatcaaaaatctgtagaaaaaataaaacaccaacttcaaagtcaaggtttcaatcatatcgctgacctttctcgagatggaggtaagccatactttatgcaagatacaatccatttaggttggaatggttggttagagctagataagcatatcaatccatttttaacagaggaaaacagcaagccgaattatcacattaataataaatttttgaagaaatcttgggcaaaatatacaggacgtccaagtgattacaagtaa

SEQ ID NO: 8912 - protein, 420 aa, Streptococcus agalactiae; identical to SEQ ID NO: 5734

SEQ ID NO: 8913 - DNA, 1263 bp, Streptococcus agalactiae; identical to SEQ ID NO: 5741

SEQ ID NO: 8914 - protein, 421 aa, Streptococcus agalactiae
VIQAFLEKLPHLDVYGNPQYFFYLILAVLPIYIGLFFKKRFALYEIIFSLSFIVMMLTGSTFNQLKSLLAYVVGQSLLVFIYKAYRKRFNHTLVFYVTVCLSIFPLFLVKLIPAISEDGHQSLFGFLGISYLTFRAVAMIIEMRDGVLKEFTLWEFLRFLLFFPTFSSGPIDRFKRFNEDYINIPDRNELLDMLGQAIHYLMLGFLYKFILAYIFGSLIMPPLKELALEQGGVFNWPTLGVMYAFGFDLFFDFAGYTMFALAISNLMGIKSPINFDKPFKSRDLKEFWNRWHMSLSFWFRDFVFMRLVKLLVKNKVFKNRNVTSSVAYIINMLLMGFWHGLTWYYIAYGLFHGIGLVINDAWVRKKKNINKERRLAKKPLLPENKWTYALGVFITFNVVMFSFLIFSGFLDLLWFPQPHNK

SEQ ID NO: 8915 - DNA, 1188 bp, Streptococcus agalactiae
atgtttagtgatttacgcaaaaaatttgtctttttgaccatgtcaatccttattgtcgttgttctctttctatttgcagttagtaatcgctacaatcaatattgggatgaatatgatgcatataggattgttaaattagttgccaaaaatgattatttaggaataccaggcgatgaaccgattgctttggtgactatagataaccaaaagatggttaagattcaaagcaataatactgatttgacaaatgatgttatcgaaaaatctagtttgaagctccttgagcaaggaaagaagtcacgaaaatggaagtcttttatatattccataaaagaatataaagataaaacctacaccatagctattatggatttggctagttatgaagtcccttatgcaaggcgttttctaattcttgtttttactatttttggattttgtttattagcagctgtaagtctttatctttctcgatttattgtaggacctgtagagacagaaatgactcgcgaaaaacagttcgtttcagatgcgagtcatgagctgaagacccctattgcagctatacgagccaacgttcaggttctggaacagcaaattccagggaatcgttatctggatcatgttgtttcggagactaagcgaatggagtttttaattgaagatttgcttaatttgtctagacttgatgaaaaacgctccaaggtaaatttcaaaaagttaaacttatctgtcttatgtcaagaagtacttctaacatatgaaagtttggcatatgaagaagaaaagtgtttaaatgatacgattgaagatgatgtctggattgttggagaagagagtcagattaagcaaattttaataattcttttggataatgctattaggcattctttgtcaaaatcagcaatccagtttagtcttaaacaagctcgaagaaaagctattctgacaatatcaaatccaagtgctatctattccaaagaggttatggataatctctttgagcgtttttatcaagctaaagatgatcatgcagattctctcagttttggtctaggcttatctattgctaaagcaatcgtggaacgccataaggggagaattagagcatatcaagaaaaagaccaattacgtcttgaagtccagttaccaattgatggattttggaccaataccatgattaattaa

SEQ ID NO: 8916 - protein, 395 aa, Streptococcus agalactiae; identical to SEQ ID NO: 5750

SEQ ID NO: 8917 - DNA, 1098 bp, Streptococcus agalactiae
atgcaaattacccgagaagccggatatgatgttaaagatattaataaacctaaagcgtctatcgttattgacaataaaggtcatattttgtgggaagataacgctgatttagaacgtgatcccgctagcatgtctaaaatgtttactttatatttactatttgaagacttagctaaaggaaaaacaagcctcaacaccacagtgactgcaacagaaacagaccaagccataagtaagatttatgaaattagtaataataatattcatgctggggttgcttatcctattcgtgaactgattactatgacagctgtcccgtcatctaatgtagcaactattatgattgctaaccacttatcacaaaacaatcctgacgccttcattaaacgaatcaatgaaaccgccaagaaactcggtatgacaaaaactcacttttataaccccagtggggcggtagcgagtgcttttaatggactttactccccaaaagaatacgataacaatgctactaacgttacgactgcacgtgatctatcaattttaacctatcatttccttaaaaaataccctgatatactgaactatacaaaatatcctgaagtcaaggccatggtcggaactccttatgaagaaacatttacaacttataactactctacccccggcgctaaatttggattagaaggagtagatggcttaaaaactggttctagccctagcgctgcttttaatgccttagttacagctaaacgccagaatactcgcttgataactgtggttttaggagttggtgattggtcagaccaagacggagagtactatcgtcatccgtttgtcaacgctcttgtagaaaaaggttttaaagacgctaaaaatatttcttctaaaactcctgtattaaaagccgttaaacctaaaaaagaagttactaaaaccaaaaccaaatctattcaagaacagcctcaaacaaaagaacagtggtggacaaaaacagatcaatttattcaatcacattttgtatctattttaattgttctgggcaccatcgctatcctttgtcttttagctgggatagtattacttataaagcgctctaga

SEQ ID NO: 8918 - protein, 366 aa, Streptococcus agalactiae
MQITREAGYDVKDINKPKASIVIDNKGHILWEDNADLERDPASMSKMFTLYLLFEDLAKGKTSLNTTVTATETDQAISKIYEISNNNIHAGVAYPIRELITMTAVPSSNVATIMIANHLSQNNPDAFIKRINETAKKLGMTKTHFYNPSGAVASAFNGLYSPKEYDNNATNVTTARDLSILTYHFLKKYPDILNYTKYPEVKAMVGTPYEETFTTYNYSTPGAKFGLEGVDGLKTGSSPSAAFNALVTAKRQNTRLITVVLGVGDWSDQDGEYYRHPFVNALVEKGFKDAKNISSKTPVLKAVKPKKEVTKTKTKSIQEQPQTKEQWWTKTDQFIQSHFVSILIVLGTIAILCLLAGIVLLIKRSR

SEQ ID NO: 8919 - DNA, 954 bp, Streptococcus agalactiae
atgccaatggcggccagtagacactttatagaagtctcttattttcactacattttgcctgtaattattggcggtctcgtagttacaacaacaggattcatagatgacatctttgaattaagacctcgttataaaatgttgggaattattattgcagctattatcatatggaaatttacacattttagatttgatagttttaagattccaataggtggtccactcttggagtttggtcctattttaactttctttttgacagttttatggattatttcaatcactaatgctatcaatctgattgatggtctagatggtctagttagtggtgtttcaattatcagtctagcaacgatggcagtggtttcttatttctttttacctaaaatagatttttttctcacgctaactattgttattttaatcgcctcaatagttggttttttcccttataattatcatccagccattatctacctaggtgatgctggtgccttgtttataggatttatgattggtgtattatcgcttcaaggtttaaaaaactccacagctgttgcagtgataacacctgtcattattttaggagttcctattttggatacagctgttgctattgtgaggcgtaaattatcagggaaaaagatttctgaagctgataagatgcacctgcatcaccgattgctatctatgggatttacacatagaggagcagttttagttgtttatggtattgcaattatcttttcgcttatcgctttgcttttaaatgtttctagtcgtattgggggaatttttcttctattggcgctactattagcgatggaaatttttatagaaggtttaaatatttggggtgagaatcggacaccactatttaatctcttaaagttcattggcaacagtgattacagacaaagtgttattgctaaatatagcgataagcatcaaaaa

SEQ ID NO: 8920 - protein, 318 aa, Streptococcus agalactiae
MPMAASRHFIEVSYFHYILPVIIGGLVVTTTGFIDDIFELRPRYKMLGIIIAAIIIWKFTHFRFDSFKIPIGGPLLEFGPILTFFLTVLWIISITNAINLIDGLDGLVSGVSIISLATMAVVSYFFLPKIDFFLTLTIVILIASIVGFFPYNYHPAIIYLGDAGALFIGFMIGVLSLQGLKNSTAVAVITPVIILGVPILDTAVAIVRRKLSGKKISEADKMHLHHRLLSMGFTHRGAVLVVYGIAIIFSLIALLLNVSSRIGGIFLLLALLLAMEIFIEGLNIWGENRTPLFNLLKFIGNSDYRQSVIAKYSDKHQK

SEQ ID NO: 8921 - DNA, 1887 bp, Streptococcus agalactiae
atgataatgaagaaatgttttttggctatttgtttagctcttagtttttttatggtttcagttcaagcagatgaggtggactataacattcctcattatgagggtaatctaactattcacaatgataatagtgctgattttacagagaaggttacttaccaatttgattcgtcctataatggacagtatgtcacattaggtacggcgggtaagttacctgacaattttgatattaataataagccacaggttgaagtttcaattaatggtaaagtaaggaaagttagttaccagatagaagatttggaggatggctaccgtttgaaagtgtttaatggtggtgaagcaggtgatactgttaaagtcaatgttcagtggaaactaaaaaatgttctatttatgcataaggatgttggtgaacttaactggattcctattagcgactgggataaaacgttagagaaagtagatttttggatatcaactgacaaaaaggttgctctttctcgtctttgggggcacttgggttatcttaaaactcctcctaaaataagacaaaataataatcgttaccatttgacagcttttaatgtaaacaaacgattagaatttcatggttattgggatagatcttattttaatctacctacaaacagtaaaaataattacaagaaaaaaattgaatatcaagagaagatgatagagcgtcatggttttatcctaagtttcttgttaaggatattattaccttcattctttattattgtgacactattcatctcaattagggtgttcctgtttagaaaaaaagttaataaatacgggcaattccctaaggaacatcatttatatgaagcacctgaggacctttcaccactagagttaactcaaagcatttatagtatgagttttaaaaattttcaagatgaggagaagaaaactcaccttatcagtcaagaacaactcattcagtcaattctattagacttgattgatagaaaagtattgaattatgatgataacttgttatctctagctaacttagatagagcttctgatgcagaaatagattttatagagtttgcttttgcggattctacgagtttgaagccagatcaactcttttctaattaccaatttagttataaagaaacactacgtgaactgaaaaagcagcacaaggcttcagatctgcaaactcaaatgagacgccgaggaagtaatgccttatcaagaattacgcgtctcacaaggttgatttctaaagacaatataaactctcttagaagaaagggaatttcatccccttatcgtaaaatgtcttcagaagagtctaaagaattatctaggttgaaaagattcagttacctatcacctcttatttcttttgttgttataatttatacgctttttttaaattattttacctatttctgtatctatctcttattgtttggtgttatcctgttgttgaataaaatcatttttatgatgacaagaaaaataagtaacggttatattgtaactgaagatggagcaagtcgtgtctaccaatggactagttttaggaacatgctaagggatatcaaatcgtttgatcgttcagagttagaaagtatcgtattatggaatcgaatattggtttacgctactttattcggctacgctgaccgtgttgagaaagcactcagagtgaaccaaatagatattccagaaagatttgcaaacattgatagtcatcaatttgcgatttcagtcaatcaatctagtaatcatttttcaacgataactgaagatgttagtcacgcttctaattttagtgttaattcaggcggttcttcaggtggtttctcaggcggcggaggcggcggaggtggtggtgccttc

SEQ ID NO: 8922 - protein, 629 aa, Streptococcus agalactiae
MIMKKCFLAICLALSFFMVSVQADEVDYNIPHYEGNLTIHNDNSADFTEKVTYQFDSSYNGQYVTLGTAGKLPDNFDINNKPQVEVSINGKVRKVSYQIEDLEDGYRLKVFNGGEAGDTVKVNVQWKLKNVLFMHKDVGELNWIPISDWDKTLEKVDFWISTDKKVALSRLWGHLGYLKTPPKIRQNNNRYHLTAFNVNKRLEFHGYWDRSYFNLPTNSKNNYKKKIEYQEKMIERHGFILSFLLRILLPSFFIIVTLFISIRVFLFRKKVNKYGQFPKEHHLYEAPEDLSPLELTQSIYSMSFKNFQDEEKKTHLISQEQLIQSILLDLIDRKVLNYDDNLLSLANLDRASDAEIDFIEFAFADSTSLKPDQLFSNYQFSYKETLRELKKQHKASDLQTQMRRRGSNALSRITRLTRLISKDNINSLRRKGISSPYRKMSSEESKELSRLKRFSYLSPLISFVVIIYTLFLNYFTYFCIYLLLFGVILLLNKIIFMMTRKISNGYIVTEDGASRVYQWTSFRNMLRDIKSFDRSELESIVLWNRILVYATLFGYADRVEKALRVNQIDIPERFANIDSHQFAISVNQSSNHFSTITEDVSHASNFSVNSGGSSGGFSGGGGGGGGGAF

SEQ ID NO: 8923 - DNA, 1548 bp, Streptococcus agalactiae
atgaaaaaaatattactaagtttattcactgctttgcttatcaccyttggaggtatgacaagtatacaagcagatgaatatctacgtgtcggtatggaggcagcctatgctcctttcaactggacacaaaatgataacacaaatggtgcagttcctattgaaggaactgatcaatatgctaatggttatgatgtacaagtcgctaaaaagttagctaaaaagttaaataaaaaagttgttgttgtcaaaacaaaatgggaaggccttgttccagcactaacttctggaaaactcgatatgattattgcaggaatgagtcctaccgaagaacgtaaaaaagaaattaatttttcaaagccttactacatttcagaacctactctagttgttaatgctgaaggaaaatatactaatgctaaaaatattagtgatttcaaaaatgctaaagtaactgcccaacaaggagtctacttatacaacctcattgatcaaatcaatggtgtcaaaaaagaagttgccatgggggacttcaatcaattaagacaagctgtagaatctggtgttgtagacgcctatgtttcagaacgtccagatgcaacttccgctcaaactgctaatcctaaattaaaaatgattgaactgcaccaagggtttaaaacatctgatgccgatacaaatatttctgttgggatgcgtaaaggtgacaatcgtattaatcaagttaatcaagttctcgaaagcatttctagagataaacaaatcgccttgatggataagatgattaaagaacagccatccgttaaaaaagaaaaaaatgggaaaccaaacttctttgaacagatggcaactattttaaaaaacaatggttctcaattcctcagaggaacagctacaaccctcctaatttctatggtaggaacaatcgtcggattatttatcggccttctcatcggtgttttccgtacagcaccaaaatctgacaataagttaaaggctgccttacaaaaattattaggttggttacttaacatctatattgaggtcttccgcgggacacctatgattgtacaatcgatggttatctactacggaacagcacaagcttttggagtttcgctggaccgtacactagcagctatatttattgtttcaatcaatactggtgcttatatgagcgaaattgtacgtggtggtattttctctgttgataaaggacaatttgaagccgcaactgcacttggtttcacccacggacaaaccatgcgaaaaattgttctaccacaagttgtacgtaacatactcccagctactggtaatgagtttgttatcaatatcaaagatacctctgtactgaacgttatctctgttgtcgaactctacttctctggtaatactgttgcaacacaaacctaccaatatttccaaacattcaccattattgcgattatttacttcatcttaaccttcaccgtaacacgtatcttacgttacattgaaaaacgttttgattcagataattacacaaccggtgcgaatcaattacaagtc

SEQ ID NO: 8924 - protein, 516 aa, Streptococcus agalactiae
  MISC_FEATURE (1)..(516): Xaa = Any Amino Acid
MKKILLSLFTALLITXGGMTSIQADEYLRVGMEAAYAPFNWTQNDNTNGAVPIEGTDQYANGYDVQVAKKLAKKLNKKVVVVKTKWEGLVPALTSGKLDMIIAGMSPTEERKKEINFSKPYYISEPTLVVNAEGKYTNAKNISDFKNAKVTAQQGVYLYNLIDQINGVKKEVAMGDFNQLRQAVESGVVDAYVSERPDATSAQTANPKLKMIELHQGFKTSDADTNISVGMRKGDNRINQVNQVLESISRDKQIALMDKMIKEQPSVKKEKNGKPNFFEQMATILKNNGSQFLRGTATTLLISMVGTIVGLFIGLLIGVFRTAPKSDNKLKAALQKLLGWLLNIYIEVFRGTPMIVQSMVIYYGTAQAFGVSLDRTLAAIFIVSINTGAYMSEIVRGGIFSVDKGQFEAATALGFTHGQTMRKIVLPQVVRNILPATGNEFVINIKDTSVLNVISVVELYFSGNTVATQTYQYFQTFTIIAIIYFILTFTVTRILRYIEKRFDSDNYTTGANQLQV

SEQ ID NO: 8925 - DNA, 2349 bp, Streptococcus agalactiae; identical to SEQ ID NO: 5873

SEQ ID NO: 8926 - protein, 783 aa, Streptococcus agalactiae
VKKLKHSMKSKTSSNDKKQKTKTQKQEISPSTVNTLAYQGLFQNGLMQVSPSYFSQTYLLGDVNYQTVGLDDKGAIVEKYSDLINSLDDKTNFQLTIFNQKVNLEKFRKSILYPLQEDGFDTYRDELNRMMDANLEAGENNFSAVKFLSFGKSDQTPKLAFRSLSQIGEYFKSGFSEIDVSLGLLGGEERVNVLADMLRGENHLPFSYKDLTLSGQSTKHFIAPTYLSFKHKNHIELDDRLLQIVYVRDYGMELGDKFIRDLMQSDLEVMISLHAKGSTKSETMTKLRTKKTLMESQKIGEQQKMARTGIYLEKVGHVLENNIDEAEALLQTMTQTGDKLFDTVFLIGVLADTEDQLKQSLDIIKQVAGSNDMIIDNLTYMQEAAFNSLLPFGKNYLEGVSRSLLTSNIAVNAPWTSVDIHDKGGKFYGINQISSNIISIDRGKLNTPSGLILGTSGAGKGMATKHEIISTKLKEADSDTEIIIVDPENEYSIIGQAFGGESIDIAPDSTTFLNVLELSDENMDEDPVKVKSEFLLSWIGKLLDRKMDGREKSLIDRVTRLTYKHFDTPSLVEWVFVLSQQPEQEAKDLALDMELYVEGSLDIFSHRTNIKTDSHFLIYNVKKLGDELKQIALMVIFDQIWNRVVKNQKLGKKTWIYFDEMQLLLLDKYASDFFFKLWSRVRKYGAIPTGITQNVETLLLDANGRRIIANSEFMILLKQAKSDREELVHMLGLSKELEKYLVNPEKGAGLIKAGSTVVPFKNKIPQHTKLFDIMSTDPEKMRT

SEQ ID NO: 8927 - DNA, 2328 bp, Streptococcus agalactiae
atgaaatcaaagacctcttctaatgacaaaaagcaaaagacgaaaacacagaaacaggaaatcagcccttctaccgtaaatacgttagcctatcaaggactttttcagaatggccttatgcaggtcagtccaagctatttctcacaaacctatctcttaggagatgttaattaccaaacagttggcttagatgataagggagctatcgtggagaaatattccgatttaatcaattcactggatgataagaccaatttccaactgactattttcaatcaaaaagttaatttggaaaaatttcgtaagagtattctctatcccttgcaggaagatgggtttgatacttatcgtgatgaattgaatcgcatgatggatgccaacttagaggcgggtgagaacaacttttcagctgtcaagtttctttcatttggcaagagcgaccaaacaccaaaactagcttttcgttctctgtcacagattggggaatatttcaagagtggcttttcagagattgatgtatctcttggtttacttggtggagaggagcgagtgaatgtccttgcggatatgttacgaggtgaaaatcatttaccgttttcttataaggatttgactctctcaggtcaatccaccaaacactttattgccccaacctacctttcctttaaacacaagaatcatattgaattggacgatcgattattacagattgtttatgttcgcgactatggcatggagttaggggataaatttattcgagacctcatgcagtcagatttggaagtgatgattagcctacatgccaaaggctctactaagtctgaaaccatgaccaagctacgaaccaagaagaccttgatggaatcacaaaagattggtgaacaacaaaaaatggctcggactggaatctatttggagaaggtcggccatgttcttgagaacaacatcgatgaagctgaagctcttcttcaaaccatgacccaaacaggagataaactgtttgacaccgtatttctaattggcgtgctagcggatactgaagaccaactcaaacaatctcttgatattatcaagcaagtggcagggtctaatgatatgattattgataacttgacctatatgcaagaagctgcctttaatagtctcttgccatttgggaagaactatctcgaaggtgtttctcggtctctattgacttcaaatattgccgtgaatgcaccttggacttccgtagatattcatgacaagggtgggaaattttatggcatcaatcaaatctcaagtaatatcatcagtattgaccgtggcaagttaaatactccatcaggtttgattttagggacttctggagctggcaaagggatggcgacaaaacacgaaatcatctcaactaagctcaaggaagcagatagtgatactgaaattattattgttgacccagaaaatgagtacagtattatcggtcaagcctttggtggggagagtattgatattgccccagactctaccaccttcttaaatgtcttagaactatctgatgagaatatggatgaggacccagttaaggtcaaatccgaatttctcttgtcttggattggaaagctcttggaccgcaaaatggatggtcgtgaaaaatccttgatagatcgtgtgacacgcttgacatataagcattttgacacaccgtccttggtcgaatgggtctttgtcttatctcaacaacctgaacaggaagctaaggacttggcactggatatggaactctatgtggaagggtcgctggacatattttcacatcggaccaatattaaaacagacagtcatttcctgatttacaatgtcaaaaagctaggcgatgagttaaaacaaattgccctcatggttatctttgaccaaatttggaatcgggtggtcaaaaaccaaaagctagggaagaagacctggatttactttgatgaaatgcagctactcttattggacaagtatgcctctgatttctttttcaaactttggagtcgtgtccgtaagtatggggcgataccgacaggtattactcagaatgtagaaacgcttcttttggatgccaatggcagacgcattattgccaatagcgagttcatgattcttttaaaacaggctaagagcgatcgcgaagaattggtgcatatgcttgggctttctaaagagctggagaagtacttggtcaatcctgaaaaaggggcaggcttaattaaggccggttccaccgttgttccgttcaagaataagattccgcaacacaccaagctctttgacatcatgagtacggaccctgaaaaaatgaggaca

SEQ ID NO: 8928 - protein, 776 aa, Streptococcus agalactiae
MKSKTSSNDKKQKTKTQKQEISPSTVNTLAYQGLFQNGLMQVSPSYFSQTYLLGDVNYQTVGLDDKGAIVEKYSDLINSLDDKTNFQLTIFNQKVNLEKFRKSILYPLQEDGFDTYRDELNRMMDANLEAGENNFSAVKFLSFGKSDQTPKLAFRSLSQIGEYFKSGFSEIDVSLGLLGGEERVNVLADMLRGENHLPFSYKDLTLSGQSTKHFIAPTYLSFKHKNHIELDDRLLQIVYVRDYGMELGDKFIRDLMQSDLEVMISLHAKGSTKSETMTKLRTKKTLMESQKIGEQQKMARTGIYLEKVGHVLENNIDEAEALLQTMTQTGDKLFDTVFLIGVLADTEDQLKQSLDIIKQVAGSNDMIIDNLTYMQEAAFNSLLPFGKNYLEGVSRSLLTSNIAVNAPWTSVDIHDKGGKFYGINQISSNIISIDRGKLNTPSGLILGTSGAGKGMATKHEIISTKLKEADSDTEIIIVDPENEYSIIGQAFGGESIDIAPDSTTFLNVLELSDENMDEDPVKVKSEFLLSWIGKLLDRKMDGREKSLIDRVTRLTYKHFDTPSLVEWVFVLSQQPEQEAKDLALDMELYVEGSLDIFSHRTNIKTDSHFLIYNVKKLGDELKQIALMVIFDQIWNRVVKNQKLGKKTWIYFDEMQLLLLDKYASDFFFKLWSRVRKYGAIPTGITQNVETLLLDANGRRIIANSEFMILLKQAKSDREELVHMLGLSKELEKYLVNPEKGAGLIKAGSTVVPFKNKIPQHTKLFDIMSTDPEKMRT

SEQ ID NO: 8929 - DNA, 1818 bp, Streptococcus agalactiae
atgtattccaggcaaaaagcatttgtctttggactcttgggtctcgcctttggctatttctgccatcgtctaaccctactctatgatagtttaactaatgccccacctatggaacgtattgcctacctcttaggagaggggttaaatcaggttttcaatcctttatggctattttcctttactcaaaaatcttttcttgcctttatccttggggttctaatgatgacgctagtctatctttatgtatcgacaggacagaaagtctatcgggaaggggaagaatatggttctgcacgatttggaaccagtaaggaaaagcggaacttttacagtaagaatcctttcaatgacacgattttggctcgtgatgttcgtctaaccttgttggaaaagaagaaaccccagtttgaccgaaataaaaatttgattgtcattgggggttctggggcaggtaagacctttcgctttgtgaaacccaaccttatccaacttaactgttccaatattgtcgtagatccgaaagaccatttggctgagaagacaggtaaactctttttagaaaacggttatcaggttaaggttttagacttggttaatatgaccaattcagacggttttaatccctttcgttatgtagaaacagagaatgatttgaaccgtatgttaacggtctattttaataataccaaaggaaatggttctcgcagtgatccgttttgggatgaggcttccatgacattggtgagagctattgcctcttacttggtggatttttacaatcctccaggaagttctaagcaagagcaggaagcaagacgtaagcgtggccgttatccagccttttctgagattgggaaactcatcaaactcttatcaaagggagacaatcaggacaaaagtatacttgaagtcctgtttgaagactatgctaagaaatatggtcatgagaactttaccatgagaaactgggcagattttcaaaactataaggataagaccttggattcggtgattgcggtcacaacagctaaatttgccctctttaatattcaatcggtgattgatttgacgcaaagagacactatggatttgaaaacgtggggcactcaaaagaccatggtctatcttgttattccagacaatgatacgacctttcgtttcctatctgctttatttttctctacggttttctccactttgaccagacaggctgatgttgactttaaagggcaactgcctattcatgttagaagctatctggatgagtttgcgaatgtcggagaaatcccagacttcgctgaacaaacctcaacagtccgctctaggaatatgagtcttgtgcctattctccaaaatatcgctcaactccaaggactttataaggaaaaagaagcttggaaaactatactggggaactgtgacagtctcctctatttgggtgggaatgacgaggaaactttcaaattcatgagtggacttttaggcaaacaaaccgttgatgtcagaagcaccagtcgttcttttgggcagacgggttcaagttctacctctcatcagaaaattgctcgtgacttgatgacggctgatgaagttggaactatgaaacgagatgagtgcctcgtacgcattgcaggggttcctgtttttcgaaccaagaaatattttcctctcaaacataaacattggaagttgctcgctgataaggaaaccgatgaccgttggtggaactatcacatcaatcccttggctaaagaggaagaattggacttgtcagactatcaaataagggatttaagcacagaaacgtcactacattaa

SEQ ID NO: 8930 - protein, 605 aa, Streptococcus agalactiae; identical to SEQ ID NO: 5884

SEQ ID NO: 8931 - DNA, 588 bp, Streptococcus agalactiae; identical to SEQ ID NO: 5889

SEQ ID NO: 8932 - protein, 196 aa, Streptococcus agalactiae
VTMIRIVLFYLAIQLNGLLVSLFLKEYLTIEGIVLLQLVLLSVTCLEIARHKTVPLKIVGVQNRLSWLLLGFVAMVAFAVFISFLFPVQTRNQAVLVQVGKQVPPIIFLLFLVNASILEEIVYRQLLWEKLTFPFEQIGVTSFLFVLSHGPNQLGSWLIYSCLGLTLAVVRLKTDCMTAIALHLLWNSLAYVVTFL

SEQ ID NO: 8933 - DNA, 1044 bp, Streptococcus agalactiae; identical to SEQ ID NO: 5925

SEQ ID NO: 8934 - protein, 348 aa, Streptococcus agalactiae
LLGIAHNVLGFTSVFHLLFSAIFITNYVTRNGDLMGRFKELLESKKTLILHGALGTELESRGCDVSGKLWSAKYLIEDPAAIQTIHEDYIRAGADIVTTSTYQATLQGLAQVGVSESQTEDLIRLTVQLAKAAREQVWKSLTKEEKSERIYPLISGDVGPYAAFLADGSEYTGLYDIDKQGLKNFHRHRIELLLDEGVDILALETIPNAQEAEALIELLAEDFPQVEAYMSFTSQDGKTISDGSAVADLAKAIDVSPQVVALGINCSSPSLVADFLQAIAEQTNKPLVTYPNSGEVYDGASQSWQSSPDHSHTLLENTSDWQKLGAQVVGGCCRTRPADIADLSAHLK

SEQ ID NO: 8935 - DNA, 2937 bp, Streptococcus agalactiae
atgtttcgtaaatataattttgaaaaaggtttaaagttttccattcgtaaattttcggttggagtagcttcagttgctataggatcattattattcatttctcctcaggtacttgcagatgagacaactagtgttacatctgcaacaactccaacaggtgtaacggccacagatgcaaacttggtcacttctaacaattcaactcctacttccactaataggagtgcaactagcactcaaggaagtaatttgagtaatacttcagaaatcattaagcctgcaactttagcagcaacatcaccaacaactgataatgtagccccatcagtagacaagaggacgtatgctactagtggcgattggacgttacaaaatccatatgctgacagtgttcgaaataaaaatatttctccaagtgttcgtgatgaatcatttaaaagtgctgaaacaacggtggttcgtgacgataactcaaccgtcaaagtgactgcgacaattactcctgtaccagggaatgatgaaggttctggtgttttaacaaatggtggtaatcagtcagaatataaagcaacatcagaaatgtttgttggaaatgtagatcctgcaaaaatacctgctttaggtgtctatacacaaccaggacgtactgaaggaggtagtaaactatctgataagctcaattttaatgggaaggcgccatcaactattttaacattgaaatttgacaaggcagttacagaccctattattgacttatctggtgttggaggtaatgcacatctatcatttacagaaactaccaatgaaaatggtaggattgttgaaaaaattgactatgcacgtggttcatataattcaacgttctttgagttaataactccaggtataagccttgaaaaagcaagttcaggagttaatttaacagttacagcgaatacggttgatgtaacagacaaaaacacctttaatgagtcagttgttaatccatctgacgcagactttgtcaatggtctagatagaacgcctgatgcagtcccagcgggaacaggttcaattcgtttaaaaggaacctttacagaggtttcatttaaattatatcatcaagctgttccatttacagcattttctaaagagaaatatcatacaggagatggatattataatagtactgcgaatattcgaccaactgtagttaaaccagatagtattaatggtttaaataagcacgcaagcgatgttattgatgataaaatttccgataataatgatatttcgaacgatgacttacttcgtttatctgttcgcttacaaaatccgcgtggatcagttgttgtaaattatattgatacagaaggcaatattattggtactgaatacaaagataccaccgatgcaattctaggaacacattacaatacggcagaatcatcaggagaccttagttcagacgcgacagttgagcgtcctttcactattactaaagatggtaaggtgtatgaattagtagcagaaaatattacagtaccagttggtaaggttaattcggatggtacgttggctacaaatggaggctcatttaattatggtactgatgcagcatctggagaagttgcagaaggtactaagtcagtaacttatgtttatagcattaaacaagaatcaaagggcaatgttcatgcccgctatgttattttagggacagagactgagcttgcaagtgttaaaacagttaaatcagaagctccaattgatgaagcatattcagatagagcacctgcaactcttgaaaaagatggtaagttgtatgaatttgtacatgtgcgtgataataagggcgatgctccagcagatggtaaggtgactgaacaagatcagaccattacatatgaatatgttgaagttcctaagggtcgtgtggttgtagattatgttatcgagggtactgctacaaaacttaaagatacctatgtcgataccccaacagcttatattcgtgataaagaaggccaagctactccttataatacagctgagaatgattctgagaaaccattgttacttgacaaagatggaataaaatatgaactagtttcaattcaagagggatcagcagcggagaaaggaacacttcgagaaggggaacaacatgttgtctatcaatatcgtaaagtggtagaggttccaagcgttaaagttggaaatgttcatgcccgctatgttattttagggacagagactgagcttgcaagtgttaaaacagttaaatcagaagctccaattgatgaagcatattcagatagagcacctgcaactcttgaaaaagatggtaagttgtatgaatttgtacatgtgcgtgataataagggcgatgctccagcagatggtaaggtgactgaacaagatcagaccattacatatgaatataagcttaagaaagatgaatcagaggctgtagggaatgtagtgattaactatgtggacgaaacaggtaatgttatcaaaaaaccaatactagatacacacgaatcaaaggttgggacaccatatgataccacagattataaattcgctgaaattaaatttaatggtaagatttataaactcgtttctgcaaaaactatgggaaatgaattcggaaaggtcactgaaggcacaacagaagtgacttatgtgtatcgagaatcagtaaaatctaccctaccaaaggaaatgggaatttctattccaagcgaatcagagtctcctaagtttatatctacccaaactacagaaaatagacctaacaaaggagtattaacttcatctaaaaaaccaaccaataaatctgttcttccaactacaggcgaggaaagtaatagaactctcggagttgttgggattactctagtagcaacaacagctactttggcagctagcagtttaaaacgacgtaaaaat

SEQ ID NO: 8936 - protein, 979 aa, Streptococcus agalactiae
MFRKYNFEKGLKFSIRKFSVGVASVAIGSLLFISPQVLADETTSVTSATTPTGVTATDANLVTSNNSTPTSTNRSATSTQGSNLSNTSEIIKPATLAATSPTTDNVAPSVDKRTYATSGDWTLQNPYADSVRNKNISPSVRDESFKSAETTVVRDDNSTVKVTATITPVPGNDEGSGVLTNGGNQSEYKATSEMFVGNVDPAKIPALGVYTQPGRTEGGSKLSDKLNFNGKAPSTILTLKFDKAVTDPIIDLSGVGGNAHLSFTETTNENGRIVEKIDYARGSYNSTFFELITPGISLEKASSGVNLTVTANTVDVTDKNTFNESVVNPSDADFVNGLDRTPDAVPAGTGSIRLKGTFTEVSFKLYHQAVPFTAFSKEKYHTGDGYYNSTANIRPTVVKPDSINGLNKHASDVIDDKISDNNDISNDDLLRLSVRLQNPRGSVVVNYIDTEGNIIGTEYKDTTDAILGTHYNTAESSGDLSSDATVERPFTITKDGKVYELVAENITVPVGKVNSDGTLATNGGSFNYGTDAASGEVAEGTKSVTYVYSIKQESKGNVHARYVILGTETELASVKTVKSEAPIDEAYSDRAPATLEKDGKLYEFVHVRDNKGDAPADGKVTEQDQTITYEYVEVPKGRVVVDYVIEGTATKLKDTYVDTPTAYIRDKEGQATPYNTAENDSEKPLLLDKDGIKYELVSIQEGSAAEKGTLREGEQHVVYQYRKVVEVPSVKVGNVHARYVILGTETELASVKTVKSEAPIDEAYSDRAPATLEKDGKLYEFVHVRDNKGDAPADGKVTEQDQTITYEYKLKKDESEAVGNVVINYVDETGNVIKKPILDTHESKVGTPYDTTDYKFAEIKFNGKIYKLVSAKTMGNEFGKVTEGTTEVTYVYRESVKSTLPKEMGISIPSESESPKFISTQTTENRPNKGVLTSSKKPTNKSVLPTTGEESNRTLGVVGITLVATTATLAASSLKRRKN

SEQ ID NO: 8937 - DNA, 1629 bp, Streptococcus agalactiae
atgaaaaaaggacaagtaaatgatactaagcaatcttactctctacgtaaatataaatttggtttagcatcagtaattttagggtcattcataatggtcacaagtcctgtttttgcggatcaaactacatcggttcaagttaataatcagacaggcactagtgtggatgctaataattcttccaatgagacaagtgcgtcaagtgtgattacttccaataatgatagtgttcaagcgtctgataaagttgtaaatagtcaaaatacggcaacaaaggacattactactcctttagtagagacaaagccaatggtggaaaaaacattacctgaacaagggaattatgtttatagcaaagaaaccgaggtgaaaaatacaccttcaaaatcagccccagtagctttctatgcaaagaaaggtgataaagttttctatgaccaagtatttaataaagataatgtgaaatggatttcatataagtctttttgtggcgtacgtcgatacgcagctattgagtcactagatccatcaggaggttcagagactaaagcacctactcctgtaacaaattcaggaagcaataatcaagagaaaatagcaacgcaaggaaattatacattttcacataaagtagaagtaaaaaatgaagctaaggtagcgagtccaactcaatttacattggacaaaggagacagaattttttacgaccaaatactaactattgaaggaaatcagtggttatcttataaatcattcaatggtgttcgtcgttttgttttgctaggtaaagcatcttcagtagaaaaaactgaagataaagaaaaagtgtctcctcaaccacaagcccgtattactaaaactggtagactgactatttctaacgaaacaactacaggttttgatattttaattacgaatattaaagatgataacggtatcgctgctgttaaggtaccggtttggactgaacaaggagggcaagatgatattaaatggtatacagctgtaactactggggatggcaactacaaagtagctgtatcatttgctgaccataagaatgagaagggtctttataatattcatttatactaccaagaagctagtgggacacttgtaggtgtaacaggaactaaagtgacagtagctggaactaattcttctcaagaacctattgaaaatggtttagcaaagactggtgtttataatattatcggaagtactgaagtaaaaaatgaagctaaaatatcaagtcagacccaatttactttagaaaaaggtgacaaaataaattatgatcaagtattgacagcagatggttaccagtggatttcttacaaatcttatagtggtgttcgtcgctatattcctgtgaaaaagctaactacaagtagtgaaaaagcgaaagatgaggcgactaaaccgactagttatcccaacttacctaaaacaggtacctatacatttactaaaactgtagatgtgaaaagtcaacctaaagtatcaagtccagtggaatttaattttcaaaagggtgaaaaaatacattatgatcaagtgttagtagtagatggtcatcagtggatttcatacaagagttattccggtattcgtcgctatattgaaatt

SEQ ID NO: 8938 - protein, 543 aa, Streptococcus agalactiae
MKKGQVNDTKQSYSLRKYKFGLASVILGSFIMVTSPVFADQTTSVQVNNQTGTSVDANNSSNETSASSVITSNNDSVQASDKVVNSQNTATKDITTPLVETKPMVEKTLPEQGNYVYSKETEVKNTPSKSAPVAFYAKKGDKVFYDQVFNKDNVKWISYKSFCGVRRYAAIESLDPSGGSETKAPTPVTNSGSNNQEKIATQGNYTFSHKVEVKNEAKVASPTQFTLDKGDRIFYDQILTIEGNQWLSYKSFNGVRRFVLLGKASSVEKTEDKEKVSPQPQARITKTGRLTISNETTTGFDILITNIKDDNGIAAVKVPVWTEQGGQDDIKWYTAVTTGDGNYKVAVSFADHKNEKGLYNIHLYYQEASGTLVGVTGTKVTVAGTNSSQEPIENGLAKTGVYNIIGSTEVKNEAKISSQTQFTLEKGDKINYDQVLTADGYQWISYKSYSGVRRYIPVKKLTTSSEKAKDEATKPTSYPNLPKTGTYTFTKTVDVKSQPKVSSPVEFNFQKGEKIHYDQVLVVDGHQWISYKSYSGIRRYIEI

SEQ ID NO: 8939 - DNA, 1068 bp, Streptococcus agalactiae
atgacaaatacggtaacaccaaaagagacggctggttcttttatcaataaagtgttaggtgggacagcaactgcaatcgttgtagcactcatcccaaatgctatcctagccacttttttgaaaccatttttatcttacggacttgctgcagagttcttacacatcgtgcaggtattccaatttttcacaccaattatggcaggatttttgattggtcaacagtttaaattcaccccaatgcaacagcttgctgttggaggtgctgcatatattggttctggtgcgtgggcttacacagaagttattcaaaaaggagttgctactggtagtttccaattgcgtgggattggtgatctcatcaatatgatgctaacagcagctttagcagttttagcagttaagtggtttggtaataaatttggktccctamccattatcttgttacctattatcataggtacaggcgtaggctatttaggatggaaattactcccttacgtttcatatgtgacaacacttattggtcaaggaattaattcttttactactttacaaccaattgcgatgtcaattctaattgcgatggctttttcaatgcttattgtaagtcctatttcaacagtagcgattggtctagcgattggtcttaatggtatgtcagcaagtgcagcttcaatgggagttgcttcaacaacagcagtgctagtttgggcaacgatgaaggctaataagtctggagttccaattgctattgctttaggtgcaatgaagatgatgatgccaaatttcctaaagcatccagtaatggcgattccaatgcttatgactgctacagtaagttctctaacagtcccattgtttaaattggtggggacaccagcttcgtctggttttgggcttgttggtgcagtaggtccgattgcttcatttgaagcaggagcaagtatgttgattgttatcttatcttggctcgttattccttttgcagtaggttttgtatcacacaaaatttgtaaagacattctgaaactttataaagacgatattttcgtttttgaaggtcaaaat

SEQ ID NO: 8940 - protein, 356 aa, Streptococcus agalactiae
  MISC_FEATURE (1)..(356): Xaa = Any Amino Acid
MTNTVTPKETAGSFINKVLGGTATAIVVALIPNAILATFLKPFLSYGLAAEFLHIVQVFQFFTPIMAGFLIGQQFKFTPMQQLAVGGAAYIGSGAWAYTEVIQKGVATGSFQLRGIGDLINMMLTAALAVLAVKWFGNKFGSLXIILLPIIIGTGVGYLGWKLLPYVSYVTTLIGQGINSFTTLQPIAMSILIAMAFSMLIVSPISTVAIGLAIGLNGMSASAASMGVASTTAVLVWATMKANKSGVPIAIALGAMKMMMPNFLKHPVMAIPMLMTATVSSLTVPLFKLVGTPASSGFGLVGAVGPIASFEAGASMLIVILSWLVIPFAVGFVSHKICKDILKLYKDDIFVFEGQN

SEQ ID NO: 8941 - DNA, 3402 bp, Streptococcus agalactiae
ttgcgtaaaaaacaaaaactaccatttgataaacttgccattgcgcttatatctacgagcatcttgctcaatgcacaatcagacattaaagcaaatactgtgacagaagacactcctgctaccgaacaagccgtagaacccccacaaccaatagcagtttctgaggaatcacgatcatcaaaggaaactaaaacctcacaaactcctagtgatgtaggagaaacagtagcagatgacgctaatgatctagcccctcaagctcctgctaaaactgctgatacaccagcaacctcaaaagcgactattagggatttgaacgacccttctcatgtcaaaaccctgcaggaaaaagcaggcaagggagctgggaccgttgttgcagtgattgatgctggttttgataaaaatcatgaagcgtggcgcttaacagacaaaactaaagcacgttaccaatcaaaagaaaatcttgaaaaagctaaaaaagagcacggtattacctatggcgagtgggtcaatgataaggttgcttattaccacgactatagtaaagatggtaaaaacgctgttgatcaagaacacggcacacacgtgtcagggatcttgtcaggaaatgctccatctgaaatgaaagaaccttaccgcctagaaggtgcgatgcctgaggctcaattgcttttgatgcgtgtcgaaattgtaaatggactagcagactatgctcgtaactacgctcaagctatcagagatgctgtcaacttgggagctaaggtgattaatatgagctttggtaatgctgcactagcttacgccaaccttccagacgaaaccaaaaaagcctttgactatgccaaatcaaaaggtgttagcattgtgacctcagctggtaatgatagtagctttgggggcaagccccgtctacctctagcagatcatcctgattatggggtggttgggacacctgcagcggcagattcaacattgacagttgcttcttacagcccagataaacagctcactgaaactgctacggtcaaaacagacgatcatcaagataaagaaatgcctgttatttcaacaaaccgttttgagccaaacaaggcttacgactatgcttatgctaatcgtggtacgaaagaggatgattttaaggatgtcgaaggtaagattgcccttattgaacgtggcgatattgatttcaaagataagattgcaaacgctaaaaaagctggtgctgtaggggtcttgatctatgacaatcaagacaagggcttcccgattgaattgccaaatgttgaccagatgcctgcggcctttatcagtcgaagagacggtctcttattaaaagacaatcccccaaaaaccattaccttcaatgcgacacctaaggtattgccaacagcaagtggcaccaaactaagccgcttctcaagctggggtctgacagctgacggcaatattaaaccggatattgcagcacccggccaagatattttgtcatcagtggctaacaacaagtatgccaaactttctggaactagtatgtctgcaccattggtagcgggtatcatgggactgttgcaaaagcaatatgagacacagtatcctgatatgacaccatcagagcgtcttgatttagctaagaaagtattgatgagctcagcaactgccctatatgatgaagatgaaaaagcttatttttctcctcgccaacagggagcaggagcagtcgatgctaaaaaagcttcagcagcaacgatgtatgtaacagataaggacaatacctcaagcaaggttcacctgaacaatgtttctgataaatttgaagtaacagtaacagttcacaacaaatctgataaacctcaagagttgtattaccaagtaactgttcaaacagataaagtagatggaaaacactttgccttggctcctaaagcattgtatgagacatcatggcaaaaaatcacaattccagccaatagcagcaaacaagtcaccgttccaatcgatgctagtcgatttagcaaggacttgcttgcccaaatgaaaaatggctatttcttagaaggttttgttcgtttcaaacaagatcctacaaaagaagagcttatgagcattccatatattggtttccgaggtgattttggcaatctgtcagccttagaaaaaccaatctatgatagcaaagacggtagcagctactatcatgaagcaaatagtgatgccaaagaccaattagatggtgatggattacagttttacgctctgaaaaataactttacagcacttaccacagagtctaacccatggacgattattaaagctgtcaaagaaggggttgaaaacatagaggatatcgaatcttcagagatcacagaaaccatttttgcaggtacttttgcaaaacaagacgatgatagccactactatatccaccgtcacgctaatggcaaaccatatgctgcgatctctccaaatggggacggtaacagagattatgtccaattccaaggtactttcttgcgtaatgctaaaaaccttgtggctgaagtcttggacaaagaaggaaatgttgtttggacaagtgaggtaaccgagcaagttgttaaaaactacaacaatgacttggcaagcacacttggttcaacccgttttgaaaaaacgcgttgggacggtaaagataaagacggcaaagttgttgctaacggaacctacacctatcgtgttcgctacacgccgattagctcaggtgcaaaagaacaacacactgattttgatgtgattgtagacaatacgacacctgaagtcgcaacatcggcaacattctcaacagaagatagtcgtttgacacttgcatctaaaccaaaaaccagccaaccggtttaccgtgagcgtattgcttacacttatatggatgaggatctgccaacaacagagtatatttctccaaatgaagatggtacctttactcttcctgaagaggctgaaacaatggaaggcgctactgttccattgaaaatgtcagactttacttatgttgttgaagatatggctggtaacatcacttatacaccagtgactaagctattggagggccactctaataagccagaacaagacggttcagatcaagcaccagacaagaaaccagaagctaaaccagaacaagacggttcaggtcaaacaccagataaaaaaaaagaaactaaaccagaaaaagatagttcaggtcaaacaccaggtaaaactcctcaaaaaggtcaatcttctcgtactctagagaaacgatcttctaagcgtgctttagctacaaaagcatcaacaagagatcagttaccaacgactaatgacaaggatacaaatcgtttacatctccttaagttagttatgaccactttcttcttggga

SEQ ID NO: 8942 - protein, 1134 aa, Streptococcus agalactiae
MRKKQKLPFDKLAIALISTSILLNAQSDIKANTVTEDTPATEQAVEPPQPIAVSEESRSSKETKTSQTPSDVGETVADDANDLAPQAPAKTADTPATSKATIRDLNDPSHVKTLQEKAGKGAGTVVAVIDAGFDKNHEAWRLTDKTKARYQSKENLEKAKKEHGITYGEWVNDKVAYYHDYSKDGKNAVDQEHGTHVSGILSGNAPSEMKEPYRLEGAMPEAQLLLMRVEIVNGLADYARNYAQAIRDAVNLGAKVINMSFGNAALAYANLPDETKKAFDYAKSKGVSIVTSAGNDSSFGGKPRLPLADHPDYGVVGTPAAADSTLTVASYSPDKQLTETATVKTDDHQDKEMPVISTNRFEPNKAYDYAYANRGTKEDDFKDVEGKIALIERGDIDFKDKIANAKKAGAVGVLIYDNQDKGFPIELPNVDQMPAAFISRRDGLLLKDNPPKTITFNATPKVLPTASGTKLSRFSSWGLTADGNIKPDIAAPGQDILSSVANNKYAKLSGTSMSAPLVAGIMGLLQKQYETQYPDMTPSERLDLAKKVLMSSATALYDEDEKAYFSPRQQGAGAVDAKKASAATMYVTDKDNTSSKVHLNNVSDKFEVTVTVHNKSDKPQELYYQVTVQTDKVDGKHFALAPKALYETSWQKITIPANSSKQVTVPIDASRFSKDLLAQMKNGYFLEGFVRFKQDPTKEELMSIPYIGFRGDFGNLSALEKPIYDSKDGSSYYHEANSDAKDQLDGDGLQFYALKNNFTALTTESNPWTIIKAVKEGVENIEDIESSEITETIFAGTFAKQDDDSHYYIHRHANGKPYAAISPNGDGNRDYVQFQGTFLRNAKNLVAEVLDKEGNVVWTSEVTEQVVKNYNNDLASTLGSTRFEKTRWDGKDKDGKVVANGTYTYRVRYTPISSGAKEQHTDFDVIVDNTTPEVATSATFSTEDSRLTLASKPKTSQPVYRERIAYTYMDEDLPTTEYISPNEDGTFTLPEEAETMEGATVPLKMSDFTYVVEDMAGNITYTPVTKLLEGHSNKPEQDGSDQAPDKKPEAKPEQDGSGQTPDKKKETKPEKDSSGQTPGKTPQKGQSSRTLEKRSSKRALATKASTRDQLPTTNDKDTNRLHLLKLVMTTFFLG

SEQ ID NO: 8943 - DNA, 480 bp, Streptococcus agalactiae; identical to SEQ ID NO: 6127

SEQ ID NO: 8944 - protein, 160 aa, Streptococcus agalactiae
LERIPVQFKGCDDYYNENVGYPLSRINLEHYLTEGGVLYFVVYSKDVSPTVTYASLTPKVIKNVLPASDKKKRIKKKEDIFLLFWMAIIAKLLILPYPALQTSYKSRPCLRRSSLRKLTQIPFSIVTKVGNTNMKSITAFLQVKAYILPCLAKGPARIMV

SEQ ID NO: 8945 - DNA, 597 bp, Streptococcus agalactiae; identical to SEQ ID NO: 6135

SEQ ID NO: 8946 - protein, 199 aa, Streptococcus agalactiae
LMLNQYFLHFEESKIVTPLYAFDIDYLNIPKYVGLSKEQILENYRILLTYLNIPWFLALDMPDFPSSASGLFHFFEVKKLFMLDYLILIFSGMGTLWFVRHLNRRRESWRLLPYFRQGTLIPLAILLALLVSFDTLFVLFHKVFFNNDAWLFNATTDPIILALPAEFFMHSFLLAFGLIEVFLILGYFTTKYRISAPSR

SEQ ID NO: 8947 - DNA, 2004 bp, Streptococcus agalactiae
atggaacatagtcagatggatcacagcaatatggatcacagtgaaatggatcatggcgcaatgggagggcatgcccaccaccatcacggtagctttaaggagattttcttgaagtcactcccattaggaattgcaatcttactcattacgcctatgatggatattcagttgcctttccaaattatctttccttatgcagacgttgtagcagctgtattggcaacaattctatacatttttggcggaaaaccattctacatgggtgcgaaagatgagtttaattcaaaagctccaggcatgatgtccttgattactttgggaataacggtttcttatgcctatagtgtttacgcagtggccgctcgttatgtgaccggagagcatgtcatggacttcttctttgagtttacaaccttaattttaatcatgttattaggacactggattgaaatgaaggcattgggtgaagcaggggacgcgcaaaaagcattggctgagttggtgccgaaagatgctcatgttgttttagaagacgattcgattgagactcgccctgtgtctgaacttcagattggagatgttatccgtgttcaagcaggagaaaatgttccagctgatggtatcattatccgcggagaatctcgtgtaaacgaagcgcttgtgactggggaatcgaaaccaattgaaaaaaaaaccggagatgaggtcatcggtggatcaaccaatggtggcggagtcctctatgtggaaataaagcagacgggcgatcagtccttcatttctcaggttcagacattaatcagccaagcgcaaagccaaccttctcgagcagagaatgtggctcaaaaagtagctagctggttgttctacattgcggttgtagtagctttaatcgccctactaatctggacgatcattgcggatctgcctacagccgttatctttactgtgactgcgttagttattgcctgcccacatgctttgggtcttgctattcccttggtagtatcacgtagtactagtttgggtgcaagccgaggattactggttaaaaatagagaagctttggaattaactactaaagcggatgttatggtattggataaaacaggtactttaacaactggtgaatttaaagtgttggacgtcactgttttgagtgataaatattctgaagaagaaattacaggcttgttggcgggtatagaggcgggctccagtcacccgattgcccaatcgattgtgaaccacgctgaagcgaaaggcattaagtcagtttcctttgactccattgaaatcgtttcgggagcaggaatagaaggggaggcgaacggccaccactatcaattaatcagccaaaaggcatacggaaaagcattgcgtatggatattccgaaaggcgctactttaagtatccttgtagaaaataatgaagcaatcggcgctgtcgcattgggagatgaactgaaagaaaccagcagaaacttgatcgaggtgctgaaaaaatacggaattgaaccactcatggctactggtgataacgaggaagctgcacaaggagttgcagaagttctaggtattcaataccaagccaatcaatctccggaagataagtacaagctggtcgagtccatgaaaaaccaaaacaagacggttatcatggtaggagacggggtcaatgacgcaccttcccttgccttggcagacgtaggtattgcaatcggagctggaacgcaagtagctttggattctgcggatattatccttactcagtctgatccaggggatattgaatcctttatcgagttagcaaacaagacgacacgtaaaatgaaacaaaacttggtatggggagcaggctacaattttatcgcgattccaattgctgctggcctccttgctcctatcggcattaccttgggtccggccttcggcgccgtcctcatgtccttatcgaccgttattgttgccatcaatgctatgacattgaaattagagccgaaa

SEQ ID NO: 8948 - protein, 668 aa, Streptococcus agalactiae
MEHSQMDHSNMDHSEMDHGAMGGHAHHHHGSFKEIFLKSLPLGIAILLITPMMDIQLPFQIIFPYADVVAAVLATILYIFGGKPFYMGAKDEFNSKAPGMMSLITLGITVSYAYSVYAVAARYVTGEHVMDFFFEFTTLILIMLLGHWIEMKALGEAGDAQKALAELVPKDAHVVLEDDSIETRPVSELQIGDVIRVQAGENVPADGIIIRGESRVNEALVTGESKPIEKKTGDEVIGGSTNGGGVLYVEIKQTGDQSFISQVQTLISQAQSQPSRAENVAQKVASWLFYIAVVVALIALLIWTIIADLPTAVIFTVTALVIACPHALGLAIPLVVSRSTSLGASRGLLVKNREALELTTKADVMVLDKTGTLTTGEFKVLDVTVLSDKYSEEEITGLLAGIEAGSSHPIAQSIVNHAEAKGIKSVSFDSIEIVSGAGIEGEANGHHYQLISQKAYGKALRMDIPKGATLSILVENNEAIGAVALGDELKETSRNLIEVLKKYGIEPLMATGDNEEAAQGVAEVLGIQYQANQSPEDKYKLVESMKNQNKTVIMVGDGVNDAPSLALADVGIAIGAGTQVALDSADIILTQSDPGDIESFIELANKTTRKMKQNLVWGAGYNFIAIPIAAGLLAPIGITLGPAFGAVLMSLSTVIVAINAMTLKLEPK

SEQ ID NO: 8949 - DNA, 417 bp, Streptococcus agalactiae
atgaaaaagaaaaacaaatcctctaacattgctataattgcaatcttttttgctattatgcttgtcattcattttttgtcatcatttatttttagtttttggttagtccctattaaacctactttgatgcatatcccagttattattgcatctatagcctatggacctcgtattggtgcaactctaggcgccttaatgggggggatcagcgtagctaacagcagcattgttctattaccaacgagttacctcttctcaccttttgttgaaaatggtaatttttattcgctaattattgcacttgtaccacgtattctaatcgggattattccttatttcgtttacaaattactacacaaccgctttggtttggctatctcaggtgctataggctctctaacaaacacagtatttgtt

SEQ ID NO: 8950 - protein, 139 aa, Streptococcus agalactiae
MKKKNKSSNIAIIAIFFAIMLVIHFLSSFIFSFWLVPIKPTLMHIPVIIASIAYGPRIGATLGALMGGISVANSSIVLLPTSYLFSPFVENGNFYSLIIALVPRILIGIIPYFVYKLLHNRFGLAISGAIGSLTNTVFV

SEQ ID NO: 8951 - DNA, 918 bp, Streptococcus agalactiae; identical to SEQ ID NO: 6169

SEQ ID NO: 8952 - protein, 306 aa, Streptococcus agalactiae
LRETYWKISSDCDKINLAEFSRERMSDLLEWQDLAQLPVSIFKDYVTDAQDAEKPFIWTEVFLREINRSNQEIILHIWPMTKTVILGMLDRELPHLELAKKEIISRGYEPVVRNFGGLAVVADEGILNFSLVIPDVFERKLSISDGYLIMVDFIRSIFSDFYQPIEHFEVETSYCPGKFDLSINGKKFAGLAQRRIKNGIAVSIYLSVCGDQKGRSQMISDFYKIGLGDTGSPIAYPNVDPEIMANLSDLLDCPMTVEDVIDRMLISLKQVGFNDRLLMIRPDLVAEFNRFQAKSMANKGMVSRDE

SEQ ID NO: 8953 - DNA, 1593 bp, Streptococcus agalactiae; identical to SEQ ID NO: 6201

SEQ ID NO: 8954 - protein, 531 aa, Streptococcus agalactiae
LIWRGEKLISNKVKIVRLLNKSKKSLLRGIFSRTTVIAILLILQLLFLLASYSWLEQYRVWLATVEHILTIGAVLYLVNSEMDALSRVTWLILVMIAPLLGAMFLMYTKFDWGYRGLKQRLETLIDESQIYLEDDPETLNQLKSSTSTTYHLVQYFEKAHGNFPVYRNTDVTFLPTGEAFFEKMKEELLKAKKYIFLEFFIIDEGIMWGEILSILEQKVEEGVEVRILYDGMIEITKLSFDYTKRLEKIGIKAKAFSPISPFISTYYNYRDHRKIVVIDGVVGMTGGVNLADEYINHIELFGHWKDSGIMLKGKAVDSFLLLFLQMWSITEEKMLVAPYLGVHDDLVENEGYVIPYGDSPLDTDKVGENVYIDILNHAREYVYIMTPYLILDSELEHAIQFAAERGVDVRIIMPGIPDKPIPYALAKTYYQALTKSGVKIYEYTLGFVHSKIFLSDNTKAVVGTINLDYRSLYHHFECAVYLYKVDAIQDIYRDYMDTLNKSRLVSLKDINNIPKFQKVIGIVTKTIAPLL

SEQ ID NO: 8955 - DNA, 1212 bp, Streptococcus agalactiae; identical to SEQ ID NO: 6243

SEQ ID NO: 8956 - protein, 404 aa, Streptococcus agalactiae
LEVIMQFIYSIIGILLVLGIVYAISFNRKSVSLSLIGKALIVQFIIALILVRIPLGQQVVSVVSTGVTKVINCGQAGLNFVFGSLADSGAKTGFIFAIQTLGNIVFLSALVSLLYYVGILGFVVKWIGKGVGKIMKSSEVESFVAVANMFLGQTDSPILVSKYLGRMTDSEIMVVLVSGMGSMSVSILGGYIALGIPMEYLLIASTMVPIGSILIAKILLPQTEPVQKIDDIKMDNKGNNANVIDAIAEGASTGAQMAFSIGASLIAFVGLVSLINMMLSGLGIRLEQIFSYVFAPFGFLMGFDHKNILLEGNLLGSKLILNEFVSFQQLGDLIKSLDYRTALVATISLCGFANLSSLGICVSGIAVLCPEKRGTLARLVFRAMIGGIAVSMLSAFIVGIVTLF

SEQ ID NO: 8957 - DNA, 1893 bp, Streptococcus agalactiae
atgaataataacgaaaaaaaagtaaaatactttttaagaaaaacagcttatggtttggcctcaatgtcagcagcgtttgctgtatgtagtggtattgtacacgcggatactagttcaggaatatcggcttcaattcctcataagaaacaagttaatttaggggcggttactctgaagaatttgatttctaaatatcgtggtaatgacaaagctattgctatacttttaagtagagtaaatgattttaatagagcatcacaggatacacttccacaattaattaatagtactgaagcagaaattagaaatattttatatcaaggacaaattggtaagcaaaataaaccaagtgtaactacacatgctaaagttagtgatcaagaactaggtaagcagtcaagacgttctcaagatatcattaagtcattaggtttcctttcatcagaccaaaaagatattttagttaaatctattagctcttcaaaagattcgcaacttattcttaaatttgtaactcaagccacgcaactgaataatgctgaatcaacaaaagctaagcaaatggctcaaaatgacgtggccttaataaaaaatataagccccgaagtcttagaagaatataaagaaaaaattcaaagagctagcactaagagtcaagttgatgagtttgtagcagaagctaaaaaagttgttaattccaataaagaaacgttggtaaatcaggccaatggtaaaaagcaagaaattgctaagttagaaaatttatctaacgatgaaatgttgagatataatactgcaattgataatgtagtgaaacagtataatgaaggtaagctcaatattactgctgcaatgaatgctttaaatagtattaagcaagcagcacaggaagttgcccagaaaaacttacaaaagcagtatgctaaaaaaattgaaagaataagttcaaaaggattagcgttatctaaaaaggctaaagaaatttatgaaaagcataaaagtattttgcctacacctggatattatgcagactctgtgggaacttatttgaataggtttagagataaacaaactttcggaaataggagtgtttggactggtcaaagtggacttgatgaagcaaaaaaaatgcttgatgaagtcaaaaagcttttaaaagaacttcaagaccttaccagaggtactaaagaagataaaaaaccagacgttaagccagaagccaaaccagaggccaaaccagacgttaagccagaggccaaaccagacgttaagccagaagctaagccagacgttaaaccagaagctaagccagacgttaaaccagaagctaagccagacgttaaaccagaagctaagccagacgttaaaccaaaggccaaaccagacgttaagccagaagctaagccagacgttaaaccagacgttaaaccagacgttaagccagaggccaaaccagaggataagccagacgttaaaccagacgttaagccagaagctaaaccagacgttaagccagaggccaaaccagaagctaagccagaagctaagccagaagctaagccagaggccaaaccagaagctaagccagacgttaagccagaagctaaaccagacgttaaaccagaggctaagccagaagctaaaccagaggctaagtcagaagctaaaccagaggctaagctagaagctaaaccagaggccaaaccagcaaccaaaaaatcggttaatactagcggaaacttggcggctaaaaaagctattgaaaacaaaaagtatagtaaaaaattaccatcaacgggtgaagccgcaagtccactcttagcaattgtatcactaattgttatgttaagtgcaggtcttattacgatagttttaaagcataaaaaaaattaa

SEQ ID NO: 8958 - protein, 630 aa, Streptococcus agalactiae; identical to SEQ ID NO: 6266

SEQ ID NO: 8959 - DNA, 849 bp, Streptococcus agalactiae; identical to SEQ ID NO: 6279

SEQ ID NO: 8960 - protein, 283 aa, Streptococcus agalactiae
LPMLSVGLVLEGGGMRGLYTAGVLDAFLDAGIKIDGIVSVSAGALFGVNFVSRQRERALRYNKKYLSHPKYMSLRSWFRTGNFVNKDFTYYEVPMKLDVFDDEAFKKSSIDFYVVATEMTSGKPEYFKIDSVFEQMEILRASSALPVVSKMVDWQGKKYLDGGLSDSIPVDFARGLGFDKLIVVMTRPLNYQKKPSSGRLYKTLYRKYPNFVKTASNRYQQYNNSLEKVMSLEKTGDLFAIRPSKSLVIGRLEKNPDKLDSIYQLGMKDAKSVMPELNSYLMK

SEQ ID NO: 8961 - DNA, 606 bp, Streptococcus agalactiae
atgttacattctaaaaaaatacattccttatcgcttattgccgttctctctttagcaacatatacgagtttacaaccaaatcatgtaacggctgaacaatcacaaaaaacatcaactgttcatatgagtcaaaaaactattgaacataagttaaaagttgcagataaagaagctgctcctctctacgctaaaatcgaccatatccaacgacatattgaagtcaaaaaagcaaaagatttaaaagttattgaattgtatattaacaaagatatcaaccaactagagaagcaaaataaacgtctactaactaaattctatacttctattgataatcaaacatgggatagcacaagtgaagtcaaaaaattgattgataagacaaacctatccactaacgaaaaagatagattaaaattatattttgaacaacgtgcttaccttgagacaaggttgaacgaccgctatcaaaaatttgataactctattgaaaaccaaaataaagaactaaaaatattaacgtcaaaaatagaaaaaatctatcaaaaacatggtattacaaaagaggtattaaaaacttactatgctaaaaaaacagtacgagctgac

SEQ ID NO: 8962 - protein, 202 aa, Streptococcus agalactiae
MLHSKKIHSLSLIAVLSLATYTSLQPNHVTAEQSQKTSTVHMSQKTIEHKLKVADKEAAPLYAKIDHIQRHIEVKKAKDLKVIELYINKDINQLEKQNKRLLTKFYTSIDNQTWDSTSEVKKLIDKTNLSTNEKDRLKLYFEQRAYLETRLNDRYQKFDNSIENQNKELKILTSKIEKIYQKHGITKEVLKTYYAKKTVRAD

SEQ ID NO: 8963 - DNA, 4734 bp, Streptococcus agalactiae
atgttacaagaaaaggagatttttatgaacacaaaacagcgtttttcaatccggaaatataagttaggtgccgtatctgtacttttgggaaccctattttttttaggtggtatcacaaatgtagctgctgattctgtcataaataagccatctgatattgcagttgaacagcaagtaaaagacagtccaacgagcatagcaaatgagacacctactaacaacacgtcatcagcccttgcgtcgacagctcaagacaatcttgttacaaaggctaataatagtccaacagaaacacaaccagtagctgagtctcactctcaagccaccgagacattttccccagtcgcaaatcaaccggttgaaagcactcaagaagtttctaaaactcctttaaccaaacaaaatttagcagtcaaatctacaccagctatttctaaagaaacccctcaaaacattgatagtaataaaattatcactgtccccaaagtatggaacacaggctacaaaggagagggaactgttgtagcaattattgactcaggactagatatcaatcacgatgctctccaattaaatgattcgacaaaagcaaaataccaaaacgaacagcaaatgaatgctgctaaagcaaaagctggtataaactatggaaaatggtataacaacaaagtaatctttggtcacaactatgttgatgtcaatacagagctaaaagaggtgaaaagcacttctcatggtatgcacgtaaccagtatcgcaacagctaatcctagcaagaaagatacaaatgaattaatctatggtgttgctcctgaagcacaagtaatgtttatgagagtcttctctgatgaaaaaagaggaactggaccagccctttatgttaaagctattgaagatgccgttaaactcggtgctgacagcattaatttaagtttaggtggagctaatgggtctttagttaatgccgatgaccgacttataaaagctttagagatggctagactcgctggcgtttctgttgttatagcagcaggtaacgacggtacatttgggagtggagcatcaaagccttctgctctttatcctgattatggtttagttggtagtccatcaacagctcgtgaggccatttctgtagcatcatataataatacaacactggttaataaagtcttcaacattatcggattagaaaacaacagaaatctcaacaacggattagctgcttatgcagatcctaaagttagtgataagacctttgaagtagggaaacaatatgattatgttttcgtaggaaaaggaaacgacaatgattataaggacaaaactttaaatggtaaaatcgccttaattgaacgtggagatattacttttacaaaaaaagtcgtcaatgctattaatcacggtgctgtgggagctattatctttaataacaaagctggggaagctaatctaacaatgagtttagatcctgaagcaagtgctattcctgctatttttacccaaaaagagtttggagatgttttagctaaaaacaactataaaattgtatttaacaatatcaaaaataaacaagccaaccctaatgcaggtgtcctatctgacttttcaagctgggggttaacagcagacggacaattaaaacctgacttatctgctcctggaggctctatttacgccgctatcaatgataatgaatatgatatgatgagtgggacaagtatggcttctccccatgtcgctggtgctactgctctagttaaacaatacttattgaaagaacatccagaacttaaaaaaggtgacattgaaagaactgtcaaataccttcttatgagtactgctaaagcacacctaaacaaagatacaggcgcttacacctcaccacgccaacaaggagcaggtattatcgatgtcgcagcagcagttcagacaggattatacctaactggtggggaaaacaactatggcagcgttacattaggaaatattaaagataaaatttcctttgatgttactgttcataatatcaataaagttgcaaaagatttacactatacaacctatttaaatactgatcaagttaaagatggctttgtcacattggctcctcaacaacttggtacatttacagggaaaacgatacggattgaaccagggcaaacccaaacgattacaattgatatagatgtttcgaaataccatgacatgttaaaaaaagtaatgccaaacggctatttcctagaaggctacgtacgttttacagaccctgttgatggtggggaagttcttagtattccttatgttggatttaagggagaattccaaaacttagaagttttagaaaaatccatttataagcttgttgctaacaaagaaaagggattttatttccaaccaaaacaaacaaacgaagttcctggttcagaagattatactgccttaatgactacaagttcagagcctatctactcaacagacggtactagtcctatccaattgaaagccttgggaagctataagtctatagatggaaaatggatcttacaactagatcaaaaaggccagcctcatctagccatttcacctaatgatgaccaaaatcaagatgccgttgcagtgaaaggtgttttcttacgtaatttcaataatttaagagccaaagtctatcgtgcagatgatgttaatttacaaaaaccactatgggtaagtgctccccaagcaggagataaaaattactacagcggaaatactgaaaatccaaaatctacatttttatatgacacagaatggaaaggaaccactactgatggtattcctttagaagatggaaaatacaaatacgttttaacttattactctgatgtccctggctctaagccacaacaaatggtgtttgatatcactttggatagacaagctcctacactaacaacagcaacttatgacaaagatagacgtatcttcaaagctcgtcctgcagtagaacacggggaatctggtatctttagagaacaagttttttacttaaaaaaagataaagatggtcattataatagcgtcttacgtcaacaaggagaagacggtatccttgttgaagataacaaagtatttatcaaacaagaaaaggatggtagctttattctacctaaagaggttaacgatttctctcatgtctactatactgttgaagattatgcaggcaatctagtatcagcaaaactcgaagatttgatcaatattggcaataaaaatggtttagtaaacgtcaaagtgtttagccctgagcttaacagtaatgtcgatattgatttctcttactctgtcaaagatgacaaaggtaatatcatcaaaaagcaacatcacgggaaagacctcaatttattgaaattgccttttggtacctatacgtttgatctattcttatacgatgaggaacgagcaaatctaatcagtcccaaaagtgtcactgtaactatttctgaaaaagatagccttaaagacgtcttatttaaagttaacttactcaagaaagcagccttactcgttgaatttgacaagcttttaccaaaaggagcaacagtccagttggttactaagacaaatactgttgttgatctaccaaaagcaacttattctcctactgactatggtaaaaacatacctgtaggagactatcgtttaaacgtaacgctgcctagtgggtatagcactttagagaacttagatgatttacttgtatccgtaaaagaagatcaggtaaacctaacaaaattgacgctgattaataaagctcctctgattaatgccctagcagaacaaactgatattattacccagcctgtgttttataatgctggaactcacttaaaaaataattacctagctaatcttgaaaaggcacaaactttaattaaaaatagagtggaacaaacaagtattgataatgctattgctgctttgagagaaagtcgccaagctcttaacggtaaagaaacagatacttctttactggcaaaagctattttagctgaaacagaaatcaagggaaactatcaatttgttaatgctagtccattaagccaatcaacttatatcaatcaagtccaattggcgaaaaaccttctacaaaaacctaacgtcactcaatcagaagtagacaaagccttagaaaatcttgatattgctaaaaatcaattaaatggtcatgaaactgattactctggtttacaccatatgataattaaagcaaacgttctgaaacaaacatcatctaaatatcagaacgccagtcaatttgctaaagaaaattataataaccttatcaagaaagcagaattgctgctttccaatagacaagctacacaagctcaagttgaagagttattaaaccaaataaaagcaaccgaacaagagcttgatggccgtgatagagtttcttccgcagagaattatagtcaatcactcaatgataatgactctctcaataccacacctatcaatccgccaaatcagccccaggcgttgatattcaaaaaaggcatgactaaagaaagtgaggttgctcagaagcgtgtcttaggggtgactagccaaaccgataatcaaaaggtaaagacaaacaagcttcctaaaacaggcgaaagcactcctaaaataacctatacaatattgctatttagtctctctatgctaggtctggcaacaatcaaactaaagtctatcaaaagagaa

SEQ ID NO: 8964 - protein, 1570 aa, Streptococcus agalactiae
MNTKQRFSIRKYKLGAVSVLLGTLFFLGGITNVAADSVINKPSDIAVEQQVKDSPTSIANETPTNNTSSALASTAQDNLVTKANNSPTETQPVAESHSQATETFSPVANQPVESTQEVSKTPLTKQNLAVKSTPAISKETPQNIDSNKIITVPKVWNTGYKGEGTVVAIIDSGLDINHDALQLNDSTKAKYQNEQQMNAAKAKAGINYGKWYNNKVIFGHNYVDVNTELKEVKSTSHGMHVTSIATANPSKKDTNELIYGVAPEAQVMFMRVFSDEKRGTGPALYVKAIEDAVKLGADSINLSLGGANGSLVNADDRLIKALEMARLAGVSVVIAAGNDGTFGSGASKPSALYPDYGLVGSPSTAREAISVASYNNTTLVNKVFNIIGLENNRNLNNGLAAYADPKVSDKTFEVGKQYDYVFVGKGNDNDYKDKTLNGKIALIERGDITFTKKVVNAINHGAVGAIIFNNKAGEANLTMSLDPEASAIPAIFTQKEFGDVLAKNNYKIVFNNIKNKQANPNAGVLSDFSSWGLTADGQLKPDLSAPGGSIYAAINDNEYDMMSGTSMASPHVAGATALVKQYLLKEHPELKKGDIERTVKYLLMSTAKAHLNKDTGAYTSPRQQGAGIIDVAAAVQTGLYLTGGENNYGSVTLGNIKDKISFDVTVHNINKVAKDLHYTTYLNTDQVKDGFVTLAPQQLGTFTGKTIRIEPGQTQTITIDIDVSKYHDMLKKVMPNGYFLEGYVRFTDPVDGGEVLSIPYVGFKGEFQNLEVLEKSIYKLVANKEKGFYFQPKQTNEVPGSEDYTALMTTSSEPIYSTDGTSPIQLKALGSYKSIDGKWILQLDQKGQPHLAISPNDDQNQDAVAVKGVFLRNFNNLRAKVYRADDVNLQKPLWVSAPQAGDKNYYSGNTENPKSTFLYDTEWKGTTTDGIPLEDGKYKYVLTYYSDVPGSKPQQMVFDITLDRQAPTLTTATYDKDRRIFKARPAVEHGESGIFREQVFYLKKDKDGHYNSVLRQQGEDGILVEDNKVFIKQEKDGSFILPKEVNDFSHVYYTVEDYAGNLVSAKLEDLINIGNKNGLVNVKVFSPELNSNVDIDFSYSVKDDKGNIIKKQHHGKDLNLLKLPFGTYTFDLFLYDEERANLISPKSVTVTISEKDSLKDVLFKVNLLKKAALLVEFDKLLPKGATVQLVTKTNTVVDLPKATYSPTDYGKNIPVGDYRLNVTLPSGYSTLENLDDLLVSVKEDQVNLTKLTLINKAPLINALAEQTDIITQPVFYNAGTHLKNNYLANLEKAQTLIKNRVEQTSIDNAIAALRESRQALNGKETDTSLLAKAILAETEIKGNYQFVNASPLSQSTYINQVQLAKNLLQKPNVTQSEVDKALENLDIAKNQLNGHETDYSGLHHMIIKANVLKQTSSKYQNASQFAKENYNNLIKKAELLLSNRQATQAQVEELLNQIKATEQELDGRDRVSSAENYSQSLNDNDSLNTTPINPPNQPQALIFKKGMTKESEVAQKRVLGVTSQTDNQKVKTNKLPKTGESTPKITYTILLFSLSMLGLATIKLKSIKRE

SEQ ID NO: 8965 - DNA, 741 bp, Streptococcus agalactiae; identical to SEQ ID NO: 6307

SEQ ID NO: 8966 - protein, 247 aa, Streptococcus agalactiae
LNKSWLRKGGIKMVCVDFIDQKVYSEAEGLFVSDLDLGIKGLIRARYPFALDSDFISYGNLSHYCMNYLDEIVQRANQKNEKIKYNVTTLMKEEEKPFNVEERLNKQATIGQRIADDVARFGGSWTFIIVFVSIMAIWMLVNIMKPFGIQFDPYPFILLNLALSTIAAIQAPLIMMSQNRAADYDRLQARNDFNVNKTSELEIRLLHEKIDHMVQQDQFELLEIQKLQTEMLVSLGNQLAQLKQLQK

SEQ ID NO: 8967 - DNA, 636 bp, Streptococcus agalactiae
atgaatcttttaattatgggtttgcctggtgctggtaaaggtactcaagcagctaagatcgttgaagaatttggtgttgctcacatctcaacaggggatatgttccgcgccgcaatggctaatcaaaccgaaatgggacgtttagctaaaagttatattgataaaggtgaattggttcctgatgaagtaacaaacgggattgtaaaagagcgcttagctgaggatgatatcgcagaaaaaggttttttacttgatggatatccacgtactattgaacaagcacacgccttagatgctacgcttgaagaactaggactacgcttagatggtgttattaatattaaagtggatccatcatgtcttatagagcgtttgagtgktcgtattatcaatcgtaaaactggtgaaactttccacaaagtgttcaacccaccagtagattataaagaagaagattactatcaacgtgaagatgataagcctgaaactgtcaaacgtcgcttggacgttaatattgctcaaggagaacctattcttgaacactatcgtaagcttggtcttgttacagatattgaaggtaatcaagaaataacagaagtttttgcagatgttgaaaaagcgttgctagaactcaaa

SEQ ID NO: 8968 - protein, 212 aa, Streptococcus agalactiae
  MISC_FEATURE (1)..(212): Xaa = Any Amino Acid
MNLLIMGLPGAGKGTQAAKIVEEFGVAHISTGDMFRAAMANQTEMGRLAKSYIDKGELVPDEVTNGIVKERLAEDDIAEKGFLLDGYPRTIEQAHALDATLEELGLRLDGVINIKVDPSCLIERLSXRIINRKTGETFHKVFNPPVDYKEEDYYQREDDKPETVKRRLDVNIAQGEPILEHYRKLGLVTDIEGNQEITEVFADVEKALLELK

SEQ ID NO: 8969 - DNA, 1302 bp, Streptococcus agalactiae
atgtttttaaaattacttagagatgcactcaaagtaaagatggtaagaaataaaattttatttactatctttatccttcttgtatttcgtatcggaacgcatatcacagtaccgggcatcaatgttaagagtttagaacaaatgggtgaacttccatttctaaatatgcttaacttagttagtggtaatgcaatgagaaacttttcggtattctctatgggagttagcccttacattactgcgtctattgttgttcagttacttcaaatggatattcttccgaagtttgttgaatggggaaaacaaggagaggtaggtcgtcgtaagcttaaccaagctacacgttatatttctttgttccttgcattcgtacaatcaattggtattactgctggttttaacactctatcaagtgttgctttagttaaaactccgaatgtacaaacatatttgcttattggtgcaatccttacaacaggtagtatggtggttacttggctaggtgaacaaattactgataagggattcggaaatggagtgtctatgattatctttgcgggtatcatttcttccattccaagtgcaattacaactatctacgaagatttctttgtaaatgtacgctcttcagcaattacaaattcttacatctttgtcgggatccttatcgtagcagtattagcaattgtattttttacaacatttattcaacaagctgaatacaaaattccaatccaatatacaaaacttgttcaaggagctcctacaagttcatatcttcctctaaaagtaaatccagctggtgttattcccgttatctttgctagctcgattacaacaattccaagtacgattattcctttctttcaaaatggcaaagaaattccttggcttactaaactccaagaattacttaattatcaaaccccagtcggtatgattatctatgctatcttgattattctgttctctttcttctawacttttgkacaagtaaaccctgaaaagacagcagagaatcttcaaaaaaattcgtcctacattccaagtattcgaccaggacgagaaacagaagaatatatgtcatcgctattgaaaaaattagcaacaattggttcagtatttctagcatttatttccttgttaccaattattgctcaacaagcgttgcatttgtcatcaagtattgcgttaggtgggacaagcttactcattttgattgcaacgggtattgaaggtatgaaacaactcgagggctatcttttgaagagacgctatgttggattcatgaatacaacagaa

SEQ ID NO: 8970 - protein, 434 aa, Streptococcus agalactiae
  MISC_FEATURE (1)..(434): Xaa = Any Amino Acid
MFLKLLRDALKVKMVRNKILFTIFILLVFRIGTHITVPGINVKSLEQMGELPFLNMLNLVSGNAMRNFSVFSMGVSPYITASIVVQLLQMDILPKFVEWGKQGEVGRRKLNQATRYISLFLAFVQSIGITAGFNTLSSVALVKTPNVQTYLLIGAILTTGSMVVTWLGEQITDKGFGNGVSMIIFAGIISSIPSAITTIYEDFFVNVRSSAITNSYIFVGILIVAVLAIVFFTTFIQQAEYKIPIQYTKLVQGAPTSSYLPLKVNPAGVIPVIFASSITTIPSTIIPFFQNGKEIPWLTKLQELLNYQTPVGMIIYAILIILFSFFXTFXQVNPEKTAENLQKNSSYIPSIRPGRETEEYMSSLLKKLATIGSVFLAFISLLPIIAQQALHLSSSIALGGTSLLILIATGIEGMKQLEGYLLKRRYVGFMNTTE

SEQ ID NO: 8971 - DNA, 1278 bp, Streptococcus agalactiae; identical to SEQ ID NO: 6413

SEQ ID NO: 8972 - protein, 426 aa, Streptococcus agalactiae
VRYSKEIIQLAIPAMIENILQMLMGVVDNYLVAQLGVVAVSGVSVANNIITIYQAIFIALGASIASLLAKSLAGSKKDDAISVCSQAIFLTLLIGAVLGIISIVFGQTFFKLLGTTKSVAQVGGLYLAIVGGGVVTLGMLTTLGSFLRVQGQPRLPMYVSIFVNFLNAVLSGFAIFEWRYGLVGVAVSTLIARLIGICILAKYLPIKKIIKRMTWKISAQIWNLALPSAGERLMMRAGDVVIVAIVVQLGTNVVAGNAIGETLTQFNYMPGLGIATATIILTAKYVGQKNRESIEETIQSSYYIGLVLMILISSFMLLAGKPLTQLFTNNPSAIKGSLIVILLSFVGVPATIGTLVYTAAWQGLGNAKLPFYTTTIGMWLIRVVLGYLLGIVFELGLLGVWMATIADNIFRWLFLKVHYHRYIQKM

SEQ ID NO: 8973 - DNA, 1125 bp, Streptococcus agalactiae
atgaaacattatcaaaccataattatcggtgcaggcgctgcaggaatcggttttggttctgccatgcaacgattaggacttacaaattttcttatcattgaaaaagggcacattggagaatcttttttaagatggcccagaacaacacaatttatcacaccttcyttcactacmaatggctttggttttccagatctaaacgctgttattccagatacttctcctgctttctcatttgaaaaagaacatctttctggagtggaatatgcacgctacttacaattagttgctgctcattataatctccctatccaaaacgaaacatctgttctatctattgataaacgagatagcctttttgttattaaaacttcaaagggagatttttctgctgattatcttattatggcaacaggagaatttcaaaatccaaataccattgatattaaaggtgcagatctaggaatgcactatggtcaagttgataatttccatatcaaatctgacaatccatttatcatcattggtggaaacgaaagtgcttgtgatgcactaacacatctagtatatttgggaaatcaagtcgaattatatacagatacgtttggtcgtaaagagagcaatcccgatccaagcatctctttatcccccctaactaaagaacgtttaaaacatatacaagaccacaaaaaagaatattatagtatctctgaaggcaagaaagccattgagattaaacaaattggaaaacaatatcaagttacttttgatgacggtagtactgcggagtctttccataaacctattctttccacaggttttctaaatacctgtcatctcattgacggaatcgctttatttgaatacgataaaaatcagttgccaatagttactgaagatgacgaatctactatcgttaataactgtttcttaattggtccaagcttacgacaaagagatactattttctgctatatttataaattcagacagcgctttgtccctgttattaatcatatcgcacaacgagaagggattatattagacgaagatacccttgaattctttaaagaaaatcaaatgtaccttgataacctagcttgttgcgatgtcaattgtgattgc

SEQ ID NO: 8974 - protein, 375 aa, Streptococcus agalactiae; identical to SEQ ID NO: 6456

SEQ ID NO: 8975 - DNA, 1041 bp, Streptococcus agalactiae
gtgtttgtaaagaaaggactatttgtgtttttactattatgtattttatcgatgtggctcatgatttttggggttgcattctattactttgggtcgctacatcaatcattgacttcaaggattatttatcagtttgtacttactgttttgctaacgacaacagcttggttcatgggtgcctattttttagcatttgaaggtcattttaaaactgtctttcaattccaagaagcagatggtaaacaaattgtaaattgtttatttcaactttgtttcgccctttacgcagtagtaatgcttattgggtcaattattgatagagttcagacgaagcgacttttattagctgttgtttcttggcttttcttggtgtatacgcccttagcttatttaatttggaattcagagggtgtttttgcaaagatgggagtacttgatttttcaggcggaatgatcgttcatttatctgcagggctttcttcgtatattttagctcatgttattggcaagagtgaacatcagcacaataaggttaaaaatgatagtctctttttaggaatgatacttattacatttggttggtttggatttaatatgggtccagttggtgagtggaattcacaagccattatgatacttttaaatactatatttgctattataggtggtggtttggcgtggacattggctgctaagtggaatggtgaggaagagaaaacaggaagcttattgaatggcattattgttggtcttgtgacgagtacagcaggagttgggtatctcttaacttggcaattattagctgtaacattctttgcatccctcttcacctactttgtaacggattacgwwgcgaaagcttttgccattgatgatgtcgtttcctcctttggaatgaatggtattgggggattgttgggaagtttaggagttggtctctttaaattatcacatatgccagttcaactgttagcattagctaccacaattcttttgtcaattataatgacctatatcatatctaaagcgatttttagaaaa

SEQ ID NO: 8976 - protein, 347 aa, Streptococcus agalactiae
  MISC_FEATURE (1)..(347): Xaa = Any Amino Acid
VFVKKGLFVFLLLCILSMWLMIFGVAFYYFGSLHQSLTSRIIYQFVLTVLLTTTAWFMGAYFLAFEGHFKTVFQFQEADGKQIVNCLFQLCFALYAVVMLIGSIIDRVQTKRLLLAVVSWLFLVYTPLAYLIWNSEGVFAKMGVLDFSGGMIVHLSAGLSSYILAHVIGKSEHQHNKVKNDSLFLGMILITFGWFGFNMGPVGEWNSQAIMILLNTIFAIIGGGLAWTLAAKWNGEEEKTGSLLNGIIVGLVTSTAGVGYLLTWQLLAVTFFASLFTYFVTDYXAKAFAIDDVVSSFGMNGIGGLLGSLGVGLFKLSHMPVQLLALATTILLSIIMTYIISKAIFRK

SEQ ID NO: 8977 - DNA, 939 bp, Streptococcus agalactiae
gtgaaaaatatgatgaaatatatatcagagttaacaaccctgattgcgttagctggtttaatggttattatcacactcattaatcctaatttcctcacaaccaataatctactcaatttattattacaagtaactgcaaatggttttatcgctttcgggatgaccttcgttattttgactggcggtattgatttatcagtcgggtccatattagccctatctagtgcattaacagctggattaatcggccacggagtacccgttggtattgctatcgttttatctgttgccttaggtggcatcttgggaatgctaaacggactcttcatttcttacggaaaattagcaccatttatcgttacactggcaacaatgactatctttagaggagcaacgctagtttattcaaacggcaacccaattaccgctggcttatccgatagttttctattccaatttttgggacaaggctatattgttggtatcccattcccagtcattctcatgtttcttacttttattattttgtatattttgttacataaaacagccttcgggaaatctgtttacgctttaggaggtaatgaaaaagcagcgtatatctcgggtattaagttaaacaaagttaaaattatcatctacactatctcaggtatcatggcttccatttctgggttaattatcacatcacgccttagctcagcacaaccaacagctggagcaagttatgagatggatgctattgccgccgttgtcttaggtggaacgtctttatctggtgggaaaggacgtatcattggaacattgattggtgctcttattattggtgtcctgaacaatggattaaacatcattggtgtctctgcattttggcaacaagttgtgaaaggtatcgttattttaatggctgttttacttgatcgctttaaagtagcaaaa

SEQ ID NO: 8978 - protein, 313 aa, Streptococcus agalactiae
VKNMMKYISELTTLIALAGLMVIITLINPNFLTTNNLLNLLLQVTANGFIAFGMTFVILTGGIDLSVGSILALSSALTAGLIGHGVPVGIAIVLSVALGGILGMLNGLFISYGKLAPFIVTLATMTIFRGATLVYSNGNPITAGLSDSFLFQFLGQGYIVGIPFPVILMFLTFIILYILLHKTAFGKSVYALGGNEKAAYISGIKLNKVKIIIYTISGIMASISGLIITSRLSSAQPTAGASYEMDAIAAVVLGGTSLSGGKGRIIGTLIGALIIGVLNNGLNIIGVSAFWQQVVKGIVILMAVLLDRFKVAK

SEQ ID NO: 8979 - DNA, 1086 bp, Streptococcus agalactiae
atgtcacatgcttggaaagaattaaccttttataagaaaaaatacctcctgattgaattgctaatcattgttatgatgttcatggtagtttttttatcaggtttagcaaacggtttaggtagagctgttagtgctgctattgaaaataacccagctcaaacctatattttgaatgaaggtgctgaacaagtgattacatcatctgtattgacaactaaagatcagacagatttaaacagtttgaatttaaaagatagtaccactttaaatattcaacgttcgagtttaactcgacaaggacacgaaaagaaaattgatatttcttattttgctattgataaagattcttttatggcacctacactttctgagggaaaacaactgacaagttacaaaaaagctattattttaaatgatagtttaaaagctgaagggataaagttaggtgataaagtgattgataagtcatcatctatatcactaacagtcgttggatttgtccataatagtatgtatggtcacggacctgtggcatttattgataaagacatttataccgaaattaataaaaagattaatcctcaataccagttcttacctcaggcattagttatgaaaaatgataaaagtatatctcatttaccaactcaattagaagctgttagtaaaaaagatgtcattcaacatattcctggttatagtgccgaacaatccactttgaatatgattttatgggtccttgtcgtagcttcagctggtattttaggtgtctttttctacatcatcacacttcaaaaacgtcatgaatttagcgtcatgaaagctattgggacaaaaatgtcagagattgccctatttcaattgagtcaagtcattatattggcactgtttggtatcattgttggagatggattggcggttgctctctcttatgtattaccagctcaaatgccatttgttattaattggcaaaatattattctagtatcgtttgtatttttagtcattgcaatgattagtagtgctttgtcaattgtaaaagttgctaaaatcgacccagtcgaagttattaatgggggaggagaa

SEQ ID NO: 8980 - protein, 362 aa, Streptococcus agalactiae
MSHAWKELTFYKKKYLLIELLIIVMMFMVVFLSGLANGLGRAVSAAIENNPAQTYILNEGAEQVITSSVLTTKDQTDLNSLNLKDSTTLNIQRSSLTRQGHEKKIDISYFAIDKDSFMAPTLSEGKQLTSYKKAIILNDSLKAEGIKLGDKVIDKSSSISLTVVGFVHNSMYGHGPVAFIDKDIYTEINKKINPQYQFLPQALVMKNDKSISHLPTQLEAVSKKDVIQHIPGYSAEQSTLNMILWVLVVASAGILGVFFYIITLQKRHEFSVMKAIGTKMSEIALFQLSQVIILALFGIIVGDGLAVALSYVLPAQMPFVINWQNIILVSFVFLVIAMISSALSIVKVAKIDPVEVINGGGE

SEQ ID NO: 8981 - DNA, 1068 bp, Streptococcus agalactiae
atgactaagctaaggcgatttcggtttccgttaagattttatttcacattaatgtttgtgttaacgatgcttttctcagtcctagcttctcttttactagttgcagcaatagtttttactttttttcaaggagtcttaactactcatgtattacaagttagtgctctcgctgttgtttttttaagccttgtgatagctagtattagtatgtggtacggttcttatcatttaacaaaaccaattttagatattagccatattgtgtccaatgttgcagacggtgactttgaagggcatatttatcgaaacagtaatcgtcgtaaatcctatgagtattataatgaattggatgagctatctgaaagtattaatcagatgattgtttctttatctcatatggatcatatgcgaaaagactttatcactaatgtttctcatgagctaaagactccgattgctgcagtagctaatattgtagaactattacaagatccagaattagatgaagaaacacaaagtgagttattaggtcttgttaaaacagagagcctaaggttaacaagattatgtgatacgatgttgcaaatgtcgcgcgtggataatcaggagactattggggagctatcctctgttcgtgtagatgaacaaattcgtcaagcaatgattagtttaacagaacgttggcaagctaaaaggataaattttcaactggattcaaaaccatatactgtttactcaaactctgacttgctgatgcaagtttggataaaccttttagataatgcaataaaatattccgaggatattgtagacttaagtgtacgaatggaagaaactaataatcattatctgagagttattatttctgataaaggtaggggaatttctcaatatgatgttcagcatatatttgataaattttaccaagcggatcagtcgcataatcaacaaggaaatggattaggactagcaatagttaaacgtataattgttctttgtaagggacgtattagtgtctccagtcagttggaaattggaacagaattttgtgtagaactacctttatca

SEQ ID NO: 8982 - protein, 356 aa, Streptococcus agalactiae
MTKLRRFRFPLRFYFTLMFVLTMLFSVLASLLLVAAIVFTFFQGVLTTHVLQVSALAVVFLSLVIASISMWYGSYHLTKPILDISHIVSNVADGDFEGHIYRNSNRRKSYEYYNELDELSESINQMIVSLSHMDHMRKDFITNVSHELKTPIAAVANIVELLQDPELDEETQSELLGLVKTESLRLTRLCDTMLQMSRVDNQETIGELSSVRVDEQIRQAMISLTERWQAKRINFQLDSKPYTVYSNSDLLMQVWINLLDNAIKYSEDIVDLSVRMEETNNHYLRVIISDKGRGISQYDVQHIFDKFYQADQSHNQQGNGLGLAIVKRIIVLCKGRISVSSQLEIGTEFCVELPLS

SEQ ID NO: 8983 - DNA, 2007 bp, Streptococcus agalactiae; identical to SEQ ID NO: 6623

SEQ ID NO: 8984 - protein, 669 aa, Streptococcus agalactiae
LAEMQHVNHSSFDKASKAGFIIALGIVYGDIGTSPLYTMQSLVENQGGISSVTESFILGSISLIIWTLTLITTIKYVLVALKADNHHEGGIFSLYTLVRKMTPWLIVPAVIGGATLLSDGALTPAVTVTSAVEGLKVVPSLQHIFQNQSNVIFATLFILLLLFAIQRFGTGVIGKLFGPIMFIWFAFLGISGLLNSFAHPEVFKAINPYYGLKLLFSPENHKGIFILGSIFLATTGAEALYSDLGHVGRGNIHVSWPFVKVAIILSYCGQGAWILANKNAGNELNPFFASIPSQFTMHVVILATLAAIIASQALISGSFTLVSEAMRLKIFPQFRSTYPGDNIGQTYIPVINWFLFAITTSIVLLFKTSAHMEAAYGLAITITMLMTTILLSFFLIQKGVKRGLVLLMMIFFGILEGIFFLASAVKFMHGGYVVVIIAVAIIFIMTIWYKGSKIVSRYVKLLDLKDYIGQLDKLRHDHRYPIYHTNVVYLTNRMEEDMIDKSIMYSILDKRPKKAQVYWFVNIKVTDEPYTAEYKVDMMGTDFIVKVELYLGFKMRQTVSRYLRTIVEELLESGRLPKQGKTYSVRPDSNVGDFRFIVLDERFSSSQNLKPGERFVMLMKSSIKHWTATPIRWFGLQFSEVTTEVVPLIFTANRGLPIKEKSELTTTGD

SEQ ID NO: 8985 - DNA, 624 bp, Streptococcus agalactiae
atgaagaagcttacttttatttgggatttagatgggacattaatagattcgtatgtaccaattatggaagctcttgaagaaacctatcgtcattttggtttaatatttgataaagaattaatccatgaatatattttacaggaatcagtggggaaattattggtaaacctttcagaggaagagcaaatacctcatgaaaaactgaaagcatattttacaaaagaacaagaaagtcgagattctaaaatacatttaatgccatatgcaaaagagattttagaatggaccaaagaacaagatatccccaattttatgtatacacataaaggagcaagtacgcattcagtgttggaaaccttgcagatctctcattattttgatgaaattttaactggtgtttcgggattcgagcgaaaaccacatccacaagggattaattatttagttaaacgatattctttagataaatcaatgacttattacataggagatcgtccactagatttggaggttgctcaaaatgctggtataaaatccataaacttaaggttagagaattccaaagaaaactataatatttcaagtctcaaagatataatatcacttgatttcactcgtttggat

SEQ ID NO: 8986 - protein, 208 aa, Streptococcus agalactiae
MKKLTFIWDLDGTLIDSYVPIMEALEETYRHFGLIFDKELIHEYILQESVGKLLVNLSEEEQIPHEKLKAYFTKEQESRDSKIHLMPYAKEILEWTKEQDIPNFMYTHKGASTHSVLETLQISHYFDEILTGVSGFERKPHPQGINYLVKRYSLDKSMTYYIGDRPLDLEVAQNAGIKSINLRLENSKENYNISSLKDIISLDFTRLD

SEQ ID NO: 8987 - DNA, 1149 bp, Streptococcus agalactiae; identical to SEQ ID NO: 6649

SEQ ID NO: 8988 - protein, 383 aa, Streptococcus agalactiae
LNSKLSLKLTILSISIFLMSHLAIAPAIPKLYAFYHTQNPHIGLASVESLVTIPAMMITIFVILSNFVVTKLGKKNTVLLGLCLILMSGFISFFTSNFSLAMASRLLLGIGIGLYNSLSISIITDLYEADERASMIGLRTASLNIGKALTTFIVGLVLAIGVNYIYLVYLLVIPVFFFFWKNVPEVENQTHTLKASTTFDTKAALLMLITFLVGIAYIGATVKIPTLLVTKYHYATSFSSNMLTLLAFSGILVGSVFGKLVKVFQEKTLLIMILAMGIGNVLFALANNQIIFIVASILIGASFVGTMSSVFFYISKNYAKEHNNFITSLALTAGNIGVILTPLILTKLPSQLHLEPFMTPFLITSGLMVINVFVYLVLMSKNK

SEQ ID NO: 8989 - DNA, 414 bp, Streptococcus agalactiae
atgtttgaaatagtattggaaaaaattaaatcgcataaatgggagacaacaggaattattgtaggactcttattatttggaattttgggtttaaatcattttggcactcatcataaagaagacaatttaaatatcaatttagagaaaaaagtatcaactataacagaaaaaaaggtaccaatgattagtcacgtcaaagataaagtatctaatcaagtaacggttgacgtaaaaggggcagtcaatcatccaggtgtttatagtttgccttctcaaagtcgtgtaacagatgcgattaagcgtgcaggtggactaagcaatctcgctgatagtaaatccgttaatctagcacagaaattacaagatgagacggttatctatgttgctcaaaaaggtgaaaaaataactgttgtg

SEQ ID NO: 8990 - protein, 138 aa, Streptococcus agalactiae
MFEIVLEKIKSHKWETTGIIVGLLLFGILGLNHFGTHHKEDNLNINLEKKVSTITEKKVPMISHVKDKVSNQVTVDVKGAVNHPGVYSLPSQSRVTDAIKRAGGLSNLADSKSVNLAQKLQDETVIYVAQKGEKITVV

SEQ ID NO: 8991 - DNA, 1584 bp, Streptococcus agalactiae; identical to SEQ ID NO: 6731

SEQ ID NO: 8992 - protein, 528 aa, Streptococcus agalactiae
LKFTELNLSQDILSAVEKAGFVEPSPIQEMTIPLALEGKDVIGQAQTGTGKTAAFGLPTLNKIHTEDNTIQALIIAPTRELAVQSQEELFRFGRDKGVKVRSVYGGSSIEKQIKALRSGAHVVVGTPGRLLDLIKRKALKLNHIETLILDEADEMLNMGFLEDIEAIISRVPETRQTLLFSATMPDPIKRIGVKFMKDPEHVKIKATELTNVNVDQYYVRVKENEKFDTMTRLMDVDQPELSIVFGRTKRRVDELTRGLKLRGFRAEGIHGDLDQNKRLRVIRDFKNDHIDILVATDVAARGLDISGVTHVYNYDIPQDPESYVHRIGRTGRAGKSGQSITFVSPNEMGYLTIIENLTKKRMTGMKPATASEAFQAKKKVALKRIARDFEDQELVSKFDKFKADALELATQYTPEELALYVLSLTVQDPESLPEVEITREKPLPFKPSGGGFKGKGGRGNGRGGDRRRNDRGDRRGNRDRDDRGSRCDFKRRDDKFKKDNRRQENKKPHKNTSSEKQTGFVIRNKGDK

SEQ ID NO: 8993 - DNA, 591 bp, Streptococcus agalactiae
atgcttatgacaaaaataataggactgacaggagggatagcttctggaaagtcaacggtaacaaaaataatacgagaatcaggttttaaagtcatagatgcggatcaagtggttcataaattgcaagctaagggtgggaaactttaccaagctttattagaatggttgggtcccgagatacttgatgctgatggtgagttggatagaccaaagctttctcaaatgatttttgctaatccagacaatatgaagacatcagctaggctacaaaatagtatcattcgtcaagagttagcatgtcagcgcgaccaattaaaacaaacagaagagatatttttcatggatattcctttattgattgaagaaaagtatataaaatggtttgatgagatttggttggtatttgttgataaagaaaaacaattacaacgattaatggcccgtaacaactacagtcgagaagaagcagaattacgactttcacaccaaatgcctttaacagataaaaaaagtttcgctagtcttattattgacaataatggtgatttaataactttaaaagagcaaatattggatgctcttcaacgttta

SEQ ID NO: 8994 - protein, 197 aa, Streptococcus agalactiae
MLMTKIIGLTGGIASGKSTVTKIIRESGFKVIDADQVVHKLQAKGGKLYQALLEWLGPEILDADGELDRPKLSQMIFANPDNMKTSARLQNSIIRQELACQRDQLKQTEEIFFMDIPLLIEEKYIKWFDEIWLVFVDKEKQLQRLMARNNYSREEAELRLSHQMPLTDKKSFASLIIDNNGDLITLKEQILDALQRL

SEQ ID NO: 8995 - DNA, 1218 bp, Streptococcus agalactiae; identical to SEQ ID NO: 6813

SEQ ID NO: 8996 - protein, 406 aa, Streptococcus agalactiae
LKNLNRYVVAVSGVVLHLMLGSTYAWSVFRNPIISETGWDISSVSFAFSLAIFCLGMSAAFMGHLVERFGPRIMGMISAILYGAGNVLTGLAIETQQLWLLYVAYGILGGIGLGSGYITPVSTIIKWFPDRRGLATGFAIMGFGFASLVTSPLAQSLMIRIGVGKTFYILGLVYFFVMMIASQFIKQPPQEKITILTHDGKKNAMNSQIITGLKANAAIKSKTFYIIWLTLFINISCGLGLISAASPMAQDLAGYSAESAALLVGVLGIFNGFGRLLWASLSDYIGRPLTFIILFIVNFIMTSSLFLSFNAIVFAIAMSILMTCYGAGFSLLPAYLSDIFGTKELATLHGYSLTAWAIAGLFGPLLLSKTYSWGNSYQLTLMVFGFLFLFGLLLSLYLRKLTTKVV

SEQ ID NO: 8997 - DNA, 2043 bp, Streptococcus agalactiae
atgttgaatcgtaaaaaaaggtatcgtctcactgtaaaaaagcaaaatgctagcatacctagacgattaaatcttctattttttattattgktttattatttactgttctaattcttcgtttagagcaaatgcagattgggcaacaatcattttacatgaaaaaactgacagctcttacgagttatacagtgaaagaatcaaaagcgagaggtcagatttttgatgctaagggagttgtcttagttgaaaatgatgaacgtcctactgtggcgttttctagaggaaacaatatttcatctcagtctatcaaagagttagcgaataaattatcacattacattaccttaaccgaagttgcttcaagcgatagagcaaagagagattattatttagcagataaagccaactacaaaaaagttgttgaaagtttaccagattctaaacgttacgataaatttggtaaccatctagccgaatcaaccgtatatgcaaatgcagttgctgcagttccagtgagcgctattaactattctgaagatgagttaaaagtggttgccttatttaaccaaatgaatgcgacaccaacgtttggttcagtgaaattaagtacaggcgaattaagtgatgatcaaatcaagaaactggatgctgataagaaggaactgttaggaatttctgtaacaagtaattggcatcgtcgtaaaaaaggaacttctttatcggatatattaggtactatttctacagaaaaggcaggtttaccaagagaagaagttaaaaaatatttgaaaaaaggctattcactgaatgaccgagtgggaacttcttaccttgaaaaacaatatgaagatgacttacaaggaatcagacaaattcgcaaagtagttgttaataaaaaaggtaaagttgtttcagataatattacgcaagaaggtaagtcaggaagaaatcttaaattaacgattgatcttaattaccaaaacaaagtagaaagtatcttgaaacaatactatggcagtgaattatctagtggacgcgctagtttttccgaagggatgtatgcagttgctatagaaccttcaactggtaaagtgttagcaatggctggtctgaaaaatgatcatgggaatttagttgatgacagcctaggcactattgctaagaatttcacgccaggatctgttgtgaaaggtgcgacgctatcatcaggatgggaaaataaagttcttagaggaaatgaagtgctttatgaccaagaaattgctaatatacggtcatggtttacacgaggtttgactccaatatctgcggcacaagcgctagagtattcatctaatacttatatggttcaagtagcacttcgtttaatgggacaagactataatacaggagatgctttaactgatcgaggctatcaagaagcaatggctaaactaaggaaaacttacggcgaatatggtttaggggtttctacaggattagatttacctgaatcagaaggttatgtacctggaaaatacagcttaggaacaactctaatggaatcgttcggtcagtatgatgcctatacaccaatgcaacttggtcagtatatctcaactattgcgaataatgggaatcgtttagcacctcacgtggtttcagatatctatgaagggaatgattctaataagttcgctcaattggttcgttcaatcactcctaaaacactaaataagatagctatctcagatcaagagttagccattattcaagaaggtttttataacgttgtcaatagtggaagtggctatgcaactggtacgtcaatgagggggaatgtgacaaccattagtggtaaaactggtaccgctgaaacatttgctaaaaatgtaaatggacaaacagtttctacctacaacttaaacgctattgcctacgatactaatcgtaaaatagcagtagcggtaatgtatccgcatgttacaactgatacaacaaaatcccatcaattagttgcacgagatatgattgatcaatatatttcacagttcacaggacaa

SEQ ID NO: 8998 - protein, 681 aa, Streptococcus agalactiae
  MISC_FEATURE (1)..(681): Xaa = Any Amino Acid
MLNRKKRYRLTVKKQNASIPRRLNLLFFIIXLLFTVLILRLEQMQIGQQSFYMKKLTALTSYTVKESKARGQIFDAKGVVLVENDERPTVAFSRGNNISSQSIKELANKLSHYITLTEVASSDRAKRDYYLADKANYKKVVESLPDSKRYDKFGNHLAESTVYANAVAAVPVSAINYSEDELKVVALFNQMNATPTFGSVKLSTGELSDDQIKKLDADKKELLGISVTSNWHRRKKGTSLSDILGTISTEKAGLPREEVKKYLKKGYSLNDRVGTSYLEKQYEDDLQGIRQIRKVVVNKKGKVVSDNITQEGKSGRNLKLTIDLNYQNKVESILKQYYGSELSSGRASFSEGMYAVAIEPSTGKVLAMAGLKNDHGNLVDDSLGTIAKNFTPGSVVKGATLSSGWENKVLRGNEVLYDQEIANIRSWFTRGLTPISAAQALEYSSNTYMVQVALRLMGQDYNTGDALTDRGYQEAMAKLRKTYGEYGLGVSTGLDLPESEGYVPGKYSLGTTLMESFGQYDAYTPMQLGQYISTIANNGNRLAPHVVSDIYEGNDSNKFAQLVRSITPKTLNKIAISDQELAIIQEGFYNVVNSGSGYATGTSMRGNVTTISGKTGTAETFAKNVNGQTVSTYNLNAIAYDTNRKIAVAVMYPHVTTDTTKSHQLVARDMIDQYISQFTGQ

SEQ ID NO: 8999 - DNA, 651 bp, Streptococcus agalactiae
atgtttaatacaattggtcgcgctcaggggtggagtgatactcctttaactacttttggagaactcgggattaaagagcttggtttgggactaaaggcttcaaatattagttttaaagaggctttttctagtgatagtgracgtactttacaaactatggaaattattctcagggaagtgcaacaagaaaatattccctatacgagagataaacgaatccgcgagtggtgctttggtagtttggatggaggatatgatggcgacctttttaatggcgttctgcctcgagtttcaaacggagatatgagccatttgacacacgaagaaattgctaatttgatttgtcaagttgatacggctggctgggcagaaccgtgggcaatattgagtaaccgtattctgtcaggcttcactgctatagctaaaaaaatagaggatattgggggaggtaatgcgattgttgtcagtcatgggatgactattgcgacttttttatggttaatcgaccatagtacccctcgtagtttaggcttagataatggtagtgtctcagtcgttgattttgaagatggaacattttctattcaatctattggggatatgtcctatcgagaaaaaggaagagaaattttagaaaaaacattgcaatga

SEQ ID NO: 9000 - protein, 216 aa, Streptococcus agalactiae
  MISC_FEATURE (1)..(216): Xaa = Any Amino Acid
MFNTIGRAQGWSDTPLTTFGELGIKELGLGLKASNISFKEAFSSDSXRTLQTMEIILREVQQENIPYTRDKRIREWCFGSLDGGYDGDLFNGVLPRVSNGDMSHLTHEEIANLICQVDTAGWAEPWAILSNRILSGFTAIAKKIEDIGGGNAIVVSHGMTIATFLWLIDHSTPRSLGLDNGSVSVVDFEDGTFSIQSIGDMSYREKGREILEKTLQ

SEQ ID NO: 9001 - DNA, 753 bp, Streptococcus agalactiae
atgaaaaaaaataaaattatccgattcagtttagttggtgttctacttgcgatactatgctttagtctttttgctttattgaagcctaacagtcaacaatcatcatctcaaaagttgaggaatgaggatataaaaaagatatcctctcaaaaaagaaataagaaattacaattaccagctgtatcatcaaaagattggaacttgattttggtcaatcgtgaccataaacatgaagaattaagtccagatgtggttcctgttgaaaatatttatttggataaacgtattacgaagcaagctactcagtttttagaggctgctagagcaattgattcacgagaacatttaatttcgggttatcgtagtgttgcctatcaggagaagttgttcaattcttatgttactcaagagatgactagtaaccctaatttgacgaggggacaagcagaaaagttggtaaaaacttactctcagcctgcaggtgctagtgaacaccagactggattagcgatggatatgagtactgtagattctttgaatgagagcgatcctagagtagtcagtcagttgaaaaagatagctccacaatatggttttgtcttacggtttccggatggtaaaacagcagaaacaggggtaggttatgaagattggcattaccgctatgttggggtagagtctgcaaaatatatggccaaacatcatttaacattagaagaatacataactttattaaaggagaataaccaatga

SEQ ID NO: 9002 - protein, 250 aa, Streptococcus agalactiae; identical to SEQ ID NO: 6860

SEQ ID NO: 9003 - DNA, 1524 bp, Streptococcus agalactiae
atgaaaaaaaaactatctctttgggcatttctatcattgattttagtcactatgaccatttgtatattttctattttttattatgtcactatacatcagtcctatcgtatggtaagggtacaggaagaaaaaatcttaaaaaatactggttatgctttatcgagaaatccacaagttatacaaacactcaaagataatcactatgatcaaagtctccaaaaacaaatgttattccttagcaaaaaatcaaatttagactatattgtccttataaatttaaaagggatccgttttacccaccctgactccactaagattggtaaaccatttcaagggggtgatgaacaagctgtttttaagggaaaagctattatgtctactgcagaaggttctttaggaaaatctttacgatacttaattccagtatatgatcaccaaaaacaggttggggcaattgcagttggcttaaaattaacgacacttggagacttatctcaaagtagcataaaagagtttagtaagcctctcttgattagtattttgattagcttagtcgtcacaagtataatttcttatggcttaaaaaaacaacttcacaacctccatccaagtgatatttttcaacatttagaagagcgcaatgcaacactggaccaaattcaagccgctgtatttgttattgaccagaggcatatcatcaaaagaaataatcctgcagctagtttattattcaaaaaagaggggcaacgagacctattttcaggtaaattattagaatctttaattcctcaactcaagcaggatcatttttcaaaaaaaactgaacaagtattacattttcaaggacaagactatttactatctatctcgccaattacggttaaaacacaaaatagaggctatgttgtcttcttaaggaatgttactgaaacacttttcactttggatcaattagcacacactacagcttatgcttctgcgctacaggcccaaacacatcaatttatgaatcaacttcatgttatttatggacttgcagacattgaatactacgacgagttgaaaatttatttaaaagaattattggagccacaaaatgaatttttagcacgcttatcaatgttagttagagagcctcgactggctagtttcattattggcgaaagagaaaaattcgcagaaaaacacatcaatctatccacagaaattttagtagaaatccctaccaagtcaactgttgaggatgttaataactatctcttgctccacagatatattaatacgaagatactcacgctattaaattcaacgactttagtttctttacgtttaaattatcaaaataacctcattgaaacagattatcaatgggagaatgagaagtggttactcaatgactaccatcagtatttcaacgacgcttattttcaacagttacttgtagattcaagagctacttataagatctctttaaaacaaaataaggttattataagaacaaatattatctactcagaagggcct

SEQ ID NO: 9004 - protein, 508 aa, Streptococcus agalactiae
MKKKLSLWAFLSLILVTMTICIFSIFYYVTIHQSYRMVRVQEEKILKNTGYALSRNPQVIQTLKDNHYDQSLQKQMLFLSKKSNLDYIVLINLKGIRFTHPDSTKIGKPFQGGDEQAVFKGKAIMSTAEGSLGKSLRYLIPVYDHQKQVGAIAVGLKLTTLGDLSQSSIKEFSKPLLISILISLVVTSIISYGLKKQLHNLHPSDIFQHLEERNATLDQIQAAVFVIDQRHIIKRNNPAASLLFKKEGQRDLFSGKLLESLIPQLKQDHFSKKTEQVLHFQGQDYLLSISPITVKTQNRGYVVFLRNVTETLFTLDQLAHTTAYASALQAQTHQFMNQLHVIYGLADIEYYDELKIYLKELLEPQNEFLARLSMLVREPRLASFIIGEREKFAEKHINLSTEILVEIPTKSTVEDVNNYLLLHRYINTKILTLLNSTTLVSLRLNYQNNLIETDYQWENEKWLLNDYHQYFNDAYFQQLLVDSRATYKISLKQNKVIIRTNIIYSEGP

SEQ ID NO: 9005 - DNA, 594 bp, Streptococcus agalactiae
atgaccaaaaagatattcttatttatctgcgctactcttttagtaggaatagccttatatacaccaacaacttctatttttaatcataacaacgtttatgctgccaccaagaaagcaaaaattaaatttaataaaactcaaaaaaaaattgtcaaaaaagcaagagaatatgctaagtctggccatatgtctaaagatagtatcattgaaaaattaaaaaaggattctaagaaatatcgtcaagaagacatcaactttgtgattaataacctcaaggttgattacaaaaaaaatgccttgatttctgccaaaatttattcaaagaccatgaatttatctaaacaatctatctttgaacagctctattcggagtctccagataaggcaacccactctgataaatttacaaaagaagaatcccaatatgctatagaccatctcaaagtagatttcaaagaaaatgctcttgagactgctaaaagttatcaaagtagttcttctttatccaaagaagaaatctataaacaattgacatctacgctgggcgataaattcacaaatgatgaagcccaatatgctgtagatcatttgaaa

SEQ ID NO: 9006 - protein, 198 aa, Streptococcus agalactiae
MTKKIFLFICATLLVGIALYTPTTSIFNHNNVYAATKKAKIKFNKTQKKIVKKAREYAKSGHMSKDSIIEKLKKDSKKYRQEDINFVINNLKVDYKKNALISAKIYSKTMNLSKQSIFEQLYSESPDKATHSDKFTKEESQYAIDHLKVDFKENALETAKSYQSSSSLSKEEIYKQLTSTLGDKFTNDEAQYAVDHLK

SEQ ID NO: 9007 - DNA, 366 bp, Streptococcus agalactiae
atgactatttctcaacaacaataccaacacatgataacaaatagtgacttaatcgccatcacagataaggcgttagtaagcaaaagtcaacaatctgaagcgactatttttataggacgtccaacttgccaatattgtagagctttcttaccaaaattattaaaatctcaagccacacttcattcaaaaatttactaccttgatagtcaaaaatacaaagggaaacgattgaagagttttttcaaaaagcatcatattaccactgttccaaatttagcacattatcaacaaggaaaaatgactaaatatcttgttcaaggaagccaagctacacctcaacaaatccaaactttcttaagccaaaaa

SEQ ID NO: 9008 - protein, 122 aa, Streptococcus agalactiae
MTISQQQYQHMITNSDLIAITDKALVSKSQQSEATIFIGRPTCQYCRAFLPKLLKSQATLHSKIYYLDSQKYKGKRLKSFFKKHHITTVPNLAHYQQGKMTKYLVQGSQATPQQIQTFLSQK

SEQ ID NO: 9009 - DNA, 540 bp, Streptococcus agalactiae
atgtcaattattattgggttaatggccgctatgtttattattcgtttagcttatttaaagctatctatagctaatgaaaaggccttaagaaaaaatggtgctaaagaatatggtgtaggtgtttcaaaagcaatcacagttcttcatattatcatttatttttcatctgtaactgaggctattctaacaaaagcaagttttaattttgttagcgtaatcgggcttagcttgatgattttttctgtgtttatgttacatacagtaacacgtttacttggtcgtatttggacagtgaaattaatggtagataaaaatcatcaatttgtagatcactggttatttagggttgttaagcatcctaactatttcttaaatattgctcctgaacttttaggtgtaactttattgtgtcatgctaaatacacagcattatttgtcttgccaatttatgcttttgttatttatttaagaattcgtgaagaaaacttattattaaaaacgatcattattccaaatggaatcaaaaagtctagggtatat

SEQ ID NO: 9010 - protein, 180 aa, Streptococcus agalactiae
MSIIIGLMAAMFIIRLAYLKLSIANEKALRKNGAKEYGVGVSKAITVLHIIIYFSSVTEAILTKASFNFVSVIGLSLMIFSVFMLHTVTRLLGRIWTVKLMVDKNHQFVDHWLFRVVKHPNYFLNIAPELLGVTLLCHAKYTALFVLPIYAFVIYLRIREENLLLKTIIIPNGIKKSRVY

SEQ ID NO: 9011 - DNA, 498 bp, Streptococcus agalactiae
atggaatcatatgaacaattttatgccaaactatctcaaccttttagaaaatccccacagttaataattcttttaaattttttactaaaaatagtcacaggaatgatgtacatactctatccatcttttctgatatttactctttggcaagggatgacatttcaattatggttaaggctattaattatccctgctgttggctttatagctttgtcttacattaggaaacgccttgattttccacgaccatatgaaaaatggaatattaaacctttaatttataaggatactgagggaaggtcaatgcctagcagacatgttttttcagctacgatgattagtatgtgtttgttacgatattatgtttactttggaatagtttgtttaatattatcggttctattggcaatttgccgtgtgatagcaggtattcactatcctaaggatgttattgtaggttaccttattggcttgattttagggctttgtttatttatt

SEQ ID NO: 9012 - protein, 166 aa, Streptococcus agalactiae
MESYEQFYAKLSQPFRKSPQLIILLNFLLKIVTGMMYILYPSFLIFTLWQGMTFQLWLRLLIIPAVGFIALSYIRKRLDFPRPYEKWNIKPLIYKDTEGRSMPSRHVFSATMISMCLLRYYVYFGIVCLILSVLLAICRVIAGIHYPKDVIVGYLIGLILGLCLFI

SEQ ID NO: 9013 - DNA, 351 bp, Streptococcus agalactiae
atgatatacaaaattattgcttctttatttcttgttttaatccctatattttcacaggttcttgtcaaaatatttaaacttaaaaaatttaacattatgtttccagatgttgcttttcctatttttgtttttttaattccattaatatcatctagtctgttaaaacaaaatcttttaccttactatctgattctcatttcattactggcaatcggaattacaataaagcttctacgaacaaagactcttttttcttataaacgttttttaaaattattttggagatctggctttattctaactttccttttttacctaggattattggttatcatctttatcaaagtacaa

SEQ ID NO: 9014 - protein, 117 aa, Streptococcus agalactiae
MIYKIIASLFLVLIPIFSQVLVKIFKLKKFNIMFPDVAFPIFVFLIPLISSSLLKQNLLPYYLILISLLAIGITIKLLRTKTLFSYKRFLKLFWRSGFILTFLFYLGLLVIIFIKVQ

SEQ ID NO: 9015 - DNA, 201 bp, Streptococcus agalactiae
gtgaggcgtaatatggcatctagtggttggaaatatgtattaaaacaaatcggtctaatagtattagtcatactattagccttgctgtttttagcggttggattgatgttgggttatagtgtttttggtgacggagagcatgcttactctattttatcgctggataaatggcaaaatattattggaaaatttttaggaaaa

SEQ ID NO: 9016 - protein, 67 aa, Streptococcus agalactiae
VRRNMASSGWKYVLKQIGLIVLVILLALLFLAVGLMLGYSVFGDGEHAYSILSLDKWQNIIGKFLGK

SEQ ID NO: 9017 - DNA, 411 bp, Streptococcus agalactiae
atgatggaaaaaattaggatttaccataacccaaattgtgggacatcaaggaacgtacttgccattattcgtcattgtggtattgaaccagaaattatttattatctgaaaacaccacctagcaggatggaactggttgaactgttgttagaaatgaaactttctgcgagggaacttctaagaacagatgttcctgcttatgagaaattcaatttggaatcttctagcgttacagatgaagaaatgattgatgcgatgatacaagatcctattcttatcaatcgtcccatagttgttacgagtaaaggtgcaaaactctgccgaccctgtgaagcaattttaaccattttacctgtaaagatggaaaaagattttgttaaagaagatggacagattatccaaagtttatga

SEQ ID NO: 9018 - protein, 136 aa, Streptococcus agalactiae
MMEKIRIYHNPNCGTSRNVLAIIRHCGIEPEIIYYLKTPPSRMELVELLLEMKLSARELLRTDVPAYEKFNLESSSVTDEEMIDAMIQDPILINRPIVVTSKGAKLCRPCEAILTILPVKMEKDFVKEDGQIIQSL

SEQ ID NO: 9019 - DNA, 291 bp, Streptococcus agalactiae
atgaaacttaaaatcagtgttttaacagcagcttcagctgtcactctattattagctactttagcaagtcttgcgaaggcagacacagtgtcttatccttcacgtgatgccggatttgtctactctcgtgggtatgcgccttctgaatcaagctatccttcacgcgatgccgggtttatctactctcgtgggtatgcgccttctgaatcaagctatccttcacgcgatgccggatttatctactctcgtgggtatgctccaaaacacttcctaagtgcttacgataaataa

SEQ ID NO: 9020 - protein, 96 aa, Streptococcus agalactiae
MKLKISVLTAASAVTLLLATLASLAKADTVSYPSRDAGFVYSRGYAPSESSYPSRDAGFIYSRGYAPSESSYPSRDAGFIYSRGYAPKHFLSAYDK

SEQ ID NO: 9021 - DNA, 453 bp, Streptococcus agalactiae
atgttaataaaaggattattgtcacccaatagtaaagtatctccgaaggattacaaagtatatatgagagttttgtcttttgtttttagtgtatgtagtttgattatgatagtatcatcatttctacatacctttgaatctaattttactaaaggtttttcctttggttcaggtattgccttatttgcaggaagtttttattttttggtgataacatttagtgaaaagcgatttcaacattactataccaaagtttttgatgagcgtaatcaatttattgctaatatgtcttgtcgacttcttttccttttatctgtccttgttttagtggtattgtgtctgattaatgtctggtttggtataactttttcctatgcaaagttcttgctattgatactctcttttattttatatggttatttattaatttactttattttacagaagttattg

SEQ ID NO: 9022 - protein, 151 aa, Streptococcus agalactiae
MLIKGLLSPNSKVSPKDYKVYMRVLSFVFSVCSLIMIVSSFLHTFESNFTKGFSFGSGIALFAGSFYFLVITFSEKRFQHYYTKVFDERNQFIANMSCRLLFLLSVLVLVVLCLINVWFGITFSYAKFLLLILSFILYGYLLIYFILQKLL

SEQ ID NO: 9023 - DNA, 204 bp, Streptococcus agalactiae
atgaacactaacatccctagccaatttttacctttctttatccctcttatcctcttacaggttatccttatcatcattgcactcttaaaattacgaaaaataacaaagacaaactacctttctaaaccagtttgggttctaattatcctttttgttaatctccttggacctattgcttttcttagcttagaagggaaaaatgca

SEQ ID NO: 9024 - protein, 68 aa, Streptococcus agalactiae
MNTNIPSQFLPFFIPLILLQVILIIIALLKLRKITKTNYLSKPVWVLIILFVNLLGPIAFLSLEGKNA

SEQ ID NO: 9025 - DNA, 471 bp, Streptococcus agalactiae
gtgggaggaaatgaaatattaattaataaacggttaagaacaatctccttactacattatctgttagcgctactacttcttatagacattatctttacgattgattttataattcacacgtcaacaatttccaaaaatagtctatcatatataagttatggtcaaggatttggttggtctatgattcttattaatttgatagctctacctatttgtttcctagtagaattgtcagctggtctactattaaaattagaaatgcataagcaacatggctactatcctctggaacgcttattgatgactggtaatattctaacagttgtatcgctagtattattacatactttgattcacaatatcaattcacttctttttttatcaattacagtagttttattgatttctgggaagtccttaagtcttattagtatctatctattaaaaagaaaaagtaaacatcaaaaagtc

SEQ ID NO: 9026 - protein, 157 aa, Streptococcus agalactiae
VGGNEILINKRLRTISLLHYLLALLLLIDIIFTIDFIIHTSTISKNSLSYISYGQGFGWSMILINLIALPICFLVELSAGLLLKLEMHKQHGYYPLERLLMTGNILTVVSLVLLHTLIHNINSLLFLSITVVLLISGKSLSLISIYLLKRKSKHQKV

SEQ ID NO: 9027 - DNA, 351 bp, Streptococcus agalactiae
atgagtttagcattgcaaattgaaatgtttattttagccattgtcctactttatatgattataagaatggttaataaaaacacattttctgttaaacgttctttaccttggctattagttggtttaattctagtctttattagtgtatttcctggggtggtctcatttatcgctcatcaccttggattcgctttaacgatgaatttcttgttatttggtgctattttatttctgttttgtttagaattatttgatactagtagcaataccaaaagagatgagcaaattaaacgcctgattcaagaggtttctttgttgaaaaaagagatagaggatagcactttagatgag

SEQ ID NO: 9028 - protein, 117 aa, Streptococcus agalactiae
MSLALQIEMFILAIVLLYMIIRMVNKNTFSVKRSLPWLLVGLILVFISVFPGVVSFIAHHLGFALTMNFLLFGAILFLFCLELFDTSSNTKRDEQIKRLIQEVSLLKKEIEDSTLDE

SEQ ID NO: 9029 - DNA, 450 bp, Streptococcus agalactiae
atgtcaaaaggatattcaagacaacagaaaaagtctactaagactaatactgattcaactcaatcacccgctaagcatataaaaacaggtttttctgcacttcaaaaaacaattgcattagtcggtagtgttttaagtattattgttgcctctattactattactaatgcgattaataatcacaaagactctagtaagactgattcttctacttcaaaaaccgtcattataagagaaagtggacaaaattctagtaaccaagtttctactgaaaaagatgagacaagggcatcatccagccaaacactagaaaattcctctgctagtagtactccgagtagcagttcaaattctgctgccaataacgatcaaacatcatctagtactaacaatgatcaaacaaataatactactaccgatacctcaactattgaaaatacaacaacacct

SEQ ID NO: 9030 - protein, 150 aa, Streptococcus agalactiae
MSKGYSRQQKKSTKTNTDSTQSPAKHIKTGFSALQKTIALVGSVLSIIVASITITNAINNHKDSSKTDSSTSKTVIIRESGQNSSNQVSTEKDETRASSSQTLENSSASSTPSSSSNSAANNDQTSSSTNNDQTNNTTTDTSTIENTTTP

SEQ ID NO: 9031 - DNA, 399 bp, Streptococcus agalactiae
atgcataatatattaagatttttaggcattgttattatttctgcagtgattctatttagtataggtagtttctacgatttaacattaatgaaaaatatactacttatctgttggagttttctctttgatctattggtttttgtcttcaaacaaagacaaacgacagaagtactcacatggtatcaagttgttaagcaattttggttatttattaagtgtactattcttattcctatcttagttgcttttattataatgaaaggatgtttgacaagtatatcagatatattaatttacttttatttacaccttgtcgttgtttattatacgataggaatgattttatcattaggtcgtatcatttctcctgaacactctatgtttaataaacttagaaag

SEQ ID NO: 9032 - protein, 133 aa, Streptococcus agalactiae
MHNILRFLGIVIISAVILFSIGSFYDLTLMKNILLICWSFLFDLLVFVFKQRQTTEVLTWYQVVKQFWLFIKCTILIPILVAFIIMKGCLTSISDILIYFYLHLVVVYYTIGMILSLGRIISPEHSMFNKLRK

SEQ ID NO: 9033 - DNA, 453 bp, Streptococcus agalactiae
atggttaaattaaaatcgttactgaaaaaaagtattcaaaatgaagtcagcttatatttactgttcggactattaacatcccttctttatttagttattcgacaagggatttttaatttctcgcaggacgctccattctctgcaatagttgctaacataatagctatactttttgctttttttacaaatgatcgatttgtttttaaacaaactaaaattgaacagcttcaacgcttacaaacatttgtcatcgctagattaggcacattaggattagatttgatattagctgttatttttgttgatcaatttccttctattatcggacaattcgttcagcacaatttaaataaaatcaacaccattgaaagccttgtatctcaaatattaattattttactcaactacatcttgagcaaatttgttatttttaaagacaaaaaaagacaactc

SEQ ID NO: 9034 - protein, 151 aa, Streptococcus agalactiae
MVKLKSLLKKSIQNEVSLYLLFGLLTSLLYLVIRQGIFNFSQDAPFSAIVANIIAILFAFFTNDRFVFKQTKIEQLQRLQTFVIARLGTLGLDLILAVIFVDQFPSIIGQFVQHNLNKINTIESLVSQILIILLNYILSKFVIFKDKKRQL

SEQ ID NO: 9035 - DNA, 405 bp, Streptococcus agalactiae
atgaaaaagagtacccaaataatactactaatagttgcattattcatacttgtttttagcggaggattttatatgaaagaacaacaaagaaaagaagaactaaaacggaatcgagaatatgaagttagtctagtcaaagcattgaaaaattcctatgagaatatagaagaaataaaaatcacacatcctgtttcaactgaaattcctggagattggcattgtactgtaaagatttcatttaatgataaaaaatctattgtttataatattacacataatttggaatcgaaaaaaaattatagcggaaaatttaatgaaaaaaatatgaatttttttgattcaagaattggtaaaacaaaaaaaactataaaaattattttttcagatggtcaggagaagatacaa

SEQ ID NO: 9036 - protein, 135 aa, Streptococcus agalactiae
MKKSTQIILLIVALFILVFSGGFYMKEQQRKEELKRNREYEVSLVKALKNSYENIEEIKITHPVSTEIPGDWHCTVKISFNDKKSIVYNITHNLESKKNYSGKFNEKNMNFFDSRIGKTKKTIKIIFSDGQEKIQ

SEQ ID NO: 9037 - DNA, 297 bp, Streptococcus agalactiae
atgctagtatcaaaggagaaagctatgtcatcaccacttaagcaagagcaaactcacgaaagcaaaacagagcaagctcaaccaaaatttcaagtatttcaagaatttgatcacagtgctaagttgcgtgagctagtcttttttgctcgtatcgctctcttcagtataaccactgtgctaatctctttcttattactagcactaagtttaacacctgtctggagtttcttactagcgatgctggcaagtctagcagttacatctgcagtctcttcattcatttggtcactcagacaa

SEQ ID NO: 9038 - protein, 99 aa, Streptococcus agalactiae
MLVSKEKAMSSPLKQEQTHESKTEQAQPKFQVFQEFDHSAKLRELVFFARIALFSITTVLISFLLLALSLTPVWSFLLAMLASLAVTSAVSSFIWSLRQ

SEQ ID NO: 9039 - DNA, 465 bp, Streptococcus agalactiae
atgcttatgataataaattcattcgataatagtagaaaagcgattattaatcctgaagatattaattcaccaataaaaggttttccaaagactgttattacctgtttcgcgcgggagactttcaatcgtattttagaagaattgcctcatcgtgaaattgctagaactagtgtagcaaacttagaaattcccatttatgaattagaatttaaaggacaaaagattggctttttcaatgcttatgttggtgcttcagcttgcgtagcaatcttggaagatattatagtatttggaatggaaagtttaattgtttttggaacatgtggcgtccttgattcgtcaattgaggagacatccattattattccaagaagtgctattagggatgaagggacatcatttcattattcggaagcaagttctgaaattgcagtaaacacaaattcaatttttttactctgcgga

SEQ ID NO: 9040 - protein, 155 aa, Streptococcus agalactiae
MLMIINSFDNSRKAIINPEDINSPIKGFPKTVITCFARETFNRILEELPHREIARTSVANLEIPIYELEFKGQKIGFFNAYVGASACVAILEDIIVFGMESLIVFGTCGVLDSSIEETSIIIPRSAIRDEGTSFHYSEASSEIAVNTNSIFLLCG

SEQ ID NO: 9041 - DNA, 456 bp, Streptococcus agalactiae
gtgaaccacttacttaacctcagtaaagaaaatatagctaaaatagattttgactttcttaatgaggcacttaatgcaaatattcgtttgaaagaattagtagatgaactaaaaatttcaaaagaactggacagtaaaggttggtccaaaaaagactctcgaacgataaaaatcttgtacgatggccttatcaataaacatatagtttccctagatcgtgcagattataacattatccaagtcattccatttgctaatgtacatgtactactgtttttaataccagaaagggagaattctaaaaattatagaatatacaactacagtgattatgaaatggagttaatcaatgaggataggcaacaattttcaaaatatgaaacagttgatttagaccaattgatacttgttgatatttttaatattgatgactacatttcatcatatttaacaata

SEQ ID NO: 9042 - protein, 152 aa, Streptococcus agalactiae
VNHLLNLSKENIAKIDFDFLNEALNANIRLKELVDELKISKELDSKGWSKKDSRTIKILYDGLINKHIVSLDRADYNIIQVIPFANVHVLLFLIPERENSKNYRIYNYSDYEMELINEDRQQFSKYETVDLDQLILVDIFNIDDYISSYLTI

SEQ ID NO: 9043 - DNA, 348 bp, Streptococcus agalactiae
atgaaagactatattaacagaatattgcactttattaaagaacatatgacttatcatgtcaactttatagatgactttttagatattaaatgggaaaaggtgagtaacatccatttaaggttttggacaactattattgcttatttagttatttttatcttaagtatctctaccgtaattcttaaccttgtacttctttttcaaggattcttaacgcaaaaccctattatttacttactattttttataactttagtttgtgctttttattttgcttataaatttattacttatactccaaccattgtaaaaaatgctcttcagtatatcaaaaagctcaaaaacgtt

SEQ ID NO: 9044 - protein, 116 aa, Streptococcus agalactiae
MKDYINRILHFIKEHMTYHVNFIDDFLDIKWEKVSNIHLRFWTTIIAYLVIFILSISTVILNLVLLFQGFLTQNPIIYLLFFITLVCAFYFAYKFITYTPTIVKNALQYIKKLKNV

SEQ ID NO: 9045 - DNA, 201 bp, Streptococcus agalactiae
atgggattttttgcacagcgttgtccttactgccaaagtacaaaagtacaatttatgaaccaagaccgtaaaggttttaatggttgtgtcggttgtatcggatttttaattgcttggccgttcttattgctaggtttggttgggaaaaagggtaaaaacaactggcattgcacaaattgtggaagaacgtttaagacaaaa

SEQ ID NO: 9046 - protein, 67 aa, Streptococcus agalactiae
MGFFAQRCPYCQSTKVQFMNQDRKGFNGCVGCIGFLIAWPFLLLGLVGKKGKNNWHCTNCGRTFKTK

SEQ ID NO: 9047 - DNA, 393 bp, Streptococcus agalactiae
atgattatgtctaccatctattttatttctttatgcatgagttttatcttaagttattatgatataaaataccaagagtatcctatttttctatggatattattcaccatttcaacgataattctcacaccgattacaaaagtttctattgttttgtgtttatttgggattttagctgaagtggttgatattaatatcggaagtggagatttcctttatttagccacaattggcttatctttacctcttcatcaaatgctttttattattcaaataggtgcttggttaggaattatttattgtttagttatgagaaaaatgaaaaaaacgatagcttttctaccgtttttaagtatcgcttatataatcgtcaccagttactctcttttattc

SEQ ID NO: 9048 - protein, 131 aa, Streptococcus agalactiae
MIMSTIYFISLCMSFILSYYDIKYQEYPIFLWILFTISTIILTPITKVSIVLCLFGILAEVVDINIGSGDFLYLATIGLSLPLHQMLFIIQIGAWLGIIYCLVMRKMKKTIAFLPFLSIAYIIVTSYSLLF

SEQ ID NO: 9049 - DNA, 462 bp, Streptococcus agalactiae
atgagaaagattattataccaataataactattttgttgattgctttagatcaactatctaagttatggattgttaaacatattgaactaaaccaaattaaggaattcattccaaatatcgttagtctaacttatctgagaaattatggtgctgcattttctattttgcaaaatcaacaatggctttttaccttaattacaatcttcgttgttggtgttgctattatttatttgatgaaacatattaatggaagttattggttattaatttctctaaccttaatcatctctggtggattaggaaactttatagatcgcttaagattaggttatgtcgttgatatggtgcatttagattttattaattttgctatctttaatgtagcagactcatatctgacaatcggtattatttgcttaatgattgcactttggaaagaggaaagtaatggaaatcacaat

SEQ ID NO: 9050 - protein, 154 aa, Streptococcus agalactiae
MRKIIIPIITILLIALDQLSKLWIVKHIELNQIKEFIPNIVSLTYLRNYGAAFSILQNQQWLFTLITIFVVGVAIIYLMKHINGSYWLLISLTLIISGGLGNFIDRLRLGYVVDMVHLDFINFAIFNVADSYLTIGIICLMIALWKEESNGNHN

SEQ ID NO: 9051 - DNA, 369 bp, Streptococcus agalactiae
atgattttaaagaagaaacttaaagctggcatccttttgcaagctattgtattggctgctgtatttacactcgtcttacagttttatctagcaagaatattggcaacagaaagacagtatcatagccaaattgaagcaagtaaagcttatttaacagcgcagttagcttataaaacaatagaaggtgactccatatcaggaaaatgttattttacaggaggatatgcttcatacctccaagaagggaactatttacaagttaaggttacattggataagggaggaaactataaccataagttttatcgtaaaacagacactctccaagtacctctcaagtctaatgataataaagcaagccataaacat

SEQ ID NO: 9052 - protein, 123 aa, Streptococcus agalactiae
MILKKKLKAGILLQAIVLAAVFTLVLQFYLARILATERQYHSQIEASKAYLTAQLAYKTIEGDSISGKCYFTGGYASYLQEGNYLQVKVTLDKGGNYNHKFYRKTDTLQVPLKSNDNKASHKH

SEQ ID NO: 9053 - DNA, 201 bp, Streptococcus agalactiae
atggcattattttttaccttcctaaaggtatctcaagtcattttcttagtattattgattgcctatgccagctttttagtgatttcattagtcattggaggtgttcatctctatgaaaaaaatgagcgcaaaaaaagtttaactagaaataaagaaaaaattccaatttcaattattagacttcctgcgaaactaaaatcc

SEQ ID NO: 9054 - protein, 67 aa, Streptococcus agalactiae
MALFFTFLKVSQVIFLVLLIAYASFLVISLVIGGVHLYEKNERKKSLTRNKEKIPISIIRLPAKLKS

SEQ ID NO: 9055 - DNA, 249 bp, Streptococcus agalactiae
atgataatattcttatacgcttgtctgatgatatttgggatactttatattattgaacgtcgggtaagtcagaaaaagtctaaagttattttggaattattgatgaaccctaaacttcatttggatttattatcggcattaaaaccatttgaaaaagaaacagatcgtctcatataccttcgtaaaacttatcacctagatattattgatgctgttactttaaataatcaattgaaagagaaagaagta

SEQ ID NO: 9056 - protein, 83 aa, Streptococcus agalactiae
MIIFLYACLMIFGILYIIERRVSQKKSKVILELLMNPKLHLDLLSALKPFEKETDRLIYLRKTYHLDIIDAVTLNNQLKEKEV

SEQ ID NO: 9057 - DNA, 1671 bp, Streptococcus pyogenes
atggttttatcagatattgaaatagccaactctgtcactatggaacctatcagtaaggttgccgatcaattagggattgacaaggaggcgctctgtctctatggtaagtacaaggcaaaaattgatgcccgtcaactggtcgccttaaaaaacaaacctgatggcaaactcattcttgtcactgctatctcaccaacaccagctggtgaaggcaaaaccaccacttctgttggattggtagatgctctttctgccattggaaaaaaagcagttattgcccttcgtgaaccttctcttggtcctgtttttggggttaagggaggagctgctggcggtggccacgcgcaagttgtcccaatggaagacatcaaccttcactttacaggggactttcatgccatcggtgtcgccaacaacttattagctgccttgattgataaccacattcaccatggcaatagcctaggcattgattccagacgtatcacttggaaacgtgtggtggatatgaatgaccgccagcttcgtcatattgttgacggcttgcaaggcaaggtcaacgggattcctcgtgaagatggttatgacattaccgtcgcctctgaaatcatggcaatcctgtgcctatccgaaaatatttctgacctcaaagcccgccttgaaaaaatcatcatcggttacaactaccaaggtgaacctgtaacagctaaagacttgaaagctggtggtgccctagccgctctgctcaaggatgcgattcatcctaatctcgtgcaaaccctggaacacacaccagccctcattcacggtggcccatttgctaatatcgcccatggctgtaatagtgtcctcgccaccaaactagccttgaaatatggtgattatgccgttaccgaagctggatttggcgctgaccttggagctgaaaaattcattgacatcaaatgccgcatgtcaggccttcgcccagcagccgttgtcctagtagccactatacgtgcccttaaaatgcatgggggtgtgccaaaagcagacctggctactgaaaatgttcaggccgttgtggatggtttacctaaccttgacaaacatttggctaatatccaagacgtctatggccttccagttgtcgtggcgatcaataaattcccgcttgataccgatgccgaattacaagctgtctatgatgcctgcgacaaacgtggcgttgacgttgtgatttctgatgtttgggcaaatggcggagctggtggccgtgaactggctgaaaaagtcgtgacactagccgagcaagacaatcaattccgctttgtttatgaggaagacgatagcattgaaaccaaactgactaaaatcgttaccaaagtttacggtggtaaaggcatcaacttgagctcagcagccaaacgtgaactggctgacttagaacgcctcggctttggcaactacccaatttgcatggccaaaacccaatattccttctcagacgatgccaaaaaacttggcgcaccaactgactttacagtgactattagcaaccttaaagtgtccgcaggagcaggatttatcgttgccctaacaggtgctatcatgaccatgcctggccttccaaaagtacctgccagcgaaacaattgatattgacgaggagggcaacatcacaggactattc

SEQ ID NO: 9058 - protein, 557 aa, Streptococcus pyogenes
MVLSDIEIANSVTMEPISKVADQLGIDKEALCLYGKYKAKIDARQLVALKNKPDGKLILVTAISPTPAGEGKTTTSVGLVDALSAIGKKAVIALREPSLGPVFGVKGGAAGGGHAQVVPMEDINLHFTGDFHAIGVANNLLAALIDNHIHHGNSLGIDSRRITWKRVVDMNDRQLRHIVDGLQGKVNGIPREDGYDITVASEIMAILCLSENISDLKARLEKIIIGYNYQGEPVTAKDLKAGGALAALLKDAIHPNLVQTLEHTPALIHGGPFANIAHGCNSVLATKLALKYGDYAVTEAGFGADLGAEKFIDIKCRMSGLRPAAVVLVATIRALKMHGGVPKADLATENVQAVVDGLPNLDKHLANIQDVYGLPVVVAINKFPLDTDAELQAVYDACDKRGVDVVISDVWANGGAGGRELAEKVVTLAEQDNQFRFVYEEDDSIETKLTKIVTKVYGGKGINLSSAAKRELADLERLGFGNYPICMAKTQYSFSDDAKKLGAPTDFTVTISNLKVSAGAGFIVALTGAIMTMPGLPKVPASETIDIDEEGNITGLF

SEQ ID NO: 9059 - DNA, 1908 bp, Streptococcus pyogenes
atgagtagagatccaacgttgacattagacgagtcaaatctcgttattggtaaggatggacgtgtgcattatacatttactgctagtcaagacaaccaaacagttagactagccagcaactgcttaggcacagcgcactttaatcagctcatgattgagcgaggggataaagcgactggctatgtggcgcctgtggttgttgagggtagcggtgagttgacaggtgtgtttaaaagtcttgaggagatgcttagtagcttgagatctattaatttagagctgacagacaccaaagactctaagctttggtcaaaaatcaagttgactaaccgtggcatgttgcaggagtactatgacggtaagatcaagactgagatagtcaactccgcacaaggtgtggctactcgtatcacagaggagactggcaaaaagctagcacttatcaatgagtctatcaacggtataaggcgagagtatcaaaacgctgataaaaagctatcagctagctatcagctgggcatagatggtctcaaagccaccatgcgtagtgataaaatcggcttacaagctgagatacaaacaaccgctcaaggcttgtatcaaaggtatgataacgagatacgcaagctgtccgctaaaataaccactacctcgtcaggcactacagaggcctatgaaagcaagctcgatggcttacgagctgagtttactcatagtaatcaaggtatgcgcgtagagctggagtcaaaaatcagtgggttgcaatcaacgcaacaagcaactgccaggcaaatctcacaagagataagtaaccgcgaaggtgctgtcagtcgtgtacaacagggcctagacagttaccaacgacgattacagtccgcagagggtaattacaatagtttgagagagactgtagcgggttatgagcgcaggatatccaatcaggataacactatctcctctaactttacacagctaaaaagcttgataaatcagtctgtgaccttaggaaaaatacagtccctcttgcggcaatctggcgacagtatcatgcttgcgattaaagacaaaatcccgcaaagtaaaatgtctggcagcgatattatctcagcgattaacttgaattcccgcggtgtgcaaatagctggtaaaaacatcgctcttgatggcaatacgacggttaatggagcttttggggctaagttaggggagtttatcaagctaagagccgaccagattatcggtgggacaatcgatgcaaacaaaatcaatgtgattaatctcaaagctagcagtattgttggtttagacgctaattttatcaaggcaagaattagctatgctatcactgatttgcttgagggtaaagttattaaggctcgtaatggtgcgatgacaatagacttgcaaagcggtcaaatcaaccattacacaaatgagtcagccatgagacgtatcgatagcagtacagctagtcagtttataaagatgacaaagtcaggctttatatctgagataggtaacatgcaagctgcaatgacggttataggctctaatagcgatgggtcagaaaaccatgaaaataaaaccttcggaggcataagaatttggaacgggaagtcatcttatcaatcgacaagttttgttgaattagttggtaaccgtgtagcaatctatggaaataaaaatcgtagtccatggctctttgactcaacaacgtcaggatatgcttaccttatccctcaaaatgacagaggtataaagcatgtcatagggagagctgatcgtaagatagaccaaatccacgttggagatatctatgtgcaaggcgaacgtgtagccatgatgttaaaagatttagcacttaaaattggctatataggtacaggtggttgggctaaccgcatagga

SEQ ID NO: 9060 - protein, 636 aa, Streptococcus pyogenes
MSRDPTLTLDESNLVIGKDGRVHYTFTASQDNQTVRLASNCLGTAHFNQLMIERGDKATGYVAPVVVEGSGELTGVFKSLEEMLSSLRSINLELTDTKDSKLWSKIKLTNRGMLQEYYDGKIKTEIVNSAQGVATRITEETGKKLALINESINGIRREYQNADKKLSASYQLGIDGLKATMRSDKIGLQAEIQTTAQGLYQRYDNEIRKLSAKITTTSSGTTEAYESKLDGLRAEFTHSNQGMRVELESKISGLQSTQQATARQISQEISNREGAVSRVQQGLDSYQRRLQSAEGNYNSLRETVAGYERRISNQDNTISSNFTQLKSLINQSVTLGKIQSLLRQSGDSIMLAIKDKIPQSKMSGSDIISAINLNSRGVQIAGKNIALDGNTTVNGAFGAKLGEFIKLRADQIIGGTIDANKINVINLKASSIVGLDANFIKARISYAITDLLEGKVIKARNGAMTIDLQSGQINHYTNESAMRRIDSSTASQFIKMTKSGFISEIGNMQAAMTVIGSNSDGSENHENKTFGGIRIWNGKSSYQSTSFVELVGNRVAIYGNKNRSPWLFDSTTSGYAYLIPQNDRGIKHVIGRADRKIDQIHVGDIYVQGERVAMMLKDLALKIGYIGTGGWANRIG

SEQ ID NO: 9061 - DNA, 1041 bp, Streptococcus pyogenes
atgaacaaaaaagtaatgtcacttggtcttgtttcgactgccctattcacattaggaggctgtaccaataactccgctaaacaaacaactgacaattcattaaaaatcgctatgattactaatcagacgggtattgatgacaagtcatttaaccagtcagcctgggaaggcttacaagcttggggaaaagaaaataaacttgaaaaaggaaaaggctatgattatttccaatcagccaatgaatcagagtttaccacaaaccttgagtcagcagtaaccaatggttataatcttgtttttgggattggatttccattacatgacgctgtagaaaaagtagccgcaaacaatcctgacaaccattttgcaattgtggatgatgtgattaaaggtcaaaaaaatgttgcaagtatcaccttttcagaccatgaagcggcatacctagccggtgttgcagcagctaaaacgacaaaaaccaagcaagttggttttgtaggtggtatggaaggagatgttgtcaagcgctttgaaaaaggttttgaagctggtgtgaaatcagtagatgataccatcaaagtaagagttgcttatgcaggctcttttgcagatgctgccaaaggcaagacgattgcagctgctcaatacgctgaaggcgcagatgttatttatcatgcagcaggaggcacaggggcgggtgtctttagcgaagctaagtctatcaacgaaaaacgtaaagaagaagataaggtttgggttattggtgttgaccgtgaccaaagtgaagatggaaaatacactacaaaagatggcaagtcagctaattttgttttgacctcaagtatcaaggaagtcggaaaagctttagtaaaagtagccgtaaaaacctcagaagaccaattcccaggtggtcaaataaccacttttggtttaaaagaaggtggtgttagccttacaacggatgctctgacacaagacactaaaaaagctattgaggctgctaaaaaagcgattatcgaaggaaccatcacagttcctgaaaac

SEQ ID NO: 9062 - protein, 347 aa, Streptococcus pyogenes
MNKKVMSLGLVSTALFTLGGCTNNSAKQTTDNSLKIAMITNQTGIDDKSFNQSAWEGLQAWGKENKLEKGKGYDYFQSANESEFTTNLESAVTNGYNLVFGIGFPLHDAVEKVAANNPDNHFAIVDDVIKGQKNVASITFSDHEAAYLAGVAAAKTTKTKQVGFVGGMEGDVVKRFEKGFEAGVKSVDDTIKVRVAYAGSFADAAKGKTIAAAQYAEGADVIYHAAGGTGAGVFSEAKSINEKRKEEDKVWVIGVDRDQSEDGKYTTKDGKSANFVLTSSIKEVGKALVKVAVKTSEDQFPGGQITTFGLKEGGVSLTTDALTQDTKKAIEAAKKAIIEGTITVPEN

SEQ ID NO: 9063 - DNA, 777 bp, Streptococcus pyogenes
atgacacatactaaagaagttgcatttatcactggtgctgcaagcggaattggaaaacaaatcggggaaaccttattaaaagaaggtaaaacggttgttttttccgacattaatcaagaaaaactggatcaggttgttgctgactatactaaagaaggctatgacgcttttagtgttgtgtgcgatgtcaccaaagaagaagccatcaatgctgctattgatacggttgttgaaaaatatggtcgtattgatattttggttaacaacgcaggtcttcaacatgttgccatgattgaagattttccaactgaaaaatttgaattcatgattaaaatcatgttgacagcaccatttattgccattaaacgtgcttttcctacaatgaaagctcaaaaacacggtcgtattattaatatggcttctatcaatggtgtcattggttttgctggcaaatccgcctacaattcagctaagcacggcttgatcggtctgaccaaagtaactgccttagaagctgctgattcaggcattacggtcaatgccatttgtcctggatatgttgacacaccactggttcgtggccagtttgaagacctttccaaaacaagaggtattccccttgaaaatgttcttgaagaagtgctatacccacttgttcctcaaaaacgcctcattgacgttcaagaaattgcagactatgtgtctttccttgccagtgataaggcaaaaggtgttacaggtcaagcctgtatcttagacggtggctacactgctcaa

SEQ ID NO: 9064 - protein, 259 aa, Streptococcus pyogenes
MTHTKEVAFITGAASGIGKQIGETLLKEGKTVVFSDINQEKLDQVVADYTKEGYDAFSVVCDVTKEEAINAAIDTVVEKYGRIDILVNNAGLQHVAMIEDFPTEKFEFMIKIMLTAPFIAIKRAFPTMKAQKHGRIINMASINGVIGFAGKSAYNSAKHGLIGLTKVTALEAADSGITVNAICPGYVDTPLVRGQFEDLSKTRGIPLENVLEEVLYPLVPQKRLIDVQEIADYVSFLASDKAKGVTGQACILDGGYTAQ

SEQ ID NO: 9065 - DNA, 1359 bp, Streptococcus pyogenes
ttggttataaatgggatgtttaaaaaatattcaataaaaaatcgtgtttggcgcgccgtcgttgaaattgtctttggagtttgtatcactgttttaatgattgcgataatatcgctttctttttcaaagttaaatatagtgacatctcataatgtgggagaagaattttatattaaagataaacagtcaatcaaacagttgaacaattatatgaagacattgggattagattatgttgtttttgatagaaaaacagataaagctatggaaggaaaatatttatctaaagaattttctttatttaacgaagttgcagaagaaaaaaataatctgacttttaattctgtacattatgatttatatactaatatcaattataatattgttataagatataatgagataccggagttctctaaccattaccttagaaatgtttcatataacatgttgacattttatattctgggaataggaacgagtatcagcattgtagttgctttaacacggtttgtaaaagaaatttctttgaatttcaaggaaatcaagaagttagcaaataaaatggggatagaagtcctttctgaaaatgaaaattattctcaaataatcgagtttgatgatatacttagaactttacatattaaaggtgataatttgaaaagtttgattgagcgagaaatattggaaaagcaagatctatcctttcaaattgcagcactttcgcatgatattaaaacacctttaacggttttaaaaggaaatcttgagttattagaattgactactttaaataaaaatcaggaaggttatattgtatctatgaacaatagtatttctgtttttgaaggctatttcaattctttaatatcttatacacgcatgctttcagaggatagatcagtgaaactaattttagttgaggagctattaagtgagttacattttgaagtcgatgacttattgaatatcaataatattgaattttctatttgtaatagacttattatcacttctttttatggagatgaggaaaatctgataagagctctttctaaccttttagttaatgcaataagatttatgcccgtattagataaaaaaatcgaagttatactgtctgagtcaggagagcaaattcattttgaaatatggaataatggtgagcgtttcagtgatagtacactgaaaaagggagataaattattttacacggaagattatagcagaggtaacaaacattatggaatcggtttggcatttgttaaaggcgttgctatcaaacacggtgggaatcttcaattgaataatccagctagaggaggtgctagcgccataatctcgataaaaaagaaaatt

SEQ ID NO: 9066 - protein, 453 aa, Streptococcus pyogenes
LVINGMFKKYSIKNRVWRAVVEIVFGVCITVLMIAIISLSFSKLNIVTSHNVGEEFYIKDKQSIKQLNNYMKTLGLDYVVFDRKTDKAMEGKYLSKEFSLFNEVAEEKNNLTFNSVHYDLYTNINYNIVIRYNEIPEFSNHYLRNVSYNMLTFYILGIGTSISIVVALTRFVKEISLNFKEIKKLANKMGIEVLSENENYSQIIEFDDILRTLHIKGDNLKSLIEREILEKQDLSFQIAALSHDIKTPLTVLKGNLELLELTTLNKNQEGYIVSMNNSISVFEGYFNSLISYTRMLSEDRSVKLILVEELLSELHFEVDDLLNINNIEFSICNRLIITSFYGDEENLIRALSNLLVNAIRFMPVLDKKIEVILSESGEQIHFEIWNNGERFSDSTLKKGDKLFYTEDYSRGNKHYGIGLAFVKGVAIKHGGNLQLNNPARGGASAIISIKKKI

SEQ ID NO: 9067 - DNA, 1140 bp, Streptococcus agalactiae
gtgactacgatgattgattttattatttctattgatgattgcgcagttgaattggatagtcgtcaatcttggaaaattcgctaccccttatcaaccattctatttcttggctttcgttggcaagtagctggcattgaaacctggaaggagatggaagattttattgaaatgaatgaaccattgtttgcgacctacgttgatttgagtgaaggttgtccgtctcatgataccttagagcgtgtgattagtcttgttaattcagaccgtttaaaagagcttaaagttcaatttgagcaatcattgacaagcttagatgccgttcatcaactgatttcagtggacggtaaaacgattcgaggcaatcgaggtaaaaatcagaagcctgttcatattgtaacggcttatgatgggggtcatcatcttagtttgggacaggtagcggttgaggagaaaagtaatgaaattgttgccatccctcagctattgcggacaattgatatccgtaaaagcattgtaacgatagacgcaatgggcacgcagacggctatcgttgatacgattataaaaggtaaagcagactattgcttagccgtcaaaggaaatcaagaaacactttatgatgatattgctctttattttagtgatgtcaacttattggaagaactccaagaaaatgcacagtattatcagactgttgaaaaatctaggggacagattgaagttagagaatactgggtgtcttccgatatcaaatggttgtgtcaaaattatcccaaatggcataagttacgtggtattgggatgactcgtaacacgattgataaggatggtcagctgagtcaagagaatcgttattttatctttagctttaagccggatgtcctcacatttgccaattgtgtacgaggtcattggcagatagagagtatgcactggttattggacgttgtttatcatgaagatcatcatcagacattggataaaagagccgcatttaacctaaatcttatccgaaaaatgtgcttatattttctcaaagtgatggtatttcctaaaaaagacctcagttatcgtcgcaaacaacggtatatttctgtccatttggaagattatttagtccaattatttggagaaagaggc

SEQ ID NO: 9068 - protein, 380 aa, Streptococcus agalactiae
VTTMIDFIISIDDCAVELDSRQSWKIRYPLSTILFLGFRWQVAGIETWKEMEDFIEMNEPLFATYVDLSEGCPSHDTLERVISLVNSDRLKELKVQFEQSLTSLDAVHQLISVDGKTIRGNRGKNQKPVHIVTAYDGGHHLSLGQVAVEEKSNEIVAIPQLLRTIDIRKSIVTIDAMGTQTAIVDTIIKGKADYCLAVKGNQETLYDDIALYFSDVNLLEELQENAQYYQTVEKSRGQIEVREYWVSSDIKWLCQNYPKWHKLRGIGMTRNTIDKDGQLSQENRYFIFSFKPDVLTFANCVRGHWQIESMHWLLDVVYHEDHHQTLDKRAAFNLNLIRKMCLYFLKVMVFPKKDLSYRRKQRYISVHLEDYLVQLFGERG

SEQ ID NO: 9069 - DNA, 1512 bp, Streptococcus pyogenes
ttgaggacaactatgaaaaaatatattttaaaccgtatcatgcgatcgttagtgtcggtagttctggtaacggctttaacatacaccatcgtatatactctagtacctaccagccttatctttaaacaagaccctaattataataaaatgacaacaacaccagataaaaaagtagcgtatgaaaatctaacttttcaacgtatgggttatgtcaattatttttcaagcaaagaattaaaagataatgcttctaaagtagatagtagtgtaacgacagaagcaactagtgctaacaaagctatctatgagaagtatattgattctcttggcaatggctggcagctaaaacgcttccccactagcaaacagttttatgcaattcgcaatattcctatttacgaacgtgtttggaactttttctcaaatctagttgttattgatcacccttggaagattcaggataaagataatccaaaattagctaggtatattcgtctagaaaaagataaatcagttggctggtcacttgttggttcggggacaaaacataagtatctcctctatactaacggaaaatttccttatcttcaccaaaactttgttaccttaaacttagggacatcttatccaacatacagcaatattcctgttcttcaggtcatttcacaagggcaaggacgaacagctcttcaagatgtgaccttcccatcaggtgtcactaagaaatcgtcagtggatatctatagccgtagctacaaaaatccaaaatcattggatgatatcaccaaggtaaactatggtaagggagattcctacactaaaaccatcaataattatgtcgacccatcaatgattcacaattcttttgtaattggtttttttggtgttatgttttcctatatcgttggtttgcctcttggtttatttatggctcggtttaaaaatacctattttgacagtttctcaacagcgaccatgaccttcatgcttgctttaccaagtattgctgttatctatgttgttcgcttcctaggtggcatggttggtttaccagatagtttcccaatgctgggggcatctgatcctaaatcttatattttaccagcccttattttaggaattttaaatattccaactacggttatctggttccgtcgctatcttgttgaccttcaggccagcgattgggtacgttttgcgcgttcaaaaggattatcagaatctgaaatttacagagggcatctcttcaaaaatgccatggtcccaattgtgtcaggggttcctgcaagtattatccttgctattggtggtgcaacattaacagagactgtctttgccttcccgggtatgggtaaaatgttaattgattctattaaatctgctaacaattctatgattgttggattaacctttatcttcactgtcttgtcaattgtttcacttttactaggagatattgtcatgacccttgtcgatccacgtattaaattgtcaacaaaaaaaggaggtaag

SEQ ID NO: 9070 - protein, 504 aa, Streptococcus pyogenes
LRTTMKKYILNRIMRSLVSVVLVTALTYTIVYTLVPTSLIFKQDPNYNKMTTTPDKKVAYENLTFQRMGYVNYFSSKELKDNASKVDSSVTTEATSANKAIYEKYIDSLGNGWQLKRFPTSKQFYAIRNIPIYERVWNFFSNLVVIDHPWKIQDKDNPKLARYIRLEKDKSVGWSLVGSGTKHKYLLYTNGKFPYLHQNFVTLNLGTSYPTYSNIPVLQVISQGQGRTALQDVTFPSGVTKKSSVDIYSRSYKNPKSLDDITKVNYGKGDSYTKTINNYVDPSMIHNSFVIGFFGVMFSYIVGLPLGLFMARFKNTYFDSFSTATMTFMLALPSIAVIYVVRFLGGMVGLPDSFPMLGASDPKSYILPALILGILNIPTTVIWFRRYLVDLQASDWVRFARSKGLSESEIYRGHLFKNAMVPIVSGVPASIILAIGGATLTETVFAFPGMGKMLIDSIKSANNSMIVGLTFIFTVLSIVSLLLGDIVMTLVDPRIKLSTKKGGK

SEQ ID NO: 9071 - DNA, 810 bp, Streptococcus pyogenes
atgaattttaaaaaaataagatttggttttttgctttgcctcctactttatcctttagcagcttgtaacaagtctgaacaacttaatcactacgaaagaattaaaaaaacaagaaaattagtcgttgctgtaagccctgattatgctccttttgaatttaaagctttagttaatggaaaagatactattgttggagcagatgttcaattagctcaggctattgctgatgaattagacgttgatcttgagctttcaccaatgagttttgataatgttttgtctagtttacagactggtaaagctgatcttgctatttcaggaatctcacatactaaagaaagagctaaagtatatgatttttcaattccttactatcaggcagaaaacgctatagtgatgagagcatctgatgctaaagtgaccaaaaatattagtgacctaaacggtaagaaagtagccgctcaaaaaggtagtatcgaggaaggtttagttaaaatacaattaccaaaggccaatctgatttctttgactgctatgggagaagccattaatgaactaaaagcaggacaagtctatgcagttaccttagaagcacctgtagctgctggttttttagcccaacataaggatctggctttagcaccctttagcttaaaaaccagtgatggagatgccaaagcagtggcccttcctaaaaatagtggagacttaaccaaagccgttaataaggttattgctaagttagatgagcaagaacggtacaagtcatttattgcagagacaatagcactaacgaaaaatactatgaag

SEQ ID NO: 9072 - protein, 270 aa, Streptococcus pyogenes
MNFKKIRFGFLLCLLLYPLAACNKSEQLNHYERIKKTRKLVVAVSPDYAPFEFKALVNGKDTIVGADVQLAQAIADELDVDLELSPMSFDNVLSSLQTGKADLAISGISHTKERAKVYDFSIPYYQAENAIVMRASDAKVTKNISDLNGKKVAAQKGSIEEGLVKIQLPKANLISLTAMGEAINELKAGQVYAVTLEAPVAAGFLAQHKDLALAPFSLKTSDGDAKAVALPKNSGDLTKAVNKVIAKLDEQERYKSFIAETIALTKNTMK

SEQ ID NO: 9073 - DNA, 597 bp, Streptococcus pyogenes
ttgaaggtgaaaaaaaggagaagaagggctaaatcatcagtaaatcgacttgtcttagggttagtattacttaatctgattgttagtatgtggacactaaaattgggaaaccagcgattagctccgtatgcggatcacgaaactctgacatttgtcaggaagattagtcatgctgctcaatcagtcgctcaaaagaaacagttatatagttcggtgatgatggctcaggccattttagaatccaataatggtaagtcacaactaagtcaaaaaccttattataattttttcgggattaaggggagctataaagaacggtcagtcatttttccaactttagaagacgatggacaagggaatctttatcaaattgatgctgcttttcgttcctatgggagcctgacagcttgttttttagattacgcaagagttttgaatgatccactttatgacaaaacccacaaaaagttttggtctcattatcaagatgctactgcaaccttaacaggcacttacgccactgatacaacttaccataccaaattaaatgaattgattgaatggtatcaactcactaattttgatggtctaatgaaa

SEQ ID NO: 9074 - protein, 199 aa, Streptococcus pyogenes
LKVKKRRRRAKSSVNRLVLGLVLLNLIVSMWTLKLGNQRLAPYADHETLTFVRKISHAAQSVAQKKQLYSSVMMAQAILESNNGKSQLSQKPYYNFFGIKGSYKERSVIFPTLEDDGQGNLYQIDAAFRSYGSLTACFLDYARVLNDPLYDKTHKKFWSHYQDATATLTGTYATDTTYHTKLNELIEWYQLTNFDGLMK

SEQ ID NO: 9075 - DNA, 1200 bp, Streptococcus pyogenes
atgacctttttagataaaattaaacaaggctgtttagatggctgggctaagtacaaaatcttgccatccttgaccgcagcacaagctatcttagagagcgggtggggcaaacatgccccacacaacgctctgtttggtattaaggcagatagctcttggactggtaaatcatttgataccaaaacccaagaggaatatcaagcaggtgttgtcacggatattgtggaccgatttagggcgtatgatagttgggatgagtcgatagctgatcacggacaatttttagttgataatccacgctatgaggcagttattggggagactgactataaaaaggcttgttacgctattaaagcagctggatacgctacggcaagtagctatgtcgaacttttaatccaactgattgaggaaaacgacttacaaagttgggatagagaagctcttaaaaataataaggaggaaacgatgacaaccgcaaacgaaattgtacaatactgtgttaaccttgctaattcaggcatgggtgttgacaaagacggtgctcacgggacgcaatgctgtgacttgccttgttttgtcgctaaaaattggtttggtgttgatctttggggcaatgcgattgatttattagacagcgcaagtgcgcaaggctgggaagtccatcgtatgccaacagaggcaaacccaaaagcaggcgctacatttgtccaatcagtgccgtatcatcaatttggacatacgggaattgttatcgaggatagtgacggttacaccatgcgcactgtcgagcaaaacattgatggcaatcctgatgctttgtatgtcggtgcaccagctcgttttaacactcgtgactttactggcgtgataggttggttttacccaccatatcaaggggatacagtcacgcaaccagtcagcaccgagccgcaaacttctgacactatcgtagagacagcaaaaacaggcacctttacccttgatgttgcagagatcaatatcagacgctggccaagtctagccagcgaggttgtaggtatctacaagcaaggtgatactgtcagctttgatagcgagggctacgctaatggctattattggattagctatgttggaggctcaggtatgcgtaactacctaggtattggacagactgataaagatgggaatcgcatcagcctttggggtaaattaaat

SEQ ID NO: 9076 - protein, 400 aa, Streptococcus pyogenes
MTFLDKIKQGCLDGWAKYKILPSLTAAQAILESGWGKHAPHNALFGIKADSSWTGKSFDTKTQEEYQAGVVTDIVDRFRAYDSWDESIADHGQFLVDNPRYEAVIGETDYKKACYAIKAAGYATASSYVELLIQLIEENDLQSWDREALKNNKEETMTTANEIVQYCVNLANSGMGVDKDGAHGTQCCDLPCFVAKNWFGVDLWGNAIDLLDSASAQGWEVHRMPTEANPKAGATFVQSVPYHQFGHTGIVIEDSDGYTMRTVEQNIDGNPDALYVGAPARFNTRDFTGVIGWFYPPYQGDTVTQPVSTEPQTSDTIVETAKTGTFTLDVAEINIRRWPSLASEVVGIYKQGDTVSFDSEGYANGYYWISYVGGSGMRNYLGIGQTDKDGNRISLWGKLN

SEQ ID NO: 9077 - DNA, 444 bp, Streptococcus pyogenes
ttgataatggaagaaatcacgatttatcataatccaaactgtggcacttcacgtaatgttcttgccatgattcgccatgcaggtattgagcctactattattgagtatttgcagacgccacctaatcgggagactttaattgagctcttacaatcgatgggaatctctgcaagagaactcttgcgaaccaatgttcctgaatttgaggcttatggattagcaaatcaagcagtagctgagaaagacattattaatgccatgttggcggatccaattttgatcaatcgtcctattgttgtgactcgcaaaggagtaaaactttgccgtccttctgagaccttactggatattcttcctgttcccctgcctagtccttatattaaagaggatggcgagagtgtgaaccctattgaggtaaaaggagaaaaagatgtcattgatgac

SEQ ID NO: 9078 - protein, 148 aa, Streptococcus pyogenes
LIMEEITIYHNPNCGTSRNVLAMIRHAGIEPTIIEYLQTPPNRETLIELLQSMGISARELLRTNVPEFEAYGLANQAVAEKDIINAMLADPILINRPIVVTRKGVKLCRPSETLLDILPVPLPSPYIKEDGESVNPIEVKGEKDVIDD

SEQ ID NO: 9079 - DNA, 1458 bp, Streptococcus pyogenes
atgaaatttacaatcattactaactatgatacacttagtagaaaatcatttactatagaaggtgataacatgactatttttcgtaaaaaaaagaaatattccaataaaacagaaatgcaaaggcacttcaaagttattgatttagtttttttaggcctaggttcaatggttggaacaggtatctttacagttactggcataggcgctgctaagtatgcaggtcctgctttaacaatatcgattatcatttccgcgattgctattggaattttagccttattttatgcagaatttgcgtctcgtatgccttctaacggtggtgcttatagttatgtttatgcaaccttgggagagtttccagcatggcttgttggctggtatattattatggaatttttaacagctatatctagtgttgctgttggctggggaagttatttaaaaggattacttgccaattataatatagtattaccaaacgctttaaatggcacgttcaatcttaagaatggaacttacatagatattcttcctgttttagtgatgtttttcgtgacagggattgtcctaatgaattcgaaattagccctgagattcaatagttttttagttattttaaaattttcagcactggctttatttatctttgtaggcattttttttattgatcacaataattggtctcattttgctccatatggtgtaggacaaattactggaggtaaaacaggtatctttgctggtgcttctgttatgttctttgcatttttaggatttgaatctatttcaatggcagttgatgaagtgaaagaaccacaaaaaacaatccctaaaggcatcattttatctttgattattgtaacagcactctatatagttgtcaccactattttaacgggaattgtacactacactaaattaaatgttccagacgcggtggcttttgctttaagaaatattagactttattgggcagctgactatgtgtcgatagttgctattttgactcttattacggtatgtatttctatgacctatgcattagctagaacaatttacagtattagtagagatggtttattacctaaatcactttatactctcactaaaaaaaataaagtgcctcaaaatgctactcttgtcactggactacttgctatgatttgtgcgggaatatttcctttatcgagtctagcagagtttgttaatatttgtactttagcatatttaattattctgtcgggtgcaattattaaactcagaagaatagaaggagaaccaaaagcaaatgaatttaaaactcctctagtaccattcctaccaatgttggcaattatcatttgtctatcatttatgagccaatataaagcttttacttggattgcttttgctattgccacaattattggaacattaatctacttagcttatggttatactcattcaatagaaaataaa

SEQ ID NO: 9080 - protein, 486 aa, Streptococcus pyogenes
MKFTIITNYDTLSRKSFTIEGDNMTIFRKKKKYSNKTEMQRHFKVIDLVFLGLGSMVGTGIFTVTGIGAAKYAGPALTISIIISAIAIGILALFYAEFASRMPSNGGAYSYVYATLGEFPAWLVGWYIIMEFLTAISSVAVGWGSYLKGLLANYNIVLPNALNGTFNLKNGTYIDILPVLVMFFVTGIVLMNSKLALRFNSFLVILKFSALALFIFVGIFFIDHNNWSHFAPYGVGQITGGKTGIFAGASVMFFAFLGFESISMAVDEVKEPQKTIPKGIILSLIIVTALYIVVTTILTGIVHYTKLNVPDAVAFALRNIRLYWAADYVSIVAILTLITVCISMTYALARTIYSISRDGLLPKSLYTLTKKNKVPQNATLVTGLLAMICAGIFPLSSLAEFVNICTLAYLIILSGAIIKLRRIEGEPKANEFKTPLVPFLPMLAIIICLSFMSQYKAFTWIAFAIATIIGTLIYLAYGYTHSIENK

SEQ ID NO: 9081 - DNA, 1125 bp, Streptococcus pyogenes
atggttttatttcatttaatcaaaaaagaaagtttacagatttttagaaaccgaacagccttattgatgatggtgatttttccaattttgatgatcgttattttaagttttgcctttaaatcaagttttaatactgcgacaacagtccctaaattgaccattcgttaccaattagagggtgaaaaaacggattaccagaaaaattttcttgcttttttaaaagttttaaaccaaaaacttcatttagagactaaacctagtaattctcttgaaaaagatcgacaaagggtcagtgaaggagccttaacggctgttttagaagtgaagaagaatcagaccattaaggttattactaataatattaatcagcaaaatgcagatttgatcaatatgctagtaaaaaattatgttgataatgctaaaacttatgactcgatagcagctctttatcctcaacaattaaatcatatcagaaagcgaagtgtggactatgttaaggtcagttcaatacagacaagtaaaggaatgacatcagctgattattatgctatttccatgtttaccatgattactttttatagtatgatgtctgcgatgaaccttgttttgtcagatcgtcaacaacggattacaaatcgtattcacttaacaggagtttctccaagttttttggtctttgggaaattaataggtgctatgttagcaacaactgttcaattgagtcttttatacatttttacaaggtttgttttacgagttaattggggcactaatgagtggatgcttattggtataacagcctccttagtctatctctctgtagctataggtatcgggctaggtataagcattaaaaatgaggcttttttaacggttgcatccaatactattattcctatattcgcctttttaggaggcagttacgttccattgacaacattacacagctctattattaatcaattgtcgaatatatctcctattaaatgggttaatgatagtttgttctatcttatttttggtggtcaatataatccgattcctgtaactttgatcgttaatattagtatcggaacaatttttataatattggcattgataggtatgagaaagcaggtgacgaca

SEQ ID NO: 9082 - protein, 375 aa, Streptococcus pyogenes
MVLFHLIKKESLQIFRNRTALLMMVIFPILMIVILSFAFKSSFNTATTVPKLTIRYQLEGEKTDYQKNFLAFLKVLNQKLHLETKPSNSLEKDRQRVSEGALTAVLEVKKNQTIKVITNNINQQNADLINMLVKNYVDNAKTYDSIAALYPQQLNHIRKRSVDYVKVSSIQTSKGMTSADYYAISMFTMITFYSMMSAMNLVLSDRQQRITNRIHLTGVSPSFLVFGKLIGAMLATTVQLSLLYIFTRFVLRVNWGTNEWMLIGITASLVYLSVAIGIGLGISIKNEAFLTVASNTIIPIFAFLGGSYVPLTTLHSSIINQLSNISPIKWVNDSLFYLIFGGQYNPIPVTLIVNISIGTIFIILALIGMRKQVTT

SEQ ID NO: 9083 - DNA, 339 bp, Streptococcus pyogenes
atgacacagttattaaaacgatatcctattactattttccttttagggttaacaggcttaatttttatagcaatgcaagtggtatatggacatttagcaactggtgctcaagctatttatcaagttggaggtatgtttggattactagtaaaagcaatgccagaccagttgtggcgattggtgactccgatatttattcatatcggctttggtcatttttttgtcaatggattaacactatattttgttggtcaaatcgtcgaagacctctggggctcacgccttttttattactttatgttttatcaggtgttatgggcaatgcctttactttttggt

SEQ ID NO: 9084 - protein, 113 aa, Streptococcus pyogenes
MTQLLKRYPITIFLLGLTGLIFIAMQVVYGHLATGAQAIYQVGGMFGLLVKAMPDQLWRLVTPIFIHIGFGHFFVNGLTLYFVGQIVEDLWGSRLFYYFMFYQVLWAMPLLFG

SEQ ID NO: 9085 - DNA, 1203 bp, Streptococcus pyogenes
atgattaatagagaaattgcagtaaaagtacagcatgttagtaaaacgtttaaactgcctacagaagcaactaaaagttttcgcacgactctggttaatcgcctaagagggattaaaggatttactgaacaacatgtgctaaaagatattaactttgatgtttataaaggcgatttttttggaattgttgggcgtaacggctcaggaaaatcaacgctccttaaaattatttcccagatctatgttccagaaaaagggcaggttacagtagatgggaagatggtttcttttatagagcttggagtgggattcaatccagaattaacaggacgagaaaacgtctatatgaacggcgccatgctgggatttaccaaagacgaagttgatgatatgtacaatgatattgttgattttgcagagttgcatcattttatgaatcaaaaattaaaaaattattcttctggcatgcaggtacgtttagcattttcagtggctattaaagcccaaggtgacgttcttattttagatgaggtgcttgctgtaggagatgaagcttttcagcgaaaatgtaatgattattttatggaaagaaaagacagtggtaagacgactattttagtgacacatgatatgggagctgttaagaagtattgtaaccgtgcagttcttattgaagatggtcttgttaaagcatatggagaaccatttgatgttgctaatcagtatagtgtagataatacagagacagctgaggatgcaatgaatgctgaaaaaatatctgtatctgatattgccaaagatttgaaagtgtcattaatctcaaatccaagaataacaccaaatgacacaatcacatttgaagtttcttatgaagttttaaaagatgattttacctacattgccttttctttaacggatattgatagaaacatttgggtttacaacgacaattctttagattatccaacacaaggtataggtagaaaatgcatttcctaccaatgtcaactatctcaacttaatgatataaaactaaaattagaagtaactgtccgagataagaacggtcagatgctactcttttcaacagcagaacaatcaccccagatagtgattcaaagaaacgatattgatcaagatgatctgtcagctctagattcagcaagtggcttgtatcaacgtaatgggaagtgggtttttcat

SEQ ID NO: 9086 - protein, 401 aa, Streptococcus pyogenes
MINREIAVKVQHVSKTFKLPTEATKSFRTTLVNRLRGIKGFTEQHVLKDINFDVYKGDFFGIVGRNGSGKSTLLKIISQIYVPEKGQVTVDGKMVSFIELGVGFNPELTGRENVYMNGAMLGFTKDEVDDMYNDIVDFAELHHFMNQKLKNYSSGMQVRLAFSVAIKAQGDVLILDEVLAVGDEAFQRKCNDYFMERKDSGKTTILVTHDMGAVKKYCNRAVLIEDGLVKAYGEPFDVANQYSVDNTETAEDAMNAEKISVSDIAKDLKVSLISNPRITPNDTITFEVSYEVLKDDFTYIAFSLTDIDRNIWVYNDNSLDYPTQGIGRKCISYQCQLSQLNDIKLKLEVTVRDKNGQMLLFSTAEQSPQIVIQRNDIDQDDLSALDSASGLYQRNGKWVFH

SEQ ID NO: 9087 - DNA, 456 bp, Streptococcus pyogenes
atgcgcagtattatcagactgttgaaaaatctagaagttagagaatactgggtgtcttccgatatcaaatggttgtgtcaaaaccatcccaaatggcataagttacgtggtattgggatgactcgtaacacgattgataaggatggtcagctgagtcaagagaatcgttattttatctttagctttaagccggatgtcctcacatttgccaattgtgtacgaggtcattggcagatagagagtatgcactggttattggacgttgtttatcatgaagatcatcatcagacattggataaaagagccgcatttaacctaaatcttatccgaaaaatgtgcttatattttctcaaagtgatggtatttcctaaaaaagacctcagttatcgtcgcaaacaacggtatatttctgtccatttggaagattatttagtccaattatttggagaaagaggt

SEQ ID NO: 9088 - protein, 152 aa, Streptococcus pyogenes
MRSIIRLLKNLEVREYWVSSDIKWLCQNHPKWHKLRGIGMTRNTIDKDGQLSQENRYFIFSFKPDVLTFANCVRGHWQIESMHWLLDVVYHEDHHQTLDKRAAFNLNLIRKMCLYFLKVMVFPKKDLSYRRKQRYISVHLEDYLVQLFGERG

SEQ ID NO: 9089 - DNA, 711 bp, Streptococcus pyogenes
gtgactacgatgattgattttattatttctattgatgattgcgcagttgaattggatagtcgtcaatcttggaaaattcgctaccccttatcaaccattctatttcttgtcttcgtttgtcagttagctggcattgaaacctggaaggagatggaagattttattgaaatgaatgaaccattgtttgcgacctacgttgatttgagtgaaggttgtccgtctcatgataccttagagcgtgtgattagtcttgttaattcagaccgtttaaaagagcttaaagttcaatttgagcaatcattgacaagcttagatgccgttcatcaactgatttcagtggacggtaaaacgattcgaggcaatcgaggtaaaaatcagaagcctgttcatattgtaacggcttatgatgggggtcatcatcttagtttgggacaggtagcggttgaggagaaaagtaatgaaattgttgccatccctcagctattgcggacaattgatatccgtaaaagcattgtaacgatagacgcaatgggcacgcagacggctatcgttgatacgattataaaaggtaaagcagactattgcttagccgtcaaaggaaatcaagaaacactttatgatgatattgctctttattttagtgatgtcaacttattggaagaactccaagaaaatgcgcagtattatcagactgttgaaaaatctagaagt

SEQ ID NO: 9090 - protein, 237 aa, Streptococcus pyogenes
VTTMIDFIISIDDCAVELDSRQSWKIRYPLSTILFLVFVCQLAGIETWKEMEDFIEMNEPLFATYVDLSEGCPSHDTLERVISLVNSDRLKELKVQFEQSLTSLDAVHQLISVDGKTIRGNRGKNQKPVHIVTAYDGGHHLSLGQVAVEEKSNEIVAIPQLLRTIDIRKSIVTIDAMGTQTAIVDTIIKGKADYCLAVKGNQETLYDDIALYFSDVNLLEELQENAQYYQTVEKSRS

SEQ ID NO: 9091 - DNA, 1341 bp, Streptococcus agalactiae
atgagaaacaaaaaagtaacattagctcatattgtcgcaaagacaagtgttgctattgctttggctggagcaatgggtagcagtttattagctaatagcacaacgtacgctgttagtggcaaagaaaataaaaaaagcgatgtcaaatatgaaacgaccaaagttatggaagctaacgcaacttcctctaaagaagacaatcatgtcatgcacacattagacggctcaatgagtactgtctgggaggaaaattcacctggtggtggtgttggtgaagtactttcctacaagtttgcgtccccgatgcatattgggagaattttaattgttaatggagatacatctagcaaggagaattactacaagaaaaatagaattgcaaaggctgatgttaaatactataacaggaataaattggtcctctttcaaaaaattgaattaggcgacacctacactaaaaaaccgcatcacattgagattgataaaaaattagatgttgatcgtattgatattgaggtaacagaggtccatcagggacaaaacaaggatattttagccttgtcagaggtcacttttggcaatatagaacgcgatatttttgaaaaaaagtttaaagaaattaaagataaatgggtaacagataaacaagcagatgagtttattgaaactgccgacaagtatgctgataaagctgttcagatgtctgctgttgcgtcacgtgctgagtattatcggatgtacgttagccgcaaataccactacaaaaaagagtttgttgaaaaactaaaacaagtctacaaagaaagcggagcttcccacgttacaagcaaaaaagatgtgatgttagcttttgacgatgctaaaaaaaagtcaacgattggtcgacaagaaaacggtctttttgtgacaagttttgctgaggatatggctttgctctttactgatcaaggtaagttaaaatcagctgaccaaattgaaaatataaaagatgtcgatagcggaaaatatagcgatggggtttatcaatatgagtacgattctgaactaacaaaaaacattgataagctaggctatatccgaacagctagcggagatactcctggagcaaattcgctcaacgttcctggttgccaaacgtggtcaggaaaacacattgaaaattcagaaagtgaattaattttcccatcgattagtgttaaagatctaaaatctaaagctgtcttagcagagattgatgccaaaggctattttgaaattattgatcctaccatcattgctccaaatggtgaccataaaaaagtaactggtcgcttcaaaattaagaaaatgcaagataggaag

SEQ ID NO: 9092 - protein, 447 aa, Streptococcus agalactiae
MRNKKVTLAHIVAKTSVAIALAGAMGSSLLANSTTYAVSGKENKKSDVKYETTKVMEANATSSKEDNHVMHTLDGSMSTVWEENSPGGGVGEVLSYKFASPMHIGRILIVNGDTSSKENYYKKNRIAKADVKYYNRNKLVLFQKIELGDTYTKKPHHIEIDKKLDVDRIDIEVTEVHQGQNKDILALSEVTFGNIERDIFEKKFKEIKDKWVTDKQADEFIETADKYADKAVQMSAVASRAEYYRMYVSRKYHYKKEFVEKLKQVYKESGASHVTSKKDVMLAFDDAKKKSTIGRQENGLFVTSFAEDMALLFTDQGKLKSADQIENIKDVDSGKYSDGVYQYEYDSELTKNIDKLGYIRTASGDTPGANSLNVPGCQTWSGKHIENSESELIFPSISVKDLKSKAVLAEIDAKGYFEIIDPTIIAPNGDHKKVTGRFKIKKMQDRK

SEQ ID NO: 9093 - DNA, 828 bp, Streptococcus agalactiae
atgcctaaaaaccaccgcctaattaccaaaatcgaagcatcattggaacatatgaccagtttagaaaaagggattgctcatttttttattacaaccgatctgacacctcaagagttgaccgcatccgagatagttaagcgactacacatctctcaagccgccttgactcgatttgcaaaaaaatgtggttttactggttatcgtgcttttgcctttgattaccttcacagtcttcaagaatcacaagagactttccaatctattcacttagaattgacaaagcgcgtgctgatggactacgacgctcttattaataaaacctatgagctcgttaatgaggaaaaattactgaacttagccaagctgatcgattcttctgagcgagtctatttctttggcaaaggatcttctggactagtagcaagagaaatgaagctacgctttatgcgacttggtttaatctgtgatgcttattcagacactgatggttttacttgggcaaatagcctcgtcaatgaaaattgccttgtttttggtttttctttatctggcaaaacaaactctgtcatcacagcacttcatcaagctagtcagcgaggagccaaaactgtcctcttaacaacagataatcaaaccgaatttgacgactccttagatattattcccgtatcatcaactcaccaactacattatgggaatcgtgtgtcaccacaatttcctcttcttattatgatggacattatttatgcttacgttttagcgattgacaaaccgcacaaagaaaaaatcttcaaaaacactattattgacaaagaaaataacgacctt

SEQ ID NO: 9094 - protein, 276 aa, Streptococcus agalactiae
MPKNHRLITKIEASLEHMTSLEKGIAHFFITTDLTPQELTASEIVKRLHISQAALTRFAKKCGFTGYRAFAFDYLHSLQESQETFQSIHLELTKRVLMDYDALINKTYELVNEEKLLNLAKLIDSSERVYFFGKGSSGLVAREMKLRFMRLGLICDAYSDTDGFTWANSLVNENCLVFGFSLSGKTNSVITALHQASQRGAKTVLLTTDNQTEFDDSLDIIPVSSTHQLHYGNRVSPQFPLLIMMDIIYAYVLAIDKPHKEKIFKNTIIDKENNDL

SEQ ID NO: 9095 - DNA, 1008 bp, Streptococcus pyogenes
atggtagttaaagttggtattaacggtttcggtcgtatcggacgtcttgcattccgccgtattcaaaacatcgaaggtgttgaagtaactcgtatcaatgaccttacagatccaaatatgcttgcacacttgttgaaatacgatacaactcaaggtcgttttgatggaacagttgaagttaaagaaggtggatttgaagtaaacggaaacttcatcaaagtttctgctgaacgtgatccagaaaacatcgactgggcaactgatggggttgaaatcgttcttgaagcaactggtttctttgctaaaaaagaagcagctgaaaaacacttacatgctaacggtgctaaaaaagttgttatcacagctcctggtggaaacgatgttaaaacagttgttttcaacactaaccacgacattcttgacggtactgaaacagttatctcaggtgcttcatgtactacaaactgtttagctcctatggctaaagctcttcacgatgcattcggtattcaaaaaggtcttatgactacaatccacgcttacactggtgaccaaatgatccttgacggaccacaccgtggtggtgaccttcgtcgtgcacgcgctggtgctgcaaatatcgttcctaactcaactggtgctgctaaagctatcggtcttgttatcccagaacttaacggtaaacttgacggtgctgcacaacgtgttcctgttccaactggatcagtaactgagttggttgtaactcttgacaaaaacgtttctgttgacgaaatcaacgctgctatgaaagctgcttcaaacgatagcttcggttacactgaagatccaatcgtttcttcagatatcgtaggcgtatcatacggttcattgtttgacgcaactcaaactaaagtaatggaagttgacggatcacaattggttaaagttgtatcatggtatgacaacgaaatgtcttacactgctcaacttgtacgtactcttgagtacttcgcaaaaattgctaaa

SEQ ID NO: 9096 - protein, 336 aa, Streptococcus pyogenes
MVVKVGINGFGRIGRLAFRRIQNIEGVEVTRINDLTDPNMLAHLLKYDTTQGRFDGTVEVKEGGFEVNGNFIKVSAERDPENIDWATDGVEIVLEATGFFAKKEAAEKHLHANGAKKVVITAPGGNDVKTVVFNTNHDILDGTETVISGASCTTNCLAPMAKALHDAFGIQKGLMTTIHAYTGDQMILDGPHRGGDLRRARAGAANIVPNSTGAAKAIGLVIPELNGKLDGAAQRVPVPTGSVTELVVTLDKNVSVDEINAAMKAASNDSFGYTEDPIVSSDIVGVSYGSLFDATQTKVMEVDGSQLVKVVSWYDNEMSYTAQLVRTLEYFAKIAK

SEQ ID NO: 9097 - DNA, 861 bp, Streptococcus pyogenes
atgaagaaatcagttacattactgtctatcggacttgccagccttttattggcagcatgtgcgccacatcaatctcaaaaatcaagttgggacactatcaaagaaaaaggggtgttaaaagtagctaccccaggaacctatcagccaacttctttttacaacgataataatgagttagtaggttacgaagtagatatggtcaaagaaatcggtaaacgacttaacattaaagtcaagtttgttgaaacaggatttgaccaagcctttacctcagttgatagtggtcgagtggatatttctttgaacaactttgacattaccccaaaacgtcagaaaaaatacaatatctctacgccttataaatacggggtaggaggcatgattgtccgtgctgatggcagctcaaacatagctaaaaaagatcttagcgactggaaaggaaaaaaagcagccggcgcttctggaacagaatacatgaaagtagcgcaaaaacagggagctgaactggtgacctacgataatgttacaggagatgtttatctaaacgatgtggctaacggtcgaacagatttcatcccaaatgattacccagctcaaaaattatttgtggattacatgttatctcaaaatccaaatctaaatgtcaaaatgagcgatgttcagtacaacccaaccgaacaaggaattgttatgaacaaaaaagacgatagcctcaagaaaaaaatagatgctgttattaaagacatgataaaagatggtagcttgaagaaaatctctgaaacctactatgctggtcaagatctgacaaaaccttttggcaaagacaaaaaaattcccgtcattgatacgaaagacgttaac

SEQ ID NO: 9098 - protein, 287 aa, Streptococcus pyogenes
MKKSVTLLSIGLASLLLAACAPHQSQKSSWDTIKEKGVLKVATPGTYQPTSFYNDNNELVGYEVDMVKEIGKRLNIKVKFVETGFDQAFTSVDSGRVDISLNNFDITPKRQKKYNISTPYKYGVGGMIVRADGSSNIAKKDLSDWKGKKAAGASGTEYMKVAQKQGAELVTYDNVTGDVYLNDVANGRTDFIPNDYPAQKLFVDYMLSQNPNLNVKMSDVQYNPTEQGIVMNKKDDSLKKKIDAVIKDMIKDGSLKKISETYYAGQDLTKPFGKDKKIPVIDTKDVN

SEQ ID NO: 9099 - DNA, 2415 bp, Streptococcus pyogenes
gtgaatacttatttttgcacacaccataaacaattactactttattcaaacctattccttagctttgctatgatgggccaaggaactgccatttatgccgatacactgacttcaaattcagaacctaataatacttactttcaaacgcaaacgctcactactacagatagcgaaaaaaaggtagtacagccacaacaaaaagactactatactgaattgttagaccaatggaacagtattatcgcaggcaacgatgcttatgataaaaccaatcctgacatggtcacttttcataataaagctgaaaaggatgctcaaaacattattaaaagctatcaagggcctgaccacgaaaatagaacttacctttgggaacatgcaaaggattattccgcttctgctaatatcacgaaaacttaccgcaatattgaaaaaatagcaaaacagatcactaatcctgaatcatgctattatcaagatagtaaagctattgctattgtaaaagacggtatggccttcatgtatgaacacgcttataatctagatcgtgaaaatcatcaaacaactggaaaagaaaacaaagaaaattggtgggtttatgaaattggaactcctcgtgctattaataataccttatccttgatgtatccttattttactcaagaagaaattcttaaatacacagctccaatcgaaaaatttgtgcctgaccctactcgttttagggttcgcgctgccaatttttcaccttttgaagccaatagcggaaatttaattgatatggggcgtgttaaactcatttccggtattcttcgtaaagatgatctcgaaattagtgatacaatcaaagcaattgagaaagttttcacgctagttgatgaaggaaatggtttttaccaagacggttctttaattgatcacgtggttactaacgctcaaagtccactttataaaaaaggcattgcttacactggagcttacggtaatgtgcttatagatggcttatcgcaattaattcctattattcaaaaaacaaagtctcctataaaagcggataaaatggctactatctatcattggattaaccattcttttttccctatcatcgttcgtggagaaatgatggatatgactcgagggcgttctatcagtcgttttaatgcccaatctcatgttgctggcattgaagcacttcgtgctattttacgtattgctgacatgtctgaagagcctcaccgtttggcacttaaaacacgtataaaaacactcgtcacacaagggaatgctttttacaatgtctatgataatttgaaaacctatcacgatatcaaacttatgaaagaactactaagtgatacttctgttccagtccaaaaacttgatagttacgtagctagtttcaatagtatggataaattggcactatataataataaacacgattttgcttttggcctatcaatgttttcgaatcgaactcaaaattatgaagctatgaataatgaaaatcttcatggctggtttacttctgatggaatgttttacctatacaataacgatttaggacactacagtgaaaactattgggcaacggtaaatccctaccgcttacctggaaccacagaaactgagcaaaaaccactagagggaactcctgagaatattaaaacgaactatcaacaagttggcatgactggtctctctgatgacgcttttgttgcaagtaaaaaacttaataacacaagtgctctagctgctatgaccttcactaattggaataaaagcctcaccctcaataaagggtggtttatcttaggaaacaaaataatctttgttggtagcaatatcaaaaaccaatcatctcacaaggcgtatacaactattgaacaacgaaaagaaaatcaaaagtacccttactgttcttatgttaacaatcaacccgttgacttgaataatcagctagttgattttacaaacactaaaagtattttccttgaaagtgatgatcccgctcaaaatattggttactacttcttcaagccaacaacacttagcataagtaaggcacttcaaacagggaaatggcaaaacataaaagctgatgacaaatcaccagaagccatcaaagaagtttcaaatacctttatcactatcatgcaaaaccatactcaagatggcgatcgttatgcctatatgatgcttccaaatatgactcgtcaagaatttgaaacctatattagcaagcttgatatcgacttattagaaaacaatgacaaactggccgctgtctacgatcatgatagtcaacagatgcacgtcattcactatggaaaaaaagcaacgatgttttcaaatcataatctttctcatcaaggcttttatagttttcctcatcctgtcaggcaaaatcaacaa

SEQ ID NO: 9100 - protein, 805 aa, Streptococcus pyogenes
VNTYFCTHHKQLLLYSNLFLSFAMMGQGTAIYADTLTSNSEPNNTYFQTQTLTTTDSEKKVVQPQQKDYYTELLDQWNSIIAGNDAYDKTNPDMVTFHNKAEKDAQNIIKSYQGPDHENRTYLWEHAKDYSASANITKTYRNIEKIAKQITNPESCYYQDSKAIAIVKDGMAFMYEHAYNLDRENHQTTGKENKENWWVYEIGTPRAINNTLSLMYPYFTQEEILKYTAPIEKFVPDPTRFRVRAANFSPFEANSGNLIDMGRVKLISGILRKDDLEISDTIKAIEKVFTLVDEGNGFYQDGSLIDHVVTNAQSPLYKKGIAYTGAYGNVLIDGLSQLIPIIQKTKSPIKADKMATIYHWINHSFFPIIVRGEMMDMTRGRSISRFNAQSHVAGIEALRAILRIADMSEEPHRLALKTRIKTLVTQGNAFYNVYDNLKTYHDIKLMKELLSDTSVPVQKLDSYVASFNSMDKLALYNNKHDFAFGLSMFSNRTQNYEAMNNENLHGWFTSDGMFYLYNNDLGHYSENYWATVNPYRLPGTTETEQKPLEGTPENIKTNYQQVGMTGLSDDAFVASKKLNNTSALAAMTFTNWNKSLTLNKGWFILGNKIIFVGSNIKNQSSHKAYTTIEQRKENQKYPYCSYVNNQPVDLNNQLVDFTNTKSIFLESDDPAQNIGYYFFKPTTLSISKALQTGKWQNIKADDKSPEAIKEVSNTFITIMQNHTQDGDRYAYMMLPNMTRQEFETYISKLDIDLLENNDKLAAVYDHDSQQMHVIHYGKKATMFSNHNLSHQGFYSFPHPVRQNQQ

SEQ ID NO: 9101 - DNA, 552 bp, Streptococcus pyogenes
atgctaaaacgccccattcatctctcgcatgattttttagcggaggttgtggataagtctagtgtggttgttgatgccacgatgggtaatggaaatgatactgcctttttggcacaattagctaaaaaggtttatgcttttgatgtgcaagaacaagctattagaaaaacaagtgagcggttagcgcagctaggattatcgaacgctgagctgattttagcgggtcatgaagcggttgatcagtatgtgacagagccggtgcgcgcagcgatttttaaccttggttatttgcccagcgcagataaatctattattaccttaccaaataccacactccaagctttatcaaaactactaacgttattaatggtaggtgggcgtattgctattatggtctattatgggcatgatggaggcagtttggaaaaagatgctttattagattttgtcaagcaattagaccaaagaaaggtttctgcaatgctttatcagcctcttaatcaggtgaataccccaccttttttaatcatgttggagaaattagcagacttt

SEQ ID NO: 9102 - protein, 184 aa, Streptococcus pyogenes
MLKRPIHLSHDFLAEVVDKSSVVVDATMGNGNDTAFLAQLAKKVYAFDVQEQAIRKTSERLAQLGLSNAELILAGHEAVDQYVTEPVRAAIFNLGYLPSADKSIITLPNTTLQALSKLLTLLMVGGRIAIMVYYGHDGGSLEKDALLDFVKQLDQRKVSAMLYQPLNQVNTPPFLIMLEKLADF

SEQ ID NO: 9103 - DNA, 933 bp, Streptococcus pyogenes
atgtcaaaaattttagtttttggtcatcaaaatcctgatacggatgctattgcatcatcttatgcttttgattacttatcccaaaaagcgtttggtttggatactgaagtcgtagctttaggaacacctaacgaagaaacagcttttgcccttgattattttggtgttgaggcaccacgtgtggtagagtctgctaaagcacaagggtctgaacaagtgattttgacagaccacaatgaattccaacaatccattgcagatatccgtgaggttgaggtatatggtgtggttgatcaccaccgtgtggctaattttgaaactgcaaatcctttatacatgcgtgtggaaccagtaggatcagcctcatctattgtttaccgtatgtttaaagaaaatggcatcgaggtgccaaaagcgattgcagggatgctcttgtctggtttgatttcagataccttgttgttgaaatctccaacaactcatgtgtctgatcaccttgtcgctgaagaattggcagagctggcagaagtgaacttggaagactatggaatggctcttttaaaagcaggtacaaaccttgcaagcaaatcagaagtagaattgattggtattgatgccaaaacatttgaattaaatggcaatgctgtgcgcgtggcacaagtgaacactgttgacattgcagaagtcttagaacgtcaagaagctattgaagcagccattaaagatgccatggctgcagaaggttattcagattttgttttgatgatcacggatattgttaactcaaactctgaaattctagctattggagcaaacatggacaaggttgaagcagcctttaacttcacccttgacaacaatcatgccttcttagcaggtgccgtttctcgtaaaaaacaagtggttccacaattgacagaaagttttggagct

SEQ ID NO: 9104 - protein, 311 aa, Streptococcus pyogenes
MSKILVFGHQNPDTDAIASSYAFDYLSQKAFGLDTEVVALGTPNEETAFALDYFGVEAPRVVESAKAQGSEQVILTDHNEFQQSIADIREVEVYGVVDHHRVANFETANPLYMRVEPVGSASSIVYRMFKENGIEVPKAIAGMLLSGLISDTLLLKSPTTHVSDHLVAEELAELAEVNLEDYGMALLKAGTNLASKSEVELIGIDAKTFELNGNAVRVAQVNTVDIAEVLERQEAIEAAIKDAMAAEGYSDFVLMITDIVNSNSEILAIGANMDKVEAAFNFTLDNNHAFLAGAVSRKKQVVPQLTESFGA

SEQ ID NO: 9105 - DNA, 750 bp, Streptococcus pyogenes
atgctaaaaaagcgctatcaactggctattgtccttcttcttagctgttttagtctgatctggcaaactgagggcttggtcgagctttttgtctgtgagcactatgagcgggcggtttgtgaggggacgcctgcttattttaccttttcggatcaaaagggcgctgagacactgattaaaaagcgatggggcaagggtctcatctacccaagggctgagcaagaggcgatggctgcttatacctgtcagcaggcaggccctatcaacaccagcctagacaaagccaaaggtgagctcagccaactcacgcctgagctaagggatcaggtggcccagctcgatgctgcgactcaccggctagtcatcccgtggaacattgtagtataccgctatgtatacgagacgtttttgcgtgatatcggtgtttcacatgctgatctcacgtcttactaccgtaaccatcagtttgaccctcatatcctttgtaagatcaagcttggtacacgctacaccaagcacagttttatgagcacgacagccttgaaaaacggcgccatgacccatcgaccggtggaggtgcgcatctgtgtcaaaaaaggggccaaggcagcctttgtcgagccttattcggctgtgccttcagaggttgagctcttgtttccaagaggctgtcagctggaggtcgttggagcttacgtgtcacaggaccaaaaaaagctccacatagaagcgtatttcaagggcagtttg

SEQ ID NO: 9106 - protein, 250 aa, Streptococcus pyogenes
MLKKRYQLAIVLLLSCFSLIWQTEGLVELFVCEHYERAVCEGTPAYFTFSDQKGAETLIKKRWGKGLIYPRAEQEAMAAYTCQQAGPINTSLDKAKGELSQLTPELRDQVAQLDAATHRLVIPWNIVVYRYVYETFLRDIGVSHADLTSYYRNHQFDPHILCKIKLGTRYTKHSFMSTTALKNGAMTHRPVEVRICVKKGAKAAFVEPYSAVPSEVELLFPRGCQLEVVGAYVSQDQKKLHIEAYFKGSL

SEQ ID NO: 9107 - DNA, 696 bp, Streptococcus pyogenes
atgactaaagttgttttagtgacgggctgtgctagtgggattggttatgcacaggcccgctattttttgaaacaagggcatcacgtatatggtgtggataagtcggataaaccggacttaagcggtaactttcactttatcaaattggatttatcctctgagttagccccactatttaaagtggtccccagtgttgatattttgtgtaatactgcagggattttagatgcctacaagccacttttagacgtcagtgatgaagaagtggaacacctatttgatattaatttttttgcgacggtgaagttaacacgtcattatcttagacgtatggtggaaaagcagtcaggtgttatcatcaatatgtgctcaatagcaagttttatagcgggtggcggtggtgttgcctatacgagttctaagcatgcccttgcgggattcacgcgccagctggctttggattacgccaaagatcagattcacatttttggtatagcaccaggtgctgtcaaaaccgctatgacggctaacgattttgagcctggtggcttagcagactgggtagctcgtgagacgccaattgggcgttggactaaaccagatgaagttgctgaattaacgggatttcttgcttcaggaaaagcgagatcaatgcaaggcgagattgtcaaaattgacggtggctggactttgaaa

SEQ ID NO: 9108 - protein, 232 aa, Streptococcus pyogenes
MTKVVLVTGCASGIGYAQARYFLKQGHHVYGVDKSDKPDLSGNFHFIKLDLSSELAPLFKVVPSVDILCNTAGILDAYKPLLDVSDEEVEHLFDINFFATVKLTRHYLRRMVEKQSGVIINMCSIASFIAGGGGVAYTSSKHALAGFTRQLALDYAKDQIHIFGIAPGAVKTAMTANDFEPGGLADWVARETPIGRWTKPDEVAELTGFLASGKARSMQGEIVKIDGGWTLK

SEQ ID NO: 9109 - DNA, 1770 bp, Streptococcus pyogenes
atgtattatactagtggtaattacgaagcttttgcaacacctcgaaaacccgaaggggtagatcagaaatcagcttatattgttggtactggtttagctggtttagcagcagctgttttccttattcgcgatgggcatatggctggggaacgcattcatctgtttgaggaattgcctttagcaggtggttctttagatggtattgaaaagcctcatcttggttttgtgacccgtggtggtcgtgagatggaaaatcattttgagtgtatgtgggacatgtatcggtctattccctcactggaaattcccggtgcgtcttatttagatgaattttattggttggataaggatgatcctaactcatccaactgtcgtttgattcacaagagaggaaatcgtgtggatgatgacggccagtatacgctcggtaaacagtcaaaagaattaatccatttaatcatgaagacagaagaatctctaggagaccaaaccattgaagagttcttctcagaagatttctttaagagtaatttttgggtgtattgggcaaccatgtttgcttttgaaaaatggcattctgctgtagaaatgcgacgctatgcgatgaggtttatccaccatattgatggtttgccagatttcacctccctcaagttcaacaaatataaccaatatgactctatggtcaaaccgattattgcttacctagaatcacacgacgttgacatccaatttgacacaaaagtcactgatattcaggtggagcaaacagctggtaaaaaggtagcaaaaaccatccatatgacggtgtctggggaggctaaggcgattgagctaacacctgatgatttggtttttgtgaccaatggttctattactgaaagcagcacatacggtagtcatcacgaagtggctaagccaaccaaagcgttaggtggttcttggaatttatgggaaaatctagctgctcaatcagatgattttggtcatcctaaagtgttttaccaggacttgcctgctgaaagctggtttgtgtctgctacagcaaccataaaacacccagctatcgagccttatatagaacgtttgacccaccgtgacttgcacgatggcaaagtgaacactggcggcatcatcactattacagattctaactggatgatgagctttgccattcaccgtcaacctcattttaaagaacaaaaagaaaatgagaccactgtctggatttacggtctttattccaatagtgagggcaattacgtccacaagaaaattgaggagtgtacaggtcaagaaatcacagaagaatggttgtaccaccttggggtacctgttgataaaatcaaggacttagcgagtcaggactatatcaatacagttcctgtttacatgccttatattacgagttactttatgccacgcgtcaaaggagaccgtccgaaagttatcccagatggttcagtcaacttggcctttattggtaactttgcggaatctccatctcgagatacggtctttacgactgagtattctattcgtactgccatggaagcagtgtatagcttcttgaatgtggaacgaggcatcccagaagtctttaattcagcctatgatattcgtgaattgctcaaagccttttattaccttaatgataaaaaggcaatcaaggatatggatttgccaattcctgcactgattgagaaaatcggacataaaaaaatcaaggatacctttatcgaagaattgctcaaagatgctaatcttatg

SEQ ID NO: 9110 - protein, 590 aa, Streptococcus pyogenes
MYYTSGNYEAFATPRKPEGVDQKSAYIVGTGLAGLAAAVFLIRDGHMAGERIHLFEELPLAGGSLDGIEKPHLGFVTRGGREMENHFECMWDMYRSIPSLEIPGASYLDEFYWLDKDDPNSSNCRLIHKRGNRVDDDGQYTLGKQSKELIHLIMKTEESLGDQTIEEFFSEDFFKSNFWVYWATMFAFEKWHSAVEMRRYAMRFIHHIDGLPDFTSLKFNKYNQYDSMVKPIIAYLESHDVDIQFDTKVTDIQVEQTAGKKVAKTIHMTVSGEAKAIELTPDDLVFVTNGSITESSTYGSHHEVAKPTKALGGSWNLWENLAAQSDDFGHPKVFYQDLPAESWFVSATATIKHPAIEPYIERLTHRDLHDGKVNTGGIITITDSNWMMSFAIHRQPHFKEQKENETTVWIYGLYSNSEGNYVHKKIEECTGQEITEEWLYHLGVPVDKIKDLASQDYINTVPVYMPYITSYFMPRVKGDRPKVIPDGSVNLAFIGNFAESPSRDTVFTTEYSIRTAMEAVYSFLNVERGIPEVFNSAYDIRELLKAFYYLNDKKAIKDMDLPIPALIEKIGHKKIKDTFIEELLKDANLM

SEQ ID NO: 9111 - DNA, 591 bp, Streptococcus pyogenes
atgattattggcatcacaggaggcattgcatcaggaaaatcgactgtggttaaggtcattagaaaagctggttatcaggtgattgatgcggatcaagtggtccatgacttgcaagaaaaaggcggtcgtctttacgaggctcttagagaagcttttgggaatcagattttaaaagcagatggtgagttagatcgcacaaagctgtcagaaatgcttttttcaaacccagataatatggcaacatcctcagccattcaaaatcaaatcattaaggaagaattggcggctaagcgtgaccacttagcacagagccaagccatttttttcatggatattccccttttaatggaattgggctaccaagactggtttgatgcgatttggctggtttatgtagatgctcagacacaattgcagcgcttaatggctagaaatcgtttagacaaaggaaaagcaaggcagcgaatagccagtcagttaccaatagaggaaaaaaagccctatgccagtctagtgattgataatagtggggatattgcagccttaataaagcaagtacaatctgcgttgttgttattagccaatccgagg

SEQ ID NO: 9112 - protein, 197 aa, Streptococcus pyogenes
MIIGITGGIASGKSTVVKVIRKAGYQVIDADQVVHDLQEKGGRLYEALREAFGNQILKADGELDRTKLSEMLFSNPDNMATSSAIQNQIIKEELAAKRDHLAQSQAIFFMDIPLLMELGYQDWFDAIWLVYVDAQTQLQRLMARNRLDKGKARQRIASQLPIEEKKPYASLVIDNSGDIAALIKQVQSALLLLANPR

SEQ ID NO: 9113 - DNA, 924 bp, Streptococcus pyogenes
atgacactactatctatcattgtcccctgctttaatgaagaagcaaacattctcccttattttgaagaaatgcatcaactagaaacgtccatgaccaaccaacttgcttttgaatacatttttattgatgatggttctaaggataacaccttgggtattttgcgtgagctagctgctcgctttccaaatgtgcattatctgtctttttcacgccattttggcaaggaagctgggctcttagctggactaaaagaagccaaaggcaattacattactgtgatggatgtggatctgcaagatccacccgaacttttgccaattatgtacgctaagctaaaagaaggttatgacatcgttggcaccaggcgccaaaatagacaaggagaaccactaattcgttcaatgtgttcgaatctattttatggactgatcaaacacttatcagatactgaaatggtcaatggagttcgggattatcggttaatgaccagacaagtcgttgatagcattcttgagttgggagaggttaatcgtttttcaaaagggatcttttcgtgggttggttatcgtatcacctatcttagttttgaaaaccaaaaacgcaaatatggaaaaagtcgttggcatttttgggagttgctccgatattctttagatggctttatcaacttttcagaaatgccgttaaccattgctacctggacagggactttcagctttttgatttctattttcgccatcttatttatcattatcagaaagatactctttggtgatcctgtctctggttgggccagcactgtctctattattttattcatgggaggcattcagctcttttgcatgggtattattggaaaatatatttcaaaaatattccttgaaactaaaaaaaggcctctctatattatcaaagaaaaacat

SEQ ID NO: 9114 - protein, 308 aa, Streptococcus pyogenes
MTLLSIIVPCFNEEANILPYFEEMHQLETSMTNQLAFEYIFIDDGSKDNTLGILRELAARFPNVHYLSFSRHFGKEAGLLAGLKEAKGNYITVMDVDLQDPPELLPIMYAKLKEGYDIVGTRRQNRQGEPLIRSMCSNLFYGLIKHLSDTEMVNGVRDYRLMTRQVVDSILELGEVNRFSKGIFSWVGYRITYLSFENQKRKYGKSRWHFWELLRYSLDGFINFSEMPLTIATWTGTFSFLISIFAILFIIIRKILFGDPVSGWASTVSIILFMGGIQLFCMGIIGKYISKIFLETKKRPLYIIKEKH

SEQ ID NO: 9115 - DNA, 813 bp, Streptococcus pyogenes
atgattcgctttttaattttagctggctattttgaactaaccatgtatctccagctgtctggcaaactggatcagtacatcaatgttcggtattcttaccttgcttatatttccatgattttatctttcattttagctcttgttcaactctatacctggatgaaaaacattaaggtacatagccatttaacaggaaaaatcgcaaggctgacgagtccttttatcttggtctttcctgttttgattggtctccttgtgccgaccgtgaccttagattccaccacggtttctgctaaaggctatactttcccattggctgcgggagcctctaaaacgggagtcagtgatgacggtaccaccattcaatacctcaaacctgataccagcctttactttacaaagtctgcctaccaaaaggagatgcgtcaagaactccataaatataaaggcaagaaaccggtcaccattaccactgaaaattatatggaagtgatggaattgatctatctctacccagatgagtttcttgatcgtgacatccaatacactggctttgtttataacgaaccgggccatgacaactaccaattccttttccgcttcggcattattcactgtattgccgactcaggagtgtacggacttttgaccacaggtaatcaaaccagctaccctaacaacacatggctaacagttaaaggtcgccttcatatggaatatgataaaaacttagaacaacatctacctgtccttcaacttgctgaggttcatcaaaccaaagaacctaataatccttatgtttaccgcgttttt

SEQ ID NO: 9116 - protein, 271 aa, Streptococcus pyogenes
MIRFLILAGYFELTMYLQLSGKLDQYINVRYSYLAYISMILSFILALVQLYTWMKNIKVHSHLTGKIARLTSPFILVFPVLIGLLVPTVTLDSTTVSAKGYTFPLAAGASKTGVSDDGTTIQYLKPDTSLYFTKSAYQKEMRQELHKYKGKKPVTITTENYMEVMELIYLYPDEFLDRDIQYTGFVYNEPGHDNYQFLFRFGIIHCIADSGVYGLLTTGNQTSYPNNTWLTVKGRLHMEYDKNLEQHLPVLQLAEVHQTKEPNNPYVYRVF

SEQ ID NO: 9117 - DNA, 426 bp, Streptococcus pyogenes
atgaataaaagtttcaaaaacttagtgattggagctgtttcaggagtagcggcagcttacttcttatcaacagaaaaaggcaaggctttgaaaaatcgtgctgaaaaagcttatcaagcctacaaagaaagtccagatgattaccaccaatttgctaaagaaaaaggtagtgaatacagccatttagcacgtgacactttctatgatgtgaaagataagttggcttctggtgacttaactaaagaggacatgttagacttgctcaaagataaaacaacagctttcgtgcaaaaaacaaaagaaacccttgccgaagttgaagcgaaagaaaagcaagatgatgttatcattgatttaaatgaagaagacatcatcattgactatactgaacaagatgagcctgttagtgatacactagataaacac

SEQ ID NO: 9118 - protein, 142 aa, Streptococcus pyogenes
MNKSFKNLVIGAVSGVAAAYFLSTEKGKALKNRAEKAYQAYKESPDDYHQFAKEKGSEYSHLARDTFYDVKDKLASGDLTKEDMLDLLKDKTTAFVQKTKETLAEVEAKEKQDDVIIDLNEEDIIIDYTEQDEPVSDTLDKH

SEQ ID NO: 9119 - DNA, 1248 bp, Streptococcus pyogenes
atgaaggaggaaaattttgaggcaagatgttataatagagaaaaaggagggtgtgtcttgattaaaactatgcaatacaaaaaaacgatggcaacagttgttgctcttatcgtcgcacttttgctatttggcttgatttatgatttacttggggttcaaaaaaatgagctagcagctcaaaaatctgctcagccaaaggtcaaaacagcgcgtgttgtagctaatggcgacattttaattcatgatattctctacatgagtgctagaaaagctgacgatacctatgatttcactccttattttgaatatgttaaggactggattagcggtgctgacttagctattggagattatgaagggaccattagcccagattatcccttagcaggctatcccttattcaatgctccagaagagattgcaggtgctctgaaaaatactggctatgatgtagtcgatttagcccataatcatatcttagattcccaattagacggtgcccttaacactaaaaaggtttttcatcaattaggtatagacagtattggcatctatgacaaggatcgttcaaaagaatccttcttaattaaaaatgtcaatggtatcaaaattgcaattttaggttattcttatggttataacggcatggaggccacacttagccaagaagactatgagaaacacatgtctgatttagatgaagctaagataaaaaaagaacttcagctagctgaaaaaaaggctgacgtgaccattgttatgccacaaatgggaacagaatatgccttagaaccgacagcagaacaaaaagaactttaccacaaaatgattgattggggagctgacgtcgtcctaggaggccatccgcatgttattgaaccttcagagacagttataaaaggtaggcaaaagaaattcattatttactctatgggaaattttatttcaaatcagcggcttgaaaccgtagatgatatctggactgagcgtggcctattgatggaccttacttttgagaaaaaagataacaaaacaaaaattaaaacagttgaggcccatccaaccatggttttagccaaaggtaaaggcattgtgggtaaagaaggttttgaactatacaattatcgaacaatggttttagaagattttatcaaaggtggaaaataccacgacaagattgatgaggaaaccaaagcaaaagtagcacttgcctatcaggaaattaatgatttagttaacctgaaatgg

SEQ ID NO: 9120 - protein, 416 aa, Streptococcus pyogenes
MKEENFEARCYNREKGGCVLIKTMQYKKTMATVVALIVALLLFGLIYDLLGVQKNELAAQKSAQPKVKTARVVANGDILIHDILYMSARKADDTYDFTPYFEYVKDWISGADLAIGDYEGTISPDYPLAGYPLFNAPEEIAGALKNTGYDVVDLAHNHILDSQLDGALNTKKVFHQLGIDSIGIYDKDRSKESFLIKNVNGIKIAILGYSYGYNGMEATLSQEDYEKHMSDLDEAKIKKELQLAEKKADVTIVMPQMGTEYALEPTAEQKELYHKMIDWGADVVLGGHPHVIEPSETVIKGRQKKFIIYSMGNFISNQRLETVDDIWTERGLLMDLTFEKKDNKTKIKTVEAHPTMVLAKGKGIVGKEGFELYNYRTMVLEDFIKGGKYHDKIDEETKAKVALAYQEINDLVNLKW

SEQ ID NO: 9121 - DNA, 619 bp, Streptococcus pyogenes
atgtatgggaaatattgccttagtaacaggggcttcagccggttttggcagagccattgtcgaacacttaattgcagatgggataaaggttattggtgcttctcgtcgtcttgagaaactcaaggccttagaaacgagctttgggtcggacaacttttaccctttgcagatggatgtcacagataccaaagcgattgatgatgctttgacaagtctaccaaatcagtggcaagatattactattttagtgaataatgcaggcttggcattaggacttgataaggcttatgaagccgattttgagaattggatgacgatgattaataccaatattgttgggttgatttatctcacacgtcaattattaccacatatggtctccaaagatgatggtattattattaatttagggtcaaccgcagggacaattccctatccgggagctaatatttatggggctagcaaggcttttgttaagcagttctcactcaatttacgagctgatttagcaggtagccatatacgtgtgaccaatattgaacccggtctatgtgaagggacagaattttcaaagggacagaattttcaaaggtccgctttaatggtgatgaggaacggg

SEQ ID NO: 9122 - protein, 205 aa, Streptococcus pyogenes
MGNIALVTGASAGFGRAIVEHLIADGIKVIGASRRLEKLKALETSFGSDNFYPLQMDVTDTKAIDDALTSLPNQWQDITILVNNAGLALGLDKAYEADFENWMTMINTNIVGLIYLTRQLLPHMVSKDDGIIINLGSTAGTIPYPGANIYGASKAFVKQFSLNLRADLAGSHIRVTNIEPGLCEGTEFSKGQNFQRSALMVMRNG

SEQ ID NO: 9123 - DNA, 840 bp, Streptococcus pyogenes
atgaataatcgtcatttatttagtgggatatttttctttgttattagtttatgtctggcctttttattgctaaatattattatccctaagtcaaattcacgtttgaaaaagagtgattttctgaaaaaagaacaagtagctatccaatatgttgctataggagattcattgacagaaggagtaggtgatctaactcatcaaggtggttttgttcctttgttaacgaatgatctcagtgaatattttaaggctaatgttaatcatcaaaattacggcgtatctggtgataccagtcaacaaattcttgataggatgataaaacaaaagcagatacagttatctttaaaaaaagcagatataatgacgttaaccgttggtggtaatgatgttatggcagttattcggaagaatttagcggatttgcaagtttctagttttagaaagccagctcgtcagtatcaaaaacgattaagacagattatcgagttagccagaaaagataataaagatcttcctatttttattttaggcatctataatccgttttatttgaattttccagaactaactgatatgcaaaaagtgattgatgactggaataccaaaactaaggaggttgttggagaatacgatcgtgtgtactttgtgccaataaatgacctcttgtataaagggataaatggacaagaaggaattgttcattcttcaggagatcaaactacaattgtcaatgatgccttgtttactggggaccattttcacccaaataatactggctatcaaatcatgtcaaatgcagtaatggagaaaattaaaaagcatgaaaaaaaaatcaaacct

SEQ ID NO: 9124 - protein, 280 aa, Streptococcus pyogenes
MNNRHLFSGIFFFVISLCLAFLLLNIIIPKSNSRLKKSDFLKKEQVAIQYVAIGDSLTEGVGDLTHQGGFVPLLTNDLSEYFKANVNHQNYGVSGDTSQQILDRMIKQKQIQLSLKKADIMTLTVGGNDVMAVIRKNLADLQVSSFRKPARQYQKRLRQIIELARKDNKDLPIFILGIYNPFYLNFPELTDMQKVIDDWNTKTKEVVGEYDRVYFVPINDLLYKGINGQEGIVHSSGDQTTIVNDALFTGDHFHPNNTGYQIMSNAVMEKIKKHEKKIKP

SEQ ID NO: 9125 - DNA, 3495 bp, Streptococcus pyogenes
atgaaaaagaaagtcaaccaaggatcaaagcgctatcaatatctgttaaaaaagtgggggataggttttgtaatcgctgcaactgggactgtcgtgttagggtgcacccctagtatcttaacacatcaagttgctgctaaaaccattgttggactagcccgcgatgaagctcaacaaggagatggcaatgctaaatctggtgatggtcttcaatcgtctagcaaggaggcaaaaccagttttagacagctcgtcagctaatcctgctagtattgctgagcatcatttgcgtatgcattttaaaacattgccagctggtgagtcgctaggaagcttgggactttgggtgtggggagatgtggatcaaccttcaaaggattggccaaatggtgctatcaccatgacaaaagcgaaaaaagatgactatggctattatctagatgtgccactagcagctaaacaccgccagcaagtgtcttatctcattaataataaagctggagagaatctttcaaaggaccagcacatctcgcttctcacgccaaaaatgaatgaagtttggatagacgagaattaccatgcgcacgcttatcgacctttgaaaaaaggttaccttcgaatcaactaccacaatcaatcgggacactacgataacttagctgtctggacctttaaagatgtcaaaaccccaacgaccgactggccaaatggacttgacttgtcacataaagggcattatggagcttatgttgatgtccccttaaaagaaggagctaacgaaatcggatttttaatccttgataaaagtaagacaggagatgctattaaagtgcaaccaaaagattatctatttaaagagttagacaatcatactcaggtttttgtcaaagacactgacccaaaagtttacaacaatccttattatattgatcaggttagtctcaaaggagctgaacaaaccacgccaaatgagattaaagccatttttacgaccttagatgggcttgatgaagatgcggtgaaacaaaacatcaagatcactgacaaagcagggaaaactgttgcaattgatgagttgacacttgacagggataagtctgtaatgacattaaagggtgattttaaggcgcaaggtgcagtctacacggttacatttggagaagttagccaagtcgctcgccaatcctggcaattaaaagataaactctatgcttacgatggtgaacttggagctaccctagctaaggatggttctgttgatttagcgctatggtctccaagtgctgatactgttaaggttgtcgtttatgataaacaagatcagacaagggtggttggtcaagctgatttgaccaagtcggacaagggtgtttggagagctcatctaacttctgacagtgtcaagggcattagtgattacacaggctactattacctttatgaaatcacgcgcggtcaggaaaaagtcatggttttggatccttacgccaaatctctcgctgcctggaatgatgcgactgctactgatgacatcaaaacagcaaaagctgcctttattgatccaagcaaactaggaccaacaggccttgattttgccaaaattaacaactttaaaaagcgtgaagacgctattatctatgaagcacatgtgcgagattttacgtcagataaggctctagaaggcaagttaacacacccttttgggactttttcagctttcgttgaacagctagactatctcaaagacttgggggttacccacgttcaattgctaccggttttgagttatttttatgccaatgagctggacaagagccgctcaacagcctacacgtcttcagacaataattacaactggggttatgacccacaacactactttgccctttctggcatgtattcggcaaatcctaatgaccctgctttacgtatcgcagagcttaaaaaccttgtcaatgagattcacaaacgtggtatgggtgttatttttgatgtggtttataaccacacggctagaacctatctctttgaagatttggaacccaactactatcattttatgaatgctgatggtacagctagagagagttttggcggaggtcgtctaggaacgacacatgccatgagtcgtcgtatcttggtggattcgattacttatctgactcgtgaattcaaggtagatggttttcgtttcgacatgatgggtgaccatgatgcggcagctattgagcaagcctttaaggcagccaaagccattaatccaaataccattatgattggcgaaggctggcgtacctaccaaggtgatgaggggaaaaaagaaattgcggcagatcaagattggatgaaagcaaccaatacggtcggtgttttctctgatgatatcagaaataccctcaagtcaggttttccaaatgaaggcacagcagcctttattactggtggcgcaaaaaatctagaaggtttattcaaaacgatcaaagcacagcctggtaactttgaagcagatgccccaggagatgtagtgcagtatattgcagcccatgacaacctgaccttacatgatgtcattgccaaatccatcaataaggatcctaaagtggctgaagaagagattcacaagcgtattcgtctaggaaataccatgattttaactgctcaagggactgcctttatccattctggtcaggaatatggacgaaccaagcagcttctaaatcccgactacaagacaaaggcgtctgatgacaaggtgccaaataaggcgactctgattgatgctgtagcgcaatacccttacttcatccacgattcttatgattcgtctgatgcggtcaatcattttgactgggcaaaggcaacagattccatagctcacccgattagcaaccaaacaaaagcctatacacagggactaattgcgttgcgtcgctcaacagatgcctttacaaaagcaaccaaagctgaggtagatcgggatgtgaccttgatcacccaagcaggacaagatggtattcaacaagaggacctcatcatgggttaccaaacagtggcatcaaatggagatcgctatgctgtctttgtcaatgcagacaacaagacccgcaaggtagttttacctcaagcctaccgctatttgctaggagcccaagtgcttgttgatgctgagcaagctggtgttactgccattgctaagcctaagggagtccagtttaccaaagaaggcttgactattgaaggcctaactgccctggtcctcaaagtatcctcaaaaacggctaatccctctcagcaaaagagtcagacagacaatcatcaaaccaaaacaccagatggctcaaaagacctagacaaatcattaatgactagaccaaaaagagctaaaacaaaccaaaagctcccaaaaacgggtgaagcctcctcaaaaggcttattagcagctggaatagctctgcttttattggctattagcctgttgatgaagcgccaaaaagat

SEQ ID NO: 9126 - protein, 1165 aa, Streptococcus pyogenes
MKKKVNQGSKRYQYLLKKWGIGFVIAATGTVVLGCTPSILTHQVAAKTIVGLARDEAQQGDGNAKSGDGLQSSSKEAKPVLDSSSANPASIAEHHLRMHFKTLPAGESLGSLGLWVWGDVDQPSKDWPNGAITMTKAKKDDYGYYLDVPLAAKHRQQVSYLINNKAGENLSKDQHISLLTPKMNEVWIDENYHAHAYRPLKKGYLRINYHNQSGHYDNLAVWTFKDVKTPTTDWPNGLDLSHKGHYGAYVDVPLKEGANEIGFLILDKSKTGDAIKVQPKDYLFKELDNHTQVFVKDTDPKVYNNPYYIDQVSLKGAEQTTPNEIKAIFTTLDGLDEDAVKQNIKITDKAGKTVAIDELTLDRDKSVMTLKGDFKAQGAVYTVTFGEVSQVARQSWQLKDKLYAYDGELGATLAKDGSVDLALWSPSADTVKVVVYDKQDQTRVVGQADLTKSDKGVWRAHLTSDSVKGISDYTGYYYLYEITRGQEKVMVLDPYAKSLAAWNDATATDDIKTAKAAFIDPSKLGPTGLDFAKINNFKKREDAIIYEAHVRDFTSDKALEGKLTHPFGTFSAFVEQLDYLKDLGVTHVQLLPVLSYFYANELDKSRSTAYTSSDNNYNWGYDPQHYFALSGMYSANPNDPALRIAELKNLVNEIHKRGMGVIFDVVYNHTARTYLFEDLEPNYYHFMNADGTARESFGGGRLGTTHAMSRRILVDSITYLTREFKVDGFRFDMMGDHDAAAIEQAFKAAKAINPNTIMIGEGWRTYQGDEGKKEIAADQDWMKATNTVGVFSDDIRNTLKSGFPNEGTAAFITGGAKNLEGLFKTIKAQPGNFEADAPGDVVQYIAAHDNLTLHDVIAKSINKDPKVAEEEIHKRIRLGNTMILTAQGTAFIHSGQEYGRTKQLLNPDYKTKASDDKVPNKATLIDAVAQYPYFIHDSYDSSDAVNHFDWAKATDSIAHPISNQTKAYTQGLIALRRSTDAFTKATKAEVDRDVTLITQAGQDGIQQEDLIMGYQTVASNGDRYAVFVNADNKTRKVVLPQAYRYLLGAQVLVDAEQAGVTAIAKPKGVQFTKEGLTIEGLTALVLKVSSKTANPSQQKSQTDNHQTKTPDGSKDLDKSLMTRPKRAKTNQKLPKTGEASSKGLLAAGIALLLLAISLLMKRQKD

SEQ ID NO: 9127 - DNA, 1005 bp, Streptococcus pyogenes
atgaagagaattgcaatagatgctatgggtggagataacgctcctaaagctattgttgagggtgttaatcaagcaatagaagcattttcagatatcgaaattcaactttacggtgatcagacaaagattaactcctatcttattcaatcagatcgtgttgctattattcatacagatgaaaaaattatgtcagatgatgaacctgcaaaagctgttcgccgtaaaaagaaggcttcaatggttttagcagctaaggcagtgaaagaaggaaaagcagatgccattatttcagcagggaatacaggtgctcttttagctgtaggtttgtttgttgtggggcgtatcaagggagttgatcgtccaggattattatcaactattcccacagtaaccggattaggatttgatatgttggatcttggagctaatgctgaaaatacggcaaaacatttacatcaatatgctattttaggctctttctatgctaagaatgtacgtgggattgctaatccacgtgttggtctattaaacaatggtacagaagaaacaaaaggagatccccttcgtaaggccacttatgaacttttaacagcagataatacaatatcttttgttggtaatgtcgaggcgcgagaacttatgtcaggtgttgcagatgttattgtatcagatggtttcacgggaaacgcagtgttgaaatcaatagaaggaacagctattagcattatggggcaactgaaacagataattaatagcggcggtattaagactaaaattggagctagtctacttaaaagtagtctttacgagatgaagaagactcttgactactctagtgctggaggtgcagttttatttggtttaaaggcacctgttgtaaagtctcatggttctagtgatgtaaaagctattttttcaacgataaaacaagtacgtacgatgctagacactaacgtggtcggacaattagtagaagaatttgctaaggagactcaagtaaatgac

SEQ ID NO: 9128 - protein, 335 aa, Streptococcus pyogenes
MKRIAIDAMGGDNAPKAIVEGVNQAIEAFSDIEIQLYGDQTKINSYLIQSDRVAIIHTDEKIMSDDEPAKAVRRKKKASMVLAAKAVKEGKADAIISAGNTGALLAVGLFVVGRIKGVDRPGLLSTIPTVTGLGFDMLDLGANAENTAKHLHQYAILGSFYAKNVRGIANPRVGLLNNGTEETKGDPLRKATYELLTADNTISFVGNVEARELMSGVADVIVSDGFTGNAVLKSIEGTAISIMGQLKQIINSGGIKTKIGASLLKSSLYEMKKTLDYSSAGGAVLFGLKAPVVKSHGSSDVKAIFSTIKQVRTMLDTNVVGQLVEEFAKETQVND

SEQ ID NO: 9129 - DNA, 2010 bp, Streptococcus pyogenes
atgaaaaaatattttattttaaaaagtagtgtattgagtatcctgactagttttactctattagttacagatgttcaagcagatcaagttgatgtgcaattccttggcgtcaatgattttcacggcgctcttgataataccggaacagcttacacaccaagtggtaaaataccaaatgctgggacggctgctcaattaggtgcttatatggatgacgctgagatagacttcaagcaagcaaatcaagacggaacaagtatacgtgttcaagctggagatatggtcggagccagtcctgctaactctgcacttttacaagatgagcctactgtcaaagtctttaacaaaatgaaatttgaatatggcactcttggtaatcatgaatttgacgaaggactagatgaatttaaccgtatcatgacaggtcaagcgcctgatcctgaatcaacaattaatgatatcaccaaacaatatgagcacgaagcttcgcatcaaaccatcgtcattgctaatgttattgataaaaaaaccaaggatatcccctatggttggaaaccttatgctataaaagacatagccattaatgacaaaatcgttaagattggcttcattggtgttgtgactacagagattccaaatctcgttttaaagcaaaactatgaacactatcaatttttagatgtagctgaaaccattgccaaatatgctaaagaactacaagaacaacatgttcatgctattgtggttttagctcatgttcctgcaacaagtaaagatggtgttgttgatcatgaaatggctacggttatggaaaaagtgaaccaaatctatcccgaacatagcattgatattatttttgcaggacataatcatcaatacactaatggaactatcggtaaaacacgtatcgttcaagccctctctcaaggaaaagcttatgcagatgtccgtggtacgctagatactgataccaatgattttattaaaactccatcagcaaatgttgttgctgtagcaccaggtatcaaaacagaaaattcagatatcaaagctataataaatcatgctaatgatattgttaaaacagttactgaacgaaaaatcggaactgcaactaattcttcaactatttctaaaacagaaaatattgataaagaatctcctgtcggtaacttagcaacaacggctcagcttactattgctaagaaaacttttccaactgttgactttgctatgaccaataatggtggtattcgaagtgacctagttgtcaaaaatgaccggaccatcacctggggagctgcacaggctgtacaaccatttggtaatatccttcaagtcattcaaatgactggtcaacacatttacgatgtcctaaatcagcaatacgatgaaaaccagacctattttcttcaaatgtcaggtttaacatacacttatacagataatgatcctaagaactctgatacccccttcaagatagttaaggtttataaagacaatggtgaagaaattaacttaacaactacttacaccgttgttgtcaacgactttctttatggtggtggtgatggcttttcagcatttaaaaaagctaaattaatcggagctattaacacagatactgaagctttcatcacatatatcacaaatttagaagcatcaggtaaaactgttaatgctactataaaaggggttaaaaattatgtaacttcaaaccttgaaagttcgacaaaagttaatagtgctggtaaacacagtatcattagtaaggtttttagaaatcgtgatggcaatacagtgtctagtgaagtcatttcagaccttttgacttctactgaaaacactaataacagccttggcaaaaaagaaacaacaacaaacaaaaatactatctctagttccactcttccaataacaggggacaattataaaatgtctcctattatgacaatccttgccttgataagcttaggtggactaaacgcttttattaaaaaaaggaaatcc

SEQ ID NO: 9130 - protein, 670 aa, Streptococcus pyogenes
MKKYFILKSSVLSILTSFTLLVTDVQADQVDVQFLGVNDFHGALDNTGTAYTPSGKIPNAGTAAQLGAYMDDAEIDFKQANQDGTSIRVQAGDMVGASPANSALLQDEPTVKVFNKMKFEYGTLGNHEFDEGLDEFNRIMTGQAPDPESTINDITKQYEHEASHQTIVIANVIDKKTKDIPYGWKPYAIKDIAINDKIVKIGFIGVVTTEIPNLVLKQNYEHYQFLDVAETIAKYAKELQEQHVHAIVVLAHVPATSKDGVVDHEMATVMEKVNQIYPEHSIDIIFAGHNHQYTNGTIGKTRIVQALSQGKAYADVRGTLDTDTNDFIKTPSANVVAVAPGIKTENSDIKAIINHANDIVKTVTERKIGTATNSSTISKTENIDKESPVGNLATTAQLTIAKKTFPTVDFAMTNNGGIRSDLVVKNDRTITWGAAQAVQPFGNILQVIQMTGQHIYDVLNQQYDENQTYFLQMSGLTYTYTDNDPKNSDTPFKIVKVYKDNGEEINLTTTYTVVVNDFLYGGGDGFSAFKKAKLIGAINTDTEAFITYITNLEASGKTVNATIKGVKNYVTSNLESSTKVNSAGKHSIISKVFRNRDGNTVSSEVISDLLTSTENTNNSLGKKETTTNKNTISSSTLPITGDNYKMSPIMTILALISLGGLNAFIKKRKS

SEQ ID NO: 9131 - DNA, 1230 bp, Streptococcus pyogenes
atgtttaatcgtatccgcattcgttttatcatgattgcttctattgccatttttattattttaagttcaattgttggtattattaacacggcacgctgttaccaaagtcaacaagaaattaaccgtattttacatttaatttcctcaaataaaggtaaattacctggcactacggaaagctctaaacgacttggaacgaaactgtctgaagatagcctaagccagtttcggtattatagtgtcatttttaatgctaatggacatctactttcttctaatactgctaatatttcagctttagatagagaagaagcccaatattttgctagactttttgctaagtctggggaagaaaaaggcagttaccgtcaccaagatagtgtttattcgtacttgattactcagctgccaaatgaagaaaaactggttgtaattttagatactaccttttattttcgtagtgtaggagatttattagctgtttcagtgatgttggcctttggaggatttatcttttttgttgttttagtgagtcttttttccggtatggtcatcaaaccttttgtccaaaattatgagaagcagcgtcgctttattactaatgcaggccacgagttaaaaacaccactagccattatctcagccaataatgaattggtcgaattaatgactggagaatcagaatggaccaagagtacaagtgatcaggtgaagcgattgacaggcttgattaatcaaatgattactttggctcgtttggaggaacagccagatgtggtattacatatggtagacttttcagctattgctcaagatgcagctgaagattttaagagtctggttttgaaagatggtaaacgttttgatttgacgattcaaccgaatattatgattaaagcggaggaaaagtcattgtttgaacttgtgacaattttagttgataatgccaataaatattgtgatcctaaaggcttggtcaaggtatctttaaccactattggaagaagacgaaaacgagcgaaattagaagtttctaatacctatttggaaggaaaatccattgattacagccgcttctttgaacgcttttatcgcgaagacgaatcccataatagcaaagaaaaaggttatggaattggtttatctatggcagaaagtatggttaagttatttaaaggaacgataactgtaaattataaaaacgatgctattgtttttacagtggtgatt

SEQ ID NO: 9132 - protein, 410 aa, Streptococcus pyogenes
MFNRIRIRFIMIASIAIFIILSSIVGIINTARCYQSQQEINRILHLISSNKGKLPGTTESSKRLGTKLSEDSLSQFRYYSVIFNANGHLLSSNTANISALDREEAQYFARLFAKSGEEKGSYRHQDSVYSYLITQLPNEEKLVVILDTTFYFRSVGDLLAVSVMLAFGGFIFFVVLVSLFSGMVIKPFVQNYEKQRRFITNAGHELKTPLAIISANNELVELMTGESEWTKSTSDQVKRLTGLINQMITLARLEEQPDVVLHMVDFSAIAQDAAEDFKSLVLKDGKRFDLTIQPNIMIKAEEKSLFELVTILVDNANKYCDPKGLVKVSLTTIGRRRKRAKLEVSNTYLEGKSIDYSRFFERFYREDESHNSKEKGYGIGLSMAESMVKLFKGTITVNYKNDAIVFTVVI

SEQ ID NO: 9133 - DNA, 630 bp, Streptococcus pyogenes
atggtagaaaacactaaattactatgtagctgggtatggttattagcgttagctattctcataacgatctattcaacgtggctgtggtatcctcttgaggtggaccatctaaagttagaacaagttgtttttatgagcaaggatgctatcttgcataactataacggactactcaattacctcaccaatccttttgtgacaaggttggaatttgctaattttcactcatcggcagacggactcaagcattttgcagatgtgaagtggctttttcacctaactcaagtcgtttttcttggccttctttacccaacccttaagactttcacacaaaggttaaaaaccaaacgtttctggctccttcaaaaacctttaatactagcagctttgtttcctcttatgattggtctaatggctagtttcattgggtttgaacatttttttactctttttcatcaggtgctttttgtaggagatagcagctggctctttgatcccttgaaagattctgtgatttggatccttccagaagtctttttcttgcactgtttccttttctttatgatagtttacgaaatcatcctgtggagcttagtaggtttagcaagatggcagcgcctaaatgtagaa

SEQ ID NO: 9134 - protein, 210 aa, Streptococcus pyogenes
MVENTKLLCSWVWLLALAILITIYSTWLWYPLEVDHLKLEQVVFMSKDAILHNYNGLLNYLTNPFVTRLEFANFHSSADGLKHFADVKWLFHLTQVVFLGLLYPTLKTFTQRLKTKRFWLLQKPLILAALFPLMIGLMASFIGFEHFFTLFHQVLFVGDSSWLFDPLKDSVIWILPEVFFLHCFLFFMIVYEIILWSLVGLARWQRLNVE

SEQ ID NO: 9135 - DNA, 1344 bp, Streptococcus pyogenes
atgtttaaaaaatattcaataaaaaatcgtgtttggcgcgccgtcgttgaaattgtctttggagtttgtatcactgttttaatgattgcgataatatcgctttctttttcaaagttaaatatagtgacatctcataatgtgggagaagaattttatattaaagataaacagtcaatcaaacagttgaacaattatatgaagacattgggattagattatgttgtttttgatagaaaaacagataaagctatggaaggaaaatatttatctaaagaattttctttatttaacgaagttgcagaagaaaaaaataatctgacttttaattctgtacattatgatttatatactaatatcaattataatattgttataagatataatgagataccggagttctctaaccattaccttagaaatgtttcatataacatgttgacattttatattctgggaataggaacgagtatcagcattgtagttgctttaacacggtttgtaaaagaaatttctttgaatttcaaggaaatcaagaagttagcaaataaaatggggatagaagtcctttctgaaaatgaaaattattctcaaataatcgagtttgatgatatacttagaactttacatattaaaggtgataatttgaaaagtttgattgagcgagaaatattggaaaagcaagatctatcctttcaaattgcagcactttcgcatgatattaaaacacctttaacggttttaaaaggaaatcttgagttattagaattgactactttaaataaaaatcaggaaggttatattgtatctatgaacaatagtatttctgtttttgaaggctatttcaattctttaatatcttatacacgcatgctttcagaggatagatcagtgaaactaattttagttgaggagctattaagtgagttacattttgaagtcgatgacttattgaatatcaataatattgaattttctatttgtaatagacttattatcacttctttttatggagatgaggaaaatctgataagagctctttctaaccttttagttaatgcaataagatttatgcccgtattagataaaaaaatcgaagttatactgtctgagtcaggagagcaaattcattttgaaatatggaataatggtgagcgtttcagtgatagtacactgaaaaagggagataaattattttacacggaagattatagcagaggtaacaaacattatggaatcggtttggcatttgttaaaggcgttgctatcaaacacggtgggaatcttcaattgaataatccagctagaggaggtgctagcgccataatctcgataaaaaagaaaatt

SEQ ID NO: 9136 - protein, 448 aa, Streptococcus pyogenes
MFKKYSIKNRVWRAVVEIVFGVCITVLMIAIISLSFSKLNIVTSHNVGEEFYIKDKQSIKQLNNYMKTLGLDYVVFDRKTDKAMEGKYLSKEFSLFNEVAEEKNNLTFNSVHYDLYTNINYNIVIRYNEIPEFSNHYLRNVSYNMLTFYILGIGTSISIVVALTRFVKEISLNFKEIKKLANKMGIEVLSENENYSQIIEFDDILRTLHIKGDNLKSLIEREILEKQDLSFQIAALSHDIKTPLTVLKGNLELLELTTLNKNQEGYIVSMNNSISVFEGYFNSLISYTRMLSEDRSVKLILVEELLSELHFEVDDLLNINNIEFSICNRLIITSFYGDEENLIRALSNLLVNAIRFMPVLDKKIEVILSESGEQIHFEIWNNGERFSDSTLKKGDKLFYTEDYSRGNKHYGIGLAFVKGVAIKHGGNLQLNNPARGGASAIISIKKKI

SEQ ID NO: 9137 - DNA, 825 bp, Streptococcus pyogenes
atgaattatacaggtaaggtaaaacgagttgctattattgcaaatggtaagtaccaaagtaaacgcgtcgcctccaaacttttctccgtatttaaagatgatcctgatttctatctttcaaagaaaaatccggatattgtgatttctattggcggagatgggatgctcttatctgcctttcacatgtatgaaaaagaattagataaggtacgttttgtaggaatccacaccggtcatcttggcttttataccgattatagggattttgaagttgataaattaattgataatttaagaaaagacaagggagaacaaatctcttatccgattttaaaagttgctattactttagatgatggtcgtgtggttaaagcgcgtgctttgaatgaagcgacggttaagcgtattgaaaaaacgatggtagcagatgttattattaaccatgtcaaatttgaaagcttccgaggtgatgggatttcagtatcgaccccgacagggagcacagcctacaataaatctttaggtggtgctgtcttgcatccgacgattgaagcgctgcaattgacggaaatttccagtcttaataaccgtgtctttagaaccttgggctcatcaatcattattcccaaaaaagataagattgagttagtgccaaaacgattaggaatttataccatttccattgataataaaacctatcagttaaaaaatgtgacgaaggtggagtattttatcgacgatgagaaaattcattttgtttcctctccgagtcatacgagcttttgggaaagggtcaaggatgcctttattggagagattgactca

SEQ ID NO: 9138 - protein, 275 aa, Streptococcus pyogenes
MNYTGKVKRVAIIANGKYQSKRVASKLFSVFKDDPDFYLSKKNPDIVISIGGDGMLLSAFHMYEKELDKVRFVGIHTGHLGFYTDYRDFEVDKLIDNLRKDKGEQISYPILKVAITLDDGRVVKARALNEATVKRIEKTMVADVIINHVKFESFRGDGISVSTPTGSTAYNKSLGGAVLHPTIEALQLTEISSLNNRVFRTLGSSIIIPKKDKIELVPKRLGIYTISIDNKTYQLKNVTKVEYFIDDEKIHFVSSPSHTSFWERVKDAFIGEIDS

SEQ ID NO: 9139 - DNA, 1068 bp, Streptococcus pyogenes
atgagacgcgaattattactagaaaaaattgaaacctacaaggctatcatgccctggtatgttttagattattaccaatccaaattagctgttccatacagctttaccaccttatatgagtatttaaaagaatacaaacgcttttttgattggctgatggatgctgatttaacgcaggcgccaaagattgctgatattgacttgagcacgcttgagcaccttaccaagaaggatttagaggcctttgtgctttatttgcgggaacgaccttctctcaacacctattccaccaaagaggggctttctcaaaccactattaatcggaccttgtctgccttatcaagcctttacaagtacttgactgaagaggttgaaaatgaccaaggggagccttatttttatcggaatgttatgaaaaaagtgtcaacaaaaaagaaaaaagaaaccctggcttccagagcggaaaatattaagcagaaactgtttttaggtgatgaaactctagctttcttggattatgtggataaggaatatgagcaaaaattgtctaatcgtgccaaatcttctttccgtaaaaataaggagagggatttggctattattgctctactacttgcttctggtgttcgtttgtctgaagcagtgaatcttgatttaaaagatgtcaatctaaatatgatgattatcgaagttattcgcaaaggcggaaaacgtgattcagtcaatgtagcaggttttgcgaaaggttatttggagtcttatttagctgttcgtcagagacgttacaaggctgaaaaacaggatcttgctttctttttaacagaataccgtggcgttccaaatcgaatggatgcttctagtatagaaaagatggttggcaagtactctgaggattttaaaattcgtgtgactcctcacaaattgcgtcatacgctagcgacaagactatatgatgctactaaatctcaggtgttagttagtcatcaattaggccattcctctactcaagtcacggatctttatacccatattgtcaatgatgagcaaaaaaatgctttagataacctt

SEQ ID NO: 9140 - protein, 356 aa, Streptococcus pyogenes
MRRELLLEKIETYKAIMPWYVLDYYQSKLAVPYSFTTLYEYLKEYKRFFDWLMDADLTQAPKIADIDLSTLEHLTKKDLEAFVLYLRERPSLNTYSTKEGLSQTTINRTLSALSSLYKYLTEEVENDQGEPYFYRNVMKKVSTKKKKETLASRAENIKQKLFLGDETLAFLDYVDKEYEQKLSNRAKSSFRKNKERDLAIIALLLASGVRLSEAVNLDLKDVNLNMMIIEVIRKGGKRDSVNVAGFAKGYLESYLAVRQRRYKAEKQDLAFFLTEYRGVPNRMDASSIEKMVGKYSEDFKIRVTPHKLRHTLATRLYDATKSQVLVSHQLGHSSTQVTDLYTHIVNDEQKNALDNL

SEQ ID NO: 9141 - DNA, 1080 bp, Streptococcus pyogenes
atgcctaagaagattttatttacaggtggtggaactgtaggtcatgtcaccttgaacctcattctcataccaaaatttatcaaggacggttgggaagtacattatattggtgataaaaatggcattgaacatacagaaattgaaaagtcaggccttgacgtgacctttcatgctatcgcgacaggcaagcttagacgctatttttcatggcaaaatctagctgatgtttttaaggttgcacttggcctcctacagtctctctttattgttgccaagcttcgccctcaagcccttttttccaaaggtggttttgtctcagtaccgccagttgtggctgctaaattgcttggtaaaccagtctttattcatgaatcagatcggtcaatgggactagcaaacaagattgcctacaaatttgcaactaccatgtataccacttttgagcaggaagaccagttgtctaaagttaaacaccttggagcggtgacaaaggttttcaaagatgccaaccaaatgcctgaatcaactcagttagaggcggtgaaagagtattttagtagagacctaaaaaccctcttgtttattggtggttcggcaggggcgcatgtgtttaatcagtttattagtgatcatccagaattgaagcaacgttataatatcatcaatattacaggagaccctcaccttaatgaattgagttctcatctgtatcgagtagattatgttaccgatctctaccaacctttgatggcgatggctgaccttgtagtgacaagagggggctctaatacactttttgagctactggcaatggctaagctacacctcatcgttcctcttggtaaagaagctagccgtggcgatcagttagaaaatgccacttattttgagaagaggggctacgctaaacaattacaggaacctgatttaactttgcataattttgatcaggcaatggctgatttgtttgaacatcaggctgattatgaggctactatgttggcaactaaggagattcagtcaccggacttcttttatgaccttttgagagctgatattagctccgcgattaaggagaag

SEQ ID NO: 9142 - protein, 360 aa, Streptococcus pyogenes
MPKKILFTGGGTVGHVTLNLILIPKFIKDGWEVHYIGDKNGIEHTEIEKSGLDVTFHAIATGKLRRYFSWQNLADVFKVALGLLQSLFIVAKLRPQALFSKGGFVSVPPVVAAKLLGKPVFIHESDRSMGLANKIAYKFATTMYTTFEQEDQLSKVKHLGAVTKVFKDANQMPESTQLEAVKEYFSRDLKTLLFIGGSAGAHVFNQFISDHPELKQRYNIINITGDPHLNELSSHLYRVDYVTDLYQPLMAMADLVVTRGGSNTLFELLAMAKLHLIVPLGKEASRGDQLENATYFEKRGYAKQLQEPDLTLHNFDQAMADLFEHQADYEATMLATKEIQSPDFFYDLLRADISSAIKEK

SEQ ID NO: 9143 - DNA, 1638 bp, Streptococcus pyogenes
atgaccaaaccatttcatcataagaaactaaaacaaataactataatagctgcaactagcctttttttattcctgatcggtggtgccttttactactctaaaaatcattgtattaatgcctatcttaaagctcgatcggcccaatcaggaccagtttttgagaatatcaaagcatatctagtctgggatgatactaatgagcagatcacaaatgacgaggcgatgtatactaagtttagaaggtatagtcagaaagaattgaggcaaaaaaagcaggatttaaaagccgctagtcaagatagtgccgttcaagtaaagtctgttggtcgtcgtttttggatttttcctgattatcggattgccataaaacccatggatttaacgataaaaacgaatgtgcctcaagcagacgttcttttaaatcaaaaaaaagttgctgtttctgattcagaacagttctcagtcaagcttgatcggctaccaacggcagaatataccgcaagtatcagaggcaaacacaacgggcgaaacattaaagtcaacaaatcatatgatggtgataatcccgtgctagatttgagtgtgtcttttagaacttttttggtaacaagcaatgctaagcaaggagatctttacttcgatgataaccatattggcacattaaaagatggtcaattacaagtagaagattaccctgttacagaaaacgcacaagcttatatgaaaacaacattcccagatggtgagttaagatcacaaaaatatgctctagctgatgttgaagaaggagcaaccctggagattttagttacagatcttttagaagaggacaaggcaggggagctattagtatcagcttttgatcagctgatgcactacctcagtacaggtcaagactcatctaacttacgtagcgtctttgaggcagggtctagcaacgcattttataggggattgaaagagtccataaaagcgaaatttcagacagatacaagaaaagccagccgtctcaatattccatctatccttttgacaacaatgactcaagtgggtaaaacaacttacgtgcttgatttcacagctacctacgaatttttgtatgacaagtcaacagatcctgagcagcatacctctggacatattaatcaagacttgactggaaaagtgactgtaaaaaaagttggacagcattaccttatcagccagtccggctccaaaaatattactgttgttaaagaggacaatcaactcaaagcgccatctgtctttcctgagtctattttgggaacgtggacaggccaagccaatggtttgagcatccatatgtctctagcatcagatggaacaattacgactaaagttgaagatcaaaaaggcaaccgttctaaagaaactcggacagctaaaattagtaaagttgaagacaaaggcaatggtttttatctttatacgccagatcctggaagtgacataagcgccttagttccagaaggaggattggggggtgcaaatgtcaaatatgcttatggtttcaaaatatctggtaaaacagcctctccagtggtgtggcaggcagcattaacacatgaatttgattataccaagccactttcgggagtaactttgcaaaagcaacca

SEQ ID NO: 9144 - protein, 546 aa, Streptococcus pyogenes
MTKPFHHKKLKQITIIAATSLFLFLIGGAFYYSKNHCINAYLKARSAQSGPVFENIKAYLVWDDTNEQITNDEAMYTKFRRYSQKELRQKKQDLKAASQDSAVQVKSVGRRFWIFPDYRIAIKPMDLTIKTNVPQADVLLNQKKVAVSDSEQFSVKLDRLPTAEYTASIRGKHNGRNIKVNKSYDGDNPVLDLSVSFRTFLVTSNAKQGDLYFDDNHIGTLKDGQLQVEDYPVTENAQAYMKTTFPDGELRSQKYALADVEEGATLEILVTDLLEEDKAGELLVSAFDQLMHYLSTGQDSSNLRSVFEAGSSNAFYRGLKESIKAKFQTDTRKASRLNIPSILLTTMTQVGKTTYVLDFTATYEFLYDKSTDPEQHTSGHINQDLTGKVTVKKVGQHYLISQSGSKNITVVKEDNQLKAPSVFPESILGTWTGQANGLSIHMSLASDGTITTKVEDQKGNRSKETRTAKISKVEDKGNGFYLYTPDPGSDISALVPEGGLGGANVKYAYGFKISGKTASPVVWQAALTHEFDYTKPLSGVTLQKQP

SEQ ID NO: 9145 - DNA, 1047 bp, Streptococcus pyogenes
atgaaagcagcaacttacctttcaaccggaaatctacagctcatagacaaaccaaaaccagtcattataaagcctacagatgctatcgtccagttggtaaaaaccactatttgtggaactgatttgcatatcttaggtggggatgttcccgcatgtaaagaaggaacaatccttggtcatgaaggaattggaattgttaaggaggtcggtgatgcggttactaactttaaaatcggagataaagtgattatttcttgcgtcacatcatgtcatacctgttattattgtaaacgaggcctttcgtcacattgtcaagatggcggttggattcttggccatttaattaatggaacacaagcagaatatgtccatatcccacatgcagatggtagtctctatcatgctcctgatacgattgatgatgaggcacttgtcatgctttctgatattttaccaacttcatatgaaattggtgtcttgccatcacatgtcaagcctggagataatgtttgtattgttggtgccggtccagtaggactcgcagccctactaaccgttcaatttttctctccagccaatattattatggtcgacttatctcaaaatcgccttgaagcagctaaaacatttggagccacacacacgatttgttcaggaagtagtgaagaagtcaaggctatcattgacgatataaccaatggacgtggtgtcgatatttccatggagtgtgttggttatcccgcgacatttgatatttgtcaaaaaattatatcagtaggtgggcatattgctaacgttggggttcatgggaaaccagttgatttcaacctggatgaattatggattaaaaatatcaccttaaacactggacttgttaatgccaatacaactgaaatgctactaaatgtcttgaaaactggaaagattgacgcaacaagacttattacacatcattttaaactttcagaagttgaaaaagcttatgaaacctttaaacatgctggtgcaaataacgccttgaaagttattattgataatgatattagc

SEQ ID NO: 9146 - protein, 349 aa, Streptococcus pyogenes
MKAATYLSTGNLQLIDKPKPVIIKPTDAIVQLVKTTICGTDLHILGGDVPACKEGTILGHEGIGIVKEVGDAVTNFKIGDKVIISCVTSCHTCYYCKRGLSSHCQDGGWILGHLINGTQAEYVHIPHADGSLYHAPDTIDDEALVMLSDILPTSYEIGVLPSHVKPGDNVCIVGAGPVGLAALLTVQFFSPANIIMVDLSQNRLEAAKTFGATHTICSGSSEEVKAIIDDITNGRGVDISMECVGYPATFDICQKIISVGGHIANVGVHGKPVDFNLDELWIKNITLNTGLVNANTTEMLLNVLKTGKIDATRLITHHFKLSEVEKAYETFKHAGANNALKVIIDNDIS

SEQ ID NO: 9147 - DNA, 207 bp, Streptococcus pyogenes
atggaatcaaaagaaatttatttgactaagtctccttatataagggggagtttagaaattcacagtaaaaataggaaacatgaaaaaatcaatttatatgacgcaaaacccaatagcaccagatctgatgtctttaaaaaatataaagacaataagactataaatatgaaagatttcagccattttgatatttatctttggactaaa

SEQ ID NO: 9148 - protein, 69 aa, Streptococcus pyogenes
MESKEIYLTKSPYIRGSLEIHSKNRKHEKINLYDAKPNSTRSDVFKKYKDNKTINMKDFSHFDIYLWTK

SEQ ID NO: 9149 - DNA, 375 bp, Streptococcus pyogenes
atgtatcaaacaaaaataacaggcaaccgcctttaccacacggtttcgaaaggctacggagatagtgtgaccttatttggaaaaactgatcaaggggaaacccctatgagtttactggttatcgccttgtcttcttgtgtgactatgtgtgtgcagggtttttaccatcgtcaatttcagcaagacacacttgctgtttctgttgaggctagttatgaggaagaagtttttgaactacttgttaggattgatgatgttttagatgacaaaaagaaagctgatttattggcttacattggaacttattgtcgtgtgaaacaactcctcaaacctgaagttacggtgaccattacgttggaaggactgtctcatgtc

SEQ ID NO: 9150 - protein, 125 aa, Streptococcus pyogenes
MYQTKITGNRLYHTVSKGYGDSVTLFGKTDQGETPMSLLVIALSSCVTMCVQGFYHRQFQQDTLAVSVEASYEEEVFELLVRIDDVLDDKKKADLLAYIGTYCRVKQLLKPEVTVTITLEGLSHV

SEQ ID NO: 9151 - DNA, 624 bp, Streptococcus pyogenes
atgcttaaaaaaccgattattattggtgtaactggtggttcaggtggcggtaaaacaagtgtgtcacgcgctattttggacagttttccaaatgctcgtattgcaatgattcaacacgattcttactataaagatcagtctcacatgagttttgaagaaagggtcaagaccaattatgaccatcctctagcttttgatacagattttatgattcagcaactaaaagaattattagctggtagacctgtagatattcctatctatgattacaaaaagcatacccgcagtaatacgacctttcgtcaggatcctcaggatgttattattgttgaaggtattcttgtcctagaagatgagcgtttgcgagatttgatggatatcaagctctttgtagacacagatgacgatattcgtattattcgtcgtattaagcgtgacatgatggaacgtggcagaagcttagaaagtattattgatcagtacacaagcgtggtaaagcctatgtatcatcagtttattgagccaagtaaacgctatgctgatattgttattccagagggagttagtaatgtcgttgctattgatgttattaatagtaaaattgcgagtattcttggagaagta

SEQ ID NO: 9152 - protein, 208 aa, Streptococcus pyogenes
MLKKPIIIGVTGGSGGGKTSVSRAILDSFPNARIAMIQHDSYYKDQSHMSFEERVKTNYDHPLAFDTDFMIQQLKELLAGRPVDIPIYDYKKHTRSNTTFRQDPQDVIIVEGILVLEDERLRDLMDIKLFVDTDDDIRIIRRIKRDMMERGRSLESIIDQYTSVVKPMYHQFIEPSKRYADIVIPEGVSNVVAIDVINSKIASILGEV

SEQ ID NO: 9153 - DNA, 630 bp, Streptococcus pyogenes
atggaacattttaagacaatcaaagccagtggttttttcgaagaaagtattaaaaaatctcgtttcatttgtcatatcaaacgagtgagcactgaagaagatggtaagaattttgttaatgctatcaaaaaagaacattacaaagctaatcattcctgctttgcgatgattatcggtaacaacagacagatcaagcgctcaagtgatgatggtgaaccttcaggaactgctggaatacctatcctttctgtgttagaaaagcagtgtttaacaaatgtagtagttgtggtaacgcgttactttggtggtattaaattaggaacaggtgggttaatcagagcatactctaacatgaccgcaacagctattaaacgatttggcatcattgaagttaaacagcagataggactagaaatcacactttcttatccccaatatcaactatactctaacttgctagatcaattggctttaaccgaaacagaaactaagttttcagacacgataaagacaacactttattgtgatactgaacgtgtggaaaatctcattgatactttaacaaattattatcatggtcagataagctgtgagaaaatcggatccaaagttattgaattcccctgtgat

SEQ ID NO: 9154 - protein, 210 aa, Streptococcus pyogenes
MEHFKTIKASGFFEESIKKSRFICHIKRVSTEEDGKNFVNAIKKEHYKANHSCFAMIIGNNRQIKRSSDDGEPSGTAGIPILSVLEKQCLTNVVVVVTRYFGGIKLGTGGLIRAYSNMTATAIKRFGIIEVKQQIGLEITLSYPQYQLYSNLLDQLALTETETKFSDTIKTTLYCDTERVENLIDTLTNYYHGQISCEKIGSKVIEFPCD

SEQ ID NO: 9155 - DNA, 2985 bp, Streptococcus pyogenes
atggataaacatttgttggtaaaaagaacactagggtgtgtttgtgctgcaacgttgatgggagctgccttagcgacccaccatgattcactcaatactgtaaaagcggaggagaagactgttcaggttcagaaaggattaccttctatcgatagcttgcattatctgtcagagaatagcaaaaaagaatttaaagaagaactctcaaaagcggggcaagaatctcaaaaggtcaaagagatattagcaaaagctcagcaggcagataaacaagctcaagaacttgccaaaatgaaaattcctgagaaaataccgatgaaaccgttacatggttctctctacggtggttactttagaacttggcatgacaaaacatcagatccaacagaaaaagacaaagttaactcgatgggagagcttcctaaagaagtagatctagcctttattttccacgattggacaaaagattatagccttttttggaaagaattggccaccaaacatgtgccaaagttaaacaagcaagggacacgtgtcattcgtaccattccatggcgtttcctagctgggggtgataacagtggtattgcagaagataccagtaaatacccaaatacaccagagggaaataaagctttagccaaagctattgttgatgaatatgtttataaatacaaccttgatggcttagatgtggatgttgaacatgatagtattccaaaagttgacaaaaaagaagatacagcaggcgtagaacgctctattcaagtgtttgaagaaattgggaaattaattggaccaaaaggtgttgataaatcgcggttatttattatggatagcacctacatggctgataaaaacccattgattgagcgaggagctccttatattaatttattactggtacaggtctatggttcacaaggagagaaaggtggttgggagcctgtttctaatcgacctgaaaaaacaatggaagaacgatggcaaggttatagcaagtatattcgtcctgaacaatacatgattggtttttctttctatgaggaaaatgctcaagaagggaatctttggtatgatattaattctcgcaaggacgaggacaaagcaaatggaattaacactgacataactggaacgcgtgccgaacggtatgcaaggtggcaacctaagacaggtggggttaagggaggtatcttctcctacgctattgaccgagatggtgtagctcatcaacctaaaaaatatgctaaacagaaagagtttaaggacgcaactgataacatcttccactcagattatagtgtctccaaggcattaaagacagttatgctaaaagataagtcgtatgatctgattgatgagaaagatttcccagataaggctttgcgagaagctgtgatggcgcaggttggaaccagaaaaggtgatttggaacgtttcaatggcacattacgattggataatccagcgattcaaagtttagaaggtctaaataaatttaaaaaattagctcaattagacttgattggcttatctcgcattacaaagctcgaccgttctgttttacccgctaatatgaagccaggcaaagataccttggaaacagttcttgaaacctataaaaaggataacaaagaagaacctgctactatcccaccagtatctttgaaggtttctggtttaactggtctgaaagaattagatttgtcaggttttgaccgtgaaaccttggctggtcttgatgccgctactctaacgtctttagaaaaagttgatatttctggcaacaaacttgatttggctccaggaacagaaaatcgacaaatttttgatactatgctatcaactatcagcaatcatgttggaagcaatgaacaaacagtgaaatttgacaagcaaaaaccaactgggcattacccagatacctatgggaaaactagtctgcgcttaccagtggcaaatgaaaaagttgatttgcaaagccagcttttgtttgggactgtgacaaatcaaggaaccctaatcaatagcgaagcagactataaggcttaccaaaatcataaaattgctggacgtagctttgttgattcaaactatcattacaataactttaaagtttcttatgagaactataccgttaaagtaactgattccacattgggaaccactactgacaaaacgctagcaactgataaagaagagacctataaggttgacttctttagcccagcagataagacaaaagctgttcatactgctaaagtgattgttggtgacgaaaaaaccatgatggttaatttggcagaaggcgcaacagttattggaggaagtgctgatcctgtaaatgcaagaaaggtatttgatgggcaactgggcagtgagactgataatatctctttaggatgggattctaagcaaagtattatatttaaattgaaagaagatggattaataaagcattggcgtttcttcaatgattcagcccgaaatcctgagacaaccaataaacctattcaggaagcaagtctacaaatttttaatatcaaagattataatctagataatttgttggaaaatcccaataaatttgatgatgaaaaatattggattactgtagatacttacagtgcacaaggagagagagctactgcattcagtaatacattaaataatattactagtaaatattggcgagttgtctttgatactaaaggagatagatatagttcgccagtagtccctgaactccaaattttaggttatccgttacctaacgccgacactatcatgaaaacagtaactactgctaaagagttatctcaacaaaaagataagttttctcaaaagatgcttgatgagttaaaaataaaagagatggctttagaaacttctttgaacagtaagatttttgatgtaactgctattaatgctaatgctggagttttgaaagattgtattgagaaaaggcagctgctaaaaaaa

SEQ ID NO: 9156 - protein, 995 aa, Streptococcus pyogenes
MDKHLLVKRTLGCVCAATLMGAALATHHDSLNTVKAEEKTVQVQKGLPSIDSLHYLSENSKKEFKEELSKAGQESQKVKEILAKAQQADKQAQELAKMKIPEKIPMKPLHGSLYGGYFRTWHDKTSDPTEKDKVNSMGELPKEVDLAFIFHDWTKDYSLFWKELATKHVPKLNKQGTRVIRTIPWRFLAGGDNSGIAEDTSKYPNTPEGNKALAKAIVDEYVYKYNLDGLDVDVEHDSIPKVDKKEDTAGVERSIQVFEEIGKLIGPKGVDKSRLFIMDSTYMADKNPLIERGAPYINLLLVQVYGSQGEKGGWEPVSNRPEKTMEERWQGYSKYIRPEQYMIGFSFYEENAQEGNLWYDINSRKDEDKANGINTDITGTRAERYARWQPKTGGVKGGIFSYAIDRDGVAHQPKKYAKQKEFKDATDNIFHSDYSVSKALKTVMLKDKSYDLIDEKDFPDKALREAVMAQVGTRKGDLERFNGTLRLDNPAIQSLEGLNKFKKLAQLDLIGLSRITKLDRSVLPANMKPGKDTLETVLETYKKDNKEEPATIPPVSLKVSGLTGLKELDLSGFDRETLAGLDAATLTSLEKVDISGNKLDLAPGTENRQIFDTMLSTISNHVGSNEQTVKFDKQKPTGHYPDTYGKTSLRLPVANEKVDLQSQLLFGTVTNQGTLINSEADYKAYQNHKIAGRSFVDSNYHYNNFKVSYENYTVKVTDSTLGTTTDKTLATDKEETYKVDFFSPADKTKAVHTAKVIVGDEKTMMVNLAEGATVIGGSADPVNARKVFDGQLGSETDNISLGWDSKQSIIFKLKEDGLIKHWRFFNDSARNPETTNKPIQEASLQIFNIKDYNLDNLLENPNKFDDEKYWITVDTYSAQGERATAFSNTLNNITSKYWRVVFDTKGDRYSSPVVPELQILGYPLPNADTIMKTVTTAKELSQQKDKFSQKMLDELKIKEMALETSLNSKIFDVTAINANAGVLKDCIEKRQLLKK

SEQ ID NO: 9157 - DNA, 591 bp, Streptococcus pyogenes
atgaaacagtttattaaagaatggggcccattcactctctttttaattctctttggtctatctcgtctttttttgtggcaggctgttaaagtagacggccattctatggacccaactctagctcatggcgaacgccttatcgtttttaatcaagctagaattgatcgctttgatattgtagttgctcaggaagaagaaaacggacaaaagaaagaaatcgtaaaaagagttattggattgccaggcgataccatttcttataatgatgacacactttatattaatggtaaaaaaacagttgagccgtatttggctgagtatctaaaacaatttaaaaacgataaactccaaaaaacttacgcctataataccctattccaacagttagcagaaacatctgatgcttttacaactaattctgagggacaaacacgctttgagatgagtgttccaaaaggagaataccttcttcttggtgatgatcgtattgtttccagggatagtcgcgaagttggtagtttcaaaaaagaaaaccttatcggtgaagtgaaagctcgtttttggccactcaataaaatgaccgtttttaat

SEQ ID NO: 9158 - protein, 197 aa, Streptococcus pyogenes
MKQFIKEWGPFTLFLILFGLSRLFLWQAVKVDGHSMDPTLAHGERLIVFNQARIDRFDIVVAQEEENGQKKEIVKRVIGLPGDTISYNDDTLYINGKKTVEPYLAEYLKQFKNDKLQKTYAYNTLFQQLAETSDAFTTNSEGQTRFEMSVPKGEYLLLGDDRIVSRDSREVGSFKKENLIGEVKARFWPLNKMTVFN

SEQ ID NO: 9159 - DNA, 696 bp, Streptococcus pyogenes
atgaagacacttgcatttgatacctcaaataaaaccttgtcccttgctatacttgatgatgagacacttctagcagatatgacccttaacattcagaaaaaacatagtgttagccttatgcctgctattgattttttgatgacttgtactgatcttaaacctcaagatttagaaagaatagtggttgcaaaaggccctggatcttacacaggtttacgagtggcagttgctactgcaaaaacgttagcgtacagtttaaatattgcattggtcgggatttcgagtctatatgctttggctgcgtctacttgtaaacagtatccaaatactttggtggtgccattgattgatgctagaaggcaaaatgcgtatgtaggttattatcggcaaggaaaatcagtgatgccacaagcccatgcttcactagaagttattatagaacaattagtagaagaaggacagctgatttttgttggggagactgctccttttgctgagaaaattcaaaagaaactacctcaggcgatactacttccaacccttccttctgcttacgaatgtggtcttttggggcaaagtttggcaccagaaaatgtagacgcctttgtccctcaatatctcaagagagtggaagctgaagaaaactggctcaaagataatgagataaaagatgatagtcactacgttaagcgaatc

SEQ ID NO: 9160 - protein, 232 aa, Streptococcus pyogenes
MKTLAFDTSNKTLSLAILDDETLLADMTLNIQKKHSVSLMPAIDFLMTCTDLKPQDLERIVVAKGPGSYTGLRVAVATAKTLAYSLNIALVGISSLYALAASTCKQYPNTLVVPLIDARRQNAYVGYYRQGKSVMPQAHASLEVIIEQLVEEGQLIFVGETAPFAEKIQKKLPQAILLPTLPSAYECGLLGQSLAPENVDAFVPQYLKRVEAEENWLKDNEIKDDSHYVKRI

SEQ ID NO: 9161 - DNA, 669 bp, Streptococcus pyogenes
atgaatacacaaaaatttcaatcagtttttgacatcattgggccagtaatgattggtccatcaagtagtcacacagctggtgccgtcagaattggtaaggtagtccattccatctttggagatattcctgatgaagtgacgtttcacctttataattcatttgctaaaacctacagaggacatggtactgataaggctcttgttgcaggaattatgggtatgggtactgataatcctgatattaaaaattctctagaaattgctcatcaaaaagggataaaaatctattgggatatcttaaaagatagtaatgctccccatcccaatactgttaaaatcagtgtcaaaaaagctgacaaaacacttagtgttactggtgtttcaattggaggaggaaacattcaagtaacagaactaaatggtttttctgtctcgttatccatgaatactcctactatagttactgtacacaaagatattcccggaatgatcgcaaaggtaactgatatcctatcttccaataatattaatatcgccacaatgaatgttacacgtgaatccgctggtgaaaaagctactatgattatagaagtcgattctagagagtgccaagaagcagccaaccaaattgcaaaaattcctcatatttataatgtcaacttctttgac

SEQ ID NO: 9162 - protein, 223 aa, Streptococcus pyogenes
MNTQKFQSVFDIIGPVMIGPSSSHTAGAVRIGKVVHSIFGDIPDEVTFHLYNSFAKTYRGHGTDKALVAGIMGMGTDNPDIKNSLEIAHQKGIKIYWDILKDSNAPHPNTVKISVKKADKTLSVTGVSIGGGNIQVTELNGFSVSLSMNTPTIVTVHKDIPGMIAKVTDILSSNNINIATMNVTRESAGEKATMIIEVDSRECQEAANQIAKIPHIYNVNFFD

SEQ ID NO: 9163 - DNA, 549 bp, Streptococcus pyogenes
atgtcctgttgtttttttgtggttctctttatactagggatagttaaaaagaaaaggagactcaaaatgtcgatagagacaagagcagcgtttgaaaaagttaagcccattattttgaaattaaagcgacactattatattcaattgtgggatagagatgactggttacaagaaggacatattatcttattacagttactagaaaggtacccagagttaattgaggaagaagagcgtttatatcgctattttaaaacaaaattttcatcttatttgaaagatttattacgccgtcaagaaagtcaaaagcgtcagttccataagttagcatatgaagagataggggaggttgcacatgccattccatcgagagggttatggctagacgactatgtggcttatcaagaggtaatagctagcttagagaaccaattaaattcgcaagagcgtatgcagtttcaagcacttatcaggggcgaacgtttcaagggaagacgtgctctacttaggaagatcagtccctattttaaggaatttgcacagcagttg

SEQ ID NO: 9164 - protein, 183 aa, Streptococcus pyogenes
MSCCFFVVLFILGIVKKKRRLKMSIETRAAFEKVKPIILKLKRHYYIQLWDRDDWLQEGHIILLQLLERYPELIEEEERLYRYFKTKFSSYLKDLLRRQESQKRQFHKLAYEEIGEVAHAIPSRGLWLDDYVAYQEVIASLENQLNSQERMQFQALIRGERFKGRRALLRKISPYFKEFAQQL

SEQ ID NO: 9165 - DNA, 2133 bp, Streptococcus pyogenes
atgatgtccaaactagtttttttctggcaaaatagagaaaaagaatttagggactttggaggattttctgaaaaaagcgtctatttttgtgatacaatagacaatagaaaacgtttaattttagttgtaataaacagagaggttttacttatgacatttgatgcaattgaccagttggcagtaaacactgtccgcaccctatcaatggatgccattcaagcggcaaattctggacacccaggacttccaatgggggcagcacctatggcctatgttctttggaatcacttcatgaacatcaatcccaaaacaagccgtaattggtcaaacagagaccgttttatcctatcagcaggtcatggaagtgccatgctttatagcttgttacacttagctggttatgatttatctgtagaagatttaaagaacttccgtcaatggggttctaaaacaccaggtcacccagaagtgaaccacacagacggtgtcgaagcaaccacaggacctcttggtcaagggatcgcaaatgccgttgggatggccatggcagaagctcatctagcagctaaatttaacaaaccaggctttgacatcgttgatcactacacatttgctttgaatggtgacggtgaccttatggaaggggtcagccaagaagcagcaagtatggcaggacatttaaaacttgggaaattggtcttgctatatgattcaaacgacatctctcttgatggtccaacctctatggctttcacagaagatgtgaaaggacgtttcgaagcttatggttggcaacatatccttgtgaaagatggaaatgatttagaagaaattgcagctgctattgaagcagctaaagctgaaactgagaaaccaaccatcatcgaagtcaaaaccattattggttttggtgccgaaaaacaaggaacttcagctgttcacggcgctcctcttggagcagaaggcattgcttttgccaaaaaagcttaccaatggactcatcaagattttgaagtgcctgctgaagtaacagagcgctttgctcaaggtcttcaagcgcgtggtgaaaaagcagaacaagcctggaatgacttgtttgcagcttatgaagcagaatatccagaattagcagcagaataccaaaaagcctttactaacgaagctgctcaagtagaacttgaagcgcacgaacttggtagttcaatggcgagtcgtgtatccagtcaacaagccatccaacaaatttcagaacaagtagcctctttctggggtgggtcagcagacctttcagcttcaaacaatactatggttaaggctgaaacagatttccaaccaggtcactacgaaggccgtaacatctggtttggcgttcgtgaatttgccatggctgcagccatgaacggtattgcccttcacggcgggacacgcgtttacggcggaaccttctttgtcttctcaaactatcttcttccagctgttcgtatggcagcgctccaaaacttgccaacagtttatgtcatgacacatgattctatcgctgtcggtgaagatgggccaacgcacgaaccaattgaacaattggcaagtgttcgctcaatgcctaacttgaacgttattcgtccagcagacggtaacgaaacaaatgctgcttggaaacgtgccattgctgaaacagatcgcccaaccatgcttgtattgacgcgtcaaaaccttccagtgcttgagggcacaaaagaattggcagaagatggtcttagcaaaggagcttatatcttgtcagaagccaaaggcgaccttgatggtatcttgattgcaacaggttcagaagtgaaactggcaatggatactcaagaagctcttgaagcagaaggcattcatgtgcgtgtcgtatctatgccatcacaaaatatctttgacgaacagtcagcagagtataaagaaagcatcctaccagcagctgtgactaaacgtctcgctatcgaagcaggttcaagctttggctgggcaaaatatgtcggcctatcaggaaaaacattgaccattgacacttggggtgcttcagctccaggaaatcgtatcttcgaagaatatggtttcactgtggcaaatgcaactgagttatacaaatcactc

SEQ ID NO: 9166 - protein, 711 aa, Streptococcus pyogenes
MMSKLVFFWQNREKEFRDFGGFSEKSVYFCDTIDNRKRLILVVINREVLLMTFDAIDQLAVNTVRTLSMDAIQAANSGHPGLPMGAAPMAYVLWNHFMNINPKTSRNWSNRDRFILSAGHGSAMLYSLLHLAGYDLSVEDLKNFRQWGSKTPGHPEVNHTDGVEATTGPLGQGIANAVGMAMAEAHLAAKFNKPGFDIVDHYTFALNGDGDLMEGVSQEAASMAGHLKLGKLVLLYDSNDISLDGPTSMAFTEDVKGRFEAYGWQHILVKDGNDLEEIAAAIEAAKAETEKPTIIEVKTIIGFGAEKQGTSAVHGAPLGAEGIAFAKKAYQWTHQDFEVPAEVTERFAQGLQARGEKAEQAWNDLFAAYEAEYPELAAEYQKAFTNEAAQVELEAHELGSSMASRVSSQQAIQQISEQVASFWGGSADLSASNNTMVKAETDFQPGHYEGRNIWFGVREFAMAAAMNGIALHGGTRVYGGTFFVFSNYLLPAVRMAALQNLPTVYVMTHDSIAVGEDGPTHEPIEQLASVRSMPNLNVIRPADGNETNAAWKRAIAETDRPTMLVLTRQNLPVLEGTKELAEDGLSKGAYILSEAKGDLDGILIATGSEVKLAMDTQEALEAEGIHVRVVSMPSQNIFDEQSAEYKESILPAAVTKRLAIEAGSSFGWAKYVGLSGKTLTIDTWGASAPGNRIFEEYGFTVANATELYKSL

SEQ ID NO: 9167 - DNA, 801 bp, Streptococcus pyogenes
atgacatcagtgtttttaaccagtggttgggctttttatgattacctcatctcaccgattccacatgggaaactttttagttggcatgctgtttttgatgccattccaaatattatccaacggcttccaattacgcttggtttgacactatcaggagcaacctttggcttggttttggctttgatttttgcccttgtcaaaattaataaagtgaagctactataccctattcaagctatttttgtgagtttcttgcgaggaactcctattttggtacagttgatgttgacctactacggtattcccctctttctaaaatttctcaatcagaagtatggctttgattggaatgttaatgcaattccggcttctatttttgccattacagcctttgcttttaatgaagcagcctacgctagtgaaactattcgggcagccattttatcagtagatacaggtgaaattgaagcagcaaaaagtctaggcatgacttctgtgcaggtttaccgtcgtgtcattattcctaatgcaactgttgtggctattccaaccttgattaatgggttaattggcttaactaaaggaacatcgcttgcctttaatgcagggattgtcgaaatgtttgcccaggctcaaattctaggcggatcagattaccgttattttgaacgttatatctctgttgctcttgtctattggtctatcagtattttgatggagcaagtaggtcgcttgattgaaaacaagatggccatcaaagcaccagaacaagctagaaatgaaaagttaggagaattgcgt

SEQ ID NO: 9168 - protein, 267 aa, Streptococcus pyogenes
MTSVFLTSGWAFYDYLISPIPHGKLFSWHAVFDAIPNIIQRLPITLGLTLSGATFGLVLALIFALVKINKVKLLYPIQAIFVSFLRGTPILVQLMLTYYGIPLFLKFLNQKYGFDWNVNAIPASIFAITAFAFNEAAYASETIRAAILSVDTGEIEAAKSLGMTSVQVYRRVIIPNATVVAIPTLINGLIGLTKGTSLAFNAGIVEMFAQAQILGGSDYRYFERYISVALVYWSISILMEQVGRLIENKMAIKAPEQARNEKLGELR

SEQ ID NO: 9169 - DNA, 1401 bp, Streptococcus pyogenes
atgttattaacaatgctggcttatgccatgattattgtctttatgtacgtggtaatgaagaaaaaaatgaccccttttactgctttggtcatgattccattaatcatgacgattgctgttatactgactggttcagctgacttcaatgcagatgccaaatttgttgcctttgttggtgacggtggaattgctaaagacctaacagctatcggaccaatggttatgtatggtatcaacaatactgctaaaacaggtatcatgttgctatttgccattttgttcttctctgtcatgttagatgcaggattgtttgatccgattactgaaaagatgattcgctttgctaaaggtgatccaatgaaggtgcttatcgcaacagctgtcgttgctgctgcagtatctcttaatggtgatggaacaaccactactttaatttgttgctctgctttcttacctatctataaaaaattggacatgaaaatcatgaacctaggtgtcttgattattcttcaaaatactattatgaacttactgccatggggtggccctactgctcgtgcgatgtctgttcttggtgtcggtcctgaaattcttggctatcttgcaccgggtatgattttatctcttctttatgtgatttgttgggttgctccaagcatggggcgtaaagaacgtgcaagacttggtgttattgacttgtctgaagaagacatgcgtcaactcacagacattactgacccagataccctttttattcgtcgtcctaaaaactttgttttcaatgctatcttaaccattggattaatcacttggttagttgctggctctttcaacaaatctattgctatggcaccgcttcttctttttgcggtgggaacttgtatcgccttgatggtcaattacccagtgcttaaagatcaatcaaaacgcattggtgacaatgctggtgatgcggttcaagtggttattctcgtctttgctgctggtatctttatgggtctttttcaaggttctggtatggctagcgctcttgcacaaagttttgcaaccattattccaaaacaactggcaggtttctggggtctcgttattgccttagtttctgcacctggtaccttctttatctccaatgatggtttttactatggtatcttgcctgttcttgcagaagctggtgctgaatatggtttcagtaacatggctatggcacttgcttccctcatgggacaagccttccacttacttagtccattagttgccttcatttatcttcttcttcgcttgacaggtcttgacatgggggaatggcaaaaagaggctgctaaatatgcccttatcatctttgttatctttgtggtaaccattattgccatgggacaaatgccactttacattccacaa

SEQ ID NO: 9170 - protein, 467 aa, Streptococcus pyogenes
MLLTMLAYAMIIVFMYVVMKKKMTPFTALVMIPLIMTIAVILTGSADFNADAKFVAFVGDGGIAKDLTAIGPMVMYGINNTAKTGIMLLFAILFFSVMLDAGLFDPITEKMIRFAKGDPMKVLIATAVVAAAVSLNGDGTTTTLICCSAFLPIYKKLDMKIMNLGVLIILQNTIMNLLPWGGPTARAMSVLGVGPEILGYLAPGMILSLLYVICWVAPSMGRKERARLGVIDLSEEDMRQLTDITDPDTLFIRRPKNFVFNAILTIGLITWLVAGSFNKSIAMAPLLLFAVGTCIALMVNYPVLKDQSKRIGDNAGDAVQVVILVFAAGIFMGLFQGSGMASALAQSFATIIPKQLAGFWGLVIALVSAPGTFFISNDGFYYGILPVLAEAGAEYGFSNMAMALASLMGQAFHLLSPLVAFIYLLLRLTGLDMGEWQKEAAKYALIIFVIFVVTIIAMGQMPLYIPQ

SEQ ID NO: 9171 - DNA, 1062 bp, Streptococcus pyogenes
atgtctaaaaatgcgcaaaaaattgctgtaccattgatttctgtcttgctaggatttttacttggcgctattattatggttatctttggttatgatcctatctgggggtatgaaggtttattccaaattgcctttggtagtgttaaaaatattggagaaatattccgttcaatggggccattgattttaatagcgcttggctttactgttgctagccgtgcaggcttctttaacgttggtttgtctggacaggctttagctggatggatttcagcaggttggtttgcactcttaaatccagatatgcctcgtccattattgattcttatgacagctcttatcggaatgattgctggtggtattgctggagctattccagggatacttcgtgcttatcttggtacaagtgaagttatcgttacgattatgatgaactacatcattttatatgtcggaaatgctattgttcaacgtggttatcctgagagtgtcaaacaaagtattgattcaactattcaagttagtgataatgctagttatcaaacgcattggttatcagccctaactaataactctcgtattaatattggtattttctttgccattattgccattgccctaatctggttcttgcttaacaaaactactttaggttttgagattcgttcagttggtctcaacccacatgcttcagaatacgcagggatgtcatcaaaacgtactatcattttatcaatgattatctctggagctcttgcaggtcttggaggagtagttgaaggtctaggaacctttgaaaatgtttttgtacaaggatcttctttagcagttggttttgacggtatggcagttagcttattagcagcaaattcaccgcttggaatatttttctcatcattcctatttggtgtcttaaatattggtgctccaggaatgaatattgcaggcattccaccagaacttgttaaagtagtaactgcatcaatcattttctttgttggttcacattacctcattgaacgttacattattcgccctaaaaaattagtgaaaggtggtaaa

SEQ ID NO: 9172 - protein, 354 aa, Streptococcus pyogenes
MSKNAQKIAVPLISVLLGFLLGAIIMVIFGYDPIWGYEGLFQIAFGSVKNIGEIFRSMGPLILIALGFTVASRAGFFNVGLSGQALAGWISAGWFALLNPDMPRPLLILMTALIGMIAGGIAGAIPGILRAYLGTSEVIVTIMMNYIILYVGNAIVQRGYPESVKQSIDSTIQVSDNASYQTHWLSALTNNSRINIGIFFAIIAIALIWFLLNKTTLGFEIRSVGLNPHASEYAGMSSKRTIILSMIISGALAGLGGVVEGLGTFENVFVQGSSLAVGFDGMAVSLLAANSPLGIFFSSFLFGVLNIGAPGMNIAGIPPELVKVVTASIIFFVGSHYLIERYIIRPKKLVKGGK

SEQ ID NO: 9173 - DNA, 1626 bp, Streptococcus pyogenes
atgaattggtctactatttgggaacttatcaagataaacattctttattccaatccacaaagtttagctaacctcaaaaagcgtcaggaaaaacacccgaaagaaaacttcaaagcctataaaagcatgatgaggcaacaggccttaatgattgccatgtttttggtgatttacctttttatgtttattggtgtcgatttcagtcattatccaggacttttctcctttgacgttgctatgttttttatcatgtcaaccttgacagcctttagctctctttacaccattttttatgaaagtaatgacctaaaactttatattcacttaccagtaacgtcagaagaactctatattgcaaaaattgtctcgtcgctagggatgggtgctgtctttttgatgcctcttatctctcttctcttaattgcctattggcaactcttgggaaatcctttgtctattttagtagctatcgtgctctttttagtgttactagtgagttctatggtattagctatttatatcaatgcttgggtaggcaaaatcattgtaagaagtcgcaaacgaaaactcatttcaactatcatgatgtttgtctcaacttttggcgctttcgtcttaatttttgcgattaatattagtaacaacaagcgtacgatgacggatggcgtatttactgattacccaactattccctatttcaaaggattctatgatgttgttcaggcaccgttttctactgcggccctccttaacttttggttgccattgttacttatcctagctatggtatatggtattgtcacaaaagtgatgccaacttattatcgtgaggctttttatattagtaacgagaacaaagtcaagcaaactaaaaaaccagttaatcgtcctcatcagaatcaatcactggcgcagttgttgcgaaaacatcacctattaacgttacaaaatgcaactttactgacacaaacctatctcatgcccctgatgtatgtgatgctttttatcggtccaagtttgtcacgtggcacaggtttctttaagcatatttccccagattactttggggtagccttattatttggggttagtttgggtgtcatgtgtgcaacaccaaccagctttattggagtaggtatttcacttgaaaaggataactttacctttattaaaagcttaccaataacgttaaaaaaattcttgatggataaattttgcttgcttgtaggtctgcagctgattgtgcctatggtgatttatcttgtgtttggtctctttgtgttgcacctgcatcctcttctaacgattgctttttgtcttggctacgccctatcactgattgtgcaaggggaattgatgtatcgtcgtgactaccggcttctggatttaaaatggcaagacatgacgcaactctttaccagaggagatgggcaatggttaacaatgggacttatctttggtaatttaatagttgcaggtgtgctaggttttggagctgttatcattgccaatattatccaacaacctctgttgattagtattctattgagttgtctaatactaatggttttaggtcttgcgcaattatggattcaaaaaaccttctggaaaagcttagagaggctt

SEQ ID NO: 9174 - protein, 542 aa, Streptococcus pyogenes
MNWSTIWELIKINILYSNPQSLANLKKRQEKHPKENFKAYKSMMRQQALMIAMFLVIYLFMFIGVDFSHYPGLFSFDVAMFFIMSTLTAFSSLYTIFYESNDLKLYIHLPVTSEELYIAKIVSSLGMGAVFLMPLISLLLIAYWQLLGNPLSILVAIVLFLVLLVSSMVLAIYINAWVGKIIVRSRKRKLISTIMMFVSTFGAFVLIFAINISNNKRTMTDGVFTDYPTIPYFKGFYDVVQAPFSTAALLNFWLPLLLILAMVYGIVTKVMPTYYREAFYISNENKVKQTKKPVNRPHQNQSLAQLLRKHHLLTLQNATLLTQTYLMPLMYVMLFIGPSLSRGTGFFKHISPDYFGVALLFGVSLGVMCATPTSFIGVGISLEKDNFTFIKSLPITLKKFLMDKFCLLVGLQLIVPMVIYLVFGLFVLHLHPLLTIAFCLGYALSLIVQGELMYRRDYRLLDLKWQDMTQLFTRGDGQWLTMGLIFGNLIVAGVLGFGAVIIANIIQQPLLISILLSCLILMVLGLAQLWIQKTFWKSLERL

SEQ ID NO: 9175 - DNA, 1020 bp, Streptococcus pyogenes
atgacagcatcagatttacaaagggatcaatccctactggctaaaaaacgtttcagaagtggtctttatctagttcttttaattctcagcctcctatttttggcggttattgccttatcccttggtggtttggcggtttcttatggggcaattgtcaagggactgtttgtggcttatgacccccaagtggctttgatttatgatttgcgttttccaagaattgtcattgctttattagcaggagcagggatagctgtttcgggagttctttttcaagcagtgttgaaaaatcctatttcagaccctgctattatagggatttgtagtggtgctagttttatggttttagtctctagtttacttctgccgcagttgctgctgtatggtccaatcgtatcctttttaggaggcggagtgtctttcctgctgatttatggtttagcatggaagaaagggcttaatcctattcggcttattctaacagggattgctattaatgctttatttatggggttatcaactgctttaaccagctttttcacctcagctagtcccatggtcaatgctcttttagcaggtcatattagtcaaaaaacatgggctgatgtaggggttttattcccttatacattcattggcttgttactagctttgttattgtcaaaaacttgtaaccttcttcttttagatgatcaggtgattcgtcatttaggaatcgatgctacagcgttacggttgggaatttccttggttgctgttttattggcttcggtagccacttcgatcgttggagtggtttctttcctaggcttgattgtccctcatatgagccgcttgctggttggaagtaagcaccaaatcttaattcctttttcagctttgcttggagcctttgtctttttgctagccgatactttaggaagaagtcttgcttacccattggaaattagccctgcgattataatgagtattgtaggcgggccttactttatttacctgctaaggaggtctgatattata

SEQ ID NO: 9176 - protein, 340 aa, Streptococcus pyogenes
MTASDLQRDQSLLAKKRFRSGLYLVLLILSLLFLAVIALSLGGLAVSYGAIVKGLFVAYDPQVALIYDLRFPRIVIALLAGAGIAVSGVLFQAVLKNPISDPAIIGICSGASFMVLVSSLLLPQLLLYGPIVSFLGGGVSFLLIYGLAWKKGLNPIRLILTGIAINALFMGLSTALTSFFTSASPMVNALLAGHISQKTWADVGVLFPYTFIGLLLALLLSKTCNLLLLDDQVIRHLGIDATALRLGISLVAVLLASVATSIVGVVSFLGLIVPHMSRLLVGSKHQILIPFSALLGAFVFLLADTLGRSLAYPLEISPAIIMSIVGGPYFIYLLRRSDII

SEQ ID NO: 9177 - DNA, 894 bp, Streptococcus pyogenes
atgaacgaaatgcttatccttagactgatacaagctttgctagtttcggcaatgctttttattttctttatgttagtaaaacatcttaaaaaaaataagatcaatccttttaaacgcttttggacggggttttggattggcctgctaacagatgcccttgacacccttgggatagggtcttttgctactaccacaacgtgctttaagttaactaaattagtcactgacgatagacaattgcctggcactatgaccgtagctcatgtgcttccggtgctcattcaatctctttgctttatttttgtcgtaaaagttgaggttctaactttacttgctatggctgcagcagcctttattggagcttattttgggactcatattacaaaaaactggcatgctccaactgtccaacgaatccttggtagtcttttaatcatagcagctataatcatgatcattagaataatctaccatccaggagaacacctttcagacaccattcatggcctccatggcatctggctttttgttggaattggttttaattttatcgttggagtcttgatgactatggggttaggcaattatgctccagaattgattttcttttcattaatgggtcttagcccaacagttgctatgcctgttatgatgctagatgcagctatgattatgacagcttctagtagccagtttatcaaagcaaaccgtgtcagttgggatggttttgctggaattgtttctggtggtattattggcgttttactagctgtgtttttcttaacgaatttagatattaatagcttgaaacttctggtcatcgctatcgttttcttcactggtggaatgctgattcgttcctcctttacctctcataagcaacaaacaaataga

SEQ ID NO: 9178 - protein, 298 aa, Streptococcus pyogenes
MNEMLILRLIQALLVSAMLFIFFMLVKHLKKNKINPFKRFWTGFWIGLLTDALDTLGIGSFATTTTCFKLTKLVTDDRQLPGTMTVAHVLPVLIQSLCFIFVVKVEVLTLLAMAAAAFIGAYFGTHITKNWHAPTVQRILGSLLIIAAIIMIIRIIYHPGEHLSDTIHGLHGIWLFVGIGFNFIVGVLMTMGLGNYAPELIFFSLMGLSPTVAMPVMMLDAAMIMTASSSQFIKANRVSWDGFAGIVSGGIIGVLLAVFFLTNLDINSLKLLVIAIVFFTGGMLIRSSFTSHKQQTNR

SEQ ID NO: 9179 - DNA, 1341 bp, Streptococcus pyogenes
atgatgttaacgaaggggcaacttccctatagtgctgcttttacaacaggagggctcttttactttgttatcattgcattaagttattatttgggatcgacactttggctagtctttgttcaggtgttttgtttttacttatctggtttatatctttataaactcattaattatatgacaggctttcaaaaagtggctttaactttttcaattagctactatttattatctgttagtcttggttttgggggattgtatcctactcaactggctatgccatttatattaatatcggcttggtttttaactaagtattttgcctgtttagtgaaagatgaggcatttattctttttggctttgtaggtgctcttgcaatgctaattgacccgagtacccttatcttttggtcttttgcttgtgtgacagttttttcttataatataagccaaaagcatcttgcaagaggtttttatcaactgctagcttcgatttttggaatgattttagttttttacacagcaggatatttcattttgaacttacaagtgctaaatccttatttatcacaaacgatgatttatccttttactttttttaaatcaggaaacttatcgttgctttttggactggctattcagttgttcttcgctttggggcttggtcttttgacgggaatggagaatgtcattaggcgatttaaaaacaattctgatagggtcgtcaagtggctatttgtcatggtcattctagaatctatacttgtggctatattttcacaagactatcgcccctatcatcttttacctcttttaccttttggattaattttgactgctattcctgttggctatcagtatggtataggattaggtcagagtagtcatcgcagacgtcatggtaaaaatggtgttggtcgagtaatgatgatttatcttaagagacacttttatttgccaattttaattgtagggacaatactaatctgttctacttattgtttcattagtagtattcctcttaatcaggagcgtgatcatattgctagttatttagaacagaaactaaataaaactcaatctatttatgtttgggatgatacttctaaaatttatttggacagtaaagctaaatctgtttctcaatttagttctcctgacatcaatacgcaaaaagagagtcatcgaaaaatattagaagatgaactattagaaaataaggctgcttatatcgttgttaatcgctataaaaacctgcctaaaatcattcaaaaagtattatctactaattacaaagtagataaacagataacgacaaaaagttttattgtttatcagaaaaag

SEQ ID NO: 9180 - protein, 447 aa, Streptococcus pyogenes
MMLTKGQLPYSAAFTTGGLFYFVIIALSYYLGSTLWLVFVQVFCFYLSGLYLYKLINYMTGFQKVALTFSISYYLLSVSLGFGGLYPTQLAMPFILISAWFLTKYFACLVKDEAFILFGFVGALAMLIDPSTLIFWSFACVTVFSYNISQKHLARGFYQLLASIFGMILVFYTAGYFILNLQVLNPYLSQTMIYPFTFFKSGNLSLLFGLAIQLFFALGLGLLTGMENVIRRFKNNSDRVVKWLFVMVILESILVAIFSQDYRPYHLLPLLPFGLILTAIPVGYQYGIGLGQSSHRRRHGKNGVGRVMMIYLKRHFYLPILIVGTILICSTYCFISSIPLNQERDHIASYLEQKLNKTQSIYVWDDTSKIYLDSKAKSVSQFSSPDINTQKESHRKILEDELLENKAAYIVVNRYKNLPKIIQKVLSTNYKVDKQITTKSFIVYQKK

SEQ ID NO: 9181 - DNA, 831 bp, Streptococcus pyogenes
atgtttacatggggaagcattggatttgttagtaacaaaattggaggaaaaccttcgcaacaaactctaggaatgacttttggggctttattattttcattagctgtttggttaattgttagacctgagatgacactgcaactttggctttttggaatattgggtggttttatctggtcaattggtcaaactggtcaatttcatgccatgcaatacatgggagtctccgttgccaatcctttgtcaagtggctctcaacttgttctgggaagtttgattggtgtcctcgtttttcatgaatggacaagacctatgcaatttgtagtaggaagtctagcactattacttctgattgttggtttttacttttctagtaaacaagatgatgctaatgcacaagtcaatcaccttcataatttttcaaaaggatttagggcgctcacttattcaacaattggttacgtgatgtatgctgtattatttaataacatcatgaaatttgaagttttgtcagtcattttacccatggcagtaggtatggttttaggagctataactttcatgtcatttaaaatttccattgaccagtatgtgattaaaaatagcgttgttggattactttggggcattgggaatatttttatgcttttagctgcatcaaaagcaggacttgctattgcctttagtttctcacaattaggtgctatcatttcgattgtcggaggcattttattcctaggcgaaaccaaaaccaaaaaagaaatgcgttgggttgtcacaggaattatttgttttatcgtaggtgctattttattaggtgtggtcaaatct

SEQ ID NO: 9182 - protein, 277 aa, Streptococcus pyogenes
MFTWGSIGFVSNKIGGKPSQQTLGMTFGALLFSLAVWLIVRPEMTLQLWLFGILGGFIWSIGQTGQFHAMQYMGVSVANPLSSGSQLVLGSLIGVLVFHEWTRPMQFVVGSLALLLLIVGFYFSSKQDDANAQVNHLHNFSKGFRALTYSTIGYVMYAVLFNNIMKFEVLSVILPMAVGMVLGAITFMSFKISIDQYVIKNSVVGLLWGIGNIFMLLAASKAGLAIAFSFSQLGAIISIVGGILFLGETKTKKEMRWVVTGIICFIVGAILLGVVKS

SEQ ID NO: 9183 - DNA, 1506 bp, Streptococcus pyogenes
ttgttagattattatttggaatccgatattattgaccagaaaatcctactggctattttgttgacagaaaaagaactgacgatggcagcagcttgttctcaaacaactttgactgctttaaaaataaagcagtatcttcgacaatttaacgccttatttaaagggtacttacgtattgagcttattaaatctcgtatttattgtgaggtattaaatgataagcgagaagcatttttttatgacatttttgccttatcagatactctaaaaatgttgacattcttattactagataatcccaaacacaaatcaatcgctgtttatacacgaaaacaagggatatcccagtcaaaagcttatcgtcttattcataaattaaaacattatttacaagacattggtttaaatattgtagacaatactgttatcggagatgaacttaaaatacggtatttgattgctcttttacataaagagtacggcattatattatatgatatacaacctgcagacattgaaacgattcatgcttttatctttgcagcacaaaaaaacttacaaccttctgcctttttagatagacgcttcttgttttttgatgtgctgttgatgttgacttggaagcgccatcgctatcctgttcatttgcctcatttagctctttttgaacatctcaaatccttgcctatttttgacaatatcaaaaccattgccgtggatgagctagcacctcgaactcgtgtcacattttcgtctgatgattttgactatctctttttaatttatttaacgactgataactccttcttgagtgggtactggacaagtcatcagcgacaacaactttaccatttaatcaccaaagatcccgattatcatttactaatccatcgtcttcaggcactagttggaaaatattccgatattcatgagcatatccctaacttaattccttttttcaaaagaactctctacaatttacaaactttaattacctttgatggttattattttgatcaatatcaaggcaacatgctactactagataagcttgaaaccgttatcaaagattggctttatgacacaggccgtcaaggcagtattagttctggtcacttacacttgatgtgtttataccttgagcagatcttggaaagctctattgctccaatcaatattactgttattgagagccaagaaactgttggtaacgttatagctaatttcatcacctcaactatcccttcttacaaagttaaactgtcacgggtcaatatcttatctgataatatttatccctatgataaacctgtagatctggttgtaaccagtcagaagctcttgcctttcttaaaagaactcggtgtttttcccaaagagacccgcttgtttggtttgagtttggactgtatccaacagcagcgcgaagatttaatcaaaaccatcttagccttgcaccagaaccactaccaaaaacgtttagaagaactttggagagttccttct

SEQ ID NO: 9184 - protein, 502 aa, Streptococcus pyogenes
LLDYYLESDIIDQKILLAILLTEKELTMAAACSQTTLTALKIKQYLRQFNALFKGYLRIELIKSRIYCEVLNDKREAFFYDIFALSDTLKMLTFLLLDNPKHKSIAVYTRKQGISQSKAYRLIHKLKHYLQDIGLNIVDNTVIGDELKIRYLIALLHKEYGIILYDIQPADIETIHAFIFAAQKNLQPSAFLDRRFLFFDVLLMLTWKRHRYPVHLPHLALFEHLKSLPIFDNIKTIAVDELAPRTRVTFSSDDFDYLFLIYLTTDNSFLSGYWTSHQRQQLYHLITKDPDYHLLIHRLQALVGKYSDIHEHIPNLIPFFKRTLYNLQTLITFDGYYFDQYQGNMLLLDKLETVIKDWLYDTGRQGSISSGHLHLMCLYLEQILESSIAPINITVIESQETVGNVIANFITSTIPSYKVKLSRVNILSDNIYPYDKPVDLVVTSQKLLPFLKELGVFPKETRLFGLSLDCIQQQREDLIKTILALHQNHYQKRLEELWRVPS

SEQ ID NO: 9185 - DNA, 903 bp, Streptococcus pyogenes
gtgctgatgaccaaagtcagaaaagctattattcccgcagcaggtttaggcacacgttttttacctgcaaccaaggcccttgccaaggagatgctacctattgttgataaaccaactattcaatttatcgttgaagaagctctaaaatcaggtatcgaagaaattcttatcgttactggaaaatccaaacgctccatagaagatcattttgattctaattttgaattagaatataatttacaggctaaaggaaaaatcgaacttctaaagttagtagacgagaccacttctattaatcttcactttattcgacagagtcatccaagaggattaggagacgcagttcttcaagcaaagacctttgttggcaatgaaccttttgttgtcatgctaggtgatgatctgatggatattacaaatccaaatgtaaaaccattaaccaaacaattgatcgatgactatgaagaaactcatgctgcaactattgccgtcatgagggttcctcacgaggatgtctctaactacggtatcattgctcctcaagcaaaagcagtaaaaggactctatagtgtggatacttttgttgaaaaaccacaacctcaagatgcacctagtgatttggcaattattggacgttacttgctcacaccagaaatttttagtattttagaaaaacaagaacctggtgcaggcaatgaagttcaactgactgatgctattgataccctcaataagacacagcgtgtctttgctcgtgagtttaaagggaaacgctatgatgttggcgataaatttgggtttatgaaaacttctttggattatgccctgaaacaccctcaagtcaaagatgacttgaaagcctacatcatccaactgggcaaagcactagagaagacaaaacca

SEQ ID NO: 9186 - protein, 301 aa, Streptococcus pyogenes
VLMTKVRKAIIPAAGLGTRFLPATKALAKEMLPIVDKPTIQFIVEEALKSGIEEILIVTGKSKRSIEDHFDSNFELEYNLQAKGKIELLKLVDETTSINLHFIRQSHPRGLGDAVLQAKTFVGNEPFVVMLGDDLMDITNPNVKPLTKQLIDDYEETHAATIAVMRVPHEDVSNYGIIAPQAKAVKGLYSVDTFVEKPQPQDAPSDLAIIGRYLLTPEIFSILEKQEPGAGNEVQLTDAIDTLNKTQRVFAREFKGKRYDVGDKFGFMKTSLDYALKHPQVKDDLKAYIIQLGKALEKTKP

SEQ ID NO: 9187 - DNA, 2619 bp, Streptococcus pyogenes
atggacttagaacaaacgaagccaaaccaagttaagcagaaaattgctttaacctcaacaattgctttattgagtgccagtgtaggcgtatctcaccaagtcaaagcagatgatagagcctcaggagaaacgaaggcgagtaatactcacgacgatagtttaccaaaaccagaaacaattcaagaggcaaaggcaactattgatgcagttgaaaaaactctcagtcaacaaaaagcagaactgacagagcttgctaccgctctgacaaaaactactgctgaaatcaaccacttaaaagagcagcaagataatgaacaaaaagctttaacctctgcacaagaaatttacactaatactcttgcaagtagtgaggagacgctattagcccaaggagccgaacatcaaagagagttaacagctactgaaacagagcttcataatgctcaagcagatcaacattcaaaagagactgcattgtcagaacaaaaagctagcatttcagcagaaactactcgagctcaagatttagtggaacaagtcaaaacgtctgaacaaaatattgctaagctcaatgctatgattagcaatcctgatgctatcactaaagcagctcaaacggctaatgataatacaaaagcattaagctcagaattggagaaggctaaagctgacttagaaaatcaaaaagctaaagttaaaaagcaattgactgaagagttggcagctcagaaagctgctctagcagaaaaagaggcagaacttagtcgtcttaaatcctcagctccgtctactcaagatagcattgtgggtaataataccatgaaagcaccgcaaggctatcctcttgaagaacttaaaaaattagaagctagtggttatattggatcagctagttacaataattattacaaagagcatgcagatcaaattattgccaaagctagtccaggtaatcaattaaatcaataccaagatattccagcagatcgtaatcgctttgttgatcccgataatttgacaccagaagtgcaaaatgagctagcgcagtttgcagctcacatgattaatagtgtaagaagacaattaggtctaccaccagttactgttacagcaggatcacaagaatttgcaagattacttagtaccagctataagaaaactcatggtaatacaagaccatcatttgtctacggacagccaggggtatcagggcattatggtgttgggcctcatgataaaactattattgaagactctgccggagcgtcagggctcattcgaaatgatgataacatgtacgagaatatcggtgcttttaacgatgtgcatactgtgaatggtattaaacgtggtatttatgacagtatcaagtatatgctctttacagatcatttacacggaaatacatacggccatgctattaactttttacgtgtagataaacataaccctaatgcgcctgtttaccttggattttcaaccagcaatgtaggatctttgaatgaacactttgtaatgtttccagagtctaacattgctaaccatcaacgctttaataagacccctataaaagccgttggaagtacaaaagattatgcccaaagagtaggcactgtatctgatactattgcagcgatcaaaggaaaagtaagctcattagaaaatcgtttgtcggctattcatcaagaagctgatattatggcagcccaagctaaagtaagtcaacttcaaggtaaattagcaagcacacttaagcagtcagacagcttaaatctccaagtgagacaattaaatgatactaaaggttctttgagaacagaattactagcagctaaagcaaaacaagcacaactcgaagctactcgtgatcaatcattagctaagctagcatcgttgaaagccgcactgcaccagacagaagccttagcagagcaagccgcagccagagtgacagcactggtggctaaaaaagctcatttgcaatatctaagggactttaaattgaatcctaaccgccttcaagtgatacgtgagcgcattgataatactaagcaagatttggctaaaactacctcatctttgttaaatgcacaagaagctttagcagccttacaagctaaacaaagcagtctagaagctactattgctaccacagaacaccagttgactttgcttaaaaccttagctaacgaaaaggaatatcgccacttagacgaagatatagctactgtgcctgatttgcaagtagctccacctcttacgggcgtaaaaccgctatcatatagtaagatagatactactccgcttgttcaagaaatggttaaagaaacgaaacaactattagaagcttcagcaagattagctgctgaaaatacaagtcttgtagcagaagcgcttgttggccaaacctctgaaatggtagcaagtaatgccattgtgtctaaaatcacatcttcgattactcagccctcatctaagacatcttatggctcaggatcttctacaacgagcaatctcatttctgatgttgatgaaagtactcaaagagctcttaaagcaggagtcgtcatgttggcagctgtcggcctcacaggatttaggttccgtaaggaatctaag

SEQ ID NO: 9188 - protein, 873 aa, Streptococcus pyogenes
MDLEQTKPNQVKQKIALTSTIALLSASVGVSHQVKADDRASGETKASNTHDDSLPKPETIQEAKATIDAVEKTLSQQKAELTELATALTKTTAEINHLKEQQDNEQKALTSAQEIYTNTLASSEETLLAQGAEHQRELTATETELHNAQADQHSKETALSEQKASISAETTRAQDLVEQVKTSEQNIAKLNAMISNPDAITKAAQTANDNTKALSSELEKAKADLENQKAKVKKQLTEELAAQKAALAEKEAELSRLKSSAPSTQDSIVGNNTMKAPQGYPLEELKKLEASGYIGSASYNNYYKEHADQIIAKASPGNQLNQYQDIPADRNRFVDPDNLTPEVQNELAQFAAHMINSVRRQLGLPPVTVTAGSQEFARLLSTSYKKTHGNTRPSFVYGQPGVSGHYGVGPHDKTIIEDSAGASGLIRNDDNMYENIGAFNDVHTVNGIKRGIYDSIKYMLFTDHLHGNTYGHAINFLRVDKHNPNAPVYLGFSTSNVGSLNEHFVMFPESNIANHQRFNKTPIKAVGSTKDYAQRVGTVSDTIAAIKGKVSSLENRLSAIHQEADIMAAQAKVSQLQGKLASTLKQSDSLNLQVRQLNDTKGSLRTELLAAKAKQAQLEATRDQSLAKLASLKAALHQTEALAEQAAARVTALVAKKAHLQYLRDFKLNPNRLQVIRERIDNTKQDLAKTTSSLLNAQEALAALQAKQSSLEATIATTEHQLTLLKTLANEKEYRHLDEDIATVPDLQVAPPLTGVKPLSYSKIDTTPLVQEMVKETKQLLEASARLAAENTSLVAEALVGQTSEMVASNAIVSKITSSITQPSSKTSYGSGSSTTSNLISDVDESTQRALKAGVVMLAAVGLTGFRFRKESK

SEQ ID NO: 9189 - DNA, 879 bp, Streptococcus pyogenes
ttgctgacctttggaggtgcaagtgcggttaaggcggaagaaaatgaaaaagtaagagagcaagaaaagctcatacagcaactttctgaaaagctagtggaaattaatgacttacaaactttaaatggtgataaagagagtatacagtctctcgtagattatctgactcgaagaggaaaacttgaagaagaatggatggaatatttgaattctggtattcaacgcaaactttttgttggtccaaaaggacctgcaggtgaaaaaggagaacaaggtcctactggaaaacaaggcgagcgtggtgagaccggccctgcaggtccacgtggtgacaagggcgaaactggtgacaaaggagcccagggtccagtaggtcccgctggcaaggacggccaaaacggtaaagatggtcttccaggtaaagacggcaaggacggccaaaacggtaaagatggtcttccaggtaaagacggcaaggacggccaagacggtaaagatggcctcccaggtaaagacggtaaggatggccaaaatggcaaagatggtcttccaggtaaagacggtcaaccaggtaaaccagctcctaaaacaccagaggtccctcaaaacccagatactgcaccacatactccaaaaacccctcggatccctggtcaatcaaaagacgtgacacctgctcctcaaaacccttctaatagaggtctaaacaaaccacaaacacaaggtggtaatcagctcgcaaaaacaccggcagctcacgacacacacagacaattgccagcaacaggcgaaacaaccaatccattctttacagcagctgctgtagctatcatgacgacagctggagttgtagctgttgcaaaacgtcaagaaaacaac

SEQ ID NO: 9190 - protein, 293 aa, Streptococcus pyogenes
LLTFGGASAVKAEENEKVREQEKLIQQLSEKLVEINDLQTLNGDKESIQSLVDYLTRRGKLEEEWMEYLNSGIQRKLFVGPKGPAGEKGEQGPTGKQGERGETGPAGPRGDKGETGDKGAQGPVGPAGKDGQNGKDGLPGKDGKDGQNGKDGLPGKDGKDGQDGKDGLPGKDGKDGQNGKDGLPGKDGQPGKPAPKTPEVPQNPDTAPHTPKTPRIPGQSKDVTPAPQNPSNRGLNKPQTQGGNQLAKTPAAHDTHRQLPATGETTNPFFTAAAVAIMTTAGVVAVAKRQENN

SEQ ID NO: 9191 - DNA, 882 bp, Streptococcus pyogenes
atgataaaacgatgtaaaggaattggtctagccttaatggccttctttttggtagcttgtgtgaatcagcaccctaaaacggctaaagagactgaacagcagagaattgtagccacttcggttgctgtggttgatatctgtgaccgtttaaatttagacctcgttggggtttgtgatagtaaattatatacccttcctaaacgctatgatgctgttaagcgtgtgggtttacccatgaatcctgatatagagttgattgcttctttgaaaccaacttggattttgagtcccaattctttacaagaagatttggaacccaagtatcaaaaattggatactgagtatggttttttgaacttacgaagtgttgagggcatgtaccagtccattgatgatttagggaaccttttccaacgtcaacaagaagcaaaagaattgcgccagcaataccaggactattatcgtgctttccaagctaaacgtaaggggaagaaaaagcctaaagtgcttattcttatgggcttgccaggtagttatttggtggcgacgaaccaatcttatgtagggaatcttttggacttggcaggtggtgagaatgtttatcagtcagatgagaaagaatttctatcagctaatcctgaagacatgctggctaaggagcctgacttgattttacgaacagctcatgccattccagacaaggtaaaagtgatgtttgacaaagaatttgctgaaaatgatatttggaaacattttacggcagtcaaggaagggaaagtctatgatttggacaataccctgtttggcatgagtgctaaattgaactacccagaagccttggacaccttaacacagctttttgaccacgtgggagatcatccg

SEQ ID NO: 9192 - protein, 294 aa, Streptococcus pyogenes
MIKRCKGIGLALMAFFLVACVNQHPKTAKETEQQRIVATSVAVVDICDRLNLDLVGVCDSKLYTLPKRYDAVKRVGLPMNPDIELIASLKPTWILSPNSLQEDLEPKYQKLDTEYGFLNLRSVEGMYQSIDDLGNLFQRQQEAKELRQQYQDYYRAFQAKRKGKKKPKVLILMGLPGSYLVATNQSYVGNLLDLAGGENVYQSDEKEFLSANPEDMLAKEPDLILRTAHAIPDKVKVMFDKEFAENDIWKHFTAVKEGKVYDLDNTLFGMSAKLNYPEALDTLTQLFDHVGDHP

SEQ ID NO: 9193 - DNA, 951 bp, Streptococcus pyogenes
atgagaaaagaggctcaaaaggacatgaaacaaatgaataaactcattacaggagtggtaacgctggcgacagtcgtgaccttatcagcttgtcaatcatcacacaacaacaccaaactcgtctcgatgaaaggagacaccatcactgtcagtgacttctacaatgagaccaaaaacacagaactcgcacaaaaagccatgttaagcttggtgattagccgcgtttttgagacacaatatgccaacaaagtctctgacaaagaggttgaaaaagcctataaacaaaccgcagaccaatacggtacatcctttaagacagtcctagcacaatcaggcttaacgccagaaacctataaaaaacaaattcgcctcacaaaattagtcgaatatgccgtcaaagaacaagccaaaaacgaaaccatctcaaaaaaagactaccgtcaggcctatgacgcttataccccaaccatgaccgcagaaatcatgcagtttgaaaaagaagaggatgccaaagcagcgcttgaagccgtcaaagctgaaggggcagactttgcagctattgccaaagaaaaaaccactgcagccgataaaaaaacaacctatacgtttgactcaggcgaaacaaccctaccagcagaagtagttagagctgcatcaggcctcaaagaagggaacagatcagaaatcatcacagcgcttgatccagccacctcaaaacgcacctaccatatcatcaaagtcaccaaaaaagcaactaaaaaagcagactggaaagcgtaccaaaaacgcttgaaagacatcatcgtgactggcaaattaaaagaccctgacttccaaaacaaagtcatcgctaaagctcttgataaagcaaatgtcaaaatcaaagacaaagcatttgccaatatcttagcccagtttgcaaaacctaaccaaaaacaacctgcccaaaaa

SEQ ID NO: 9194 - protein, 317 aa, Streptococcus pyogenes
MRKEAQKDMKQMNKLITGVVTLATVVTLSACQSSHNNTKLVSMKGDTITVSDFYNETKNTELAQKAMLSLVISRVFETQYANKVSDKEVEKAYKQTADQYGTSFKTVLAQSGLTPETYKKQIRLTKLVEYAVKEQAKNETISKKDYRQAYDAYTPTMTAEIMQFEKEEDAKAALEAVKAEGADFAAIAKEKTTAADKKTTYTFDSGETTLPAEVVRAASGLKEGNRSEIITALDPATSKRTYHIIKVTKKATKKADWKAYQKRLKDIIVTGKLKDPDFQNKVIAKALDKANVKIKDKAFANILAQFAKPNQKQPAQK

SEQ ID NO: 9195 - DNA, 1533 bp, Streptococcus pyogenes
atgtctgtgaaagcgttatcgtttactaggaggattcgcatgataaacaaaaaaatatcacttggagttttaagtattctgacagccttttcgcttcaaagtgttagttatgcttgtactggttttattattggcaaagatttaaccaaagacggttctcttctttatggtcgaacagaagatcttgagccacaccataataaaaatttcattgtacgtctagcaaaggacaatcctgctggcgaaaaatggaaagacctctctaatggttttgagtaccccttgcctgagcattcttatcgctatagtgcgattcctgatgtaacacctaacaaaggcgtttatgacgaagctggttttaatgagtttggcgtctctatgtctgcaacagtatcagcttcagctaatgatgccatccaaaaaattgatccttacgtcaaaaatggcttagcggaatcatctatgaccagtgtcattttaccaagtgtcaaaacagcccgtgaaggtgtcgcattgatcgctaaaatagtcactgaaaaaggagctgctgaaggaaatattgttaccttggctgacaaagacggcatctggtacatggaaattctctctggtcaccaatacgttgccatcaaattcccagatgataaatacgctgtttttccaaataccttctatctcggacatgtcgatttcaatgataaggaaaatacgattgcctcagaagatgtggaaaaagtcgctaaaaaagccaaatcttataccgaagttgatggtaaatttcatattgccaaatcttacaatccaccactaaacgatgccaaccgctctcgctctttctcagggattaaatcacttgaccctgattcaaaagtaacttataaagacagcaattatgagttgctccaaagcactgataagaccttcagtctagaagatgcgatgaaactgcaacgtaatcgttttgaggggctggatcttaaaccacttgatcagatggcattagacggtaagggtaaaccaaaatccaaaaaagctgttaaaggttatgcttatcccatatcaaatcctaatgtcatggaagctcatattttccaactgaaaaaagacatccctgctgaattgggtggtgtcatgtggctatctattggcagtcctcgtaatgccccttacttgccataccttggcaatatcagtagaacctatgaagcctatcaagaaaaaagcacccaatataacgataagtcatggtattggacggtgtcacacattaatgatctcgtggctgctcatccaaaaccatttggaactaaagtgattgatgagatgaaaggcttggaaaaaacctggatagccgaacaagacaaaagcaccaaagaaatcagtgacttagtcgtcagtgaccccaaagctgctcaagaaaaagctgataagatttcactagatcgcgctgaaaaaaccttcaaacgcttaaaagctattgaagccaagttggttaaagaaaaacccaaaaacaagaaaggcttgaatagatca

SEQ ID NO: 9196 - protein, 511 aa, Streptococcus pyogenes
MSVKALSFTRRIRMINKKISLGVLSILTAFSLQSVSYACTGFIIGKDLTKDGSLLYGRTEDLEPHHNKNFIVRLAKDNPAGEKWKDLSNGFEYPLPEHSYRYSAIPDVTPNKGVYDEAGFNEFGVSMSATVSASANDAIQKIDPYVKNGLAESSMTSVILPSVKTAREGVALIAKIVTEKGAAEGNIVTLADKDGIWYMEILSGHQYVAIKFPDDKYAVFPNTFYLGHVDFNDKENTIASEDVEKVAKKAKSYTEVDGKFHIAKSYNPPLNDANRSRSFSGIKSLDPDSKVTYKDSNYELLQSTDKTFSLEDAMKLQRNRFEGLDLKPLDQMALDGKGKPKSKKAVKGYAYPISNPNVMEAHIFQLKKDIPAELGGVMWLSIGSPRNAPYLPYLGNISRTYEAYQEKSTQYNDKSWYWTVSHINDLVAAHPKPFGTKVIDEMKGLEKTWIAEQDKSTKEISDLVVSDPKAAQEKADKISLDRAEKTFKRLKAIEAKLVKEKPKNKKGLNRS

SEQ ID NO: 9197 - DNA, 1197 bp, Streptococcus pyogenes
atgtttacaaaaacgcaggaagctttggaggctcttggtgcagctatcactaccaaggaaattaaacaagaaccccgtttatggcaagaaaccatgacgttttttgaagaaacaagagattctctggattcttttttaaagagagtttgtaacagcgctaacagaaataacgttcatgtcatctttacaggtgcgggtacatctgagtacatcggtaataccatttgcccttacttgaagaaggtggggaatcggcagcgctatctctttgagagcgttgcttcaaccgatttggttgcggcgccagattattatcttgttgaggaagagacggtactattagtctcctttgctaggagtggtaatagtccagaaagtgtagcggctgttaacctggtcaatcaactagtgccaaatagttatcatttaaccattacctgcgccaaagatggagaactggcgaaaaaagcacagcaagatgagcgttcttacctttatttgatgcctgaagacgctaatgatgctggttttgccatgactggtagttttacctgtatgatgctagcggctcttttgatttttgatgatgctaacagtatagctcagaaagaagcttatgtgactgatatgattcttgctgggcaagctgttattgaccaagaaagacggctacaagagctagctgatttaggatttgaacgtttagtttatctaggttctgctggtttagccaagttaacccaagaagctcaattaaaaatgttagaattgacagctggacaagttgcgaccctctacgagtcctttatgggctttaggcatggtccgaaatcttttattaatgaccgtaccttagtcattggatttgtcaataatgatgcttacgtcagacagtacgatttggacatgttagaggaaatccaagcagatggcattgcccttaaaatcttggctctattgcaaggaggggatatcaacttttcagaggaccaatttcgactagacacccgtcacttattgccagacgcttacttagcttttcccatgattttagtcgcgcagaccttggccctcttaacggccgttacattaggaaattcccctgacaccccatctgcgacaggaacggttaatcgtgtggtcaaaggagtaacgattcacccttacccgactagtagtcgtcaatgcaacaaagct

SEQ ID NO: 9198 - protein, 399 aa, Streptococcus pyogenes
MFTKTQEALEALGAAITTKEIKQEPRLWQETMTFFEETRDSLDSFLKRVCNSANRNNVHVIFTGAGTSEYIGNTICPYLKKVGNRQRYLFESVASTDLVAAPDYYLVEEETVLLVSFARSGNSPESVAAVNLVNQLVPNSYHLTITCAKDGELAKKAQQDERSYLYLMPEDANDAGFAMTGSFTCMMLAALLIFDDANSIAQKEAYVTDMILAGQAVIDQERRLQELADLGFERLVYLGSAGLAKLTQEAQLKMLELTAGQVATLYESFMGFRHGPKSFINDRTLVIGFVNNDAYVRQYDLDMLEEIQADGIALKILALLQGGDINFSEDQFRLDTRHLLPDAYLAFPMILVAQTLALLTAVTLGNSPDTPSATGTVNRVVKGVTIHPYPTSSRQCNKA

SEQ ID NO: 9199 - DNA, 864 bp, Streptococcus pyogenes
atgaaacggattgttgtggcaaatgatctggttggtgttggtaaggtagccttgtctgctagtattcctttaatggcttcttgtttgttagagcaagttttattaccaacttgccttttatcaagccatactggcggaggacagaaccctgtgaagcatactacatcaagtatattagacgtttttttaacagattgggacaacaaaagaattaagtttgacggcatttttataggttattttacgacaacaagagatgggcaaaagctgctagaatggctttcaagaaagcaacttcccttaattttagatccaattatggcagataatggaaaactttatcaaggcttcagtcaaaaacatatagagattatgataaaacttactcaaaaagctgagcttgttttacctaatattagtgaggcttgtctattaacacaaacagcttatttagcaaaaaattatgatgaagaagatattagacaggtggctagaaaattagctaagcttggacctaaacaggttgtcattagcggaatctcttttgaggagggcagcattggttttgcttactatcagtcagattcagatcaattaacattccattttgggaagcaattcccttaccatttctatggtacaggagatatagcatcagctattataacagcaggattctattatcagctaccactaacacaaattctagatcttgttgtttcatttcttgaaaaagtattgcaaaatacccttacattaaaaagagatttaatcttaggtgttgcttatgaatctcatttaaattacttaactaaatcgtttaaaaagttgttggaggaaaaaaatgtcatctcaaaaattagc

SEQ ID NO: 9200 - protein, 288 aa, Streptococcus pyogenes
MKRIVVANDLVGVGKVALSASIPLMASCLLEQVLLPTCLLSSHTGGGQNPVKHTTSSILDVFLTDWDNKRIKFDGIFIGYFTTTRDGQKLLEWLSRKQLPLILDPIMADNGKLYQGFSQKHIEIMIKLTQKAELVLPNISEACLLTQTAYLAKNYDEEDIRQVARKLAKLGPKQVVISGISFEEGSIGFAYYQSDSDQLTFHFGKQFPYHFYGTGDIASAIITAGFYYQLPLTQILDLVVSFLEKVLQNTLTLKRDLILGVAYESHLNYLTKSFKKLLEEKNVISKIS

SEQ ID NO: 9201 - DNA, 651 bp, Streptococcus pyogenes
atgggaaaagaaataaaagtgaaatgctttttgcgtagatcagcttttggattagttgcggtgtcagcatcagtattagtcggttcaacagtatctgctgttgactcacctatcgaacagcctcgaattattccaaatggcggaaccttaactaatcttcttggcaatgctccagaaaaactggcattacgtaatgaagaaagagccattgatgaattaaaaaaacaagctattgaggataaagaagctacgacagctatagaagcagcaagttcagatgccttagaagcattagcggatcaaacagacgctttacaatcagaagaagctgcggttgttaaagcggataacgctgctagtgacgccttagaagcattggcggatcaaacagacgctttacaatcagaagaagctgaagtagttcaatcagataacgctgctagtgacgcctgggaaaaagcagcaactccaatcgctttagatgttaagaaaactaaagatacaaaacctgtagttaaaaaagaagaaagacaaaacgttaatacccttcctacaactggtgaagagtctaacccattctttacagctgctgcgcttgcaataatggtaagtacaggtgtgttagttgtaagttcaaagtgcaaagaaaat

SEQ ID NO: 9202 - protein, 217 aa, Streptococcus pyogenes
MGKEIKVKCFLRRSAFGLVAVSASVLVGSTVSAVDSPIEQPRIIPNGGTLTNLLGNAPEKLALRNEERAIDELKKQAIEDKEATTAIEAASSDALEALADQTDALQSEEAAVVKADNAASDALEALADQTDALQSEEAEVVQSDNAASDAWEKAATPIALDVKKTKDTKPVVKKEERQNVNTLPTTGEESNPFFTAAALAIMVSTGVLVVSSKCKEN

SEQ ID NO: 9203 - DNA, 1104 bp, Streptococcus pyogenes
atggaacataaatggaaattatggctatttatcgttggagtggtcttgttaataggcggagcttctgttctcattcagaaaggtcaagccaaggcttttagtcaaggcaagcctcaactaccagctaaaaaagtcaaatccactaaagtagatcccaatgcccctgttgatcaaaaagtgatttacctggctggaggctgtttctggggcgttgaagaatatttttcacaagtggatggcgttctagatgcggtgtcaggctatgccaatggtagaggcgataccaccaactaccagttaattcatcagactggtcatgcagaaaccgttgaagtggcctatgatgcgaaccgtattagcttgaaagaattattactgcattttttccgaattattgacccaaccagtcttaataagcaaggaaatgatcgcggtagtcaataccgaactgggatttactatactgacaaagcagatttagctattattgatgaggtcttcaaagaaaaagctaaggattacaagaaaaaaatagtggttgaaaaagcaccattgaaacactttattaaggcagaagactaccaccaagattacctcaagaaaaatccaaatggctactgccatattgacatcaaccaagcgacttatcctgtgattgatgaaagcaagtacccaaaaccaagtgccactgagatcaaggaaaaactatctgcagacgaataccgagtgacgcaaaaaaacgaaactgaaaaagctttttctaatcgctactgggattcttttgatgcaggaatttacgtagacgttgtgacaggagaaccgcttttctcttcaaaagacaaatttgaatcaggttgtggttggccaagctttagccgccccatcagcccagacgttgtccgctacaaggaagataagagtttcaatatgacgagaacagaagtgcgcagccgttcagggaattctcatctggggcatgtctttactgacggacctaaagaccaaggcggccttcgttactgcatcaatagcttgtctattacctttattccaaaagctgatatggaagctaagggctatgggtatttattatcatctgtagaa

SEQ ID NO: 9204 - protein, 368 aa, Streptococcus pyogenes
MEHKWKLWLFIVGVVLLIGGASVLIQKGQAKAFSQGKPQLPAKKVKSTKVDPNAPVDQKVIYLAGGCFWGVEEYFSQVDGVLDAVSGYANGRGDTTNYQLIHQTGHAETVEVAYDANRISLKELLLHFFRIIDPTSLNKQGNDRGSQYRTGIYYTDKADLAIIDEVFKEKAKDYKKKIVVEKAPLKHFIKAEDYHQDYLKKNPNGYCHIDINQATYPVIDESKYPKPSATEIKEKLSADEYRVTQKNETEKAFSNRYWDSFDAGIYVDVVTGEPLFSSKDKFESGCGWPSFSRPISPDVVRYKEDKSFNMTRTEVRSRSGNSHLGHVFTDGPKDQGGLRYCINSLSITFIPKADMEAKGYGYLLSSVE

SEQ ID NO: 9205 - DNA, 1452 bp, Streptococcus pyogenes
atggctaaaaataacacgaatagacactattcgcttagaaaattaaaaacaggaacggcttcagtagcggtagctttgactgttttaggggcaggttttgcgaatcaaacagaggttaaggctaacggtgatggtaatcctagggaagttatagaagatcttgcagcaaacaatcccgcaatacaaaatatacgtttacgttacgaaaacaaggacttaaaagcgagattagagaatgcaatggaagttgcaggaagagattttaagagagctgaagaacttgaaaaagcaaaacaagccttagaagaccagcgtaaagatttagaaactaaattaaaagaactacaacaagactatgacttagcaaaggaatcaacaagttgggatagacaaagacttgaaaaagagttagaagagaaaaaggaagctcttgaattagcgatagaccaggcaagtcgggactaccatagagctaccgctttagaaaaagagttagaagagaaaaagaaagctcttgaattagcgatagaccaagcgagtcaggactataatagagctaacgtcttagaaaaagagttagaaacgattactagagaacaagagattaatcgtaatcttttaggcaatgcaaaacttgaacttgatcaactttcatctgaaaaagagcagctaacgatcgaaaaagcaaaacttgaggaagaaaaacaaatctcagacgcaagtcgtcaaagccttcgtcgtgacttggacgcatcacgtgaagctaagaaacaggttgaaaaagatttagcaaacttgactgctgaacttgataaggttaaagaagacaaacaaatctcagacgcaagccgtcaaggccttcgccgtgacttggacgcatcacgtgaagctaagaaacaggttgaaaaagatttagcaaacttgactgctgaacttgataaggttaaagaagaaaaacaaatctcagacgcaagccgtcaaggccttcgccgtgacttggacgcatcacgtgaagctaagaaacaagttgaaaaagctttagaagaagcaaacagcaaattagctgctcttgaaaaacttaacaaagagcttgaagaaagcaagaaattaacagaaaaagaaaaagctgaactacaagcaaaacttgaagcagaagcaaaagcactcaaagaacaattagcgaaacaagctgaagaacttgcaaaactaagagctggaaaagcatcagactcacaaacccctgatacaaaaccaggaaacaaagctgttccaggtaaaggtcaagcaccacaagcaggtacaaaacctaaccaaaacaaagcaccaatgaaggaaactaagagacagttaccatcaacaggtgaaacagctaacccattcttcacagcggcagcccttactgttatggcaacagctggagtagcagcagttgtaaaacgcaaagaagaaaac

SEQ ID NO: 9206 - protein, 484 aa, Streptococcus pyogenes
MAKNNTNRHYSLRKLKTGTASVAVALTVLGAGFANQTEVKANGDGNPREVIEDLAANNPAIQNIRLRYENKDLKARLENAMEVAGRDFKRAEELEKAKQALEDQRKDLETKLKELQQDYDLAKESTSWDRQRLEKELEEKKEALELAIDQASRDYHRATALEKELEEKKKALELAIDQASQDYNRANVLEKELETITREQEINRNLLGNAKLELDQLSSEKEQLTIEKAKLEEEKQISDASRQSLRRDLDASREAKKQVEKDLANLTAELDKVKEDKQISDASRQGLRRDLDASREAKKQVEKDLANLTAELDKVKEEKQISDASRQGLRRDLDASREAKKQVEKALEEANSKLAALEKLNKELEESKKLTEKEKAELQAKLEAEAKALKEQLAKQAEELAKLRAGKASDSQTPDTKPGNKAVPGKGQAPQAGTKPNQNKAPMKETKRQLPSTGETANPFFTAAALTVMATAGVAAVVKRKEEN

SEQ ID NO: 9207 - DNA, 1266 bp, Streptococcus pyogenes
atgtttcagttaagaaaaaaaatgacgcgcaaacaattagccttgttgagtgctggagtgttgacctgtgtggttggtggtagctacttgataatgaaccatcaacaacaagaaattgtctctagtgtcaacaaagtaaaagccttaaccataaaagaagccatggaacaaggaaaagatatcagcttgaccttagctggcgaagtaacagctaacaacagcagcaaagtcaaaatcgactcaagtaaaggagaagtcaaagaggtctttgttaaaaaaggcgatgttgtcaaagtaggacaacccttgtttagctatgaaacgtcacagcggttaacggctcaaagttcagaatttgatgttcaaaccaaagccaatcagctccaagttgctaaaaccaatgcagcattgaagtgggaaacctacaatcgcaaggtcaatgaaatcaacaccctaaaatctcgctacaacactgcaccagatgagagcttactagagcaaattcgcagcgcagaagacagtgtatcccaagcactaagcgatgccaaaacagcagatagcgatgtcaaaaccgctcaaatcgaactcgataaagctaatgctactgccacaacggaaaaaggtaaactagagtatgacaccgttaagtcagacaccgcaggaaccattgttagtctaaatactgatttgccaaatcaatcaaaatccaaaaaagaaaatgaaacttttatggaaattatcgacaaatcaaaaatgttagtcaaaggtaacattagtgaatttgaccgtgacaagttaaaaatcggtcaaaaagtcgaagtgattgaccgcaaagacaactctaaaaaatggactggaaaagtaacccaagttggcaacctcaaagcagaggaaaaaggccaaggtcaaggccaaggtggcaatgaccaacaagataatccaaaccaagcaaaattcccttatgttattgaacttgaccaatcagacaagcagccactcattggctcacacacctatgttaatgtgctcaacaatgttccagaagctggcaagatcgtattgaaagaaacctttacaatggcagaaaatggaaaaacctatgtgtggaaagttgataaaaacaaggtcaaaaaacaagaaatcaagactaagcccttctcaaaaggttatgttgaggtaacaagtggcttgactatgcaagataagattgctcagccgcttcctggcatgaaagacggtatggaggtaggaagtattgttaaacct

SEQ ID NO: 9208 - protein, 422 aa, Streptococcus pyogenes
MFQLRKKMTRKQLALLSAGVLTCVVGGSYLIMNHQQQEIVSSVNKVKALTIKEAMEQGKDISLTLAGEVTANNSSKVKIDSSKGEVKEVFVKKGDVVKVGQPLFSYETSQRLTAQSSEFDVQTKANQLQVAKTNAALKWETYNRKVNEINTLKSRYNTAPDESLLEQIRSAEDSVSQALSDAKTADSDVKTAQIELDKANATATTEKGKLEYDTVKSDTAGTIVSLNTDLPNQSKSKKENETFMEIIDKSKMLVKGNISEFDRDKLKIGQKVEVIDRKDNSKKWTGKVTQVGNLKAEEKGQGQGQGGNDQQDNPNQAKFPYVIELDQSDKQPLIGSHTYVNVLNNVPEAGKIVLKETFTMAENGKTYVWKVDKNKVKKQEIKTKPFSKGYVEVTSGLTMQDKIAQPLPGMKDGMEVGSIVKP

SEQ ID NO: 9209 - DNA, 813 bp, Streptococcus pyogenes
atgaatctacttggatcaagacgggttttttctaaaaaatgtcggctagtaaaattttcaatggtagctcttgtatcagccacaatggctgtaacaacagtcacacttgaaaatactgcactggcacgacaaacacaggtctcaaatgatgttgttctaaatgatggcgcaagcaagtacctaaacgaagcattagcttggacattcaatgacagtcccaactattacaaaaccttaggtactagtcagatcactccagcactctttcctaaagcaggagatattctctatagcaaattagatgagttaggaaggacgcgtactgctagaggtacattgacttatgccaatgttgaaggtagctacggtgttagacaatctttcggtaaaaatcaaaaccccgcaggctggactggaaaccctaatcatgtcaaatataaaattgaatggttaaatggtctatcttatgtcggagatttctggaatagaagtcatctcattgcagatagtctcggtggagatgcactcagagtcaatgccgttacagggacacgtacccaaaatgtaggaggtcgtgaccaaaaaggcggcatgcgctataccgaacaaagagctcaagaatggttagaagcaaatcgtgatggctatctttattatgaagctgctccaatctataacgcagacgagttgattccaagagctgtcgtggtatcaatgcaatcttctgataataccatcaacgagaaagtattagtttacaacacagctaatggctacaccattaactaccataacggtacacctactcagaaa

SEQ ID NO: 9210 - protein, 271 aa, Streptococcus pyogenes
MNLLGSRRVFSKKCRLVKFSMVALVSATMAVTTVTLENTALARQTQVSNDVVLNDGASKYLNEALAWTFNDSPNYYKTLGTSQITPALFPKAGDILYSKLDELGRTRTARGTLTYANVEGSYGVRQSFGKNQNPAGWTGNPNHVKYKIEWLNGLSYVGDFWNRSHLIADSLGGDALRVNAVTGTRTQNVGGRDQKGGMRYTEQRAQEWLEANRDGYLYYEAAPIYNADELIPRAVVVSMQSSDNTINEKVLVYNTANGYTINYHNGTPTQK

SEQ ID NO: 9211 - DNA, 1233 bp, Streptococcus pyogenes
atgataaaaaggtgggttatccttttttttatggtattaacttgttcagggtttggtaaaacagttctcgcagctgattttcaagtgggagcagaacatgcgattgtcgtagaggcagactctgggagagttctgtatgagaaagacgctaagacgccagatgctattgcctctttgaccaaattggtgacggcttatctggttttagataaggttaaatcaggccagctgcaattatcagatcaagttaatctctcagattatgccttcgagttaacaaaagataggtctttaagtaatgtaccttttgacaaaaaaacttattcagttcaagacctgttgacagctactttggtagcaagctcaaatagcgctgctattgcgttagccgaaaaagtggcgggctcagagcttcattttgtaaatcaaatgagagaacagctatctcattgggggattacttctggtaaaatcctcaacgcttcaggactgccgaatgaggtgctaaaggaccatcgttatcctggttctgcgttggaagaagagaatatgttgagtgctcaggatgttgccattgtgacgatgcatttactggaagattttcctgagattttagagatcactaaacaaacagaagttgattttgctggtaattctattaaaagttttaatcaactcttaccaggtatggctaagggtagagcaggagtggatgggctaaagacaggaacgacagatttggcaggtcattgccttgtggtaacttctattgaaaatggtatgaggctgattaccgttattctaaatgctgatggatctgataaaaaccaaaacacgcggtttgagcaagcaaatcgcttgttggactatgtggctagaacttattgtcgtcgtaagattcttaaaaaaggaagtcttgtctcggagcgatcgctccctattcaagatggccaagtaaaagaactaccgatatctgttgccgaagatgtaaccatcattttgcaacagggtgaacaagttcccaaacctaaacaatttatgatatcagagacttctttattagcaccgattactaaaggtgaagtggttgcttatttgacgtctccaagaataacagatcagtcagtgaggtatttaaaggaacctaagcgtattcctcttaaagctagccaatctctaaaaaaagcctctgacttacagctgtggtggcgagattttcttgaaaaaagacgt

SEQ ID NO: 9212 - protein, 411 aa, Streptococcus pyogenes
MIKRWVILFFMVLTCSGFGKTVLAADFQVGAEHAIVVEADSGRVLYEKDAKTPDAIASLTKLVTAYLVLDKVKSGQLQLSDQVNLSDYAFELTKDRSLSNVPFDKKTYSVQDLLTATLVASSNSAAIALAEKVAGSELHFVNQMREQLSHWGITSGKILNASGLPNEVLKDHRYPGSALEEENMLSAQDVAIVTMHLLEDFPEILEITKQTEVDFAGNSIKSFNQLLPGMAKGRAGVDGLKTGTTDLAGHCLVVTSIENGMRLITVILNADGSDKNQNTRFEQANRLLDYVARTYCRRKILKKGSLVSERSLPIQDGQVKELPISVAEDVTIILQQGEQVPKPKQFMISETSLLAPITKGEVVAYLTSPRITDQSVRYLKEPKRIPLKASQSLKKASDLQLWWRDFLEKRR

SEQ ID NO: 9213 - DNA, 1257 bp, Streptococcus pyogenes
atgtcatggaattggaaaaaaacatctgtgcttggaactttatccttagcttcagtgctacccctaactgcttgcgtaagtggtggtggtaaaggcgttaaggaaacagacggaaagactattgtagtctctgttgatgagggatatgttgattacattaagagtattaagggtgagtttgaaaaagaacataaagtcaccgttaaagtcaaaaaagaaggtatgatggatactcttgataagctatcaacggatggtccaacaggagcttcaccagatgtctttttagcaccttttgaccgtgtaggtggtttaggaactgaaggtcaaatcgctgaggttactttaggaaacagcaaagagtttgatgatacggttaagaaattagtaaccattgatggtaaaacttatggtgcaccagacgtaattgaaactttggtaacttattataataaggatttagtgcctcaagcacctaaaagctttactgaattagaagtcttacaaaaagattctaagtttgcttttgcctctgaaccaggaaaatctgtaggtttcttggcgaaatggacagacttctattatggttatggtttaattgccggttatggcggttatatctttggtgataaaggaaccaaaccaagtgatttaggcctaggtaacgacggaactgttgaagggttaaactacgcgaaacagtggtatggcacttggcctcaaggaatgcaagacactaaaaaagctggtgattttatcactgaacaatttatttctaaaaaagctggtgtcattattgatggtccatgggcagctagctcctttaaagatgctggtgttaactttggggtaatggaaattcctactttgacaaatggtaaaaaataccaaccgttcgcaggtggtaaagcttgggttatttcaaactattctaaaggaaaaacgactgctcaaaaattccttgattatgtgaccaatgctgaaaaccaaaaacgtttctatgataaaacacaagaaattccagctaacttaacagcacgtaactatgcttctaaagagggtaatgagttaacgaaagctgtgattagtcagtttgagagcgcacaaccaatgccaaatattccagaaatggctgaagtttgggaaccaggtgcaaatatgttctttaacgtggcttctggtaaggaagaagcatctaaagctgcaaaagaagcagcaaaaactattaaggaagctattgaacaaaaatacgctgaa

SEQ ID NO: 9214 - protein, 419 aa, Streptococcus pyogenes
MSWNWKKTSVLGTLSLASVLPLTACVSGGGKGVKETDGKTIVVSVDEGYVDYIKSIKGEFEKEHKVTVKVKKEGMMDTLDKLSTDGPTGASPDVFLAPFDRVGGLGTEGQIAEVTLGNSKEFDDTVKKLVTIDGKTYGAPDVIETLVTYYNKDLVPQAPKSFTELEVLQKDSKFAFASEPGKSVGFLAKWTDFYYGYGLIAGYGGYIFGDKGTKPSDLGLGNDGTVEGLNYAKQWYGTWPQGMQDTKKAGDFITEQFISKKAGVIIDGPWAASSFKDAGVNFGVMEIPTLTNGKKYQPFAGGKAWVISNYSKGKTTAQKFLDYVTNAENQKRFYDKTQEIPANLTARNYASKEGNELTKAVISQFESAQPMPNIPEMAEVWEPGANMFFNVASGKEEASKAAKEAAKTIKEAIEQKYAE

SEQ ID NO: 9215 - DNA, 1218 bp, Streptococcus pyogenes
atgaaattacttggaaaatggctattcttcttgatgtttctgactttttgcgtcagtttttggcagaaagactatcagcggattgcctttgaaaaagaacacaaactttatcaagatttagtggcacctttttaccaaaactatcctaaattacgagaactccagctttcagaagctattaaattacgccacgacttgcttgattatgttcgaaagctcgataaggacggatggtcctataaagccatccaaaaaggataccttgaacaactcgctgttagaggaaactcttatcatttcgaacaactttatagtcgcattcgcctgataggatcacctgactttcaaaagctctggcaacaagaggagatggcacagacgcctcaagaagctcaaaaacggttacaactgctcttgacgtatttaaagatgccagacgagttgacaggacaatcaaaacaaacacagcaagtattggcacaattaagtccaaagctatcgccaacagatcctttttgggaccaattatctaccctgattcaggcttattatgttaatctcgaacacattccttatagccgttttaatcggaaaattcatcaactccgttacctcatatcaacccagcaaacggagtgggttcgctcacattatgggaataaagggaaaaccgatgcggatgccttagccaaatatttggctactctagaagatgacgattatgctctttatgaatcttctagataccataataaggttgctagtattttagatgctaatggcaatcatcaggcagtctatacagacaatattcctcaagccaactataagattttaattcattttcactcagagtttattttgtcagaatctggacaatttttagtagcactagatcctgataacctaacgcgaaatagtattgtcaatggttcttctttcaattatggcaaccaaaacgatgacttgcaccgtctgcttgatattgaccctattctgctttttgatccggcttttattgaaaaagcaattaatagtcctgatgcaacttttctagttcccgatttagaacagcaaagggataagcacaatcccatttacagcagaaatggcaaatcatctaagcagctaacacgcgctgccgttaaaaaattcaaaaaattgcttcaccattatcaagaaacaagaggtgacaataagacctcaaaaacacagcat

SEQ ID NO: 9216 - protein, 406 aa, Streptococcus pyogenes
MKLLGKWLFFLMFLTFCVSFWQKDYQRIAFEKEHKLYQDLVAPFYQNYPKLRELQLSEAIKLRHDLLDYVRKLDKDGWSYKAIQKGYLEQLAVRGNSYHFEQLYSRIRLIGSPDFQKLWQQEEMAQTPQEAQKRLQLLLTYLKMPDELTGQSKQTQQVLAQLSPKLSPTDPFWDQLSTLIQAYYVNLEHIPYSRFNRKIHQLRYLISTQQTEWVRSHYGNKGKTDADALAKYLATLEDDDYALYESSRYHNKVASILDANGNHQAVYTDNIPQANYKILIHFHSEFILSESGQFLVALDPDNLTRNSIVNGSSFNYGNQNDDLHRLLDIDPILLFDPAFIEKAINSPDATFLVPDLEQQRDKHNPIYSRNGKSSKQLTRAAVKKFKKLLHHYQETRGDNKTSKTQH

SEQ ID NO: 9217 - DNA, 900 bp, Streptococcus pyogenes
atgacacagcaatcaatgttactaagtattgagcaagtaaataaatcctatggtaaaaatcaggttttaagtgatatctcttttgatatttacaaaggagaaatttgcggccttgtgggtcaaaatggtgctggaaagacaacgttaatgcgtattttatctggcctaattggaaaagattcagggcaaatcaaacagttacaaccctatcgaatgggatcaattattgagtcaccgacactttatcccaatatgacagctcatgataatctttactatgcagcgttgcaattgagattagctgatgcaaaagagcgcatacatgaggttttggaacttattgggttagaaaaagtgagcaaaaagaaaaaggtgaaagattattctttagggatgcgccaacgtttggctattggtctttcgatactggattttccagaatttttaatcttggatgaacccattaatggtcttgatccagcaggaatcaaagaaatgcgtcagattattttgaacctaagagattgctatggtattacgattttgatttccagtcatattttatcagaattagacttagttgttgatcgttacgtgattatgcataaaggcaaagttattaagagtatggacaaagcagagcttaaagctcaagtaaaagtacaaattgcccttcatacaagcgatgatcagctggtaaaaaatagacttttagaattggggcttagagttgagactgatggtcagatgctactaataaaaccaactttatcagtaatggagcttatcaaaattgttctagatctgcctgttgagatttttgacatttatcatcatcaagtgagctttgaacattattacctcgatttgttaggtaaagatgcagcatcaccattaatt

SEQ ID NO: 9218 - protein, 300 aa, Streptococcus pyogenes
MTQQSMLLSIEQVNKSYGKNQVLSDISFDIYKGEICGLVGQNGAGKTTLMRILSGLIGKDSGQIKQLQPYRMGSIIESPTLYPNMTAHDNLYYAALQLRLADAKERIHEVLELIGLEKVSKKKKVKDYSLGMRQRLAIGLSILDFPEFLILDEPINGLDPAGIKEMRQIILNLRDCYGITILISSHILSELDLVVDRYVIMHKGKVIKSMDKAELKAQVKVQIALHTSDDQLVKNRLLELGLRVETDGQMLLIKPTLSVMELIKIVLDLPVEIFDIYHHQVSFEHYYLDLLGKDAASPLI

SEQ ID NO: 9219 - DNA, 372 bp, Streptococcus pyogenes
atgtccgccaagaaaactttttttgcaagtaatttaaagtaccttagattaaaaaagaacatggaacaattagaacttgctaatctcctaggacgaaaaagctcttcttcaatcagtgagtgggaaaaaggaaaatatactccaaagtctggtctattaagtgatattgctgctatctttgatgttagtttaaccgccctaatggaagaagatttaaccttagaaaataagggagtctcttatcagttgccacaacgagagttagcgatgatttcagaacaattatccgaaaataactacactaagtgggttgacttcgcacaaattcttttagaacaacaagctaaagaagatcgtgaattagataaccac

SEQ ID NO: 9220 - protein, 124 aa, Streptococcus pyogenes
MSAKKTFFASNLKYLRLKKNMEQLELANLLGRKSSSSISEWEKGKYTPKSGLLSDIAAIFDVSLTALMEEDLTLENKGVSYQLPQRELAMISEQLSENNYTKWVDFAQILLEQQAKEDRELDNH

SEQ ID NO: 9221 - DNA, 909 bp, Streptococcus pyogenes
atggtatctgtttcccttataatgagtgtaatatactattttaagaccatacatgataaattgagttttgttacccaaagatggttaggtgattacaaagctcgtatagaactattatttctacttcttatcctttgttggattgtactcatgaaggtattagttaaagattttttgctattttttatagttgttgacgcaagcacgttgttttgtctagtggtaatttcttgcatcttttattatttagaaaactccaaacaaaattttgactatgaaaatagaagactgaactattttatgaaatcagaggaaaacatgagagtggagttctcaaattatttgcatgatgatgttttacaaaatatcatagcgataaaaaacttgttttctctagaaaatagtaatataacacatggttttattgttaatgagttgaatgatttagtttctggtatcagagatgaaatggatacttaccacccaatagttcccgctaatcaaacaatgaaagaaaacatacagtctctttttgatgatattgttaaaagtagaaaaagtaataccttattgtattttaactgttcagataatatggtagtgccatccccatatggagatattgtttataggtttataaaagagctaataaacaatgctataaaatatggagatggaaaagacattcgtttatctttaacgattcaatctgatattattatcattgaggagagcaatcaagtagtggaaaaagtacactctataaattatggcagaggattgaaatcatttcaagaaacactagcagcttttgatggagatctagaactacaaatggatactaaacaatttactatcagaatattacttcccatagattggaaattgtgttatgaagattttattaat

SEQ ID NO: 9222 - protein, 303 aa, Streptococcus pyogenes
MVSVSLIMSVIYYFKTIHDKLSFVTQRWLGDYKARIELLFLLLILCWIVLMKVLVKDFLLFFIVVDASTLFCLVVISCIFYYLENSKQNFDYENRRLNYFMKSEENMRVEFSNYLHDDVLQNIIAIKNLFSLENSNITHGFIVNELNDLVSGIRDEMDTYHPIVPANQTMKENIQSLFDDIVKSRKSNTLLYFNCSDNMVVPSPYGDIVYRFIKELINNAIKYGDGKDIRLSLTIQSDIIIIEESNQVVEKVHSINYGRGLKSFQETLAAFDGDLELQMDTKQFTIRILLPIDWKLCYEDFIN

SEQ ID NO: 9223 - DNA, 1773 bp, Streptococcus pyogenes
gtgaaccaaggaaaaataataaccgtttcgggacctcttgttgtggcttctgggatgcaagaagctaatattcaagatatttgtcgtgtgggacatcttggcttagtcggagaaattattgaaatgcgtcgcgatcaagcgtctattcaggtttatgaggaaacatcagggatcggtccaggagaaccagtagtgactactggttgtcctttgtcggtcgagttaggcccgggcctgatttcagaaatgtttgacggtattcagcgaccgcttgatcgttttcaaaaagcaacggacagcgactttttaatccgtggtgtggctatcccaagtcttgatcgaaaggctaagtgggcatttattcccaagctaagtgttggtcaagaagtagttgcaggtgatattttaggaactgtgcaagaaacagctgtcattgagcaccgtatcatggttccttataaagtttcagggaccttggtggctattcatgcaggggacttcacagtaacagatacagtttatgaaattaagcaggaagacggttccatttaccaaggtagcctcatgcagacttggccagttcgtcaaagtcgccctgttgctcaaaagcttatcccagtcgaacctttggttacaggtcaacgggttattgacacctttttccctgttacaaaaggtggtgccgctgccgttcctggaccatttggggcaggaaaaacagttgtgcagcatcaaatagctaaatttgccaacgttgatattgttatttatgtcggttgtggggaacgcggcaacgagatgaccgacgttttgaatgagtttccagagttaattgacccaaatacaggccagtccattatggagcgcacggtgttaattgcaaacacctctaatatgccagtagcagcgcgtgaagcgtcgatttacacaggtattaccattgccgaatatttccgtgatatgggctattctgtggctatcatggcagactcgacatcacgttgggcagaagctctgcgcgagatgtcaggacgcctacaagaaatgcctggtgatgaaggctacccggcttacttagggagtcgtattgccgaatattatgaacgggctggtcgtgttcggaccttgggaagtcaagaacgtgagggaaccattacagccatcggcgcggtttctcctcctggaggggatatttcagagcctgtcactcaaaacacccttcggattgtcaaagttttctgggggctcgacgcgcctcttgcgcaacggcgtcacttcccagcgattaactggctgacgtcttattcattgtatcaagatgatgtaggaagctatattgaccgtaaacagcaatctaattggtccaacaaggtaactcgtgccatggctattttgcagcgtgaagccagtctagaagaaattgtacgcttggtggggcttgattcactgtctgaacaagatcgtttgaccatggctgttgcccggcaaattcgggaggattatctccagcaaaatgcctttgattcggtggatacctttacttcctttccgaaacaagaggccatgctaaccaatattttgacctttaatgaggaagccagcaaagccctttctttgggagcttattttaatgagattatggaaggcactgctcaggtacgcgatcgcatcgcacgcagcaaatttatcccagaagaaaacttagagcagattaaagggcttactcagaaggttaccaaagagattcaccacgttttagcaaagggaggaatt

SEQ ID NO: 9224 - protein, 591 aa, Streptococcus pyogenes
VNQGKIITVSGPLVVASGMQEANIQDICRVGHLGLVGEIIEMRRDQASIQVYEETSGIGPGEPVVTTGCPLSVELGPGLISEMFDGIQRPLDRFQKATDSDFLIRGVAIPSLDRKAKWAFIPKLSVGQEVVAGDILGTVQETAVIEHRIMVPYKVSGTLVAIHAGDFTVTDTVYEIKQEDGSIYQGSLMQTWPVRQSRPVAQKLIPVEPLVTGQRVIDTFFPVTKGGAAAVPGPFGAGKTVVQHQIAKFANVDIVIYVGCGERGNEMTDVLNEFPELIDPNTGQSIMERTVLIANTSNMPVAAREASIYTGITIAEYFRDMGYSVAIMADSTSRWAEALREMSGRLQEMPGDEGYPAYLGSRIAEYYERAGRVRTLGSQEREGTITAIGAVSPPGGDISEPVTQNTLRIVKVFWGLDAPLAQRRHFPAINWLTSYSLYQDDVGSYIDRKQQSNWSNKVTRAMAILQREASLEEIVRLVGLDSLSEQDRLTMAVARQIREDYLQQNAFDSVDTFTSFPKQEAMLTNILTFNEEASKALSLGAYFNEIMEGTAQVRDRIARSKFIPEENLEQIKGLTQKVTKEIHHVLAKGGI

SEQ ID NO: 9225 - DNA, 1413 bp, Streptococcus pyogenes
atgagcgttctcaaagaatatcggacggttagcgaagtggttggccctttgatgattgttgatcaagttgcaggagtgcactacaacgaattggtagatattactttgcataatggagaaaggcgtaaaggtcaagtcttagaagtccaaggtgacaaggctatggtacagctatttgaaggatcaactggcatcaacctagccaaaaccaaggttcgatttacagggcatcctttggaattagccgtatcagaagatatggtagggcgcatctttgatggaatggggcagcccatagacggcggtccagaacttattcccgaaaaataccttgatattgatggtcaagcgatcaatcctgtcgctcgtgattacccagacgaatttatccagacaggtatctcagctattgatcacctcaataccctcgttcgtggtcaaaagttaccagttttttcgggctcagggttacctcataatgaattggccgcacagattgctcgtcaggcaactgttctaaactctgatgataactttgcggttgtgtttgcagctatgggtattacttttgaagaggcagaattctttatgaatgacttgcgtgaaacgggtgccattgatcgatctgttttatttatcaatttagctaatgaccctgctattgaacgcattgcaacaccacgtatagctctgacaacagccgaatacttggcttatgaaaaaggtatgcatgttttagtcatcatgacagatatgacaaattattgtgaagccttacgagaagtatcagccgctcgcagagaagttccaggcagacgaggttatcctggctatctctatactaatctctccaccttatatgaacgggctggtcgcttgatcgggaaaaaagggtcagtgactcaaattcctattttaaccatgccagaagatgacattacccaccctatccccgatttgacaggttatattaccgaaggtcagattattttgtcgcaagaactatataaaaatggttttagaccgcctattaatgtcttgccatcgctatctcgcctaaaagataaaggctcaggtgaaggtaagactcgacaagaccatgctgctacaatgaatcagctctttgcagcctatgcccaaggaaaacaagctaaggaattggctgttgtgctcggtgaatcagccctttctgaaacggataaactatatgtggcctttaccaaccggtttgaagaagaatacattaaccaaggattttacaccaaccgtagcattgaagaaagtcttgacttgggttgggaattgttgtcgattttgccacgtaccgaattaaaacgcattaaagatgatatgttagatcgttatttgcctaaagcagataccacgatgacaaaggtttttgttgcaaatgat

SEQ ID NO: 9226 - protein, 471 aa, Streptococcus pyogenes
MSVLKEYRTVSEVVGPLMIVDQVAGVHYNELVDITLHNGERRKGQVLEVQGDKAMVQLFEGSTGINLAKTKVRFTGHPLELAVSEDMVGRIFDGMGQPIDGGPELIPEKYLDIDGQAINPVARDYPDEFIQTGISAIDHLNTLVRGQKLPVFSGSGLPHNELAAQIARQATVLNSDDNFAVVFAAMGITFEEAEFFMNDLRETGAIDRSVLFINLANDPAIERIATPRIALTTAEYLAYEKGMHVLVIMTDMTNYCEALREVSAARREVPGRRGYPGYLYTNLSTLYERAGRLIGKKGSVTQIPILTMPEDDITHPIPDLTGYITEGQIILSQELYKNGFRPPINVLPSLSRLKDKGSGEGKTRQDHAATMNQLFAAYAQGKQAKELAVVLGESALSETDKLYVAFTNRFEEEYINQGFYTNRSIEESLDLGWELLSILPRTELKRIKDDMLDRYLPKADTTMTKVFVAND

SEQ ID NO: 9227 - DNA, 285 bp, Streptococcus pyogenes
atgacaaaacgtaattcaaaagcctatatattatggcaaaaaattatcaaaattttaggaattattgcactaattggtacttttttcctcgctttttggctgtatagactaggtatattaaacgatagtaatgctcttaaagacttagtgcagcgctatagattatgggggccgtttgtttttattgtcgtgcagatcatacagattgtttttcctgtgattcctggaggccttacgacagttgcaggttttttaatctttggcccctgtaacaggttttattta

SEQ ID NO: 9228 - protein, 95 aa, Streptococcus pyogenes
MTKRNSKAYILWQKIIKILGIIALIGTFFLAFWLYRLGILNDSNALKDLVQRYRLWGPFVFIVVQIIQIVFPVIPGGLTTVAGFLIFGPCNRFYL

SEQ ID NO: 9229 - DNA, 309 bp, Streptococcus pyogenes
atgaaatctattatgttagtttgtaatgccggtatgtcaactagtatgttggtgactaagatgcaaaaagcagcccaagcgcgtgaccttgaagtttctatttgggcagttcctgtgagtgaagctgacaacgaaatggctgctaatagcattgacgttctcttgttaggtccacaagtcaaattcttactaaaggattttaaagataagtttgaaccagatattaaagtagatgccattaacatggctgattatggtcttatgaacggtgaaaaagtccttgaaacagccctagcaatgatggaggag

SEQ ID NO: 9230 - protein, 103 aa, Streptococcus pyogenes
MKSIMLVCNAGMSTSMLVTKMQKAAQARDLEVSIWAVPVSEADNEMAANSIDVLLLGPQVKFLLKDFKDKFEPDIKVDAINMADYGLMNGEKVLETALAMMEE

SEQ ID NO: 9231 - DNA, 975 bp, Streptococcus pyogenes
atgacaatcacagcaaataaaagacattacttagaaaaagtgagccatcaaggaatcatatcagctttagcttttgatcaacgaggtgcactgaagcaaatgatggcagcacatcaagaaggagaagcgacagttacacagatagaaacattgaaagttctcgtttctgaggaattgacgccttatgcttcatctattttattagatccagaatatgggttgctggctactaaggtaagagctaatcagacaggcttactgttagcttacgaaaaaacaggttatgatgctacaaccactagccgtttacccgattgcttagtggaatggtcggtcaaacggttgaaagcagcaggtgcagatgctattaaatttttgctctattatgatgttgatggagatgaacaaatcaatttacaaaaacaagcttatattgaacgcattggttcagaatgtacagctgaagacatccctttttttcttgaacttttgagttatgatgagagaatatcagataacaacagtgcggcatacgcaaagcttaagccacataaggttaacggtgctatgtcagtattttcggataagcgttttggcgttgatgtgctaaaagtagaggttcctgttaatatggcttatgtagaaggttttactgaaggggaagtccattacagtcaagctgaggctattaaagcttttcaagaccaagaagctgccagccacctcccttatatctatttgagtgcaggcgtatctgccaaactttttcaagagacattatactttgcagcagcagcaggtgctcaatttagtggtgttttgtgtgggcgtgccacgtgggcaggatccgttccagtttatattactaaaggagaggacgaagcaagaaagtggctatgcactgaaggcttccaaaatattgacgagttaaacagggtactcgaagagaccgctagcccttggacggaaaaaatc

SEQ ID NO: 9232 - protein, 325 aa, Streptococcus pyogenes
MTITANKRHYLEKVSHQGIISALAFDQRGALKQMMAAHQEGEATVTQIETLKVLVSEELTPYASSILLDPEYGLLATKVRANQTGLLLAYEKTGYDATTTSRLPDCLVEWSVKRLKAAGADAIKFLLYYDVDGDEQINLQKQAYIERIGSECTAEDIPFFLELLSYDERISDNNSAAYAKLKPHKVNGAMSVFSDKRFGVDVLKVEVPVNMAYVEGFTEGEVHYSQAEAIKAFQDQEAASHLPYIYLSAGVSAKLFQETLYFAAAAGAQFSGVLCGRATWAGSVPVYITKGEDEARKWLCTEGFQNIDELNRVLEETASPWTEKI

SEQ ID NO: 9233 - DNA, 246 bp, Streptococcus pyogenes
gtgttaacgatgatatggtctttaattgtaggtgcctttatcggcatgatagcaggtaaaatgactgaaaaaagccagtccatgggttgttttactaatattatcgcaggtctcatagggtcagctgttgggcaaaggctttttggggattggggaattcagttggcaggtatggctattttcccgtccattttgggagcagcaattgtaattgtacttgtttcagctatttttggaaaaaggtat

SEQ ID NO: 9234 - protein, 82 aa, Streptococcus pyogenes
VLTMIWSLIVGAFIGMIAGKMTEKSQSMGCFTNIIAGLIGSAVGQRLFGDWGIQLAGMAIFPSILGAAIVIVLVSAIFGKRY

SEQ ID NO: 9235 - DNA, 834 bp, Streptococcus pyogenes
atgagtaagaacagcagtcatattcaggtgcaaaacctttcctttgcttatgaggaaaaacttgttttagatgacctgacctttagcattccaaaagggaaaattaccactattatgggggcaaatggcagtggcaagtcaaccttattacaattattaaccaaaaaccttccgttaaaacaagggcaggtttggcttgagcaggaagaattagcaacgatttctctcaaggcttttgcgaaaaaagtggcagtggtacaccaataccatcaagtggtcgaaggtttgttagtgggtgaattggtagccatggctaggcttgcccgtcgttctttttttaaaactactaccaaagaagatgaggagcgccttgcttgggccttagaagtaacggctttgagtgattatgtttatcgtgatatccaacacctttctggtggtgaacagcagagggtttggattgccatggcccttgcccaggatacagatattatttttttagatgagccaacgacttatttggatattaagtaccagcttgacattctcaagctgattactaaaatcaaccaagagctaggcctaacgattgtgttagtattacatgacatcaatcaggccttgtctctttcagaccatcttattggactgaaagatgggcgactttatgcccaaggtcaaccaagagacctccttgatcaacagtttatcagagatgtctttggtgttgaattgccctttgttgagagaaatggtcaacagtttgtcctcacttcattggtcaatgaaaccaatggtattagaactcaaaggagagataggaacaagaacaga

SEQ ID NO: 9236 - protein, 278 aa, Streptococcus pyogenes
MSKNSSHIQVQNLSFAYEEKLVLDDLTFSIPKGKITTIMGANGSGKSTLLQLLTKNLPLKQGQVWLEQEELATISLKAFAKKVAVVHQYHQVVEGLLVGELVAMARLARRSFFKTTTKEDEERLAWALEVTALSDYVYRDIQHLSGGEQQRVWIAMALAQDTDIIFLDEPTTYLDIKYQLDILKLITKINQELGLTIVLVLHDINQALSLSDHLIGLKDGRLYAQGQPRDLLDQQFIRDVFGVELPFVERNGQQFVLTSLVNETNGIRTQRRDRNKNR

SEQ ID NO: 9237 - DNA, 363 bp, Streptococcus pyogenes
atgactgtaaaaattaatacaaaagatggtctaatcgagctatccgacgatgtgattgcaactgtcgtgggaggatcagcaacggaaatttttggtgttgttggaatggccagcaaaagtgcaataaaagacaattttcaatcactacttcgcaaagaaaactacgctaagggtgttgtagtaaaatcaacagatctgggtatttctgttgatgtctacactgtgatgagttatggtgtgaaaatcagtgaagtctctaaaaatatccaagaacgcgtgaaatttaaccttgaaagtcagcttggtctcactgctgatatggttaatgtttacgtgcaaaatattaaggttgtaggagaaaat

SEQ ID NO: 9238 - protein, 121 aa, Streptococcus pyogenes
MTVKINTKDGLIELSDDVIATVVGGSATEIFGVVGMASKSAIKDNFQSLLRKENYAKGVVVKSTDLGISVDVYTVMSYGVKISEVSKNIQERVKFNLESQLGLTADMVNVYVQNIKVVGEN

SEQ ID NO: 9239 - DNA, 480 bp, Streptococcus pyogenes
atgcctcagattacccttgtttttattagcctcagtggcaacacccttagctttgtcaagcggctatccctttatctagcagacaattacgattaccatgtcaaacagattaacattaaagatttgaagcacgagacttttcccgtcaaggaagagtttgtggcgattttacccacttatctagaaggcggaaatggcgttgactctggtgatgtggagatcctcaccactcctttgggagagtttattgctgcccatggcaacgcccagcgttgtcttgggattattggctcaggcaacaaaaactttaaccatcagtattgcctgacagccaaacagtatgccaaacgctttggctttccactgctaggtgattttgagctgcgagggactcctgatgacatttcgcggttagcccaggtcatcatggaggccagctccagacactcgtctaacgacacacagacactgcctaacagc

SEQ ID NO: 9240 - protein, 160 aa, Streptococcus pyogenes
MPQITLVFISLSGNTLSFVKRLSLYLADNYDYHVKQINIKDLKHETFPVKEEFVAILPTYLEGGNGVDSGDVEILTTPLGEFIAAHGNAQRCLGIIGSGNKNFNHQYCLTAKQYAKRFGFPLLGDFELRGTPDDISRLAQVIMEASSRHSSNDTQTLPNS

SEQ ID NO: 9241 - DNA, 840 bp, Streptococcus pyogenes
atggaaattggtgaaaccgttgaattcattaggcattcaaaaaacatttcgattaaacaagtttgtggtgattatctcactaggcaaacctattatcgttttattaaaaataatcttgacatttcttcgaaaaagttactttatatcttagacaacttgaatgtcaatgttgatgagtttctctttattagtaataactttaaacaatacaaagaatttattgatatggatacggcaaaacattattttgaatgccgaaacatagaaggtttaaatcatatccttgattcttataaagatagtaagtcaacaaaggaaaagaacctttttgccttggtcaaggtgttattagcaactcttactgaggaagactgtctgacagagcggacttatttgtcaaactatcttattaatattgaaacttggagtcactatgagactgtgctttttaataattgtatgtttatttttgagtcttgctttattgagatggtgttttcaaaagttattttgaacctcgataaatacaataccctaaggtattatgggaatgaatcgattcggatgtttgtcaatatgttgattttgtttattcagcgacaagagtatgataaagcttctgagattttggcaaaaattgaagattatcagctaaatgatgattgcttatatgaacggtgttgtgtgtctttttttgatggcattattggcctcataaatggtaaagagggggctgagcaaaagtgtgtgcagatcttggagatcttccaattacttaattgcaaaacgatccatcatatgtttcaaacctacctagaagccattaaacataaactgtcc

SEQ ID NO: 9242 - protein, 280 aa, Streptococcus pyogenes
MEIGETVEFIRHSKNISIKQVCGDYLTRQTYYRFIKNNLDISSKKLLYILDNLNVNVDEFLFISNNFKQYKEFIDMDTAKHYFECRNIEGLNHILDSYKDSKSTKEKNLFALVKVLLATLTEEDCLTERTYLSNYLINIETWSHYETVLFNNCMFIFESCFIEMVFSKVILNLDKYNTLRYYGNESIRMFVNMLILFIQRQEYDKASEILAKIEDYQLNDDCLYERCCVSFFDGIIGLINGKEGAEQKCVQILEIFQLLNCKTIHHMFQTYLEAIKHKLS

SEQ ID NO: 9243 - DNA, 396 bp, Streptococcus pyogenes
ttgctatctgcttcttatttaagagtgattgttgctccagcttcttcaagtttagctttgatttcttcagcttctgcagcagcaacgccttctttaacgttagcaggtgctccatcaacaagacctttagcttctttaagaccaagacctgtgatttcacgaacagctttgataacgccaacttttttgtcgccagcagatgtcaattcaacgtcgaatgaatctttagcagcttcttcagcaccaccagcagctgcagcagctacaggagcagctgcagttacaccaaattcttcttcgatagcttttacaagatcgttaagctcaaggattgaagcttctttaatttcagcaataatgttttcaatgttcaatgccattgtgatttcctccaaa

SEQ ID NO: 9244 - protein, 132 aa, Streptococcus pyogenes
LLSASYLRVIVAPASSSLALISSASAAATPSLTLAGAPSTRPLASLRPRPVISRTALITPTFLSPADVNSTSNESLAASSAPPAAAAATGAAAVTPNSSSIAFTRSLSSRIEASLISAIMFSMFNAIVISSK

SEQ ID NO: 9245 - DNA, 513 bp, Streptococcus pyogenes
atgaaaattgctgtaggttgtgaccatattgttacttatgaaaaaatcgctgttgtggattacctaaaatcacaaggtcataaagttattgattgtggtacgtatgataatgttcgcacacactatccaatttttggtaaaaaagttggtgaagcagtagcaagtggtgaagcagaactaggtgttgttatctgtggtactggtgttggtatcacaaatgctgtaaacaaagttcctggaattcgttcagcactcgttagagatatgacatctgctatctactcaaaagaagagctaaacgcaaacgttattggttttggtggaaaaattatcggtggtttattgatgaatgatattatcgatgctttcttggccgcggaatacaaaccaactgaagaaaataaaaaatggattgaaaaaatggatagcttgcaacatgctagccaagatcaaaacaacccacacttctttgatgaattcctagaaaaatgggaccgtggtgaatatcacgac

SEQ ID NO: 9246 - protein, 171 aa, Streptococcus pyogenes
MKIAVGCDHIVTYEKIAVVDYLKSQGHKVIDCGTYDNVRTHYPIFGKKVGEAVASGEAELGVVICGTGVGITNAVNKVPGIRSALVRDMTSAIYSKEELNANVIGFGGKIIGGLLMNDIIDAFLAAEYKPTEENKKWIEKMDSLQHASQDQNNPHFFDEFLEKWDRGEYHD

SEQ ID NO: 9247 - DNA, 771 bp, Streptococcus pyogenes
atgaaaaagaaagagcgtcatgaaaaaattctcgatatcttaaaagttgacggttttataaaagtaaaagatattatcgatgaaatgaacatctcagatatgaccgctagacgagatctcgatacattggcagataaaggattacttatcaggacccatggtggtgctcaatatttggattattcttcagcaaaggacgaaggtcacgagaaaacacacactgaaaagaaggtcttacagactaccgaaaaaaaacaaattgcacaaagagctaaaaacattattaaagatggcgaaactgtctttataggtccagggacaacattagagcatctagctgtcgaattgaaaaatagaaatatcagagttattacaaatagccttcctgtttttttaattttgcacccgagcactactattgatttgattttaattggtggtgaatgtcgtgaaattactggtgcttttgttggtgctattgccattaataacctagaaacattaacattttcaaaagcttttgtcagcgcaaacgcagtttacaataattctattgcgacgtacagtgatctcgaaggagaagttcaaagggttgcattgaataatgctgttgagaaaatccttctagttgatagtaccaagtttgaaagttatgacttctataatttttaccaactagatcaagtggacttaattgtgactgataaaaatgtgacaactgatatcatagaaaagtacaagaaattctcaaaaatcataatcgctgacaag

SEQ ID NO: 9248 - protein, 257 aa, Streptococcus pyogenes
MKKKERHEKILDILKVDGFIKVKDIIDEMNISDMTARRDLDTLADKGLLIRTHGGAQYLDYSSAKDEGHEKTHTEKKVLQTTEKKQIAQRAKNIIKDGETVFIGPGTTLEHLAVELKNRNIRVITNSLPVFLILHPSTTIDLILIGGECREITGAFVGAIAINNLETLTFSKAFVSANAVYNNSIATYSDLEGEVQRVALNNAVEKILLVDSTKFESYDFYNFYQLDQVDLIVTDKNVTTDIIEKYKKFSKIIIADK

SEQ ID NO: 9249 - DNA, 555 bp, Streptococcus pyogenes
atgtcgcatttttctgataagtttatggagatttcaggaaaaattgggtcacaacggcatttagtagctattcgtgattcctttatttcaatgatgcctattaccatggcaggttcagttgctgtcttattgaacgtttttttacgcgatattccaaacaatatgggatggacaggatttgcaaaagctatgcaacctgttatcgacatcaatggctatgtttattttgggacaattggtatcatggcgctcttttttgcctttgctttcggttacaatttagctgttatgcataagattaatccattggcaggaggattgatttcttttggctcatttattgccaccctacctcagactttaaccatttcgacaccacttgaaaatgcctctgctaacctaattagcaatttgaaagaaatggggctttcagtcgttactgcgggtggagcttcaagtattgaaactagtcaatggggagcaatagctctaaagtatgtcggtgccacaggcttgttcacagctttaattattggctttttatcaagttttgtg

SEQ ID NO: 9250 - protein, 185 aa, Streptococcus pyogenes
MSHFSDKFMEISGKIGSQRHLVAIRDSFISMMPITMAGSVAVLLNVFLRDIPNNMGWTGFAKAMQPVIDINGYVYFGTIGIMALFFAFAFGYNLAVMHKINPLAGGLISFGSFIATLPQTLTISTPLENASANLISNLKEMGLSVVTAGGASSIETSQWGAIALKYVGATGLFTALIIGFLSSFV

SEQ ID NO: 9251 - DNA, 948 bp, Streptococcus pyogenes
atgataagacaaaccaacaaaaagacatccttttggaaaaatgtgattaaataccgggccttattattaatggtattaccaggtttcatctggttcatctttttcttttatattccagttttagccaatgtggttgcttttaaagattttcattattcagcagggggctttatggaaagtttgaaggagagcccttgggttggtttggctaacttcaaatacctctttgcttccaaagatgcttggttgattaccagaaataccattgcttacaatgtgattttcttactctttaatgttttctttgcgattgcttttgccattatcatgagtgagttacgaaataagagaacggttaaggtctatcacaccatgtccttattgccttatttcttatcatgggtggttattgaatactttgtttctgcctttttaaatacggataaaggtttcattaatcagctcttgaccggaagtggagcagatccaatcaagtggtattccaatcccacttggtggcccttgattttacttttcatgagtgtctggaaggggctaggctacaatagcattatctactatgcttcagtcaaagggatttctgatacttattatgaagctgctatggtggatggtgcaagcaaatggcaacaaattaggaacatcaccattccacaattattgccaatgatgtctatcttattgatcattaatattggtaatatttttaaatctgatttcggacttttctacgttattcctaagaattcaggcccactttatgacgtgaccagtgtgttaaatacctatgtctacaatgccttgactgctacaggagatattgggatggcatcggcagctagcctttatcagtcagtagttgggaccagcatcttgttagtcaccaatgcgattgttcgtcgcatggaccctgatgcagccttgttt

SEQ ID NO: 9252 - protein, 316 aa, Streptococcus pyogenes
MIRQTNKKTSFWKNVIKYRALLLMVLPGFIWFIFFFYIPVLANVVAFKDFHYSAGGFMESLKESPWVGLANFKYLFASKDAWLITRNTIAYNVIFLLFNVFFAIAFAIIMSELRNKRTVKVYHTMSLLPYFLSWVVIEYFVSAFLNTDKGFINQLLTGSGADPIKWYSNPTWWPLILLFMSVWKGLGYNSIIYYASVKGISDTYYEAAMVDGASKWQQIRNITIPQLLPMMSILLIINIGNIFKSDFGLFYVIPKNSGPLYDVTSVLNTYVYNALTATGDIGMASAASLYQSVVGTSILLVTNAIVRRMDPDAALF

SEQ ID NO: 9253 - DNA, 555 bp, Streptococcus pyogenes
atgtcatctcaaaaattagctaattatattgaattgagtatgtatgccgctttaatttttatttcagtacaagtgttgcgtgtccctgtcggtatgcagtttattcatcttggcaatgcattagttgttattgcagtcttaatctatggtagtaaaaaaggagctctagttgctagtcttggtttagggatctttgatgttttgaacggctatgcttcagtcgtttggataactatcttagaatccttggctatttgtttaattttgcatttggtatatgaaagagctatgcaatctagtaaaaaaccaaaagccattataacaataacagttattgctgcattgtcaaaattaactattaaccttataaaatacttactgttagcttatataggtactcagctaccactttcggtatctttttgggtagctcttggaaaaattggtggtagtttcggaacatcttttgtgactttagttgctgttcctcttttgtatcctgttatcaaaaacttaaaagaaaaggttacaatcggacaagcaaaaagaggtttt

SEQ ID NO: 9254 - protein, 185 aa, Streptococcus pyogenes
MSSQKLANYIELSMYAALIFISVQVLRVPVGMQFIHLGNALVVIAVLIYGSKKGALVASLGLGIFDVLNGYASVVWITILESLAICLILHLVYERAMQSSKKPKAIITITVIAALSKLTINLIKYLLLAYIGTQLPLSVSFWVALGKIGGSFGTSFVTLVAVPLLYPVIKNLKEKVTIGQAKRGF

SEQ ID NO: 9255 - DNA, 858 bp, Streptococcus pyogenes
atgagaaagacctatgtttcaatatccatgaaacgcaaacgtttcttcacccaattattgacttatctctatctaatctccttagtgatcgtgattttattcccaatactagtgacggtcagttcagcttttagaccaggaaataccacagcctttagttttcattttgatgggccatggaccttgtctaactttaaaacactctttcaagataccttatacttaagatggtattggaataccttgatcgtggcattcttcaccatgctcatacaagtaacagtcatcactttgacaggttatgcgtatagccgttacaatttctttggacgcaaaaaaagtttaatctttttcctagtcgtacagatggttcctaccatggcggctttaacggcttactttgttatggcgtggctctttaatgccttaaaccaatactggttcttgattttgatttacgtcggtggtggtattcctatgaatgcctggttgatgaagggttattttgacacggtaccttatgacttggacgaatctgctaagttagatggttctggacactttaggaccttctaccaaattgtccttcctcttgtgcgaccaatgattgcagtacaatccttatgggcttttatgggtcctttcggagacttcatgttggctaaattccttttaagggcgcaagaaaattatacggtagcagttggtcttcaatcgtttattacgaatgatgctagaaatcccaaggtaaccttatttgctgcgggagctattctgattgcagtgcctatttcagttctctttttcttcctacagaaaaatttcgtttccggtttaacaagtggtggtaccaaaggg

SEQ ID NO: 9256 - protein, 286 aa, Streptococcus pyogenes
MRKTYVSISMKRKRFFTQLLTYLYLISLVIVILFPILVTVSSAFRPGNTTAFSFHFDGPWTLSNFKTLFQDTLYLRWYWNTLIVAFFTMLIQVTVITLTGYAYSRYNFFGRKKSLIFFLVVQMVPTMAALTAYFVMAWLFNALNQYWFLILIYVGGGIPMNAWLMKGYFDTVPYDLDESAKLDGSGHFRTFYQIVLPLVRPMIAVQSLWAFMGPFGDFMLAKFLLRAQENYTVAVGLQSFITNDARNPKVTLFAAGAILIAVPISVLFFFLQKNFVSGLTSGGTKG

SEQ ID NO: 9257 - DNA, 1305 bp, Streptococcus pyogenes
atggtagagaaccaaagacaacagaagcctaataaagccatgtggctatctgttatcccaggtttgggacaactatacaataaacaaatcgttaaagggggagtcttattagttgttttcttcctagagctactagaaattgtagttctaggaattcctgctttaacaggtctttacagtcttggaagtgttccaatgcaagatcactccttatttatgttaattaagggggccatgcaattaattactctagtcttatttggtatttttcatttggttgctatgagagatgctaaattagttgcacatcaaatgaatgaaggcaagaaggttccggtgacggctaaagagacccttgaagcgatttatgaaaaaggatttccttacttgctcatcattccggcttatttagcaatggctttcgctattatttttccagttttagtgaccttgctgattgcttttaccaattacgattttaggcatattcctccgtatcgtttattggattgggtagggttgaagaattttcttaatatcttagaattaagcaccttcaaaacagcatttacatctgttttgtcatggacgctgatctggacattagcagcgacaagtcttcaaattgttattggaattgcaacggctgttattgctaatcaatcctttatcagaggaaaacgtctctttggtgtgatattcttgttaccatgggctgttccagcatttatctctattatgagttttggtaatttctttaatgattccattggggccatgaatgttcaggttcttcctttcatcgagaaattccttcctttcgttgacttcggaattgtgtcctggaagacagaccccttctggacaaaagtggctgttattatggtgcaaggttggctaggatttccctatatctatattttggtatcaggtattttacaggcaattccagctgatttatacgaagcagcaaccgttgatggtgcgacagtcttacagaaattccgccatatcaccatgccaatgatttttgcggttgcagcaccaacctttatctctcagtacacctttaacttcaataatttctctattatttatctgtttaataatgggggccctggtactgtggggggcggagctgggacaactgatattctgatttcttggatttacaagttgaccacacaaacctcgcctcagttttcgatggcgtcggcagtgaccttaatcatctctgtaatagtgatttcggtatcgttgattacctttaagaaatttaaagcttttgatatggaggagagatca

SEQ ID NO: 9258 - protein, 435 aa, Streptococcus pyogenes
MVENQRQQKPNKAMWLSVIPGLGQLYNKQIVKGGVLLVVFFLELLEIVVLGIPALTGLYSLGSVPMQDHSLFMLIKGAMQLITLVLFGIFHLVAMRDAKLVAHQMNEGKKVPVTAKETLEAIYEKGFPYLLIIPAYLAMAFAIIFPVLVTLLIAFTNYDFRHIPPYRLLDWVGLKNFLNILELSTFKTAFTSVLSWTLIWTLAATSLQIVIGIATAVIANQSFIRGKRLFGVIFLLPWAVPAFISIMSFGNFFNDSIGAMNVQVLPFIEKFLPFVDFGIVSWKTDPFWTKVAVIMVQGWLGFPYIYILVSGILQAIPADLYEAATVDGATVLQKFRHITMPMIFAVAAPTFISQYTFNFNNFSIIYLFNNGGPGTVGGGAGTTDILISWIYKLTTQTSPQFSMASAVTLIISVIVISVSLITFKKFKAFDMEERS

SEQ ID NO: 9259 - DNA, 921 bp, Streptococcus pyogenes
atgagacatgatcgtctattctactataataaaggagaacacctcatgagcttgttatgtattgatataggaggcacttcccttaaatttgccctctgtcacaatggccaattaagccagcaaagcagctttcccactccctctagtctggaaaagttttaccaattactcgaccaagaagttgctcgttactctgcttaccatttctcaggtattgccatcagttcacctggggcagtcaataaagaaaagggggttatcgaaggcgccagcgctattccctacattcaccattttaaaatacaagaggccttagaagaacggctacattaccctatttctatcgaaaatgatgccaattgtgccgccttagctgaagctaccttaggggcaggaaaaggcgctagtagcctagccatgctcgttcttggtactggagttggaggaagcttggtcattgatggcaagatttaccatggtgcccacttatttgggggcgagtttggtttcatgatcatgaacgaccgctaccaaacctttagtcagttagggacagtggtaaatatggccaagcgctatagtgcaatcgtcaataacggaaaagattatactggcaaagctgtccttgccctcgcagaacaaggagatcccctagcactcaaagaaaggcaggtctttctccaaagtttagccatcggtatttttaacattcaacacgcctttgatcctcaactgattttaatcgggggtggtgtttcccaagctgactttctactgtcagcgattgaagctgaactagacaaactctaccaagccgtcgaaatctccgaccttagaccccaattagctatttgtcactttaaaaacgaagctaatcttctgggagctgccattgatttttaccaagaacacaaggaggcc

SEQ ID NO: 9260 - protein, 307 aa, Streptococcus pyogenes
MRHDRLFYYNKGEHLMSLLCIDIGGTSLKFALCHNGQLSQQSSFPTPSSLEKFYQLLDQEVARYSAYHFSGIAISSPGAVNKEKGVIEGASAIPYIHHFKIQEALEERLHYPISIENDANCAALAEATLGAGKGASSLAMLVLGTGVGGSLVIDGKIYHGAHLFGGEFGFMIMNDRYQTFSQLGTVVNMAKRYSAIVNNGKDYTGKAVLALAEQGDPLALKERQVFLQSLAIGIFNIQHAFDPQLILIGGGVSQADFLLSAIEAELDKLYQAVEISDLRPQLAICHFKNEANLLGAAIDFYQEHKEA

SEQ ID NO: 9261 - DNA, 813 bp, Streptococcus pyogenes
ttgaccaaacgtaatattaccattaccttaccagataatgtaccacctgcggttaataaagcctttgctgccattattccaggaacagttgcgatttacgcttcggcaattttcgcctacctcattttcgcattaacaggttcttccctaagtgatgtcatttcaacctatatccaattaccattgctaggcttatcacagggtattggttcagttatcttgttaaccttcttagttcaactgctctggttcttcggcttgcatggtcataatgtcttagccccagtgatggatggtatttatatggtagctttaacagaaaatacagctgcttacaatacagcgcatagcgctgctaatttaccatacctttggacacgcgggtcctttgatgcttatgctcaaatgggtggttcaggagtaaccttggcattgattattgctatcttcatattctcaaaacgagaagagcataaaaccattgccaaattgtccgcaccaatgggtgttttcaatatcaacgaaccaattacatttgggatgccaattgttttgaatccaacctttgtgattccatggctaattgtgccaccaatttgtgctagcatagcttattttgctactgcaataggtttgattccaccggtattcttatcagtaccttggattacccctgttggactttatgcttacctagctactggaggtaatattatggcaggtttggtttcactgtttaacctctttgttgccttccttatctgggcaccatttgtcattttggccaataaagaaaaagcgagtgaccttgca

SEQ ID NO: 9262 - protein, 271 aa, Streptococcus pyogenes
LTKRNITITLPDNVPPAVNKAFAAIIPGTVAIYASAIFAYLIFALTGSSLSDVISTYIQLPLLGLSQGIGSVILLTFLVQLLWFFGLHGHNVLAPVMDGIYMVALTENTAAYNTAHSAANLPYLWTRGSFDAYAQMGGSGVTLALIIAIFIFSKREEHKTIAKLSAPMGVFNINEPITFGMPIVLNPTFVIPWLIVPPICASIAYFATAIGLIPPVFLSVPWITPVGLYAYLATGGNIMAGLVSLFNLFVAFLIWAPFVILANKEKASDLA

SEQ ID NO: 9263 - DNA, 1860 bp, Streptococcus pyogenes
atgacaatcagacaatggatggcagaccatcttcatttgatggagactttagcgtgtttggtattaataataattggcctagcctttttacactcatttccacaagtggcttccgctattttcattacagccttcttgattggaggatatgcgtctgcaaaaacgggtatattggatttggtgaagaacaaacacttgtcagtggatattttgatgattttggcagctatcggtgctggaattatcggctattggctggagggtgctctgcttatttttatcttttcgttgtccaatacgcttgaagaaatggccatggaaaaaagtaaggatgctatttcagccttgatgtccttgacgccagatacagctcgtcaataccaagaagatggccatattttagaagttgagaccagatccttgagtgttggtgaccgtttacaagttcgtaaaggcgaagctgttccaattgacgggcagttgcttagtccttttggtcaatttgatgaatctatggtcactggtgagcctatcactgttgataaggcagaaggccaggatctgattgggggaaccattaaccaaggacaaaccatagatatgttggttactattgaaaatgacgatactctctttgccaagattattaatctggtggaatctgcccaagaaaagaaaagcaaaaccgccacctttatcgaaagcttagaagatggttatgtcaaatttgtgctcgtccttattcctgcctttatcctctttagccactttgtgctttcttggacttggttggctgctttttaccgagggatgattctcttaacagtagcttcaccatgtgccctaattgccagttccacacctgctagcttggctgctatttctcgtgcagccagaaagggattgattatcaaaggaggggatattgtcgataacatgggagatattaaggctgttgtcatggataaaacgggaacgctcacccaaggaaaaccttctgttgtgaatgctcattatttggaagatgagttgctcgtgaatagactggtaaaaggagcagagactgctagtacccatcctatttctaaagcccttcttgaatacactgaaaaattggagccactgacctttgaccacttagaagaaatttctgggaaaggttttcagggcttctatcaagggcaagaatggcgaattggcaagaaaacctacattttggaaaaggttcaagacctatcagcttttgaagaaactattcaagtggaagaaaatcaagggaaaaccctaatctttgtttcacgtgaccatcaattgatagcttactatgccctcttggatgatatcaaaatagaatcaaaacgtgctattaagtctcttcatgccatgggaatcaaaacagtcatgttaacaggtgaccaagaacgaaccgccaattatgtggcacaaaaacttggtattgatgaagtggtagccaactgtatgcctcaagataaggtggctaagttagcagaattaaagactaaatatggttttgtggctatggtaggagatggtattaatgatgctcctgcccttgctcaagcagatgtttcttatgctattggatcaggaacagatattgcaatggaaagtgcagacagtgtgattatggatgacttgactcgtattccattttcgattcaactttcccgcacaatgaagaccattatcaaacaaaatattgtttttgccttatctgtgattaccttattgattttagccaatgtttttcaggtagttaacttgccgcttggtgttgttggacacgaaggctcaacgattttagtgattttaaatggcttgcgtttactttcttttaaa

SEQ ID NO: 9264 - protein, 620 aa, Streptococcus pyogenes
MTIRQWMADHLHLMETLACLVLIIIGLAFLHSFPQVASAIFITAFLIGGYASAKTGILDLVKNKHLSVDILMILAAIGAGIIGYWLEGALLIFIFSLSNTLEEMAMEKSKDAISALMSLTPDTARQYQEDGHILEVETRSLSVGDRLQVRKGEAVPIDGQLLSPFGQFDESMVTGEPITVDKAEGQDLIGGTINQGQTIDMLVTIENDDTLFAKIINLVESAQEKKSKTATFIESLEDGYVKFVLVLIPAFILFSHFVLSWTWLAAFYRGMILLTVASPCALIASSTPASLAAISRAARKGLIIKGGDIVDNMGDIKAVVMDKTGTLTQGKPSVVNAHYLEDELLVNRLVKGAETASTHPISKALLEYTEKLEPLTFDHLEEISGKGFQGFYQGQEWRIGKKTYILEKVQDLSAFEETIQVEENQGKTLIFVSRDHQLIAYYALLDDIKIESKRAIKSLHAMGIKTVMLTGDQERTANYVAQKLGIDEVVANCMPQDKVAKLAELKTKYGFVAMVGDGINDAPALAQADVSYAIGSGTDIAMESADSVIMDDLTRIPFSIQLSRTMKTIIKQNIVFALSVITLLILANVFQVVNLPLGVVGHEGSTILVILNGLRLLSFK

SEQ ID NO: 9265 - DNA, 603 bp, Streptococcus pyogenes
atgaatggcattgaaaaaacctgctttttaatttggaaaatgatccaattgaccctcatttttcatctcttgtccttagctggactgattgtgtttggggtggggccagcctggcaaaccattgtcaccctatttttaaaaacacctcaagaagaaaaccactattctttgaaaagggctgttcaactttggaaatcttatttcaaagaagctaatctaagatttggtctttttgccctgactttcctttttttaacctttaatttgcattgggcagtacagtttccatccttgttttggtttaccgtgtctttcttgattgtaatagccatggtttggctaaccatgacctatctttacatggttttttatgcagtgagctatgagattaacctttggaataatatgaaattagcctttatcagcgtctttttaagtttcaaatcctttttactcatgctgagtgttttgttgggaattaccttagtgacttggcaatacaaaggtctttatctctttttaaccttcggagctctagtcttttgcttggactttgtcactaaggctaatcgtcgactagtagatggagtgattgatgagtgt

SEQ ID NO: 9266 - protein, 201 aa, Streptococcus pyogenes
MNGIEKTCFLIWKMIQLTLIFHLLSLAGLIVFGVGPAWQTIVTLFLKTPQEENHYSLKRAVQLWKSYFKEANLRFGLFALTFLFLTFNLHWAVQFPSLFWFTVSFLIVIAMVWLTMTYLYMVFYAVSYEINLWNNMKLAFISVFLSFKSFLLMLSVLLGITLVTWQYKGLYLFLTFGALVFCLDFVTKANRRLVDGVIDEC

SEQ ID NO: 9267 - DNA, 924 bp, Streptococcus pyogenes
atggagaaaaagaaaaaagtcgaaaaggttaatgttagaacctttgatcgaaaaaccaatgctatctttaatattctgattggtctgtttgccatctcttgtatcattccttttatcttcgtgattattatttccttcactgatgaaagttacttgattaatcatgggtatagtttttttccagatgtctggtcaactaaggcttaccagtatatttttcaaggagccatgtcccatagaatcatgaggtcatttgggatatccgtgtttattacagtggtgggaacctttattaacacgaccatgacatcaacctatgcttatgcgatttcaagaccttatttcccatacagacgtttttttactgtttatgcacttatcaccatgctctttgcaccagggatggttgctaattacttggtggtcagcaatctccttcatttgaaggatacggtttgggccttgattttaccaatggctctgggcccatttggcatcttggtcatgagaacgttctttaaaaagacagttccagatagcattattgagtcggctcgtatggatggggctagtgaatggatgatttttatgaaaattgtcttaccattagctgttccagggattgccaccatcagtttattttctgccttaacttattggaatgattggtttaacgccttgctttatgtgcaaagtgagaatctttacccaatgcagtacttactgatgaaaattcagagcaacctacaggccttggcacaaaatgctggcatgagtgcacaaatggcagatagcttagcatcgctgccaaaagaatcagttcgtatggctatcgtggttattgcaaccttgccgattgccttgacttacccattcttccaaaagtactttgtcggtggtttgaccattggtggggtgaaggaa

SEQ ID NO: 9268 - protein, 308 aa, Streptococcus pyogenes
MEKKKKVEKVNVRTFDRKTNAIFNILIGLFAISCIIPFIFVIIISFTDESYLINHGYSFFPDVWSTKAYQYIFQGAMSHRIMRSFGISVFITVVGTFINTTMTSTYAYAISRPYFPYRRFFTVYALITMLFAPGMVANYLVVSNLLHLKDTVWALILPMALGPFGILVMRTFFKKTVPDSIIESARMDGASEWMIFMKIVLPLAVPGIATISLFSALTYWNDWFNALLYVQSENLYPMQYLLMKIQSNLQALAQNAGMSAQMADSLASLPKESVRMAIVVIATLPIALTYPFFQKYFVGGLTIGGVKE

SEQ ID NO: 9269 - DNA, 1668 bp, Streptococcus pyogenes
atggctaaacctaacagatctaccttaagcctggtttggcgtttattaaccctaatgaaaactctgctaccttggattatcttggctgttggctttgctgttatgggttttgtcatcacggtaagtattccaactggaatagcttatttaggactactagctattagacaagaagtgattccaatattagctttatatcttttgattgctctagcctttttaagaggttttgttcgttatggagagcattattttggtcattttgttgcttttcatagtttagcagcttttaggaacttgatctttaagaaactaagagctctttctccagcttgcttggatagtcaagacagtggttatttgcttaaaatgattggagaagatattgaggcattagaagttttttttgcccacacaatcgcacctatttgtacagcaatattgtctgcaggtttaatgttctggtacttttgtcaaagtagttggcagttagccttattagctttggcaacctatgcttgtttagccattgttatacccatttattttgctaatattttacaggttttactaaaaagccaaaatgaaggtcgaaaagattacctgtcttattttttagagagtttacgatcagtcaaagatcttttgcaatttcaggtattagacgagcaatttgaacgattaataaaaaaaagtaatcatgtaaatgctcttgatcgtaacgtagcgcaagcccaatttttgcaaatggcattgacttttttctggcttggcttaatgatcttagcattttcttatatggtttttgatgggatatgccatgacagcttatcatttgataaaggcttattaacttttattgctttcactgcttcgttttctccttttttagaactaggacgtttgccattaggttttaagcgtgctatgaatgcggctcgaaatatttttgaccttctagacgaaaatgtcatagtagatgaaggcacaaaacaaatagatcgtttaaggagtgtttcttttgaggacctcagttttgcttatccaaagcgccaagagctggtttttaaggatttaacagttacctttcaagaaaaggggattattggcattaaaggcgaatcaggatctggtaaatcaactttggtgaaattaattatgaaatggtataattggaagacaggagatatttttcttaatgataggaatagttgcttactaaatgctgctaaattacaagatactattgcttatgtgccacaaacagcgcagcttttccaacagtctatccgtgaaaatcttatctttggccgtcaagatatttcagatgagtccatttggaatttagctgaggcttgtggtatgaaagacagactgttagcttgtaaggaaggtttggatacgattatcaagagtccttctgacttttcagctggagaaggtcaacgtttagagttgatgcgagctttattgaaagatgcgagttgctatatttttgatgaacccacgtcaaatttagattctctaaatgaagctatcttgcttgatttaattaaaacacattgtcaaggattggtcttcttaatttctcacaggccatcaaccctagcttgtgttgatcatctattttgcgtaaaaaatggttccctaaaagaggtgaataaaaaa

SEQ ID NO: 9270 - protein, 556 aa, Streptococcus pyogenes
MAKPNRSTLSLVWRLLTLMKTLLPWIILAVGFAVMGFVITVSIPTGIAYLGLLAIRQEVIPILALYLLIALAFLRGFVRYGEHYFGHFVAFHSLAAFRNLIFKKLRALSPACLDSQDSGYLLKMIGEDIEALEVFFAHTIAPICTAILSAGLMFWYFCQSSWQLALLALATYACLAIVIPIYFANILQVLLKSQNEGRKDYLSYFLESLRSVKDLLQFQVLDEQFERLIKKSNHVNALDRNVAQAQFLQMALTFFWLGLMILAFSYMVFDGICHDSLSFDKGLLTFIAFTASFSPFLELGRLPLGFKRAMNAARNIFDLLDENVIVDEGTKQIDRLRSVSFEDLSFAYPKRQELVFKDLTVTFQEKGIIGIKGESGSGKSTLVKLIMKWYNWKTGDIFLNDRNSCLLNAAKLQDTIAYVPQTAQLFQQSIRENLIFGRQDISDESIWNLAEACGMKDRLLACKEGLDTIIKSPSDFSAGEGQRLELMRALLKDASCYIFDEPTSNLDSLNEAILLDLIKTHCQGLVFLISHRPSTLACVDHLFCVKNGSLKEVNKK

SEQ ID NO: 9271 - DNA, 1695 bp, Streptococcus pyogenes
atgaatggattaattgctcagattgagaaagggaaacctttcttcgagaaaatttctcgaaacatctatcttcgcgctattcgtgatggttttatcgctggtatgcctgttatcttgttttcaagtatctttatcttgattgcctatgttccaaatgcatggggcttccattggagtaaggatattgagaatctcttgatgacgccatacaactactcaatgggtattttaggtttgtttgtggctggtacgactgcaaaagcattaaccgattcaatgaaccgctcattgcctagcactaaccaaatcaactttatttcaaccatgcttgctgctattgtaggttttttacttatggcagcaaatccagcaaaagacggtggtttcttaactggatttatgggaacaaaaggtttgttaacggccttcatcgcagcttttattaccgtaaatgtctataaagcctgtgtgaaaaacaatgttactattcgcatgccagaagaggtgccaccaaatatatctcaagtttttaaagatttgattccatttacattatcagttgtacttctttatgtgattgaattgattgttcatactactttaggcgttaacgttgccgagtcaattggtaaacttcttgcaccattgttccaagcagcagatggttatgttggaatcactattatcttcggtgcatttgctttcttctggtttgttggtattcatggaccatctattgttgaaccagccattgcagcgattacttacgcaaatgctgaaaccaaccttcaattacttcaagctggtgaacatgctgacaagattttgacttcagggactcaaatgttcatcgttaccatgggtggtactggtgcaactctcgtcgttccattcatgttcatgtggttaacaaaatcaaaacgtaacaaagccattggacgtgcatcagttgttccaacattctttggtgttaacgaacccattttgtttggtgctccacttgttttgaacccaattttctttattccatttatcttggcaccgattgtcaacgtatggattttcaaattcttcattgacacacttggaatgaacagtttcactgcaaacttaccttggactacaccagctccattaggtctcattcttggtacaaacttccaagttctagcattcattttggcagctttgttaattgtcgttgatgtgatcatctactacccattcttgaaagtatatgatgagcaaattcttgctgaagaagcagcaggtacgaattcatcagatgccctcaaagaaaaagtagcagcaaactttgatactaaaaaagctgatgctattcttgaaaaatcagcagctaaagaaaccaaagaaatcactgatcaaactaatgttctcgttctttgtgccggtggtggtacaagtggtttgcttgcaaatgctttgaataaagcagctaaagaatatggtgcacctgtcactgcagcagcaggaagttatggtgctcaccgtgagattttaccacaatatcaacttgttatccttgcacctcaagtagcttctaactatgaagatatgaaagtggaaactgataaacttgatattaaattagctaaaacagaaggggctcaatacatcaaattgacccgtgatggtcaaggagctcttgattttgtaaaagcacagtttgaaaat

SEQ ID NO: 9272 - protein, 565 aa, Streptococcus pyogenes
MNGLIAQIEKGKPFFEKISRNIYLRAIRDGFIAGMPVILFSSIFILIAYVPNAWGFHWSKDIENLLMTPYNYSMGILGLFVAGTTAKALTDSMNRSLPSTNQINFISTMLAAIVGFLLMAANPAKDGGFLTGFMGTKGLLTAFIAAFITVNVYKACVKNNVTIRMPEEVPPNISQVFKDLIPFTLSVVLLYVIELIVHTTLGVNVAESIGKLLAPLFQAADGYVGITIIFGAFAFFWFVGIHGPSIVEPAIAAITYANAETNLQLLQAGEHADKILTSGTQMFIVTMGGTGATLVVPFMFMWLTKSKRNKAIGRASVVPTFFGVNEPILFGAPLVLNPIFFIPFILAPIVNVWIFKFFIDTLGMNSFTANLPWTTPAPLGLILGTNFQVLAFILAALLIVVDVIIYYPFLKVYDEQILAEEAAGTNSSDALKEKVAANFDTKKADAILEKSAAKETKEITDQTNVLVLCAGGGTSGLLANALNKAAKEYGAPVTAAAGSYGAHREILPQYQLVILAPQVASNYEDMKVETDKLDIKLAKTEGAQYIKLTRDGQGALDFVKAQFEN

SEQ ID NO: 9273 - DNA, 876 bp, Streptococcus pyogenes
atgtcaattgaccaacgtttacagttaaagaaattttgctttattattttaggagctgctatctacgcctttgcttttgtttatttttacatggctaatcgcattgcagccaatggtttagctggtctcaccctagttggtaaggcactttttgagattgatccttctttgataggctatttgattaatttgcctttggtcttgctgggagctagatgttttgggaaaagagccatggtttacacagtaacgggtattttatcactttacttttttgtgtggctgtttcaacgctttcctttggtcgttgacttggaccatgacaatttagtcgtttccttgatggctggaattattggtggtctaggtggcggtcttgtgtttcgcaatggtggaaccatcggtggagcagatattattgctaagttattagaagacaagttaggactacagctgaatcaagctcttttaggcattgatctttttgtcatgattgtctctttgacttatatttccctgccgcaaatgatgtatgctctgattgctagctttatgtatggtcaaattgttcgcttggtacaacaaggtggttattcagcccgtggcatttttatcgtttcagaacaagcggagaaaattgcccggttcatcatggacgaattgggaagaggagttacttatctaacaggtgaaggagcctactctggtcgccgtaaaaaagtgatttatgtggctttggggcgaagagatattagggaattaaaagcttttttaactcaggttgatcccaatgcctttatcacttattttgatgttaatgaagtcaatagcccagaatttttaactattaaaagcaaataccataaaaagagaaaa

SEQ ID NO: 9274 - protein, 292 aa, Streptococcus pyogenes
MSIDQRLQLKKFCFIILGAAIYAFAFVYFYMANRIAANGLAGLTLVGKALFEIDPSLIGYLINLPLVLLGARCFGKRAMVYTVTGILSLYFFVWLFQRFPLVVDLDHDNLVVSLMAGIIGGLGGGLVFRNGGTIGGADIIAKLLEDKLGLQLNQALLGIDLFVMIVSLTYISLPQMMYALIASFMYGQIVRLVQQGGYSARGIFIVSEQAEKIARFIMDELGRGVTYLTGEGAYSGRRKKVIYVALGRRDIRELKAFLTQVDPNAFITYFDVNEVNSPEFLTIKSKYHKKRK

SEQ ID NO: 9275 - DNA, 1992 bp, Streptococcus pyogenes
atgttatcaaaaaaagaactggccatcataacatttctaatccatcacaaagagcagtttgtctctagtgcaactctggctgaggttatcggtatgagtgaccgtacggttaggaaatacctcaaagaactgatcagtagccttcctgaacacggagctcacatcatttctaaacaaggtcgaggttactgcttagaaattgaccattctatggcatttgacatcttttggcaagaaagtgtgacgtctaaaaaacgtttggcagatgtgactcaagtggaagaatcggttgatcgagaagattatgtgcttcataaattcttttttgaagatgccgttcaggattttgaagagctttgtcaagaattgtatatcagtcggacaactttaaaacatgttttagcaggtattaaggagcgcataataccttaccagttagagcttgaaataactcaccaacatattcaaataagaggtaaagaagaggacattaggcattttatcatggactatttttttgttactagttttgataataccttgtccaccatggtaggtaatacctttcttgaaggtattaattttgcagaaatcatgattattgtcttggatgaatgtcgggatgctaagttgaaactttctgattttgtcatgaataatctagtcttgcatattgccctaatggttcagcgtattcgatcggggtgtccattagaactgttttccattccaatagctattcgtcagtctgatgagtatcaagtagctctgcgcattttgtatcgagtggaagaagtgatggggatacgttttcctaaagaggaggctaattatattgcactgcatctaaaggtcaaacattctgttggtaagcattggcaagatgataataccgatgaaaagttgcaggaccatttaaaagcatgtattgccaagattagtcaattgacaggcatgactttagaaacagataccaatttatttcaaggtttattagcccacatgatgcccttgaccatacgtcttgaaaaccatattcagctgactaatcctttaactgaggaaattaaaagccagtatcctgaaatatttacccttaccaagcagaccttttcggatttgcttgtatgtcaaaagaatgatgtctcagatgatgaatgggcttatattagtttgcatttaatggcggccattgagcgttattcaaaccgtcataaattgagggttctagtagtttgtgccacaggttatggtagtgccatgatgttgaaaaatcgcttggaaaaggaatttgaaggacgtttgcgtattgtcgatgttatcagttactatgaaataaccgaagagcgactgaaaaccgttgatttgattatttcctctatcagccttgccaatctgatgtttttaacaccagtgattactgtcagtgtttttttgtcaaatcaggatattgaaactattcgacaatttattggagaacaagaaggtatcaagaaagaggtcagtttaccgtcacagatgagtttagcaaaagcagagcagcttctaacaggtgtttttagccctaatcgttttctttatttagacgagaaaatctcaaaggaagacttgcttttacggatgattgcttgtcttgacgaggcgggaacagaaacgtttgtagaggacttctatcatcaaatggtactgagggaaaattacagcccagtcatctatggagaagtgcttgcctttccgcatcctgctaatcccatgacttattctgaacaggtagtagtggttatttgccgagagcctcttgagtgggacaaggcgcatcaagctgttcattttgtctttctattatccccgtctaaagggcataatcataggttaaaatatgtatcaccaggtttggcatcttttgtcaatcaggtggagcttcagcaagcgttactagaagaaccaaattattccaaattcatgacagtgtttaccccacttattcatgat

SEQ ID NO: 9276 - protein, 664 aa, Streptococcus pyogenes
MLSKKELAIITFLIHHKEQFVSSATLAEVIGMSDRTVRKYLKELISSLPEHGAHIISKQGRGYCLEIDHSMAFDIFWQESVTSKKRLADVTQVEESVDREDYVLHKFFFEDAVQDFEELCQELYISRTTLKHVLAGIKERIIPYQLELEITHQHIQIRGKEEDIRHFIMDYFFVTSFDNTLSTMVGNTFLEGINFAEIMIIVLDECRDAKLKLSDFVMNNLVLHIALMVQRIRSGCPLELFSIPIAIRQSDEYQVALRILYRVEEVMGIRFPKEEANYIALHLKVKHSVGKHWQDDNTDEKLQDHLKACIAKISQLTGMTLETDTNLFQGLLAHMMPLTIRLENHIQLTNPLTEEIKSQYPEIFTLTKQTFSDLLVCQKNDVSDDEWAYISLHLMAAIERYSNRHKLRVLVVCATGYGSAMMLKNRLEKEFEGRLRIVDVISYYEITEERLKTVDLIISSISLANLMFLTPVITVSVFLSNQDIETIRQFIGEQEGIKKEVSLPSQMSLAKAEQLLTGVFSPNRFLYLDEKISKEDLLLRMIACLDEAGTETFVEDFYHQMVLRENYSPVIYGEVLAFPHPANPMTYSEQVVVVICREPLEWDKAHQAVHFVFLLSPSKGHNHRLKYVSPGLASFVNQVELQQALLEEPNYSKFMTVFTPLIHD

SEQ ID NO: 9277 - DNA, 1776 bp, Streptococcus agalactiae
atgagaataaaatggttttctttggtacgtataacaggactactacttgttttactttaccatttctttaagaatagttttccaggaggatttgttggcgttgacatcttctttacattttctggttttctgattacggccttattgattgatgaattttctaaaacgaaaaaaattgattttgttagtttttgtcgtagacgtttttaccgtattttcccaccattagtattgatggttttggtgacaataccttttgtatttctggttaaaagcgattttagagcaagtattggctctcaaattatgactgctttaggttttaccagcaacttttacgaaatcttgactggtggtaactacgaaagtcaatttatccctcacttatttgtgcatacctggagtctttctattgaagtccatttttatgttttatggggcttaacggtatggctcttatcgaaaagatcaaaagatcaaaagcaattgagggggactttgttccttatttccatgggaatttttggagtcagcttccttaccatgtttgttagagcctttttcgttgataatttttcaacgatatatttctctacattatcacatatatttccgttctttttaggagcgatggtggctacaatatctggtattcgagagattaccggacgattcaagaaaaatatcaaaaatctgactttgaagcataatttaatcatgatgggtagtgcttttgctggtctaatgattttaacttttgcacttgattttgataatcggctaacatatctttttggttttgtattgtctagcatttttgctagtgtaatgatttacaatgcacgtattttacacgagcatacaccagatatttcagaaccttttgtgattacttatcttgctgatatcagttacggtatgtacctttttcattggccattttatattatttttagtcgtttatccccaaactggatagctgttattttgacagtagtattatcagcagtcttctcaacattatcattttatatcattgaaccttttattttaggtagaaaacctaaattccttgattatgaatttgacttgttgccttacaaaaagtggttatttagtatcggaggggtactaactcttattactgtagtgacaatgttgacagctccaagtataggtagttttgagacagaattattgcagaattcgttacaacaagctagaacaaatactaaccgaacacatacactagccgcaggggatgcaggtgctcttagtgatgtgacagtaatcggagattcagttgccttaaggtcaagtgctgcttttaataaattgttaccagaagtacaattagatgctgcggtgagtcgtaattttagtaaatcatttgatatttttgaaaaccgtattcaaaataaagccttgtccaaaattgttgttttggcagttggtgtgaattcattagataactacaagacagacttgagccaatttattaaatctttgcctaagggacaccgtttgattatagtaacaccttataatgctaaaaatatgagtcaagttacgacagtgcgtgattatgaactctcgctaatgaaaaaatataattacataacggttgctgactggtataaggttgcgacagaacatccagaaatctggggaaatacagatggtgtgcattatagtgatagcgatactacaggggctgatttatatgttagtaacgtcaaaaaagctattcaaaaatcagctcaacgagctgcaaaa

SEQ ID NO: 9278 - protein, 592 aa, Streptococcus agalactiae
MRIKWFSLVRITGLLLVLLYHFFKNSFPGGFVGVDIFFTFSGFLITALLIDEFSKTKKIDFVSFCRRRFYRIFPPLVLMVLVTIPFVFLVKSDFRASIGSQIMTALGFTSNFYEILTGGNYESQFIPHLFVHTWSLSIEVHFYVLWGLTVWLLSKRSKDQKQLRGTLFLISMGIFGVSFLTMFVRAFFVDNFSTIYFSTLSHIFPFFLGAMVATISGIREITGRFKKNIKNLTLKHNLIMMGSAFAGLMILTFALDFDNRLTYLFGFVLSSIFASVMIYNARILHEHTPDISEPFVITYLADISYGMYLFHWPFYIIFSRLSPNWIAVILTVVLSAVFSTLSFYIIEPFILGRKPKFLDYEFDLLPYKKWLFSIGGVLTLITVVTMLTAPSIGSFETELLQNSLQQARTNTNRTHTLAAGDAGALSDVTVIGDSVALRSSAAFNKLLPEVQLDAAVSRNFSKSFDIFENRIQNKALSKIVVLAVGVNSLDNYKTDLSQFIKSLPKGHRLIIVTPYNAKNMSQVTTVRDYELSLMKKYNYITVADWYKVATEHPEIWGNTDGVHYSDSDTTGADLYVSNVKKAIQKSAQRAAK

SEQ ID NO: 9279 - DNA, 1014 bp, Streptococcus agalactiae
atgaaagcggttgttgttaatcaagctagtacaggtgttgaagttgttgagcatgatcttccaaaagttggtcatggtgaagcacttgtaaaagtagaatactgtggtgtatgccatactgatttacacgttgcacatggagatttcggccaggtaccaggacgcattttgggtcacgaaggcattggtatagtagaagaaattggagaaggcgtaacgtctttgagggttggtgatcgtgtctctattgcatggttctttgaagggtgcggtcattgcgaatactgtactacaggacgtgagacactttgtcgtagtgttaaaaatgctggatacagtgttgatggtggtatgagtgaatacgctattgttaccgcggactatgcggttaaggttcctgagggattagacccagctcaagcatcatcaatcacttgtgctggagtaacaacatacaaggctatcaaagaagctggagctgctcctggtcagtggattgcagtgtatggtgcaggtggtcttggaaacttagcagtccaatatgcaaaaaaagtattcaatgctcatgttgtagctgttgatattaacgcagataaacttcaattagctaaagaggttggagcagatttgacagttaatggcaaagaaataaaagatgttgcggcatatattcaagaaaagacaggcggttgtcatggagtggttgtgactgctgtttctaaagttgcgtttaatcaggcgattgacagcgttcgtgctggaggtacagtggtagctgtcggtcttccatcagaatatatggaattgagtattgtaaaaacagtacttgatgggattcgtgtggttggttccttagttggaactcgtaaagacttagaagaagccttcgcatttggagcagaaggcttggtagtaccggtggttgaaaaagtgcctgtggatacagctcctcaagtattcgatgaaatggaaagaggattgattcaaggacgtaaagttcttgactttacaaag

SEQ ID NO: 9280 - protein, 338 aa, Streptococcus agalactiae
MKAVVVNQASTGVEVVEHDLPKVGHGEALVKVEYCGVCHTDLHVAHGDFGQVPGRILGHEGIGIVEEIGEGVTSLRVGDRVSIAWFFEGCGHCEYCTTGRETLCRSVKNAGYSVDGGMSEYAIVTADYAVKVPEGLDPAQASSITCAGVTTYKAIKEAGAAPGQWIAVYGAGGLGNLAVQYAKKVFNAHVVAVDINADKLQLAKEVGADLTVNGKEIKDVAAYIQEKTGGCHGVVVTAVSKVAFNQAIDSVRAGGTVVAVGLPSEYMELSIVKTVLDGIRVVGSLVGTRKDLEEAFAFGAEGLVVPVVEKVPVDTAPQVFDEMERGLIQGRKVLDFTK

SEQ ID NO: 9281 - DNA, 381 bp, Streptococcus agalactiae
ttggctaaaccaacacgcaaacgtcgtgtgaaaaagaacatcgaatctggtgttgctcatattcacgctacattcaataacactattgttatgattacagatgtgcatggtaacgctcttgcatggtcatcagctggtgctcttggatttaaaggttctcgtaaatctactccatttgctgctcaaatggctgctgaagctgctgctaaatctgcacaagaacacggtcttaaaactgttgaagttactgtaaaaggtcctggttcaggtcgtgaatctgctatccgtgcccttgctgcagctggtcttgaagtaactgcaattcgtgatgtgactcctgtaccacataatggtgctcgtcctccaaaacgtcgtcgtgta

SEQ ID NO: 9282 - protein, 127 aa, Streptococcus agalactiae
MAKPTRKRRVKKNIESGVAHIHATFNNTIVMITDVHGNALAWSSAGALGFKGSRKSTPFAAQMAAEAAAKSAQEHGLKTVEVTVKGPGSGRESAIRALAAAGLEVTAIRDVTPVPHNGARPPKRRRV

SEQ ID NO: 9283 - DNA, 1281 bp, Streptococcus agalactiae
atgtctacatcatttgaaaataaagctacaaaccgtggtattatcacatttacaattagtcaagatgagatcaagccagctcttgatcaagcattcaacaaagtaaaaaaagatttgaacgttccaggattccgtaaaggacatatgcctcgtacagttttcaaccaaaaatttggtgaagaagcactctacgaaaatgcattgaatttagtgttgccaaaggcttacgaagcagctgttgcagaacttggtttagacgttgttgctcaaccaaaaattgatgttgtatcaatggaaaaaggtcaagattggaagttgacagctgaagttgttacaaaaccagaagttaaacttggagattacaaagacctttcagtagaagttgatgcttcaaaagaagtttcagatgaagaagttgatgctaaagttgaacgtgagcgtaacaaccttgcagaattgactgttaaagatggtgaagcagcacaaggtgatacagttgttattgactttgtaggttcagttgatggtgttgaatttgatggtggtaaaggagataacttctcacttgaacttggttcaggtcaatttatcccaggatttgaagaacaattagtaggttctaaagctggtcaaactgtagacgttaatgtaacattcccagaagattatcaagcagaagatcttgctggtaaagatgctaaatttgttacaacaattcacgaagtaaaaactaaagaagttccagcacttgatgatgaacttgcaaaagatattgatgatgaagttgaaacacttgatgagttgaaagcgaaatatcgcaaagagctagaatcagcaaaagaaattgcatttgatgatgcagttgaaggtgcagcaatcgaattagctgttgccaatgcagaaattgttgaattaccagaagaaatggtccatgatgaagtacatcgtgctatgaatgagttcatgggtaatatgcaacgtcaaggaatttcaccagaaatgtacttccaattaacaggtacaactgaagaagaccttcataagcaataccaagcagatgctgacaaacgcgttaaaactaaccttgttatcgaagcaattgcagctgcagaaggctttgaagcaacagatgaagaaatcgaaaaagaaatcacagatcttgcttcagaatacaatatggaagctgaccaagtacgcggtctactttcagcagatatgcttaaacatgatattgcaatgaaaaaagcggttgacgttatcactagctcagctactgtaaaa

SEQ ID NO: 9284 - protein, 427 aa, Streptococcus agalactiae
MSTSFENKATNRGIITFTISQDEIKPALDQAFNKVKKDLNVPGFRKGHMPRTVFNQKFGEEALYENALNLVLPKAYEAAVAELGLDVVAQPKIDVVSMEKGQDWKLTAEVVTKPEVKLGDYKDLSVEVDASKEVSDEEVDAKVERERNNLAELTVKDGEAAQGDTVVIDFVGSVDGVEFDGGKGDNFSLELGSGQFIPGFEEQLVGSKAGQTVDVNVTFPEDYQAEDLAGKDAKFVTTIHEVKTKEVPALDDELAKDIDDEVETLDELKAKYRKELESAKEIAFDDAVEGAAIELAVANAEIVELPEEMVHDEVHRAMNEFMGNMQRQGISPEMYFQLTGTTEEDLHKQYQADADKRVKTNLVIEAIAAAEGFEATDEEIEKEITDLASEYNMEADQVRGLLSADMLKHDIAMKKAVDVITSSATVK

SEQ ID NO: 9285 - DNA, 924 bp, Streptococcus agalactiae
atgaaaaagattcgattatcaaagtttattaaaatgattgttgttattttgtttttaattagtgtagcagctagtttttattttttccacgttgcccaagttcgagatgataaatcctttatttcaaatggtcaacgtaagcctggaaactctttatatgcttatgataaatcctttgataagctattaaagcaaaaaatagaaatgacaaaccaaaatataaagcaagttgcttggtatgttcctgctgttaagaaaactcataagacagctgttgtcgttcatggttttgcgaatagcaaagagaatatgaaggcatatggttggctgtttcataagttaggatacaatgttcttatgcctgacaatattgcacatggtgaaagtcatgggcagttgataggctatggctggaacgaccgcgagaacattatcaaatggacagaaatgatagttgataagaatccatcaagccaaattactttatttggtgtttcaatgggtggagcaacagtcatgatggctagtggtgaaaaattacctagtcaggttgttaatatcattgaagattgcggttattctagtgtttgggatgaattaaaatttcaggctaaagagatgtatggtttaccagccttcccactcttatatgaagtttcaacaatttctaaaatcagagcaggtttttcgtatggacaagcaagtagtgtcgaacaattgaaaaagaataatttaccagccctctttattcatggtgataaggataattttgttccaacaagtatggtttatgacaactataaagctacagcaggtaagaaagagctttatattgtaaaaggggcaaaacatgcgaaatcttttgaaacagagccagaaaaatatgagaaacgtatctctagttttttgaaaaaatatgaaaaa

SEQ ID NO: 9286 - protein, 308 aa, Streptococcus agalactiae
MKKIRLSKFIKMIVVILFLISVAASFYFFHVAQVRDDKSFISNGQRKPGNSLYAYDKSFDKLLKQKIEMTNQNIKQVAWYVPAVKKTHKTAVVVHGFANSKENMKAYGWLFHKLGYNVLMPDNIAHGESHGQLIGYGWNDRENIIKWTEMIVDKNPSSQITLFGVSMGGATVMMASGEKLPSQVVNIIEDCGYSSVWDELKFQAKEMYGLPAFPLLYEVSTISKIRAGFSYGQASSVEQLKKNNLPALFIHGDKDNFVPTSMVYDNYKATAGKKELYIVKGAKHAKSFETEPEKYEKRISSFLKKYEK

SEQ ID NO: 9287 - DNA, 939 bp, Streptococcus agalactiae; identical to SEQ ID NO: 8977

SEQ ID NO: 9288 - protein, 313 aa, Streptococcus agalactiae
MKNMMKYISELTTLIALAGLMVIITLINPNFLTTNNLLNLLLQVTANGFIAFGMTFVILTGGIDLSVGSILALSSALTAGLIGHGVPVGIAIVLSVALGGILGMLNGLFISYGKLAPFIVTLATMTIFRGATLVYSNGNPITAGLSDSFLFQFLGQGYIVGIPFPVILMFLTFIILYILLHKTAFGKSVYALGGNEKAAYISGIKLNKVKIIIYTISGIMASISGLIITSRLSSAQPTAGASYEMDAIAAVVLGGTSLSGGKGRIIGTLIGALIIGVLNNGLNIIGVSAFWQQVVKGIVILMAVLLDRFKVAK

SEQ ID NO: 9289 - DNA, 879 bp, Streptococcus agalactiae
atggcaatcgtttcagcagaaaaattcgtccaagcagctcgtgataacggctatgcagtaggtggatttaacacaaacaaccttgagtggactcaagctatcttgcgcgcagcagaagctaaaaaagctccagtacttatccaaacttcaatgggtgcggctaaatacatgggtggttacaaactttgtaaacaacttattgaaactttggttgaatcaatgggtattactgtaccagttgctatccaccttgaccacggtcattacgatgatgcccttgagtgtattgaagtaggttacacttcaattatgtttgatggttcacaccttccagttgaagaaaaccttgaaaaagcacgcgaagttgttgctaaagcacatgctaaaggtatttcagtagaagctgaagttggtactatcggtggtgaagaagatggtattgtcggtaaaggtgaattagcaccaatcgaagacgctaaagctatggttgaaactggtattgacttcttggctgcaggtatcggtaacattcatggaccatacccagcaaactgggaaggacttgaccttgatcacttgaagaaattgactgaagctgttcctggtttcccaatcgtgttacacggtggttcaggtattcctgatgatcaaatccaagaagctatcaaacttggtgttgctaaagttaacgttaacacagaatgtcaattagctttctgtcaagcaactcgtgactacgctgttgaattcaacgctaacgaagctgaatacatgaagaaaaaactctttgacccacgtaaattcttgaaacctggtttcgatgcaattacagaagcagttgaagaacgtattgacgtgtttggttcagcaaacaaagca

SEQ ID NO: 9290 - protein, 293 aa, Streptococcus agalactiae
MAIVSAEKFVQAARDNGYAVGGFNTNNLEWTQAILRAAEAKKAPVLIQTSMGAAKYMGGYKLCKQLIETLVESMGITVPVAIHLDHGHYDDALECIEVGYTSIMFDGSHLPVEENLEKAREVVAKAHAKGISVEAEVGTIGGEEDGIVGKGELAPIEDAKAMVETGIDFLAAGIGNIHGPYPANWEGLDLDHLKKLTEAVPGFPIVLHGGSGIPDDQIQEAIKLGVAKVNVNTECQLAFCQATRDYAVEFNANEAEYMKKKLFDPRKFLKPGFDAITEAVEERIDVFGSANKA

SEQ ID NO: 9291 - DNA, 1662 bp, Streptococcus agalactiae
gtgtcaaagattacgacaagtttattccaagaaatggtacaagctgccagtacacgtctgagtaaacaggcagagtatgtcaactcattaaatgtattcccagttccagatggtgatactggtacgaatatggggatgactatggaaaacggagccaaggaagtttcggacaaaccagcgacgactgttggagaagttggtcaaattctttctaaaggtgtattgatgggagcacgtggaaattcaggtgtaattacatcacaattattccgtggttttggtcaaagtatcaaggataaagaagaattaacgggtcaagatttggcacacgctttccagaatggtgttgaagtagcttataaagccgttatgaaaccagttgaaggaactatcttgacagtatcacgcggtgcagctaccgctgctctaaaaaaagctgaagaaactgatgatgcagttgaagttatgcgcgcaactctcaaaggtgctaagcgtgctcttgctaaaacaccggatatgctacctgttcttaaagaggttggtgttgttgattctggtggtcaaggactcgtctttatttacgaaggtttcctctcagcactgactggggaatatatcgcatcagaagattttaaagcaactcccgcaacaatgactgaaatggttaatgcagagcaccataaagctgtagtaggccacgtagccacagaagatattaaatatggctattgtacagaagtcatggttggtttaaagcaaggaccaacttacgttaaggaatttaactacgaagaatttcaaggttatcttagcaatctaggggattctttactagttgttaatgatgatgaaattgtcaaggttcatgttcatacagaagatccaggtcttgttatgcaagaaggtttgaaatatggatcgcttgtgaaggttaaagttgaaaacatgcgtaaccaacatgatgcccaaatgcaaaaggttgaagttgaagaaactgtcaaagaaactaaagaatatggtattattgctgttgtagctggtgacggtctagctgagatttttaaatcacaaggtgttgattatatcatctctggcggccagactatgaacccatctacagaagatattgtaaaagcgattgaaaaagtaaacgctagaaatgttattattttaccaaacaataagaacatcttcatggctgcacagtcagctgcagatgtcgttgatattccagcagcagtagtagagacacgtacagttccacaaggatttactagcttacttgcttttgatcctgctaagtctcttgaaactaatgtagctgatatgacaaatagcctctcagatgtcattagtggtagtgtgactttagctgttcgtgatacaacgatagatggccttgaaattcatgaaaacgacatccttgggatggttgatggtaaaattctagtatctacaccagatatggaaaaagcacttaaagacacttttgataaaatgattgatgaagatagtgaaatcgtgacaatctatgttggtgaagatggtaagcaagcattagctgagaccttgtcggaatatcttgaggaaacttatgaagatgttgaagttgagatccaccaaggagatcaacctgtatatccatacctcatgagcgttgaa

SEQ ID NO: 9292 - protein, 554 aa, Streptococcus agalactiae
MSKITTSLFQEMVQAASTRLSKQAEYVNSLNVFPVPDGDTGTNMGMTMENGAKEVSDKPATTVGEVGQILSKGVLMGARGNSGVITSQLFRGFGQSIKDKEELTGQDLAHAFQNGVEVAYKAVMKPVEGTILTVSRGAATAALKKAEETDDAVEVMRATLKGAKRALAKTPDMLPVLKEVGVVDSGGQGLVFIYEGFLSALTGEYIASEDFKATPATMTEMVNAEHHKAVVGHVATEDIKYGYCTEVMVGLKQGPTYVKEFNYEEFQGYLSNLGDSLLVVNDDEIVKVHVHTEDPGLVMQEGLKYGSLVKVKVENMRNQHDAQMQKVEVEETVKETKEYGIIAVVAGDGLAEIFKSQGVDYIISGGQTMNPSTEDIVKAIEKVNARNVIILPNNKNIFMAAQSAADVVDIPAAVVETRTVPQGFTSLLAFDPAKSLETNVADMTNSLSDVISGSVTLAVRDTTIDGLEIHENDILGMVDGKILVSTPDMEKALKDTFDKMIDEDSEIVTIYVGEDGKQALAETLSEYLEETYEDVEVEIHQGDQPVYPYLMSVE

SEQ ID NO: 9293 - DNA, 1656 bp, Streptococcus agalactiae
atggcaaaacagaaaaataactggcgccgtgttggagttggtgtccttacacttgcttcagttgcgactcttgctgcatgtggaagtaaatcagcttcccaggattctaatggagcgattaattgggctattccaacagaaatcaatacactagatttatctaaagtcacagacacttactcaaatctagctattggtaactctagtagtaatttccttcgcttagataaagatggaaagacaagaccagatttggctactaaagtagatgtttcaaaagatggcttaacttatacagctacattacgtaaaggcttgaagtggtcagatggcagtaaacttactgcaaaggattttgtttattcatggcaacgtttagttgatcctaaaacagcttcacaatatgcttaccttgctgttgaagggcatgtgcttaatgccgataaaatcaacgaaggacaagagaaagacttgaataagctaggtgttaaggcggaaggcgatgacaaagttgttattactttatctagtccgtctccacaatttatctactaccttgcattcactaacttcatgccacaaaaacaagaagttgttgaaaaatatggaaaagattacgcaactacttcaaaaaatacagtttactcaggaccatatactgttgaaggttggaatggttcgaatggtactttcacgctgaagaaaaacaaaaattattgggacgctaaaaatgtaaaaacaaaagaagttcgcatccagactgttaaaaaaccagataccgccgttcaaatgtataaacgtggtgagttagatgcagctaatatctcaaatacttctgctatttatcaagctaataagaataataaagatgtcacagatgttctagaagcgaccactgcctatatggaatataatactactggttctgtgaaagggcttgataatgttaagattcgtcgcgccttaaacttagcaactaaccgtaaaggagttgttcaagcagccgttgatacaggctcaaaaccggcaattgcttttgcacctactggtttagccaaaacaccagatggaactgatttggcaaaatatgttgccccaggttatgaatataataaaactgaagcagcaaaactctttaaagaaggtttggctgaatcaggcttgactaagctaaaattaacaattacagcagatgctgatgctcctgctgccaaaaactctgttgactatatcaagtctacttgggaagctgctcttccaggacttactgttgaagaaaaatttgtaacctttaaacaacgcttagaagacagtagaaaacaaaactttgacatcgtagtttctctttggggtggggattatccagaaggatcaactttctacggcctctttaagtcagattcacaaaataacgatggaaaatttgctaacaaggactatgatgctgcttataacaaggcaatttctgaagatgcgatgaaaccagcagaatcagcgaaggactataaagaagcagagaaaattttatttgagcaaggtgcttataacccactctacttccgtagtggtaaaggtttacaaaatccaaaattaaaaggtgttattcgtaatactacaggtttgtcaatagactttacacatgcttataaaaataat

SEQ ID NO: 9294 - protein, 552 aa, Streptococcus agalactiae
MAKQKNNWRRVGVGVLTLASVATLAACGSKSASQDSNGAINWAIPTEINTLDLSKVTDTYSNLAIGNSSSNFLRLDKDGKTRPDLATKVDVSKDGLTYTATLRKGLKWSDGSKLTAKDFVYSWQRLVDPKTASQYAYLAVEGHVLNADKINEGQEKDLNKLGVKAEGDDKVVITLSSPSPQFIYYLAFTNFMPQKQEVVEKYGKDYATTSKNTVYSGPYTVEGWNGSNGTFTLKKNKNYWDAKNVKTKEVRIQTVKKPDTAVQMYKRGELDAANISNTSAIYQANKNNKDVTDVLEATTAYMEYNTTGSVKGLDNVKIRRALNLATNRKGVVQAAVDTGSKPAIAFAPTGLAKTPDGTDLAKYVAPGYEYNKTEAAKLFKEGLAESGLTKLKLTITADADAPAAKNSVDYIKSTWEAALPGLTVEEKFVTFKQRLEDSRKQNFDIVVSLWGGDYPEGSTFYGLFKSDSQNNDGKFANKDYDAAYNKAISEDAMKPAESAKDYKEAEKILFEQGAYNPLYFRSGKGLQNPKLKGVIRNTTGLSIDFTHAYKNN

SEQ ID NO: 9295 - DNA, 975 bp, Streptococcus agalactiae; identical to SEQ ID NO: 8471

SEQ ID NO: 9296 - protein, 325 aa, Streptococcus agalactiae
MKHITTVVIWKILRCLSLVFGVSILTFILLKQSPVDPVMASVNYDTSLTPVQYKAIAHHYGLDKPAPVQYFIWLKNFIQGHLGTSLVYRQPVIDIIRSRAGASFILMGLSWVLSGLIGFILGTLSAFHQGKLLDRIVRWFSYLQISVPTFWIGLIFLLIFSVQLGWFPIGISSPIGTLSQDITLADRIKHLILPVFTLSILGIANVTLHTRTKMMSVLSSEYVLFARARGETEWQIFKNHCLRNAIVPAITLHFSYFGELFGGSVLAEQVFSYPGLGSTLTEAGLKSDTPLLLAIVMIGTLFVFAGNLIADILNSIINPQLRRKV

SEQ ID NO: 9297 - DNA, 1146 bp, Streptococcus agalactiae
atgacgaagtacatcaaggctgaccgattcttttatgctgatcatgtaaaggaaaacggttatttagaaataaaagataatcactttggtaaatggatagaaaatatttctggacaagaggagattttagattattcaggttatcaaatagcacctggtttagttgatacacatattcatggttttgctggcgctgatgttatggattgtgattcagaaggaattttgcgaatgagtgctggcttactatctactggagtcacatctttcttgccgacaaccctaacttcagatacaaagcgactagaagaggcgtctaaatcagttgcggcagtagcgggcaaagaacaaggagcaaaaattcaaggcatctattttgagggaccatattttactgaggaatataaaggagctcaaaatccgatttatatgagaaatccaaacttggaagagtttgctcaatggcagaaggctgcaaaaggcttgattacaaaaattgctttggcaccagaacgtgagggagttgaggaatttgtctcagcaatcacaaagcaaggtgttacggtagctttaggtcattctaatgggacatataaagaagctaaaaaggcagtgaaggcgggtgcctcagtttgggtacatgcgtataatggtatgcgtggtttgacacaccgagaaccaggtatggttggtgcggtttataatttacctaatacctatgccgaactcatttgcgatggtcatcacgttgatcctgttgcttgtgacattttaatgacacaaaaaggccataatcatgtggcattaataacagattgtatggcagctggaggtgcccctgatggagattatatgttaggggaattgcccgtggttgtgtctaatggaactgcgcgtttgaaagatggaggtaatttagctggttctattcttaagctcaaagatggattaaaaaatgttgtagaatggggaattgctactccggaagaggcagtgcgtatggcgagttatgttccggcagtgtctgtaggcattgataatgtctgtggacagataaaagaaggttatgcagcggattttattgtattagataaacatctagatttagttgcaacataccttgatggggaaaaacgttggcaatct

SEQ ID NO: 9298 - protein, 382 aa, Streptococcus agalactiae
MTKYIKADRFFYADHVKENGYLEIKDNHFGKWIENISGQEEILDYSGYQIAPGLVDTHIHGFAGADVMDCDSEGILRMSAGLLSTGVTSFLPTTLTSDTKRLEEASKSVAAVAGKEQGAKIQGIYFEGPYFTEEYKGAQNPIYMRNPNLEEFAQWQKAAKGLITKIALAPEREGVEEFVSAITKQGVTVALGHSNGTYKEAKKAVKAGASVWVHAYNGMRGLTHREPGMVGAVYNLPNTYAELICDGHHVDPVACDILMTQKGHNHVALITDCMAAGGAPDGDYMLGELPVVVSNGTARLKDGGNLAGSILKLKDGLKNVVEWGIATPEEAVRMASYVPAVSVGIDNVCGQIKEGYAADFIVLDKHLDLVATYLDGEKRWQS

SEQ ID NO: 9299 - DNA, 753 bp, Streptococcus agalactiae
atgaatagattagaaaatattattagtttagtatcccagtaccaaaaaatagatgttaatacactctcggagttgttgcaagtttctaaagtaacgatacgtaaagatttagataaactagaaggcaaagggcttttgcatagagagcacggttatgcagttttaaacagtggggatgaccttaatgttaggttatcttttaaccataaaactaaaaaagaaattgctgccttagctgcaaatatggtgtctgacaatgacactatcttaatagaatcaggctctacttgtgctcttttagcagaaaatatctgtcagacaaagcgaaatgtcactattttgaccaactcttgctttattgctaactatttacgagagtatgattcatgccaaattgtcttacttggtggtgagtatcaatcaagttcacaggttacggtaggtcctctcttgaaaaagatgatttcactttttcatgtctcgttagcttttgttgggactgatggttttgatccaaaactaggatttatgggtagagatttaatgcgttctgaagttgcacaagagatggcgaatgctgccgatgaagtcattattttaacagattctagtaagtttaatcagactgcattggtggaacagcttccgttgtcaactgtatcacaagttattacagataaacatccaaattcggaaattgctaatttgttccaagaagcagagattaccattcaatctttattacaagtacca

SEQ ID NO: 9300 - protein, 251 aa, Streptococcus agalactiae
MNRLENIISLVSQYQKIDVNTLSELLQVSKVTIRKDLDKLEGKGLLHREHGYAVLNSGDDLNVRLSFNHKTKKEIAALAANMVSDNDTILIESGSTCALLAENICQTKRNVTILTNSCFIANYLREYDSCQIVLLGGEYQSSSQVTVGPLLKKMISLFHVSLAFVGTDGFDPKLGFMGRDLMRSEVAQEMANAADEVIILTDSSKFNQTALVEQLPLSTVSQVITDKHPNSEIANLFQEAEITIQSLLQVP

SEQ ID NO: 9301 - DNA, 810 bp, Streptococcus agalactiae
atggcggatatttcaattatctcaatgattttggtcgttatcgttgccttctttgctggtcttgaaggtatcctcgaccaattccaaatccatcaacctcttgttgcttgtactttaatcggtcttgtaactggtcacctcgaagcgggtattattcttggtggtagtctccaaatgattgctcttgcttgggcaaatatcggagctgccgtagcaccagacgctgcacttgcctctgttgctgctgctattattttggttaaaagtggtgacttcactcaaaaaggtatcaactttgccttctctactgctgtacctctagctattgctggacttttccttacaatgattgttcgtacaatctcaactgcacttgttcacgctggtgacaaagctgcttctgaaggaaacttcgcagcaattgaacgttttcactttatcgccctccttctccaaggattacgtattgcattcccagctgcgcttcttttagctattccatcttcttcagtacaaagtattcttgaagcaatgcctgattggttaaatggtggtatgcaagttggtggtgccatggttgttgccgttggttacgctatggttatcaatatgatggctactcgcgaagtttggcctttctttgctcttggatttgctctagcagctttgaaccagttaactcttattgcaatgggtactattggtgttgctatcgccctcatctacatcagtttatcaaaaatgggtggaagcaaaggtacttctaacgcaggttctaacgatcctatcggcgatatcttagaggactac

SEQ ID NO: 9302 - protein, 270 aa, Streptococcus agalactiae
MADISIISMILVVIVAFFAGLEGILDQFQIHQPLVACTLIGLVTGHLEAGIILGGSLQMIALAWANIGAAVAPDAALASVAAAIILVKSGDFTQKGINFAFSTAVPLAIAGLFLTMIVRTISTALVHAGDKAASEGNFAAIERFHFIALLLQGLRIAFPAALLLAIPSSSVQSILEAMPDWLNGGMQVGGAMVVAVGYAMVINMMATREVWPFFALGFALAALNQLTLIAMGTIGVAIALIYISLSKMGGSKGTSNAGSNDPIGDILEDY

SEQ ID NO: 9303 - DNA, 306 bp, Streptococcus agalactiae
atgcaagagtactttggtattggtcttgatagtagcagccgctgttaccactatcatactaaattggatattgtcgctttaaaatgtgctgtttgtcaaaaatattatgcttgttataaatgtcatgatgcactcgaggagcattgttttgcagcaacaaaatctgatgaaacgtttcctgtcttatgcggttcttgtcgtcagatgttgacattaaaagagtataaaactggtttttgtccttattgtcgtatgctttttaatccaaattgtcaacgccatgattctatttatttttcgaaggag

SEQ ID NO: 9304 - protein, 102 aa, Streptococcus agalactiae
MQEYFGIGLDSSSRCYHYHTKLDIVALKCAVCQKYYACYKCHDALEEHCFAATKSDETFPVLCGSCRQMLTLKEYKTGFCPYCRMLFNPNCQRHDSIYFSKE

SEQ ID NO: 9305 - DNA, 1347 bp, Streptococcus agalactiae
atgacacatattacatttgactattcaaaagtcttgggtcaatttgtaggcgaacacgagttagactacctacaaccacaagtaagtgcagcagatgctttccttcgtcaagggactggtcctggctcagattttctcggatggatggacctcccagaaaactatgacaaagaagaattttctcgcattcaaaaagccgctgaaaagattaaatcagatagcgaagtactcgtggttattggtattggtggttcgtaccttggcgcaaaagcagcaattgactttttgaataatcattttgctaatttgcaaaccgcagaagaacgtaaagcgcctcagattctttatgctggaaattctatttcatctacttaccttgccgatttagttgaatacgtccaagataaagaattctcagtaaatgtcatttcaaaatcaggtacaacaactgaaccagcgattgctttccgtgtatttaaagaacttctagttaaaaagtacggtcaagaagaagctaataaacgtatctacgctacaactgataaagttaaaggtgccgtaaaagttgaagcagatgctaacaattgggaaacatttgtagttcctgataatgttggtggtcgtttctcagtactgacagccgtaggtcttcttccaattgctgcttcaggagcagatattactgctcttatggaaggcgcaaatgctgctcgtaaagatttatcttcagataaaatctctgaaaacattgcttatcagtacgctgcagttcgtaatgttctttatcgcaaaggttatatcacagagattttagctaactacgaaccatcattacaatactttggtgaatggtggaaacaattagcaggtgaatcagaaggtaaagatcaaaaaggtatctatcctacatcagcaaacttctcaactgatcttcactcacttggtcaatttattcaagaaggttaccgtaacctctttgagacagttgttcgcgttgagaaacctcgtaaaaatgtgactattcctgaattaaccgaagatttagatggtcttggttatcttcaaggaaaagatgtagattttgttaataaaaaagcaacagatggtgtactccttgctcatacagatggtggggttccaaatatgtttgtaacgcttcctacacaagacgcttacacccttggttacactatttacttctttgagttagcaattggcctttcaggttatcttaactcagtaaatccatttgatcaaccaggggtagaagcatataaacgtaatatgtttgctcttctaggtaaacctggattcgaagagcttagcgctgaattgaatgcacgtctt

SEQ ID NO: 9306 - protein, 449 aa, Streptococcus agalactiae
MTHITFDYSKVLGQFVGEHELDYLQPQVSAADAFLRQGTGPGSDFLGWMDLPENYDKEEFSRIQKAAEKIKSDSEVLVVIGIGGSYLGAKAAIDFLNNHFANLQTAEERKAPQILYAGNSISSTYLADLVEYVQDKEFSVNVISKSGTTTEPAIAFRVFKELLVKKYGQEEANKRIYATTDKVKGAVKVEADANNWETFVVPDNVGGRFSVLTAVGLLPIAASGADITALMEGANAARKDLSSDKISENIAYQYAAVRNVLYRKGYITEILANYEPSLQYFGEWWKQLAGESEGKDQKGIYPTSANFSTDLHSLGQFIQEGYRNLFETVVRVEKPRKNVTIPELTEDLDGLGYLQGKDVDFVNKKATDGVLLAHTDGGVPNMFVTLPTQDAYTLGYTIYFFELAIGLSGYLNSVNPFDQPGVEAYKRNMFALLGKPGFEELSAELNARL

SEQ ID NO: 9307 - DNA, 1080 bp, Streptococcus agalactiae
gtgaatagagaggttactatgtcaatagaatcagattttttccggaaaaaacgttttattttttcatcgcttgaggagtttggatttatcaaatctgaccaagagtatatctattgtcaaacatttatggataatgactttaaagctattatcacgatttcattggatggaaagatagctggtaaggttattgattcggcacttgaagaagaatatttaccgcttcgagcagcaaattataatggttcgtttgttggcgaagtacgatcggcttatatggctatattaggtgatatttcagattcttgttgtaaggacttattatttaccaaagatcaaagtaatcgtttagcggagaagatagctaaaacttttgaagattcagttgattatccatttgcgaagcacccacaatatgcttcctatcgtgtgtcaggtaaatggtatgctctgctttttccattgaagatggggaaactagaaaatgttccagctcaactgtcagaagatgaggttgaagttttgaatattaaagtcaatcctcaagatatggaaatacttttacaaaaagaaggtatttatccttcttatcatatgtctaaaaagacttgggtatctatcgttttagacaatactttgtctgatatagaaatttttaaattggtatcagatagtcgtaagcttgtttctcacaataaaaaatcaaattctgagccagagttttggattattcctgctaatcctaaattttacgatattgataaggagtttgcagagcatcaattgattgattggactcaaaaaggaaagattgcggtgggagattatgtgtttatttatattacagcacctattcgtgcttttcgctatgtctgtcaagtgatagaacgtgaccttaaaacaagtacttacttaggagcaagagatgtcaaagcttatatgcgactcaaactgataaggcaatttgaagattctacctatcctgtagcatttttagcagaacacggcgttaagactgtgagaggaccacggcgaatgaccaaggaattgcgacaagtcatggcaaaaacaattctagag

SEQ ID NO: 9308 - protein, 360 aa, Streptococcus agalactiae
MNREVTMSIESDFFRKKRFIFSSLEEFGFIKSDQEYIYCQTFMDNDFKAIITISLDGKIAGKVIDSALEEEYLPLRAANYNGSFVGEVRSAYMAILGDISDSCCKDLLFTKDQSNRLAEKIAKTFEDSVDYPFAKHPQYASYRVSGKWYALLFPLKMGKLENVPAQLSEDEVEVLNIKVNPQDMEILLQKEGIYPSYHMSKKTWVSIVLDNTLSDIEIFKLVSDSRKLVSHNKKSNSEPEFWIIPANPKFYDIDKEFAEHQLIDWTQKGKIAVGDYVFIYITAPIRAFRYVCQVIERDLKTSTYLGARDVKAYMRLKLIRQFEDSTYPVAFLAEHGVKTVRGPRRMTKELRQVMAKTILE

SEQ ID NO: 9309 - DNA, 990 bp, Streptococcus agalactiae
atgaagaaaagctttattcatcagcaacaggagatttcttttgtcaaaaatacttttacacaatatttgattgataagttagaaatcgtcgaagtgcaaggacctattcttagtcaggtcggggatggtatgcaagataatttatctggtattgaacatcctgtatcggtgaaagtccttaatatacctgaagctgaatttgaagtcgttcactcattggctaaatggaaacgccatactttggcaagatttgggtttaatgagggagaaggtctttttgttcatatgaaagctcttcgtccagatgaagattctcttgatccaacacactcagtttacgtagatcagtgggactgggagaaggtcattcctgatggtagacgtaatttggactatctaaaagaaactgtggaaaaaatctacaaagctatccgcctaacagagcttgccgtggaagctcgttttgatattgaatccattttaccaaagcgtattacctttattcatacagaagaattggtagaaaaatacccagacttaagccctaaagagcgtgaaaatgccatcgctaaggagtatggcgcagtctttttgattggtattggtggagagttagcagatggtaaaccacatgatggtcgtgcaccggactatgatgactggacaacaccatcagaaaatggttttaaaggtctcaatggtgatattttagtgtggaacgaacagcttggaactgcctttgaactatcatcaatgggaattcgagttgatgaagatgctcttaaacgtcaagttgttctcaccggtgatgaagatcgtttagagtttgagtggcataagacgctattacgtggtttcttccctctgactattggtgggggaattggtcaatcacgattagctatgttcttgcttcgtaaaaaacatattggagaagtacagtcaagtgtctggccaaaagaagtcagagatacctttgaaaatatatta

SEQ ID NO: 9310 - protein, 330 aa, Streptococcus agalactiae
MKKSFIHQQQEISFVKNTFTQYLIDKLEIVEVQGPILSQVGDGMQDNLSGIEHPVSVKVLNIPEAEFEVVHSLAKWKRHTLARFGFNEGEGLFVHMKALRPDEDSLDPTHSVYVDQWDWEKVIPDGRRNLDYLKETVEKIYKAIRLTELAVEARFDIESILPKRITFIHTEELVEKYPDLSPKERENAIAKEYGAVFLIGIGGELADGKPHDGRAPDYDDWTTPSENGFKGLNGDILVWNEQLGTAFELSSMGIRVDEDALKRQVVLTGDEDRLEFEWHKTLLRGFFPLTIGGGIGQSRLAMFLLRKKHIGEVQSSVWPKEVRDTFENIL

SEQ ID NO: 9311 - DNA, 732 bp, Streptococcus agalactiae
atggttgagccaattatttcaatacaaggacttcataaaagttttgggaaaaatgaggttttaaaaggcattgacttggatattcatcaaggagaagtagtggttattattggcccttctggctctggtaagtcaacatttttaagaacaatgaatctcttggaagtaccaacaaagggaacagtgacttttgaagggattgatataacagacaaaaagaatgatatttttaaaatgcgcgaaaaaatgggcatggtttttcaacagttcaatctatttcccaatatgactgtactagaaaatattactttatcacctattaagacaaaggggctttctaatcttgatgctcagacaaaagcatatgagctacttgaaaaagttggactcaaagagaaggctaatacttatccagctagcttatctggaggacaacaacaacgaattgctattgcaagaggtcttgcaatgaatcctgatgtccttctttttgatgaacctacttcagctcttgatcctgaaatggtaggtgaagtcttgactgttatgcaagatttagctaaatctggtatgacgatggttattgtcactcatgaaatgggttttgcacgtgaagtagcggatcgtgtcatttttatggatgcaggaattattgttgagcaaggggcccctaaggaagtatttgagcagacaaaagaaatccgcacaagagatttcttaagtaaagtatta

SEQ ID NO: 9312 - protein, 244 aa, Streptococcus agalactiae
MVEPIISIQGLHKSFGKNEVLKGIDLDIHQGEVVVIIGPSGSGKSTFLRTMNLLEVPTKGTVTFEGIDITDKKNDIFKMREKMGMVFQQFNLFPNMTVLENITLSPIKTKGLSNLDAQTKAYELLEKVGLKEKANTYPASLSGGQQQRIAIARGLAMNPDVLLFDEPTSALDPEMVGEVLTVMQDLAKSGMTMVIVTHEMGFAREVADRVIFMDAGIIVEQGAPKEVFEQTKEIRTRDFLSKVL

SEQ ID NO: 9313 - DNA, 273 bp, Streptococcus agalactiae
atggctaacaaacaagatttaattgcaaaagtagcagaagctacagaattaactaaaaaagattcagcagcagcagtagatgcagtttttgcagctgtagcagattaccttgctgaaggtgaaaaagtacaattaatcggttttggtaactttgaagttcgtgaacgtgcagctcgtaaaggtcgtaacccacaaactggtgcagaaatcgaaattgcagcatcaaaagttccagcatttaaagctggtaaagctcttaaagacgctgttaaa

SEQ ID NO: 9314 - protein, 91 aa, Streptococcus agalactiae
MANKQDLIAKVAEATELTKKDSAAAVDAVFAAVADYLAEGEKVQLIGFGNFEVRERAARKGRNPQTGAEIEIAASKVPAFKAGKALKDAVK

SEQ ID NO: 9315 - DNA, 933 bp, Streptococcus agalactiae
atgattatttttcaacaaattcttgataaaatcaaagagtacgacaccatcattatccatcgacatatgagaccagaccctgatgctcttggtagccaaatcggcttaagggatatcatcaggcataattttccaaagaaaaaagtacttgctactggttttgacgaacccactctcgcttggattgctaaaatggatcaagtgaccgaccaagactatcaaggcgctcttgttgttgttacagatacagcaaataccccacgcattgatgatgaacgttataaaaaaggtgactttttaattaaaattgaccatcatccaaacgatgaagtctatggagatctctcttatgtagatactaacgcctctagtgcaagtgaaattgtgacagactttgctctttcttgtgatttgttgttatcaacaagtgcagcaagagttctatataatggtattgtaggagatacaggacgctttttatatcctgctaccacaagtaaaacactgaagattgctagcaaacttcgtgaatttgactttgatttttctgcaatggcacgtcaaatggattcctttcctttcaaaattgcaaaattacaaggctttatttttgagcaacttaaaattgacaagaacggcgctgcatgcgttactttaacacaagaagacctaaaacgcttcgatgtaacagatgcagagactgctgcaatcgttggtgtacctggaaaaattgatattgtagaaagttgggcaattttcgttgaacaaagcgatgggcattatcgtgtgcgcctacgtagtaagtcacacatcattaatgaaatagctaaacgtcataatggtggcggacatcctttagccagcggagctaattcttatagtttggaagagaatcaagctatttaccaagaaatccaggaaatactttcttta

SEQ ID NO: 9316 - protein, 311 aa, Streptococcus agalactiae
MIIFQQILDKIKEYDTIIIHRHMRPDPDALGSQIGLRDIIRHNFPKKKVLATGFDEPTLAWIAKMDQVTDQDYQGALVVVTDTANTPRIDDERYKKGDFLIKIDHHPNDEVYGDLSYVDTNASSASEIVTDFALSCDLLLSTSAARVLYNGIVGDTGRFLYPATTSKTLKIASKLREFDFDFSAMARQMDSFPFKIAKLQGFIFEQLKIDKNGAACVTLTQEDLKRFDVTDAETAAIVGVPGKIDIVESWAIFVEQSDGHYRVRLRSKSHIINEIAKRHNGGGHPLASGANSYSLEENQAIYQEIQEILSL

SEQ ID NO: 9317 - DNA, 1194 bp, Streptococcus agalactiae; identical to SEQ ID NO: 8577

SEQ ID NO: 9318 - protein, 398 aa, Streptococcus agalactiae
MIKRFDNYAQYVLVLGFSLLIGGVVGAITAVFGRVLLFLTAFRSDYIAYLLPFLSIVGLFIVFVYQKFGGKSVKGMGLVFEVGHGNEETIPKRLVPLVILTTWLTHLFGGSAGREGVAVQIGATVSHYFQKYCRLQNASQLFLVMGMAAGFAGLFQTPLAATFFAIEVLVVGRLMVSYVLPSLIAALTANFVSHSLGLEKFSHSIATSMALTPDIILKLLVLGLCFGLCGNLFAYLLAKAKLIASSRLLNPYKRIFTLGLLATFLLFIFHFGRYSGLGTNLIEASFTNKNLYDYDWLLKLCLTVITLAAGYQGGEVTPLFAIGASLGVIIAPILGLPVILVAALGYTSVFGSATNTLLGPILIGGEVFGFANTPYFVIVCLVAYSISHAHTIYGAQSR

SEQ ID NO: 9319 - DNA, 1077 bp, Streptococcus agalactiae
atgtggatagaggagctagccaacgggaaatttaaatatatcgaaagatatactgaccctctaacaaataagtacaaaaaagtatctgtgacactagataaaaattctagtcaagctcagaaaaaagctggtttaatattgcaggaaaagattgaagataggctcgctatcagaaatcactcagaaatgacttacggagaacttaaaaaggaatatctaaagcaatggataccgaccgtcaaagactccacaaaacgtggttatttagtatctgacagtcatatagcaaccgtgttaccagatgatacaattatcaacaagttgactaaacgtgatattagactaatcattgataaactattaaaacacaattcgtatcatgttacgcataaatgtagaaagagattgcatgccatattttcttatgcgatacaaatggactatatgacaagtaatccgacggagaacgtcttagttcccaaaccaaaggatgattacaagcctgaaaaggtgctttatttaacatctaacgaggtttacgacctgtgcaatagaatgatagacaatgacgaacaaacgctcgcagacatcgttttattcatgtttttgacgggtgtacggtatggagaattatcttgtctgacttacgacaaaatagattttgaaaataaagaaattctgattaatgcaacttacgattttaacacacgagaaatcactacgaccaagaccaaaaaatcaacacgcaaaatatctgtatcagataatattttagatatcgtcaatagacagaaaaagacaagttcattcgtctttccaaattcgaacggtgtaccgattttaaacgcgtacatcaataagcgattgaaaatttatggagattatcacacgcacttatttagacactcgcatatatcatttttagcagaaaaagggataccgctaaatgcgataatggatagagttggtcacagcgatccaaaaacaacattatctatttacagtcacacaactgtaaatatgaaagaaattataaataaacaaactgccccttttgtgccccttttaaaatcggaa

SEQ ID NO: 9320 - protein, 359 aa, Streptococcus agalactiae
MWIEELANGKFKYIERYTDPLTNKYKKVSVTLDKNSSQAQKKAGLILQEKIEDRLAIRNHSEMTYGELKKEYLKQWIPTVKDSTKRGYLVSDSHIATVLPDDTIINKLTKRDIRLIIDKLLKHNSYHVTHKCRKRLHAIFSYAIQMDYMTSNPTENVLVPKPKDDYKPEKVLYLTSNEVYDLCNRMIDNDEQTLADIVLFMFLTGVRYGELSCLTYDKIDFENKEILINATYDFNTREITTTKTKKSTRKISVSDNILDIVNRQKKTSSFVFPNSNGVPILNAYINKRLKIYGDYHTHLFRHSHISFLAEKGIPLNAIMDRVGHSDPKTTLSIYSHTTVNMKEIINKQTAPFVPLLKSE

SEQ ID NO: 9321 - DNA, 453 bp, Streptococcus agalactiae
atgactgaacttgacaataaaatcctacaaaaagcaagcggtgaaaatcgtcttgatcctgatcaacaacgttactaccttggtacttataaagaaagagttgtgctccacttaagtttaaaagaggcacaagaagaaaagtttcaacttgctataacatctgctcttaataatctgatacttgaatatcctaatcttagtttaaaattatcaccaaatctccctactgatgttcaaatgttctacatgaagttagctaaccgtctatcactagctgctacgattgttaatgaagcaaatgccaattctccatttggtattattatacatagtgataaggctgaaaacgttgaatggaacgattttgagacacaattccctgatttattcaattcaccaaaaaaagaggagtctcctaaaaaaagtctatggcaacatttctttagtcaaaaa

SEQ ID NO: 9322 - protein, 151 aa, Streptococcus agalactiae
MTELDNKILQKASGENRLDPDQQRYYLGTYKERVVLHLSLKEAQEEKFQLAITSALNNLILEYPNLSLKLSPNLPTDVQMFYMKLANRLSLAATIVNEANANSPFGIIIHSDKAENVEWNDFETQFPDLFNSPKKEESPKKSLWQHFFSQK

SEQ ID NO: 9323 - DNA, 783 bp, Streptococcus agalactiae
atgaaaagattacataaactgtttataaccgtaattgctacattaggtatgttgggggtaatgacctttggtcttccaacgcagccgcaaaacgtaacgccgatagtacatgctgatgtcaattcatctgttgatacgagccaggaatttcaaaataatttaaaaaatgctattggtaacctaccatttcaatatgttaatggtatttatgaattaaataataatcagacaaatttaaatgctgatgtcaatgttaaagcgtatgttcaaaatacaattgacaatcaacaaagactatcaactgctaatgcaatgcttgatagaaccattcgtcaatatcaaaatcgcagagataccactcttcccgatgcaaattggaaaccattaggttggcatcaagtagctactaatgaccattatggacatgcagtcgacaaggggcatttaattgcctatgctttagctggaaatttcaaaggttgggatgcttccgtgtcaaatcctcaaaatgttgtcacacaaacagctcattccaaccaatcaaatcaaaaaatcaatcgtggacaaaattattatgaaagcttagttcgtaaggcggttgaccaaaacaaacgtgttcgttaccgtgtaactccattgtaccgtaatgatactgatttagttccatttgcaatgcacctagaagctaaatcacaagatggcacattagaatttaatgttgctattccaaacacacaagcatcatacactatggattatgcaacaggagaaataacactaaat

SEQ ID NO: 9324 - protein, 261 aa, Streptococcus agalactiae
MKRLHKLFITVIATLGMLGVMTFGLPTQPQNVTPIVHADVNSSVDTSQEFQNNLKNAIGNLPFQYVNGIYELNNNQTNLNADVNVKAYVQNTIDNQQRLSTANAMLDRTIRQYQNRRDTTLPDANWKPLGWHQVATNDHYGHAVDKGHLIAYALAGNFKGWDASVSNPQNVVTQTAHSNQSNQKINRGQNYYESLVRKAVDQNKRVRYRVTPLYRNDTDLVPFAMHLEAKSQDGTLEFNVAIPNTQASYTMDYATGEITLN

SEQ ID NO: 9325 - DNA, 519 bp, Streptococcus agalactiae
ttgatgtcaattttaattgcgatgattttctgtttcttgatcgtatctccaatcacaacagttgggattgctttggcaattagtttgtccggaattggttctggtgctgctaatttaggtatctgtgctgctagttttgggctttgtatggctgggtggtcagtcaattctaaggggacagccttagcgcatgttttagggtctcctaagatttcgatggctaatgtattagcaaaaccgaagattatgctacctatgatatcttcagcagcaatactaggaattctcggagctctctttaatattcaaggaacaccagctagtgcaggttttggtatcagtggtttgattggaccgattaatgctcttaatttagcaaaaggtggatggtcagttatgaatatgttattgataattataatatttgttgctgcaccaattatattgaattttatttttaattacctctttataaaagtacttaaaattattgatccaatggactataaattagatatt

SEQ ID NO: 9326 - protein, 173 aa, Streptococcus agalactiae
MMSILIAMIFCFLIVSPITTVGIALAISLSGIGSGAANLGICAASFGLCMAGWSVNSKGTALAHVLGSPKISMANVLAKPKIMLPMISSAAILGILGALFNIQGTPASAGFGISGLIGPINALNLAKGGWSVMNMLLIIIIFVAAPIILNFIFNYLFIKVLKIIDPMDYKLDI

SEQ ID NO: 9327 - DNA, 1266 bp, Streptococcus agalactiae
atgaaaattgataaaaggcatcttctgaattattccatcctcattccctatttgatattgtctattctaggcttaattgtaatttattcgacaactagtgcaactctaattcagcttggagctaacccttttcgttcagtaatcaaccagggtgtcttttgggcagtcagtttggttgcaattatctttatctataaactgaaactaaattttttgaaaaattctaaagtgttgactatggcagtattggtagaagtatttttactactaatagcgcgcttttttacacaagaagttaatggagcacatggttggattgttattggtcctattagttttcaacctgctgaatatttaaaagttatcattgtatggtatttagcgtttacttttgctcgaaggcaaaaaaagatagaaatatatgattatcaagctttgacaaaagggagatggcttccgagatcactaagcgacctaaaagattggcgattttattctttatttatgattggtttggtaattgcacaacctgatttaggaaatggttcgataattgttctaacggtcattattatgtactgtattagtggtattggttatcgatggttttcagctttacttggtctaatcgtcgtggggtcaactttatttatcggaactattgcagttgttggagttgagacaatggctaaagtccctgtctttggttatgtagctaagcgatttaatgctttttttgacccatttaaagatttaacagattcaggacaccagttggctaattcgtattatgcaatgagcaacggtggctggtttggtcgaggacttgggaattctattgaaaaattagggtacttaccagaagcaacaacagactttgtcttttcaattgttattgaggaattaggagttattggtgcagggtttattttagctttggttttcttcttaattttacgtattatgcacgtaggtataaaggctaaagatcctttcaactcaatgatcgctcttggtattggagcaatgctattgatgcaagtttttgttaacattggtggtatttctgggttaatcccctcaactggagtgacatttcctttcttatcccaaggagggaacagcctcttggtactttctgtagcgatcggattcgtgcttaatattgatgctaacgagaaaaaggaactcataatgaaagaagcagaagagcaatataagccacaagaaaaaaatgaaaaaataatcaaccttgatgcctttaaa

SEQ ID NO: 9328 - protein, 422 aa, Streptococcus agalactiae
MKIDKRHLLNYSILIPYLILSILGLIVIYSTTSATLIQLGANPFRSVINQGVFWAVSLVAIIFIYKLKLNFLKNSKVLTMAVLVEVFLLLIARFFTQEVNGAHGWIVIGPISFQPAEYLKVIIVWYLAFTFARRQKKIEIYDYQALTKGRWLPRSLSDLKDWRFYSLFMIGLVIAQPDLGNGSIIVLTVIIMYCISGIGYRWFSALLGLIVVGSTLFIGTIAVVGVETMAKVPVFGYVAKRFNAFFDPFKDLTDSGHQLANSYYAMSNGGWFGRGLGNSIEKLGYLPEATTDFVFSIVIEELGVIGAGFILALVFFLILRIMHVGIKAKDPFNSMIALGIGAMLLMQVFVNIGGISGLIPSTGVTFPFLSQGGNSLLVLSVAIGFVLNIDANEKKELIMKEAEEQYKPQEKNEKIINLDAFK

SEQ ID NO: 9329 - DNA, 1536 bp, Streptococcus agalactiae
atgaataaatcattcaataccaaattaggtttggtaactgtagcggtattatcaggtattgtattaacgtctcaattacctgtgaacgctaaagctgagacaccagtaatggcagcaagtgcacaacaaggtttccgttttgtagcaaccgttgtagatagtcagacgcatgtcttgccgggaaaattggtaactttgtcagaggtgacaagtggtcagcctaaaattattgcaagtgtgaaaacgaatgatgccggacaagctatttttaataatctccctataaaacgtaaccttagtgtgtctgttgatggacaagtaaaaggatatactattcgaactgacgtagcaggttctagtaaagcagctagttttacagcaacaggagtagggacaaatgagccaacgtattcaaaaaaaaccatagacatcacagtgagagaccagaatgctgaacctgtttcaggcaggacagttaccttaaaaacacaagctggtcgtgagattgctagcttggtttctggtgacaatggattaactcgctttactgatcgtttactagatggaacattctaccaatattttgttgatgggaaaaaaattggtgatattgtacctggagaatcaagaagtgcatatgttaatgttgcacctaaaaaagattattttacctttacagtcactgctttagataaagatggacttgttgttaagggaaaagaagtaacgttgactgatattactgatggtaaagcagtagcgcttgcttctttaaaaacgaatgataatggacaagctatctttaccaacctaccattatcaagaaatatcagtgtttcaattgatggaaaatcaaagggctatactcttcgaactgatgtagcaggctctcataaagcggctgcattctatgtagatggtaaaggtaccaaagcacctcaatttagtgcagaagcagcggttgtaactgtttacgatgctaatggaaatactatagcaaaccaagaagtgacattaactaattcaaatgggacaattgttgcaaaaggtttgactgaaaaagatggcaaagcaaggttcgccaataaattaatggcaggaacgttatacaatatttttgtaaatggtattgagatgcctaaaactgcccttgttggtagtgatgtcagtgtttttctaacagataaacaaattaagaaagaaaaacctgttactcctgataaattggataaagaaatgaaccaagagaaggaaaaggagctcttagatactccaaaaccagtaccacctacttcgaaaccaacagcaccaattaaaaataaaaaggacgattcccctaagaagttcacgaaaagtcaatcttctagtttgaagtcaagtgttaaggctataggtgctaagccaaaagctatgacagccttagctaaaaaattgcctaaaactggtgatcaagccattagtattttaactttggttggttttattgtaacagggttagcgattatgttaggcttccttaaaaaatcacgatcaaaa

SEQ ID NO: 9330 - protein, 512 aa, Streptococcus agalactiae
MNKSFNTKLGLVTVAVLSGIVLTSQLPVNAKAETPVMAASAQQGFRFVATVVDSQTHVLPGKLVTLSEVTSGQPKIIASVKTNDAGQAIFNNLPIKRNLSVSVDGQVKGYTIRTDVAGSSKAASFTATGVGTNEPTYSKKTIDITVRDQNAEPVSGRTVTLKTQAGREIASLVSGDNGLTRFTDRLLDGTFYQYFVDGKKIGDIVPGESRSAYVNVAPKKDYFTFTVTALDKDGLVVKGKEVTLTDITDGKAVALASLKTNDNGQAIFTNLPLSRNISVSIDGKSKGYTLRTDVAGSHKAAAFYVDGKGTKAPQFSAEAAVVTVYDANGNTIANQEVTLTNSNGTIVAKGLTEKDGKARFANKLMAGTLYNIFVNGIEMPKTALVGSDVSVFLTDKQIKKEKPVTPDKLDKEMNQEKEKELLDTPKPVPPTSKPTAPIKNKKDDSPKKFTKSQSSSLKSSVKAIGAKPKAMTALAKKLPKTGDQAISILTLVGFIVTGLAIMLGFLKKSRSK

SEQ ID NO: 9331 - DNA, 1542 bp, Streptococcus agalactiae
atgacattacaagacgaaatcaaaaaacgccgtacttttgccatcatctctcacccggatgctggtaagacgactattactgagcaattattatattttggtggtgaaattagagaagcagggacagtaaaagggaaaaaatcaggtacttttgcaaagtccgactggatggatattgaaaagcaacggggtatctctgttacttcatctgttatgcaatttgattacgcgggtaaacgtgttaatattttggatacacctggacatgaggatttctcggaagatacataccggaccttaatggctgtggatgcagctgtcatggttgtagattcggctaaaggtattgaggctcaaactaaaaaactttttgaagttgttaagcatcgtaatattccggtttttacgtttattaataaattggaccgtgatggacgtgagccattggatttgcttgaagagttagaagaagtactaggtattgcttcttatccaatgaattggccgattggtatggggaaatcatttgaagggctttatgatttacataataaacgtttagaactctataagggagacgagcgttttgcaagtattgaagacggtgatcagctgtttgccaataatccattttatgaacaagtcaaagaagatattgaacttcttcaagaagcaggtaatgacttttcagaacaagctattcttgatggtgacctaactccagtattctttggctctgcccttacgaactttggagttcagacttttcttgatactttcttggagtttgctccagaacctcatggtcacaagactacagaaggtaatgttattgaccccttggctaaagatttttcaggttttgtctttaaaattcaagctaacatggacccacgtcatcgcgaccgtattgcttttgttcgtattgtttctggtgaatttgagcgcggtatgggagttaatttgacacgtactggtaaaggtgctaagctctccaatgttactcaatttatggcagaatcacgtgaaaatgtgacgaatgctgttgctggggatattatcggggtttatgatacaggaacttatcaagttggggataccttaacagttgggaaaaataaatttgaatttgaaccattaccaacttttaccccagaattatttatgaaagtatcagcaaaaaatgttatgaagcagaaatcattccacaaaggtattgagcaattagtacaagaaggagcaatccagctttataagaattatcagacaggcgaatacatgctgggtgctgtgggtcaacttcagtttgaagtttttaaacatcgtatggaaggtgaatacaatgctgaagttgttatgacaccaatgggtaaaaagactgtacgttggattaactcagacgatttagacgaacgcatgtcttcaagccgaaatattttagcaaaagatcgttttgaccaaccagttttcctatttgaaaatgattttgcacttcgctggtttgctgataagtatcctgatgtgaagcttgaagaaaaaatg

SEQ ID NO: 9332 - protein, 514 aa, Streptococcus agalactiae
MTLQDEIKKRRTFAIISHPDAGKTTITEQLLYFGGEIREAGTVKGKKSGTFAKSDWMDIEKQRGISVTSSVMQFDYAGKRVNILDTPGHEDFSEDTYRTLMAVDAAVMVVDSAKGIEAQTKKLFEVVKHRNIPVFTFINKLDRDGREPLDLLEELEEVLGIASYPMNWPIGMGKSFEGLYDLHNKRLELYKGDERFASIEDGDQLFANNPFYEQVKEDIELLQEAGNDFSEQAILDGDLTPVFFGSALTNFGVQTFLDTFLEFAPEPHGHKTTEGNVIDPLAKDFSGFVFKIQANMDPRHRDRIAFVRIVSGEFERGMGVNLTRTGKGAKLSNVTQFMAESRENVTNAVAGDIIGVYDTGTYQVGDTLTVGKNKFEFEPLPTFTPELFMKVSAKNVMKQKSFHKGIEQLVQEGAIQLYKNYQTGEYMLGAVGQLQFEVFKHRMEGEYNAEVVMTPMGKKTVRWINSDDLDERMSSSRNILAKDRFDQPVFLFENDFALRWFADKYPDVKLEEKM

SEQ ID NO: 9333 - DNA, 732 bp, Streptococcus agalactiae
atgataatagaattaaagagtgttggaaaaatttttccaaaatcacagtttagattagatgatatttcttttaatatagaagaaggcgagatagttggtctgattggttctaatggtactggaaagagtactattttgaagatgattaatggcttaatcccttatgataaaggaaatatttattatcaaggaaaagaagtgaagtctttttctgataataagttacgtcagatgcgtaaagatattgcttatatttttcaaaatcataatttgttagcaggagaaagtgtatattatcatctagctttagtttataaattaaatcatcaaaaagtaaatcatgacgcaattaatgatatcttagattttttaggtttgatggatttaaaacaggtgaaatgccatagtttgagtggtgggcagcaacaaaaagttgcaatcgctatggctgttttgcaaaaaccgaaacttattctatgtgatgagatcagctctgccttagatactaatagtgaaaaagagatatttaacttgttgtctgatcttcgtgaaaaatatggtatctctatcttgatgattgctcatcacctatctcttttaaaacaatattgtgatcgtgtaatgattttggatcaccagactattgtagatactgttgttccagtgaaagcaactctgaatcaattaaagtcaaactacgtagatcaagtaaaggagtttttgttacatgat

SEQ ID NO: 9334 - protein, 244 aa, Streptococcus agalactiae
MIIELKSVGKIFPKSQFRLDDISFNIEEGEIVGLIGSNGTGKSTILKMINGLIPYDKGNIYYQGKEVKSFSDNKLRQMRKDIAYIFQNHNLLAGESVYYHLALVYKLNHQKVNHDAINDILDFLGLMDLKQVKCHSLSGGQQQKVAIAMAVLQKPKLILCDEISSALDTNSEKEIFNLLSDLREKYGISILMIAHHLSLLKQYCDRVMILDHQTIVDTVVPVKATLNQLKSNYVDQVKEFLLHD

SEQ ID NO: 9335 - DNA, 606 bp, Streptococcus agalactiae
atggcaattattttaccagatttaccctatgcatatgatgcgcttgagccacatattgatgctgagacaatgacactacatcatgataagcaccatgcaacttatgttgctaatgcaaatgctgctcttgagaaacatcctgaaattggagaagacttagaggcgctcttagctgatgtttctcaaattccagaagatattcgtcaggcagtcatcaataacggtggtggacatcttaaccacgctcttttctgggaattgatgtcaccagaagaaactcaaatttcacaagagttatctgaagacattaatgcaacttttggttcatttgaagactttaaagctgctttcacagcagcagcaacaggacgttttggttcaggttgggcttggcttgttgttaatgctgaaggcaaacttgaagtgctttcaactgccaatcaagatactccaattatggaaggcaagaaacctattttagggcttgatgtatgggagcatgcttattacttaaactatcgtaatgttcgtcctaactacatcaaagctttctttgaaattattaactggaataaagtaaatgaactttaccaagctgctaaagct

SEQ ID NO: 9336 - protein, 202 aa, Streptococcus agalactiae
MAIILPDLPYAYDALEPHIDAETMTLHHDKHHATYVANANAALEKHPEIGEDLEALLADVSQIPEDIRQAVINNGGGHLNHALFWELMSPEETQISQELSEDINATFGSFEDFKAAFTAAATGRFGSGWAWLVVNAEGKLEVLSTANQDTPIMEGKKPILGLDVWEHAYYLNYRNVRPNYIKAFFEIINWNKVNELYQAAKA

SEQ ID NO: 9337 - DNA, 894 bp, Streptococcus agalactiae
ttgacacttatgtcagttgccacattagctgcctgctcaggtaaaacatcaaatggaacaaatgttgttacaatgaagggcgacactattacagtctctgatttttatgatcaagtaaaaacatcaaaagctgcacaacaatcaatgcttacattgatcctctcacgtgtttttgatacacagtatggtgataaagtttcagataaaaaagtatcagaagcttataataagacagctaaaggctatggtaattcattttcaagcgcactttcacaagcaggtttgactccggaaggttacaaacaacaaattcgcacaactatgcttgtggaatatgctgtaaaagaagcagctaagaaagaattaacagaagcaaactataaagaagcatataaaaactatactcctgaaacttctgtacaagtaatcaaattggatgcagaagataaagctaaatctgtccttaaagatgtaaaggctgatggagctgattttgcaaagattgcaaaagaaaaaacaacagctactgataagaaagttgagtataaatttgattctgcagggacaaccctccctaaagaagttatgtcagcagcctttaagctagataaaaatggtgtttcagatgtggtttcaacggttgattcaacaacttataaaacaagttactacatcattaaagtaactgataagacagagaaaaaatctgattggaaatcttacaaaaatcgcttaaaagaagttattcttaaggataaaacaagcgatagagccttccaaaataaagtgatttcaaaagccttagaaaaagctaatgttaagattaaagataaagcatttgcaggcatcttatcacaatatgctacaacaagtggttcatcatcacttaaaaaa

SEQ ID NO: 9338 - protein, 298 aa, Streptococcus agalactiae
MTLMSVATLAACSGKTSNGTNVVTMKGDTITVSDFYDQVKTSKAAQQSMLTLILSRVFDTQYGDKVSDKKVSEAYNKTAKGYGNSFSSALSQAGLTPEGYKQQIRTTMLVEYAVKEAAKKELTEANYKEAYKNYTPETSVQVIKLDAEDKAKSVLKDVKADGADFAKIAKEKTTATDKKVEYKFDSAGTTLPKEVMSAAFKLDKNGVSDVVSTVDSTTYKTSYYIIKVTDKTEKKSDWKSYKNRLKEVILKDKTSDRAFQNKVISKALEKANVKIKDKAFAGILSQYATTSGSSSLKK

SEQ ID NO: 9339 - DNA, 1038 bp, Streptococcus agalactiae
atggatttacaaaaacaattagaagagttgaaaatatcaactcaagaaaagcttaaagaaatgactgggaaccacactaaagaattacaagacttacgtgtacaagttttaggaaaaaaaggttctctaacagaattactaaaaggtctgaaagatttatctaatgatttacgaccagttgttggaaaacaagtcaatgaagtacgtgatattttaacaaaagcgtttgaggaacaagctaaagtagtggaagctgcgaagattcaagcacagttagagtctgagagtgtcgacgttaccttgcctggtcgtcaaatgacattaggtcaccgtcatgtcttaacacaaactagcgaagagattgaagatatctttttaggtatgggattccaagtggttgatggttttgaagttgagaaagactactataattttgaacgaatgaatttaccaaaagatcatccagcccgtgatatgcaagatactttttatattacagaagaaatcttgctacgtactcatacttcgcctgttcaagcacgaacaatggaccaacatgatttttctaaagggcctttaaaaatgatttctcctggacgtgttttccgtcgtgatactgatgatgctactcatagccatcaattccatcaaattgaaggcttagttgttggagaaaatatttcaatgggcgatctcaaaggaacacttcaactgatttctcaaaaaatgtttggagcagagcgtaaaatccgacttcgtccttcatatttcccattcacagaaccttcagttgaagttgatgtctcttgcttcaagtgcggaggtaagggatgtaatgtctgcaaacagacaggttggattgagatattgggtgctggtatggttcacccaagtgttttggaaatgtctggtattgattctgagaaatactccggttttgcctttggtttaggtcaagaacgtattgcaatgttacgctacggtatcaatgacattcgtggcttctatcaaggtgatgttcgcttcacagatcaattt

SEQ ID NO: 9340 - protein, 346 aa, Streptococcus agalactiae
MDLQKQLEELKISTQEKLKEMTGNHTKELQDLRVQVLGKKGSLTELLKGLKDLSNDLRPVVGKQVNEVRDILTKAFEEQAKVVEAAKIQAQLESESVDVTLPGRQMTLGHRHVLTQTSEEIEDIFLGMGFQVVDGFEVEKDYYNFERMNLPKDHPARDMQDTFYITEEILLRTHTSPVQARTMDQHDFSKGPLKMISPGRVFRRDTDDATHSHQFHQIEGLVVGENISMGDLKGTLQLISQKMFGAERKIRLRPSYFPFTEPSVEVDVSCFKCGGKGCNVCKQTGWIEILGAGMVHPSVLEMSGIDSEKYSGFAFGLGQERIAMLRYGINDIRGFYQGDVRFTDQF

SEQ ID NO: 9341 - DNA, 639 bp, Streptococcus agalactiae
atgtcttatattttagaaatcttacctagcttattagtaggtgcgcaagtgacattgcaagttttctttattgttatttgtttatcaattccacttggtattgttgtagccttcctaatgaaagttcattttaagccgcttcaatggctactgacaacttatatttggattatgcgaggcacgcctctgttattacagcttatctttttttattactttttaccaagtgtagggatttcttttgatcgtatgccagctgcgattattgcttttacgatgaattatgcagcttattttgcagagatttttcgaggaggtattgagtctattcctaaagggcaatatgaagctgcaaaggtattaaagttttctaagtttcaaacggtttggtacatagtattacctcaagtcttcaaaatagtcttaccgagtgttttcaatgaaacgattactttagtgaaagattcctcattggtttacatacttggtgtgggcgacttacttctagaaagtaagacagccgcaaatagggatgcaacacttgcaccaatgtttatagcaggtggtatttacctattattaattggtcttttaactattttatctaaacaagttgaaaagcgttttaactactataaa

SEQ ID NO: 9342 - protein, 213 aa, Streptococcus agalactiae
MSYILEILPSLLVGAQVTLQVFFIVICLSIPLGIVVAFLMKVHFKPLQWLLTTYIWIMRGTPLLLQLIFFYYFLPSVGISFDRMPAAIIAFTMNYAAYFAEIFRGGIESIPKGQYEAAKVLKFSKFQTVWYIVLPQVFKIVLPSVFNETITLVKDSSLVYILGVGDLLLESKTAANRDATLAPMFIAGGIYLLLIGLLTILSKQVEKRFNYYK

SEQ ID NO: 9343 - DNA, 858 bp, Streptococcus agalactiae
atgaaaaaaaacatttttttgttaaccttgctagccaccgtcttattgacgctgtctggttgtgctaattggattgataaaggtcaatcaatcaccagcgttggttcaaccgccttacagccacttgtagaagctgcagcagatgagtttggtaagacaaacctcggtaagactatcaatgtccaaggaggaggctcaggaacaggcttatcacaagtacagtctggagctgttcaaattggtaatagcgacttatttgcagaagaaaaagatggtattgatgctaagaaattgaaagaccatcaagtcgcagtagctggattagctgttattgttaataaaaaagttaatgttaaaaatctaaccacccaccaacttcgtgatatttttgcaggaaaaatcaagaattggaaagaagtgggaggacaagatttagatatttccatcatcaatcgagcagcaagttctggatcccgtgcaaccttcgataatactattatgggaaatgttgctcctattcaaagccaagaacaagattcaaatggtatggtgaaatcaattgtttctcaaacacctggtgcgatttcatacctcgcttttgcatacgttgataaatctgtcggaacattaaaactaaatggttttgcgccaacagctaaaaatgttactaccgacaactggaaactttggtcatatgaacatatgtatacaaaaggtaatgaaacaggtctaacaaaagaattcttagactacatgaaaagtgataaagttcaaagtagtatcgtacaacatatgggatatatctctattaacgacatgaaagttgttaaagatgctgaaggtaaagtaaccccaaaa

SEQ ID NO: 9344 - protein, 286 aa, Streptococcus agalactiae
MKKNIFLLTLLATVLLTLSGCANWIDKGQSITSVGSTALQPLVEAAADEFGKTNLGKTINVQGGGSGTGLSQVQSGAVQIGNSDLFAEEKDGIDAKKLKDHQVAVAGLAVIVNKKVNVKNLTTHQLRDIFAGKIKNWKEVGGQDLDISIINRAASSGSRATFDNTIMGNVAPIQSQEQDSNGMVKSIVSQTPGAISYLAFAYVDKSVGTLKLNGFAPTAKNVTTDNWKLWSYEHMYTKGNETGLTKEFLDYMKSDKVQSSIVQHMGYISINDMKVVKDAEGKVTPK

SEQ ID NO: 9345 - DNA, 1308 bp, Streptococcus agalactiae
atgaaattaccgaatgaatttattgaaaaatatcagactatacttaaagatgaagcagaagctttttttgacagttttgaacaaaaacccatatcggcatatcgcaccaatcctctcaaagaaaagcaacttgattttccaaatgccatcccaagtaccccttgggggcattatgggaaaatatcaggaaaatcaatagaacacacaactggccttgtttattctcaagaacctgctgctcagatagtggctcagattgctgaaccacaagaaggaatgaaagtgctagatttagcagctgcacctggtggaaaaacaacacaccttctatcatatttaaacaatactggtctattagttagtaatgaaatttcaaataaacgtagtaaaattttagtcgaaaatgtcgaacgttttggtgctagaaatgttatcgtgactaatgaaagctcccaacgactagccaaatgttttaattctttttttgatcttattgtttttgacggtccgtgttctggtgagggaatgttccgcaaagatcctcaagcaatacaatattggcacaaagattaccccactgaatgtgcacagttacaaagagatattttaaaagaagcaatcaaaatgctagctcatggtggtatacttgtatactctacttgtacatggtcaccagaagagaacgaagaagtggttaattggctccttcaagagtatgattacttagaacttgttgatattcctaaactaaatgggatggttgaagggattaatgtaccacaagttgcaaggatgtaccctcatcattttcaaggtgaaggacaattcgttgcaaaactgagagatactagatctaaggaagcacagaaaattaagccaaaagcacagaaaataaataaaatgcagttacaattgtggcaacaatttgcacaagaccatttaaagatagacttgaacggtgttttagatgttttcggcgaccaactctatcttctacctaatggtctccccgatttgtctaaattaaaaatagcacgcaatggtctccatctaggcactttcaagaagaatcgttttgagccatcgtttgctttaggaatggcacttagcgaacatgacctagtacagtctattgaaattgatatagaacagtttgaggtgtacgtatctggaaatgtagtcaaactagacaagactgttccaaacggttggtatcaaattcttgtaaaaggcaatggattaggttttgcaaaagtgacaaataatactcttaaaaattattaccctaaaggactacgatttcagaca

SEQ ID NO: 9346 - protein, 436 aa, Streptococcus agalactiae
MKLPNEFIEKYQTILKDEAEAFFDSFEQKPISAYRTNPLKEKQLDFPNAIPSTPWGHYGKISGKSIEHTTGLVYSQEPAAQIVAQIAEPQEGMKVLDLAAAPGGKTTHLLSYLNNTGLLVSNEISNKRSKILVENVERFGARNVIVTNESSQRLAKCFNSFFDLIVFDGPCSGEGMFRKDPQAIQYWHKDYPTECAQLQRDILKEAIKMLAHGGILVYSTCTWSPEENEEVVNWLLQEYDYLELVDIPKLNGMVEGINVPQVARMYPHHFQGEGQFVAKLRDTRSKEAQKIKPKAQKINKMQLQLWQQFAQDHLKIDLNGVLDVFGDQLYLLPNGLPDLSKLKIARNGLHLGTFKKNRFEPSFALGMALSEHDLVQSIEIDIEQFEVYVSGNVVKLDKTVPNGWYQILVKGNGLGFAKVTNNTLKNYYPKGLRFQT

SEQ ID NO: 9347 - DNA, 876 bp, Streptococcus agalactiae
atgagagagtctatttttgaggaaactgcaaaaggtaaagtatcaaggcatgtccttttaactatattattggctttgatattactatttacagcagatttccttacctatattattattgaattgattatctcgcttgatttttggaaactagagtgggatagcgatatcgtccagttaatcattttactagcaacttcaattagtacggtaatgttatttatgtgggtgaaatttaaagagaagcgtccaattagttctctagggctatttaaagaaggagccctaacagaattatctagaggatggttagtcgggagcgttctctttggagcctgcttaatattaacaataatttcaggctctggagttatcgaaactgttcgttttacagctgataaattgatttggtttcttatttttgctgttggatggcaggtacaaagcgcatctgttgaaatattgtgtcgtggatggttacttccggtgagtgccacaaagtatagtaagatagtttctgtcagtatcagttcaatctttttcggtcttctgcatagcgctaataatcatgtaagccttatctcgattttcaatctgtgtctctttggactatttctatcgctctatgttattttaaaaggtaacatctggggggcgtgtggtattcatggcgcctggaactgtgtacaagggagtgtctttggaatcgaagttagtggagagccaatgttgtctaactccctagtccatgttaaaacctatggtgctgactggattagcggtggaaaatttggtgtggaaggaagcatgattaccagtattgttcttatcgtagcatgttattggctttatcaaaaatcgaattttccttacgac

SEQ ID NO: 9348 - protein, 292 aa, Streptococcus agalactiae
MRESIFEETAKGKVSRHVLLTILLALILLFTADFLTYIIIELIISLDFWKLEWDSDIVQLIILLATSISTVMLFMWVKFKEKRPISSLGLFKEGALTELSRGWLVGSVLFGACLILTIISGSGVIETVRFTADKLIWFLIFAVGWQVQSASVEILCRGWLLPVSATKYSKIVSVSISSIFFGLLHSANNHVSLISIFNLCLFGLFLSLYVILKGNIWGACGIHGAWNCVQGSVFGIEVSGEPMLSNSLVHVKTYGADWISGGKFGVEGSMITSIVLIVACYWLYQKSNFPYD

SEQ ID NO: 9349 - DNA, 2628 bp, Streptococcus agalactiae
atgggaaagacattttggaaagatatctatcgatcaattacgacttcaaaaggtagattttcatcaatcctcttacttatgatgttaggctcatttgcttttataggactgaaggtctcagcacctaatatgcaaagaacagcacaaaattaccttgctcatcatcatgttatggatattaccgttttcaattcttggggacttgacaaacatgatcaaactgttttagaaagcttaaaaggatcacaagttgaattttcttactttgtagatacaacccctcaacagaatagtaaatcttatcgattgtattccaataccaaaacgatatcaacctttgatcttgttaagggacgtctccctttaaataaatcagaaattgctctctcatttcaggaacgaaaaaaatatgcaataggtgataaaattaattttaaacaagataaaaacaaactgttttcaaatacaggtcctctaactattgtaggttttgttaattctaccgagatttggtctaagacaaaccttggtagttctcaaacaggggacggcgacttagatagttatggcgtattagataagacagcatttcactctccagtatatacaatggcaagggtaacttttaaagatcttaggttgattaaccctttctcaataagttacaaagaaaaagtagcgaaataccaagaaaaggtatcgcgaaaattaaatattcacaataaaataagatataccaaaacaaaaaaagagagcctacgtaaaatcgatgaggaggaaaaaagcctactaaaagctcaaaaacaaatcaatcggttagataatgatagcctagcgatgccactatctcaaagacaagctattcaaatgaaaattaaacaagaccgactatctcttttgaaacgaacaaaagagcttctaaaattgagacataacacccaaataatggaatcgcctcaaattattgtctacaaccgtactacctttcctggaggacaaggatataacacttttgactccagtacaaatagcacttctaaaatcagtaatcttttccccattattttatatttagtcgcagcattagtaaccttaacaacaatgactaggttcgtcgaggaagaaagaaccaacgcaggcatattaaaagcactaggctatagtgaccgccaagttatctttaaatttattatttatggttttatagcaggaacattagggactactttgggtatcattggagggcattatcttttacctcgtattatttctgatatcatttccaaagacctgactattccaaacacacagtatcatcttttcttaaattacagtttactagcctttgttttttcattattaagcattgttcttccagtttttgttatcactcgacgtgagttgaaagaaaaagcagcatttttattattaccaaaaccaccagctaaaggatctaaaatagctttagagtatatcaattggatttggaaaaaactgtccttcacacaaaaagtaactgctagaaatatttttcgttacaaacaaaggatgattatgaccatatttggagttgctggatcagtagcgctcttattttcaggtctaggaatacaatcctccttaaagcaaaccgtcaatgaacatttcggtcgtattatgccctatgatatattgctaacatataacacaaatgcttctcccccaaaaatacttgaactactttcaaaagattcaaaaatagacaaataccaaccaatacaccttgaaaatcttgacgaatccattcctggacaaattaataaacagtcaatttccctattcataacagacaaaaaacaattactaccttttatttatttacaagaagcaacaactaataagtcattgcacttgaataataaagggattattatttctaaaaaattagctcaattttatcatgttaataccggtgattttatccatttatctcattcacaaacacttccttctagaaaattaaaaataacaggagttgtcaatgcgaatgttggtcactatatttttatgacaaaacaatactatcgaactatttttaagaaagaagctaaagataacgcttttttggttaagttaaccaaacataaaatcgcaaataacttagcagaaaaacttttagaaattaatggagttgagtctcttacgcaaaatgctcttcagctggctagtgtagaagccgttgtgcgttctttagatggctctatgactattttagttgtcgtatctttattgttagccattgtaattctctataatctcactaatattaatttagcagaacgtaagcgggagctatcaactataaaggtattaggtttttataatgaagaagtaactttatacatttaccgcgaaaccattattttatcaaccatcggtgtgattctaggcaccattagcggtacttatttacaccgtcaaatgatgttgctaattggttcagatcaaatactttttggtgaaaaagtatcaccaactacatttataataccaataagcgtagtagtcatcattctaataagtctaggttttatagttaaccatcaattaaaaaaactcaatatgttagatgccttgaaatcagtagat

SEQ ID NO: 9350 - protein, 876 aa, Streptococcus agalactiae
MGKTFWKDIYRSITTSKGRFSSILLLMMLGSFAFIGLKVSAPNMQRTAQNYLAHHHVMDITVFNSWGLDKHDQTVLESLKGSQVEFSYFVDTTPQQNSKSYRLYSNTKTISTFDLVKGRLPLNKSEIALSFQERKKYAIGDKINFKQDKNKLFSNTGPLTIVGFVNSTEIWSKTNLGSSQTGDGDLDSYGVLDKTAFHSPVYTMARVTFKDLRLINPFSISYKEKVAKYQEKVSRKLNIHNKIRYTKTKKESLRKIDEEEKSLLKAQKQINRLDNDSLAMPLSQRQAIQMKIKQDRLSLLKRTKELLKLRHNTQIMESPQIIVYNRTTFPGGQGYNTFDSSTNSTSKISNLFPIILYLVAALVTLTTMTRFVEEERTNAGILKALGYSDRQVIFKFIIYGFIAGTLGTTLGIIGGHYLLPRIISDIISKDLTIPNTQYHLFLNYSLLAFVFSLLSIVLPVFVITRRELKEKAAFLLLPKPPAKGSKIALEYINWIWKKLSFTQKVTARNIFRYKQRMIMTIFGVAGSVALLFSGLGIQSSLKQTVNEHFGRIMPYDILLTYNTNASPPKILELLSKDSKIDKYQPIHLENLDESIPGQINKQSISLFITDKKQLLPFIYLQEATTNKSLHLNNKGIIISKKLAQFYHVNTGDFIHLSHSQTLPSRKLKITGVVNANVGHYIFMTKQYYRTIFKKEAKDNAFLVKLTKHKIANNLAEKLLEINGVESLTQNALQLASVEAVVRSLDGSMTILVVVSLLLAIVILYNLTNINLAERKRELSTIKVLGFYNEEVTLYIYRETIILSTIGVILGTISGTYLHRQMMLLIGSDQILFGEKVSPTTFIIPISVVVIILISLGFIVNHQLKKLNMLDALKSVD

SEQ ID NO: 9351 - DNA, 315 bp, Streptococcus agalactiae
atgtggcaggcacttacccttggggccaaagaacttggctaccagtttggaccatttatgggtaatggtggcgattggaaaaataagccgggctatcaaaccacacacgaggcaaaaacaggctacgccatctcatttagccccggccaagctggtgctgatagaacttacggccacgtggccatcgtcgaagacgttaaggaagacggatctatcccgatctccgaatcaaatgtcctaggacttggcaccatctcctaccgcaccttcagtgcagcagaagcagcacaattgacttatgtagttggggagaag

SEQ ID NO: 9352 - protein, 105 aa, Streptococcus agalactiae
MWQALTLGAKELGYQFGPFMGNGGDWKNKPGYQTTHEAKTGYAISFSPGQAGADRTYGHVAIVEDVKEDGSIPISESNVLGLGTISYRTFSAAEAAQLTYVVGEK

SEQ ID NO: 9353 - DNA, 1539 bp, Streptococcus agalactiae
atgagtattttagaagtaaaaaacttaagtcacggttttggtgatcgtgctatttttgagaatgtttcttttcgccttttaaaaggtgaacatataggacttattggtgctaatggtgaaggaaaatcaacattcatgtcaattgtcacaggtcatcttcaacctgatgaaggaaaaattgaatggtcaaaatatgtaactgctggttaccttgatcaacatactgtattagaagaaggtcaaacagttcgtgatgttttgcgaacagcatttgatgaactttttaaaacagaggcacgtatcaatgatatatatatatccatggcagatgatggcgcagatgtagatagccttatggaagaagttggagaactacaagatcgtttagaatcacgtgatttttatacacttgatgctaaaattgatgaagttgcacgggcattaggagttatggattttggtatggattctgatgttactgaattatctggtggtcaaaggacaaaggttcttttagcaaaactgttattagaaaagccagacatcctcctgcttgatgagcctacaaactaccttgatgctgaacacattgattggttaaaacgctatttacaaaattatgaaaatgcttttgttttaatctcacacgatattccatttttgaacgatgttatcaatattgtctatcatgttgaaaatcaagatttagtaagatattccggtgattatactaattttgaatcagtctatgcaatgaaaaaggctcaattagaagcagcctatgaacgtcaacaaaaggaaatagctgatttacaagattttgttaatcgtaataaagcacgcgtcgcaacacgtaatatggcaatgtctcgtcaaaagaaactagacaaaatggatattattgagttacaagcagagaaaccaaagccaagtttcgaatttaaagaatctcgcacaccaggacgttttattttccaagctaaagatcttcaaattggatatgatcgtgctttaacaaaacctctaaacctaacatttgaacgtaatcaaaaaatagctattgttggagcaaatgggataggaaaaacaacattacttaagagtttactaggtattatcccccctatttctggtaatgttgaacgaggtgattttattgatttaggttattttgaacaagaagtacccggaggaaatcgccaaactccactcgaagcagtatgggatgcttttcctgctttgaaccaagcagaggttagggcagctcttgctcgttgtggtttaacttcaaagcatattgaaagtcagattcaggtgttatctggtggggagcaatcaaaggtcagattttgcttattaatgaatcgcgaaaataatgtccttgtacttgacgaaccaaccaatcatttagatgtagatgctaaagatgagttaaaacgtgctttaaaagcttataagggatcaatcttgatggtatgtcatgaaccggacttttatgaaggatggatggatgatgtttgggactttaaccaacttagt

SEQ ID NO: 9354 - protein, 513 aa, Streptococcus agalactiae
MSILEVKNLSHGFGDRAIFENVSFRLLKGEHIGLIGANGEGKSTFMSIVTGHLQPDEGKIEWSKYVTAGYLDQHTVLEEGQTVRDVLRTAFDELFKTEARINDIYISMADDGADVDSLMEEVGELQDRLESRDFYTLDAKIDEVARALGVMDFGMDSDVTELSGGQRTKVLLAKLLLEKPDILLLDEPTNYLDAEHIDWLKRYLQNYENAFVLISHDIPFLNDVINIVYHVENQDLVRYSGDYTNFESVYAMKKAQLEAAYERQQKEIADLQDFVNRNKARVATRNMAMSRQKKLDKMDIIELQAEKPKPSFEFKESRTPGRFIFQAKDLQIGYDRALTKPLNLTFERNQKIAIVGANGIGKTTLLKSLLGIIPPISGNVERGDFIDLGYFEQEVPGGNRQTPLEAVWDAFPALNQAEVRAALARCGLTSKHIESQIQVLSGGEQSKVRFCLLMNRENNVLVLDEPTNHLDVDAKDELKRALKAYKGSILMVCHEPDFYEGWMDDVWDFNQLS

SEQ ID NO: 9355 - DNA, 1716 bp, Streptococcus agalactiae
atgacttacacagaaaatcttcaaaaatggttagattttgagcagcttcctgactatcttcgtcaagaattactatcaatggatgaaaaaacaaaagaagatgctttttacacaaacttagaatttggtactgctggtatgcgtggttatattggtgctggtacaaatcgtattaatatttatgttgtccgtcaagcaaccgaaggattggcaaaattaatcgaaactaagggagaggaagctaaaaaacgtggtgtagccattgcctatgattcacgccacttctctccagaatttgcttttgagtctgcacaggtcttggcacagcatggaattaaatcttacgtatttgaagctcttcgtccaacaccagaactctcttttgctgttcgccatttaaatgcctatgctggtattatggttactgcaagccacaatccagcacctttcaatggttataaagtctatggacaagacggaggtcaactaccaccagctgatgctgatgcactaacagactttatccgtgctattgaaaatccatttgcagttgaacttgctgatttagatgaaagcaaatcatcgggccttattcaggttatcggtgaagatgttgatattgaatatcttagagaggttaaagatgttaatatcaatcaagatttaatcaataactttggaaaagacatgaaaattgtctatactcctctccacggaactggtgagatgttgacacgccgtgcccttgctcaagccggttttgaatctgttgttgtagtagaatcacaagctaaggcagatccagacttttctactgtcaaatctcctaaccctgaaagccaagctgcctttgctcttgctgaagaactcggacgagaagttgatgcagatgtcttagtagctactgatcctgatgcagaccgcctaggcgttgaaattcgccaaccagatggttcttataaaaacctttctggaaatcaaattggagcgattattgcgaaatacatcctggaagctcataaaacagcaggaacacttccagaaaatgctgctctcgctaaatcaatcgtatcaacagaattagtaacaaaaattgccgaaagttacggcgctacaatgtttaacgttttaactggatttaaattcatcgctgagaaaattcaagagtttgaagaaaaacataaccacacctatatgtttggttttgaagaaagcttcggatatcttattaaaccatttgtccgtgataaagacgctattcaagcagttcttttggttgctgagatcgcagcttattaccgttcgcgtggtttaacacttgcagatggtattgatgaaatttacaaagaatatggttattttgctgaaaaaacgatttcagtaacactttcaggtgtggatggagctgctgaaattaagaagattatggacaaattccgtgaaaatggtccaaaacaatttaacaatactgacattgtattattagaagatttccaaaaacaaaccgctactaaaaatgatggaacaatatctaacttaacaactcctccaagtaatgttttgaagtacacgttagctgatgattcatggattgcagttcgcccttcaggaactgaaccaaaaatcaagttctatattgccacggtcggtaatgatttagcagatgcagaaacaaaaatcgccaatattgaaaaagagattacaacatttgtaaat

SEQ ID NO: 9356 - protein, 572 aa, Streptococcus agalactiae
MTYTENLQKWLDFEQLPDYLRQELLSMDEKTKEDAFYTNLEFGTAGMRGYIGAGTNRINIYVVRQATEGLAKLIETKGEEAKKRGVAIAYDSRHFSPEFAFESAQVLAQHGIKSYVFEALRPTPELSFAVRHLNAYAGIMVTASHNPAPFNGYKVYGQDGGQLPPADADALTDFIRAIENPFAVELADLDESKSSGLIQVIGEDVDIEYLREVKDVNINQDLINNFGKDMKIVYTPLHGTGEMLTRRALAQAGFESVVVVESQAKADPDFSTVKSPNPESQAAFALAEELGREVDADVLVATDPDADRLGVEIRQPDGSYKNLSGNQIGAIIAKYILEAHKTAGTLPENAALAKSIVSTELVTKIAESYGATMFNVLTGFKFIAEKIQEFEEKHNHTYMFGFEESFGYLIKPFVRDKDAIQAVLLVAEIAAYYRSRGLTLADGIDEIYKEYGYFAEKTISVTLSGVDGAAEIKKIMDKFRENGPKQFNNTDIVLLEDFQKQTATKNDGTISNLTTPPSNVLKYTLADDSWIAVRPSGTEPKIKFYIATVGNDLADAETKIANIEKEITTFVN

SEQ ID NO: 9357 - DNA, 648 bp, Streptococcus agalactiae
atggataaattaaaatgccttggagaaaagttttcagagggtcacttttatccacttcaactggatattacaagtagagaatcggttgacaaagctttagaaagtctgcctaaaaaattgcaatcaattgatttgttggttaataatgcaggtttagcacttggattggataaatcatatgaagctgattttggagattggatgactatgattaatactaacgttgtaggattaatttacttgacacgatgcattttacctaaaatggtagaagttaatagagggttaattatcaatttgggatcaactgcaggaacaattccttatccaggagctaatgtctatggcgcatcaaaagcttttgtaaaacaattttctctcaacttgcgtgccgatttagctggaactaaaatcagagtgactaacctagaacccggtttatgtgaagggacagaattttcaactgtacgtttcaaaggggatcataaaagagttgaaaaactttatgaaggtgcgcatgcaattcaagcagaggatattgctaataccgtgtcatgggttgctagccaaccagaacacattaatattaatcgcatagaaataatgccagtcagtcaaacttatggacctcaacctgtttatcgtgat

SEQ ID NO: 9358 - protein, 216 aa, Streptococcus agalactiae
MDKLKCLGEKFSEGHFYPLQLDITSRESVDKALESLPKKLQSIDLLVNNAGLALGLDKSYEADFGDWMTMINTNVVGLIYLTRCILPKMVEVNRGLIINLGSTAGTIPYPGANVYGASKAFVKQFSLNLRADLAGTKIRVTNLEPGLCEGTEFSTVRFKGDHKRVEKLYEGAHAIQAEDIANTVSWVASQPEHININRIEIMPVSQTYGPQPVYRD

SEQ ID NO: 9359 - DNA, 990 bp, Streptococcus agalactiae
atgcgttccttatttggtggtttaagagaaaaagttgcaagtgattatgttaagattgttttccctgagggaagcgatgaacgtgtattacgtgcagcagctcgtttgaaatttgaaggtcttgttgatcctgttattttaggtaaggctgacgaagttcacgattctttggcaagacttggttttgttgatcaagattatagcattattgaccctgaacaatacgaaaaatttgaagagatgaaagaagcttttgttgagattcgtaaaggcaaagctactatggaagatgcagatcgtcttttgaaggatgttaactattttggggttatgttagtaaaacttggtttggcagatggtatggtatcaggggccattcattcaacagctgatactgtacgtcctgctcttcaaattattaaaacaaaaccaggaatttcacgcacttcaggtgtattcttgatgaaccgtgaaaatacacaggaacgttatatttttgctgactgtgctattaacattgatcctaatgcacaagagctagcagaaattgcagtaaatactgcggatacagctaaaatatttgatattgatcccaagattgctatgcttagtttttcaacaaaaggaagtgcaaaagcgcctcaagctgaaaaagttcaagaagcagctaaaattgccaaagatttatctcccgaattagctgttgatggagaattacaatttgatgcagcttttgttccggaaactgcagaaattaaagctcctaatagtgatgttgctggaaaagcaaatgtttttattttcccagaccttcaatcaggaaatattggctataaaattgcacaacgtttgggtatgtttgaagcaatcggaccgattttacaaggattgaatgctccagtaaatgatttatcacgtggatcaagtgctgaagatatttataaacttgctatcattacagctgctcaagctattgatgagaaatcaaaa

SEQ ID NO: 9360 - protein, 330 aa, Streptococcus agalactiae
MRSLFGGLREKVASDYVKIVFPEGSDERVLRAAARLKFEGLVDPVILGKADEVHDSLARLGFVDQDYSIIDPEQYEKFEEMKEAFVEIRKGKATMEDADRLLKDVNYFGVMLVKLGLADGMVSGAIHSTADTVRPALQIIKTKPGISRTSGVFLMNRENTQERYIFADCAINIDPNAQELAEIAVNTADTAKIFDIDPKIAMLSFSTKGSAKAPQAEKVQEAAKIAKDLSPELAVDGELQFDAAFVPETAEIKAPNSDVAGKANVFIFPDLQSGNIGYKIAQRLGMFEAIGPILQGLNAPVNDLSRGSSAEDIYKLAIITAAQAIDEKSK

SEQ ID NO: 9361 - DNA, 549 bp, Streptococcus agalactiae
atggaaaatcaaaaacaagatattaaaacttcagtaacttatgaagaaaaggtaattgctaaaattgttggacatgctttagaatcagtagacggactcttagctgtgagtggaggtttcttctctaatctaaaaaatagcgttgtaaattctgactcagtaactgatggtgtaaatgttgaagttggtactaaagaagttgcagttgatttagacatcgttgttgaatacggcaaggacatcccagctatcgttgaaagcattaaagcgattgtcagtcaaaacgttgaagtgatgacccaccttaaagttgttgaattgaacgcaaatgtcgtagatattaagactaaagctgaacatgaagctgactcagtgacagtacaagatcgtgtatctgatgcagcacaagcaacaggaaactttgcttctgaacaagctggcaaagctaaagcagcaatttcctctggagcagagaaaacaaaagaagcagtatcaaatggtactgaggctgcaaaagaaaaaatctcagaagctcgtactagtgaatct

SEQ ID NO: 9362 - protein, 183 aa, Streptococcus agalactiae
MENQKQDIKTSVTYEEKVIAKIVGHALESVDGLLAVSGGFFSNLKNSVVNSDSVTDGVNVEVGTKEVAVDLDIVVEYGKDIPAIVESIKAIVSQNVEVMTHLKVVELNANVVDIKTKAEHEADSVTVQDRVSDAAQATGNFASEQAGKAKAAISSGAEKTKEAVSNGTEAAKEKISEARTSES

SEQ ID NO: 9363 - DNA, 1398 bp, Streptococcus agalactiae
ttggggtatagccaagcggtaaggcaagggactttgactccctcatgcgttggttcgaatccagctaccccagtcaaaggtatcaaacttttgtttgacaccgtcaaagagatatttgttgtccttgcgggttaccttgagaaaatatattgttatcaaaagctagctcggctagcttttgttggaggattttttagaatgaatgaatttgaagatttgctaaacagtgttagcgaagtgaatcctggtgacgttgtcactgcggaagttttaacagttgataacggtcaagcaaacgttgttatcgatggtactggtgttgaaggtgtcttgacacttcgtgaattgactaacgatcgtgatgctgatatcaatgattttgttaaagctggcgacacagttgaagtacttgttcttcgtcaagttgtaggtaaagatactgatacagtaactttccttgtatctaaaaaacgcttggaagctcgtaaagcatgggacaaacttgttggtcgtgaaggtgaagttgttactgttaaaggtacacgtgctgttaaaggcggactttcagttgaatttgaaggacttcgtggtttcatcccagcttcaatgattgatactcgttttgtacgtaatactgaaaaatttgttggacaagaatttgatgctaaaatcaaagaagttgatgcagcagaaaatcgcttcatcctttcacgtcgtgaagttgttgaagaatcagcagctgcagcacgtaaagaagttttctcaaacattgaagtaggttcagttgtaactggtaaagttgctcgtttaacaagctttggtgctttcattgaccttggtggtgttgatggacttgtacacgtaactgaattatcacatgagcgcaatgtttcacctaaatcagttgtaactgttggtgaagaagttgaagttaaagtactttcaattgatgaagaagctggtcgtgtatcactttcacttaaagcaactacacctggcccatgggatggcgttgaacaaaaacttgctgctggtgatgttattgaaggtaaagtaaaacgcttgactgactttggtgcttttgttgaagtgttacctggcattgatggacttgtacacatttcacaaatttcacacaaacgtgttgaaaatcctaaagacgtattatctgcaggacaagaagttactgttaaagttcttgaagttaattcagatgcagaacgtgtctcactttcaatgaaagctcttgaagagcgtccagcgcaagcagaaggtgaaaaagaagaaaaacgtcaatcacgtccacgtcgtccacgtcgtcaagaaaaacgcgactacgagcttccagaaacacaaactggattctctatggctgacttattcggtgatattgaatta

SEQ ID NO: 9364 - protein, 466 aa, Streptococcus agalactiae
MGYSQAVRQGTLTPSCVGSNPATPVKGIKLLFDTVKEIFVVLAGYLEKIYCYQKLARLAFVGGFFRMNEFEDLLNSVSEVNPGDVVTAEVLTVDNGQANVVIDGTGVEGVLTLRELTNDRDADINDFVKAGDTVEVLVLRQVVGKDTDTVTFLVSKKRLEARKAWDKLVGREGEVVTVKGTRAVKGGLSVEFEGLRGFIPASMIDTRFVRNTEKFVGQEFDAKIKEVDAAENRFILSRREVVEESAAAARKEVFSNIEVGSVVTGKVARLTSFGAFIDLGGVDGLVHVTELSHERNVSPKSVVTVGEEVEVKVLSIDEEAGRVSLSLKATTPGPWDGVEQKLAAGDVIEGKVKRLTDFGAFVEVLPGIDGLVHISQISHKRVENPKDVLSAGQEVTVKVLEVNSDAERVSLSMKALEERPAQAEGEKEEKRQSRPRRPRRQEKRDYELPETQTGFSMADLFGDIEL

SEQ ID NO: 9365 - DNA, 228 bp, Streptococcus agalactiae
gtgagtaaaaaagataagaaaattgaaattcaaatttcagacgctcaagtaacagttaatggaactaaggttgatggataccaactcgttattggaaaaaaaattgtaggtcaaattgcagagctagattctaaatttgctgtgattaaaggtgagcaagtgagtggattctataaaaatttagatcaagctatgggaaatattattgaagaatataatcttaatcgc

SEQ ID NO: 9366 - protein, 76 aa, Streptococcus agalactiae
MSKKDKKIEIQISDAQVTVNGTKVDGYQLVIGKKIVGQIAELDSKFAVIKGEQVSGFYKNLDQAMGNIIEEYNLNR

SEQ ID NO: 9367 - DNA, 1044 bp, Streptococcus agalactiae
atgactgaatttaaaaacattatcgtaactggtggagctggtttcatcggatcaaactttgtacactatgtttacaataaccacccagatgttcatgtaactgtccttgataaattgacatatgcaggtaaccgtgctaacattgaagccattcttggtgatcgtgttgagttagttgttggtgacatcgctgacgctgaattggtagacaagttggctgccaaagcagatgctattgttcactatgcggctgagagccacaatgacaactcacttaacgatccaagtccatttatccatacaaactttatcggaacttacactttgcttgaagcagctcgtaaatacgatatccgtttccaccacgtgtcaactgatgaagtttatggagatctgccacttcgtgaagaccttccaggaaatggtgaaggaccaggtgaaaaattcactgctgaaacaaaatacaatccatcatcaccttactcatcaactaaggcagcttctgaccttatcgttaaggcatgggtacgttccttcggcgtaaaagcgaccatttcgaactgttcaaataactatggaccataccaacacatcgaaaaattcattccacgtcaaattacaaatatcttggcaggaatcaaaccgaaactttatggtgaaggtaaaaacgtccgtgactggatccacacaaatgatcattcaacaggtgtctgggctattttgactaagggtcgtattggtgaaacataccttattggtgccgacggtgagaaaaacaacaaggaagttcttgaacttatccttgagaaaatgggtcaaccaaaagacgcttacgatcacgtaactgaccgtgctggacacgaccttcgttacgctatcgattctacaaaattgcgtgaagaacttggttgggaaccacaattcacaaacttctcagaaggtttggaagaaacaatcaactggtacactgaaaaccaagattggtggaaagcagagaaagaagcagttgaagctaactacgctaaaacgcaagaagtcattaac

SEQ ID NO: 9368 - protein, 348 aa, Streptococcus agalactiae
MTEFKNIIVTGGAGFIGSNFVHYVYNNHPDVHVTVLDKLTYAGNRANIEAILGDRVELVVGDIADAELVDKLAAKADAIVHYAAESHNDNSLNDPSPFIHTNFIGTYTLLEAARKYDIRFHHVSTDEVYGDLPLREDLPGNGEGPGEKFTAETKYNPSSPYSSTKAASDLIVKAWVRSFGVKATISNCSNNYGPYQHIEKFIPRQITNILAGIKPKLYGEGKNVRDWIHTNDHSTGVWAILTKGRIGETYLIGADGEKNNKEVLELILEKMGQPKDAYDHVTDRAGHDLRYAIDSTKLREELGWEPQFTNFSEGLEETINWYTENQDWWKAEKEAVEANYAKTQEVIN

SEQ ID NO: 9369 - DNA, 1779 bp, Streptococcus agalactiae
atgaatgaactgattaaacataagctagaattgttaccagacagtcctggttgttaccttcataaagataagaatgggacaattatttatgtaggtaaggctaaaaatcttaagaatcgtgtgaaaagttattttcatgggagtcataatactaagacagaacttttggtctctgagattgaagactttgaatacattgtgacaacatctaataccgaagctctattattggaaattaatttaatccaagaaaatatgccgaagtataatattcgattgaaagatgataagtcttacccatatatcaaaataacaaatgaacgttatcctcgtcttatgattacacgtcaagtaaaaaaatcagatggcacttattttggaccttatccggattctggggcagcaactgagattaagcggttactagataggctctttccttttaagaaatgtactaatccagcaaataaagtatgcttttattatcatttagggcaatgcaatgcacatacagtttgtcaaactaataaagcttattgggatagtctgagagaagatgtaaaacagtttcttaatggtaaagataataaaattgttaacggattaactgaaaaaatgaagagcgctgctatgactatggaatttgagcgtgcggctgaatatcgagatttgatcgaagcaattagtttgttgcgtactaagcagcgtgttattcatcaagatatgaaggatagagatgtttttggttatttcgttgataagggttggatgtgtgtacaggtcttttttgttcgaaatggaaaattgattcagcgtgacgtgaatatgtttccttattataatgaaccagaggaagattttctaacttacatagggcaattttatcaagatacaaaacattttctacccaaagaagtctttattccacaggatattgatgctaagtcggttgaaacaattgtaggctgtaagattgttaaaccacaacgtggtgaaaagaaacagttagtaaatctggcaataaaaaatgctcgtgtcagtttacaacagaagtttgacttactggaaaaagatattcgtaaaactcatggggcaattgaaaatttaggtaatcttcttaatatccctaaaccagtacgcatagaagcatttgataattccaatattcaagggacaagtccagtagctgctatggtggtatttgtgaatggaaagccaagtaaaaaagactatcgaaagtttaaaattaagactgttatcggaccagatgattatgctagtatgagagaagtcattcatcggcgttatagtagggttttaaaagatggcttgacacctccggacttgattgtaattgatggtggtcaggggcaagtaaatatagcgcgtgatgttattgagaaccaatttggtttagccatacctattgcaggtttgcaaaagaatgataaacaccaaacacatgaattactttttggagatcctttagaagtagtagagctaccgcgtaattcagaagaatttttcttacttcaccgtattcaagatgaggtacatcgttttgctattacttttcatcgtcaattacgctccaaaaattccttttcttcaaaattagatggtatcactgggttgggaccaaaacgtaaacaattgctaatgaaacattttaaaagcttacctaatatccaaaaagctgagattgaggacattattatgtgtggtattcctaggactgttgcagaaagtctccgagattctcttaatgatcctcctaaa

SEQ ID NO: 9370 - protein, 593 aa, Streptococcus agalactiae
MNELIKHKLELLPDSPGCYLHKDKNGTIIYVGKAKNLKNRVKSYFHGSHNTKTELLVSEIEDFEYIVTTSNTEALLLEINLIQENMPKYNIRLKDDKSYPYIKITNERYPRLMITRQVKKSDGTYFGPYPDSGAATEIKRLLDRLFPFKKCTNPANKVCFYYHLGQCNAHTVCQTNKAYWDSLREDVKQFLNGKDNKIVNGLTEKMKSAAMTMEFERAAEYRDLIEAISLLRTKQRVIHQDMKDRDVFGYFVDKGWMCVQVFFVRNGKLIQRDVNMFPYYNEPEEDFLTYIGQFYQDTKHFLPKEVFIPQDIDAKSVETIVGCKIVKPQRGEKKQLVNLAIKNARVSLQQKFDLLEKDIRKTHGAIENLGNLLNIPKPVRIEAFDNSNIQGTSPVAAMVVFVNGKPSKKDYRKFKIKTVIGPDDYASMREVIHRRYSRVLKDGLTPPDLIVIDGGQGQVNIARDVIENQFGLAIPIAGLQKNDKHQTHELLFGDPLEVVELPRNSEEFFLLHRIQDEVHRFAITFHRQLRSKNSFSSKLDGITGLGPKRKQLLMKHFKSLPNIQKAEIEDIIMCGIPRTVAESLRDSLNDPPK

SEQ ID NO: 9371 - DNA, 1338 bp, Streptococcus agalactiae
atgtatcaaactcagacaaataaggaaaaatttgttttatttttgaaattatttatcccagtattgatttatcaatttgctaatttttcagctacttttattgattcggttatgactggacagtatagtcagctacatttggcaggtgtgtcaactgctagtaatttatggactccgtttttcgctttattagtaggtatgatttcagcattagtaccagtagttggtcaacatttgggtagaggaaataaagaacaaattcgcacagaatttcatcaatttctatatttaggtttgatactgtccttaatattatttttaatcatgcaatttattgctcaacctgtcttggggagtttgggtttagaagatgaagttctagcagttggtcgtggttatttaaattatatgttgattggaatcatgccgctggtgttgtttagcatttgccgttcattctttgatgcattggggttaacaaggttatctatgtatctgatgcttttaattctaccctttaattcattttttaattatatgcttatctacggtaaatttggtatgcctagactaggaggtgcgggggcaggtcttggaacttctttaacttattgggctatttttattgttattattattgtgatgtcacttcatcctcaaattaaaacatatcatatatggactctggaaagaataaaagctcctttgattattgaagatattcgattgggattaccgattggtttacaaatttttgcagaagttgcaatttttgcagtagtaggcttattcatggcaaaattttcttcaatcattattgcagcacatcaggctgctatgaatttttcatcattaatgtatgcctttcctttaagtatttccactgctctagctattacaatatcgtttgaagtaggggcagagcgctttcaggacgcaaacacttatagtaggataggacgcttaacagcggtagggattacatcaggaaccttactatttttatttctatttcgtgagaatgtagcagcaatgtataatagtgaccctcactttgtcgctattacagctcaattcctaacttatagtctctttttccagtttgcagatgcttatgcagctcctgtacaggggattttacgaggctataaggatacaacaaaaccatttatgatcggtgcgggctcttattggttatgtgctttgccattagcggttatcttagaaaaaaatagccagttaggtccttttgcctattggattggtttaatcacaggtatttttgtttgtggtctatttctaaaccaacgtctgcaaaagattaagaagttgtattat

SEQ ID NO: 9372 - protein, 446 aa, Streptococcus agalactiae
MYQTQTNKEKFVLFLKLFIPVLIYQFANFSATFIDSVMTGQYSQLHLAGVSTASNLWTPFFALLVGMISALVPVVGQHLGRGNKEQIRTEFHQFLYLGLILSLILFLIMQFIAQPVLGSLGLEDEVLAVGRGYLNYMLIGIMPLVLFSICRSFFDALGLTRLSMYLMLLILPFNSFFNYMLIYGKFGMPRLGGAGAGLGTSLTYWAIFIVIIIVMSLHPQIKTYHIWTLERIKAPLIIEDIRLGLPIGLQIFAEVAIFAVVGLFMAKFSSIIIAAHQAAMNFSSLMYAFPLSISTALAITISFEVGAERFQDANTYSRIGRLTAVGITSGTLLFLFLFRENVAAMYNSDPHFVAITAQFLTYSLFFQFADAYAAPVQGILRGYKDTTKPFMIGAGSYWLCALPLAVILEKNSQLGPFAYWIGLITGIFVCGLFLNQRLQKIKKLYY

SEQ ID NO: 9373 - DNA, 297 bp, Streptococcus agalactiae
atgacccaaacactagaagaaatgcgttataaacttgaagaatggttggcacaaggctatacaagtccagaagatagggcaaactaccaaactttaaaggaacagtatgaagatgagacctttgattacagtttttcaaagcgtgaaattactggacagctggaactcatcatcaaaagtcgtgagaatgatttttcaaacttagatgaggtgacgaagacggaataccttgacttggttacccaacttgatgaacttgaccaggaacaagccaactattatcgtaagcaattagcc

SEQ ID NO: 9374 - protein, 99 aa, Streptococcus agalactiae
MTQTLEEMRYKLEEWLAQGYTSPEDRANYQTLKEQYEDETFDYSFSKREITGQLELIIKSRENDFSNLDEVTKTEYLDLVTQLDELDQEQANYYRKQLA

SEQ ID NO: 9375 - DNA, 171 bp, Streptococcus agalactiae
atgcaaaaggaagaacagtcatcacgtcatatcgtgaagagccatatcatgaccatcatgggagttgataatctaaaagcaactcaactggtaaatgaaatggaacaaacaggtttaatccgatttgatgaattcgggaattttggacttttagtcttggagggacaatca

SEQ ID NO: 9376 - protein, 57 aa, Streptococcus agalactiae
MQKEEQSSRHIVKSHIMTIMGVDNLKATQLVNEMEQTGLIRFDEFGNFGLLVLEGQS

SEQ ID NO: 9377 - DNA, 1374 bp, Streptococcus agalactiae
atggaaaatcatcgttatgaagatgaaggtaaattccagcgtaagatgaccagtcgtcatctctttatgttatcgctaggtggtgttatcgggactgggcttttcttgagttcaggttataccattgcacaggctggtccgcttggagctgtgctgtcttatttgattggtgccgttgtggtttatttggtcatgctatcacttggggaattggcggttgccatgccggtgacggggtcattccacacttatgccactaagtttatcagtcctggaacaggttttactgttgcttggctatattggatttgttggacggtcgccttggggactgaatttttaggtgctgccatgctgatgcagcgctggttcccaaatgtgccggcttgggcatttgcttccttttttgcccttgtgatttttggtttaaatgctcttagcgtacgcttttttgcagaagcagagtctttcttctcaagtattaaggttattgctatcattatctttattatcttgggcttaggtgctatgtttggtctagtttcctttgaaggtcagcacaaggctattctcttcactcatctgactgccaatggtgcctttccaaatggtatcgttgcagttgtctcagtcatgttggctgttaactatgccttctctggtactgagttaattggtattgcggctggtgaaacggataatcccaaagaagctgtaccaagggctattaaaacgacaatcggtcgcttggttgttttctttgtactgacaattgttgtcctagcttcgctattgccaatgaaagaggcaggcgtatccacagcaccattcgttgatgtctttgacaagatgggaatcccttttacggcggatatcatgaacttcgttatcttgacagccatcctgtctgctggtaactcaggtctctacgcatcaagccgtatgctctggtcccttgccaatgaaggtatgttgtcaaaatctgttgtgaaaatcaataaacacggtgtcccaatgcgtgctcttctcttgtcaatggcaggagcagtgctgtcgctcttttcaagtatttacgctgcagacacagtttatctagccttggtttcaatcgcgggctttgctgttgttgtcgtatggctagccattccagtcgcacaaatcaatttccgcaaggaattcttgaaagagaatcaactagaagatttgtcttacaaaacaccttttacaccagttctcccttatatcacaatcattttgctcttgatttcgattgtagggattgcttgggatagctcacaacgtgctgggctttacttcggtgttccatttattattttctgctatatttatcacaaactacgttacaagaaatgg

SEQ ID NO: 9378 - protein, 458 aa, Streptococcus agalactiae
MENHRYEDEGKFQRKMTSRHLFMLSLGGVIGTGLFLSSGYTIAQAGPLGAVLSYLIGAVVVYLVMLSLGELAVAMPVTGSFHTYATKFISPGTGFTVAWLYWICWTVALGTEFLGAAMLMQRWFPNVPAWAFASFFALVIFGLNALSVRFFAEAESFFSSIKVIAIIIFIILGLGAMFGLVSFEGQHKAILFTHLTANGAFPNGIVAVVSVMLAVNYAFSGTELIGIAAGETDNPKEAVPRAIKTTIGRLVVFFVLTIVVLASLLPMKEAGVSTAPFVDVFDKMGIPFTADIMNFVILTAILSAGNSGLYASSRMLWSLANEGMLSKSVVKINKHGVPMRALLLSMAGAVLSLFSSIYAADTVYLALVSIAGFAVVVVWLAIPVAQINFRKEFLKENQLEDLSYKTPFTPVLPYITIILLLISIVGIAWDSSQRAGLYFGVPFIIFCYIYHKLRYKKW

SEQ ID NO: 9379 - DNA, 684 bp, Streptococcus agalactiae
atgagagtattaattgcagaagatgaagaacagatgtcacgtgtccttagtacggcaattagtcaccaaggttatgttgttgatgtcgcctacgatggtcagactgctattgatttagctaatcaaaatgcatatgatgtcatggttatggatgtcatgatgcctgttaaaacaggtattgaggctgtcaaagaaattagacaatcaggaaataaatctcacattattatgctaacagccatggcagaaattgatgatagagtaacaggtctagatgctggtgcagatgattatttaacaaaacccttctctctaaaagaattattagcaaggcttcgctctatgtcccgaagattggaagatttcacacctaatgtattgtcattgggaagagtaaccttatcagtcggtgaacaagagttgcaatgtgaaaacactattcgtctagcgggtaaagaagctaaaatgttagcatttttcatgttgaaccatgataaagaattatctacacaacaacttttcgaacatgtctggggagcagataaggaccaagaagatgtagatgagggatacgtctttatctatgtttcttatttgagacaaaaattgcaggcaattggtgctaacttggagattattggtcaagaaggtagtagctataaattaagtgaaataaatggtggc

SEQ ID NO: 9380 - protein, 228 aa, Streptococcus agalactiae
MRVLIAEDEEQMSRVLSTAISHQGYVVDVAYDGQTAIDLANQNAYDVMVMDVMMPVKTGIEAVKEIRQSGNKSHIIMLTAMAEIDDRVTGLDAGADDYLTKPFSLKELLARLRSMSRRLEDFTPNVLSLGRVTLSVGEQELQCENTIRLAGKEAKMLAFFMLNHDKELSTQQLFEHVWGADKDQEDVDEGYVFIYVSYLRQKLQAIGANLEIIGQEGSSYKLSEINGG

SEQ ID NO: 9381 - DNA, 687 bp, Streptococcus agalactiae
atgcgttggttcgaatccagctaccccagtttcacatggtccgttggtcaaggggttaagacaccgccttttcacggcggtaacacgggttcgaatcccgtacggactatcgtggccagttgcattttagcggctggtttttcttttattttcaaaaatatcggagttactatggaatactttaacgttggaaaaattgtcaatacacaaggattacaaggcgaaatgcgtgtattaagcgtgactgactttgtagaagaacgctttaaaaaaggtcaagtgttagctttattcgatgaaaagaatcagtttgttatggatattgaaattgctagtcatcgtaagcagaagaattttgacattataaaattcaaaggaatgtatcatattaatgatattgaaaaatataaaggtttcacactgaaggtggcagaggatcaactgagcgaccttaaagatggtgaattttattatcatgaaattattggcttagatgtctatgaaggggaagagctgattggaaaaatcaaagaaattttacaaccaggagcaaatgacgtttgggttgtggaacgtcatggaaaacgtgatcttttattaccctatatcccgccagtagtattagaagtggacctttctaatcagcgtgttcaagttgaattgatggaaggtttagatgatgaagat

SEQ ID NO: 9382 - protein, 229 aa, Streptococcus agalactiae
MRWFESSYPSFTWSVGQGVKTPPFHGGNTGSNPVRTIVASCILAAGFSFIFKNIGVTMEYFNVGKIVNTQGLQGEMRVLSVTDFVEERFKKGQVLALFDEKNQFVMDIEIASHRKQKNFDIIKFKGMYHINDIEKYKGFTLKVAEDQLSDLKDGEFYYHEIIGLDVYEGEELIGKIKEILQPGANDVWVVERHGKRDLLLPYIPPVVLEVDLSNQRVQVELMEGLDDED

SEQ ID NO: 9383 - DNA, 1509 bp, Streptococcus agalactiae
ttgctatttgattttctcgaagaaaaaataaaactgaaagcatacctgatgaccgccttacttgatgatggagaaattaaccttgatcactttaaaacagaatatgctttgagtgaaaagattttacaaggtcttatttcggaactacaaatactttattctgatttctaccttgttgtcaaaagtagaacaatggtattgttccattacgaaacactttctaagctagagactttgcataccatttatcgagagtctaatacgttacagtttttggcatattttattgctcctcaaaatgtcagtttttctgaattcacggctaagaaattcatatccgtcgcaagtgcctaccgaataaagaaaaactgtaaactttatttggagagtgttaagttatcaatacaaaaaaataaagtgacaggtccagaatatcagattaggctgctgattgctttgttacagtatcattttggttttattatttatccttttgatgctacaagtgaggtaatgataagggattttattgaatactcgaattttaaagggtgtgactacgaccttaaagacttatctgaagaatattactatttttatattttggtgaatttagtttggaaaagaaaagaatataaagtagaaattcctcaaacagaatcctttaatcaactaaaaaaatctattctctacatggagttatccaaagcagctcaaaagagtattgctatacatcttggtatagagttgaatgaaggtttacttgattatctatatttagtgttttgtattagtgatggtcctctatttagcaatcgagatgatatcaatatcaacgaagaatttatttttgcttcttataagatatcaaagtctaaagcctttaagaatttttgtggtcgattattgggtagagaatttattgactcgcagcattttaaagatattaatgcctattttttgagacattttatttgttattgttattattttattcctgatttttattttttaaatacatcaaggctgagctattctaaggatttatatcacctattagataaaggtctggctgatatttttaaccttaaaggagggaatttaactttttcaaaacatgagacagtgctactaacaatgcaattatctaacttaatagagactttcttagctcctctttctgtatatgtaatttcatctagtaatattagattacaaacctatcaagtaatgttaaaccaatattttacatctaagatagcggaattcttttttgtaaactatcaaacgactcagatagatgaaaaattactaaaaaaagcagatatcattattgctgagagacgctatatatcttctttaaaaaatgactcaggtgtggctatacaagatatattagaaattgggatgaataataagcagtaccatgaactacttttacaagctattatcgaaaaaagggaccaaaaagtttttgaatatatttcaaaaatgaaacataaaatactt

SEQ ID NO: 9384 - protein, 503 aa, Streptococcus agalactiae
MLFDFLEEKIKLKAYLMTALLDDGEINLDHFKTEYALSEKILQGLISELQILYSDFYLVVKSRTMVLFHYETLSKLETLHTIYRESNTLQFLAYFIAPQNVSFSEFTAKKFISVASAYRIKKNCKLYLESVKLSIQKNKVTGPEYQIRLLIALLQYHFGFIIYPFDATSEVMIRDFIEYSNFKGCDYDLKDLSEEYYYFYILVNLVWKRKEYKVEIPQTESFNQLKKSILYMELSKAAQKSIAIHLGIELNEGLLDYLYLVFCISDGPLFSNRDDININEEFIFASYKISKSKAFKNFCGRLLGREFIDSQHFKDINAYFLRHFICYCYYFIPDFYFLNTSRLSYSKDLYHLLDKGLADIFNLKGGNLTFSKHETVLLTMQLSNLIETFLAPLSVYVISSSNIRLQTYQVMLNQYFTSKIAEFFFVNYQTTQIDEKLLKKADIIIAERRYISSLKNDSGVAIQDILEIGMNNKQYHELLLQAIIEKRDQKVFEYISKMKHKIL

SEQ ID NO: 9385 - DNA, 1176 bp, Streptococcus agalactiae
atggcaagaatcccttatcagaaaacacttattttttgtgtagccgttattattgctatttttattttggggttatctaaggatttagcacaatctaaagggcaaaaggttgcaaataataatactgtaaaaacagcacgtgtggttgcaaacggagatattttgctgcacgatgtactatatgccagtgcgcgccaacccgacggcacttataattttactccttattttaaagaggtaaaatcttggattgagagcgctgatttagcgattggtgattatgaagggacgattagttcagaatatcctttagcgggctatcctttatttaatgctcctaatgagattgcaactactatgaaagaaactggatatgatgtcgttgacttagcacataatcatattctggattcacaactggcaggtgctatcaatactgtcaagacttttaatcgtctgggattggatactattggggtttatttaaaggatagaaataaagaagatatcttaattaagcatgtaaatggtattaaaattgctattttaggttattcgtatggctacaatggtatggaagctaatgtttcaaagagtgactatgaaaaacatatgtctgatttagatactaaaaagattaagcaagatattaaaaaggctgaaaaagaagcagatatcaccattgtcatgccacagatggggatagaatatcaaaaaaaacctactacagaacaagtaatgctttatcatagtatgattaaatggggggcagatattatattcggaggacaccctcacgttgttgaaccgtctgaagtgataaaaaaagatggccagaaaaaatttattatttactctatgggaaattttatttcaaatcagcgtttagaaacggttgatgatatctggacagaaagaggattattaatggatgtaaccatagagaaaaaaggtcaaaaaacagtaattaaaaaagttaaggcgcatccaacactagtagaagcaaaaccaaatggccgttatgttgaagaaggctttccagcttatgattataggacgctagttttagaggattatattgaaggtggtaagaaacgttctacgattgatcagactatgaaagataaagttgataaagcatataaggagatgaatgagttagttaatttgaagtgg

SEQ ID NO: 9386 - protein, 392 aa, Streptococcus agalactiae
MARIPYQKTLIFCVAVIIAIFILGLSKDLAQSKGQKVANNNTVKTARVVANGDILLHDVLYASARQPDGTYNFTPYFKEVKSWIESADLAIGDYEGTISSEYPLAGYPLFNAPNEIATTMKETGYDVVDLAHNHILDSQLAGAINTVKTFNRLGLDTIGVYLKDRNKEDILIKHVNGIKIAILGYSYGYNGMEANVSKSDYEKHMSDLDTKKIKQDIKKAEKEADITIVMPQMGIEYQKKPTTEQVMLYHSMIKWGADIIFGGHPHVVEPSEVIKKDGQKKFIIYSMGNFISNQRLETVDDIWTERGLLMDVTIEKKGQKTVIKKVKAHPTLVEAKPNGRYVEEGFPAYDYRTLVLEDYIEGGKKRSTIDQTMKDKVDKAYKEMNELVNLKW

SEQ ID NO: 9387 - DNA, 357 bp, Streptococcus agalactiae
atggctcgtgttaaaggtggagttgtttcacgtaaacgtcgtaaacgcgtacttaaattagctaaaggttactatggtgcaaaacatatcttgttccgtactgcaaaagaacaagtaatgaattcttactactatgcataccgtgaccgtcgtcagaaaaaacgtgacttccgtaaattatggatcactcgtatcaatgcggctgctcgtatgaatggtttatcatattcacaattgatgcacggtttgaaattagctgaaatcgaagttaaccgtaaaatgcttgctgatttagcagttaacgatgcagcagctttcacagctcttgcagatgcagctaaagctaaacttggtaaa

SEQ ID NO: 9388 - protein, 119 aa, Streptococcus agalactiae
MARVKGGVVSRKRRKRVLKLAKGYYGAKHILFRTAKEQVMNSYYYAYRDRRQKKRDFRKLWITRINAAARMNGLSYSQLMHGLKLAEIEVNRKMLADLAVNDAAAFTALADAAKAKLGK

SEQ ID NO: 9389 - DNA, 522 bp, Streptococcus agalactiae
atggcgaaaaaaccatgggaaaaaaaagttgtggaaaacaatagtcatagaaaagacaaaattacaagaacgagtagaggtgtggtgtcaagtactccttggattaccgctttcttgagtgcattctttgttattgtcgttgctattttatttatagtattttatacttcaaatagaggagaagacagagcaaaagaaacttctggtttttatggtgcttcaagccaaaaagttaatagttctaaaacgaaaaaagcatctacaagtaagaaaacaacgtcatcatcaaaaactaaaactagtgataaatcaacaacatcttctagtactgtagcaagttcgagtgagacatcgacatcatcttcagtaaacggtggaacaatcgtagttcaaccaggtgagggagcagcctccatagctgctcgtgcaggtatctcagttgctcgtttacaagaacttaatcccagtcatatgacctcagggtattggtatgctaatccaggcgatcctgtggttgtaaat

SEQ ID NO: 9390 - protein, 174 aa, Streptococcus agalactiae
MAKKPWEKKVVENNSHRKDKITRTSRGVVSSTPWITAFLSAFFVIVVAILFIVFYTSNRGEDRAKETSGFYGASSQKVNSSKTKKASTSKKTTSSSKTKTSDKSTTSSSTVASSSETSTSSSVNGGTIVVQPGEGAASIAARAGISVARLQELNPSHMTSGYWYANPGDPVVVN

SEQ ID NO: 9391 - DNA, 210 bp, Streptococcus agalactiae
gtgaaaatgttacaatatcttgaggaggtgaaacatatgtcaaaaacagtagtacgtaaaaacgaatcacttgacgatgcacttcgtcgtttcaaacgttctgtgactaaagctggtactcttcaagaatcacgtaaacgtgaattctacgaaaaaccttctgtaaaacgtaaacgtaaatcagaagcagctcgcaaacgtaaaaaattc

SEQ ID NO: 9392 - protein, 70 aa, Streptococcus agalactiae
MKMLQYLEEVKHMSKTVVRKNESLDDALRRFKRSVTKAGTLQESRKREFYEKPSVKRKRKSEAARKRKKF

SEQ ID NO: 9393 - DNA, 1026 bp, Streptococcus agalactiae
atggtaactataaaagatgttgctgccaaagctggtgttaatccatcgacagtaagtcgtgtactaaaagataatgcatctatttcaagtaagacgaaagagcgcgtgaaaaaagctatggaagagctgggctatgttcctaatgttgcagcacaaatgttggctagtggtttaacgcaaaatattggagttatttttcctccactggttttaccagaccgcttaagtgaaccctttttcatggagattctttctacattaactaatgaagcaaaagagcatgagtttacagtttctattgcaacaagtatgtcttctgaggagttgttagaacaagtaaaattaatgcatctacaaaaacgagtggatggttttattgttctctattcggatcaaaaagatcctatcagagagtatttattaaaatataaactgccctttgttgttgttggtgctgctaatggctatgaaaatgagattacttatattgataatgataatcagctgatggggaaatctgccattgattatctctataaaaaaggacataaaagcatccagtttgttacagatgatttaaattcagaagtatcagaagagcgctatttagggtattttaaaggtgctagaaagttaggtttaaaccaaaagccagctcttttatttgacagaggcaatccgcaagttttagaggaatttataaatagagtcaaagaagaagaaacaactgctttaattgttattggtgatactgtctctgttagagtaatgcaatttctttctttctataaattaaaagttccagatgacatttctatcatgacctttaataattctctcttctcacatctgattcatccttacctaagcacatttgatattaatgttaataatctaggaaggacaagcgttcgtcgtctgattgacatcattaaatctccagacaaagtctttagtgagactattattgtgccttttactttagaagagcgtgaaagtgtccgagatatttctaaaaataataat

SEQ ID NO: 9394 - protein, 342 aa, Streptococcus agalactiae
MVTIKDVAAKAGVNPSTVSRVLKDNASISSKTKERVKKAMEELGYVPNVAAQMLASGLTQNIGVIFPPLVLPDRLSEPFFMEILSTLTNEAKEHEFTVSIATSMSSEELLEQVKLMHLQKRVDGFIVLYSDQKDPIREYLLKYKLPFVVVGAANGYENEITYIDNDNQLMGKSAIDYLYKKGHKSIQFVTDDLNSEVSEERYLGYFKGARKLGLNQKPALLFDRGNPQVLEEFINRVKEEETTALIVIGDTVSVRVMQFLSFYKLKVPDDISIMTFNNSLFSHLIHPYLSTFDINVNNLGRTSVRRLIDIIKSPDKVFSETIIVPFTLEERESVRDISKNNN

SEQ ID NO: 9395 - DNA, 1470 bp, Streptococcus agalactiae
atggaaaaaacaaaatcattctttggacatcctcgtggtttgtccactcttttctttactgaaatgtgggaaagattctcatactatggtatgcgtgctattttgctgtactatatgtactatagtgtttctcaaggtggccttggtatggacaagactgtcgctgcatcaatcatggctgtctatggttcactggtttatctctcatcagtaattggtggttttgtcagcgaccgtattctaggtagtcgtaaaactgttctgtatggtggtattctaatcatgctaggtcatattgctctagctacaccatttggtcaaacagctctattcatttcgattgctctaattatccttggtactggactattaaaaccaaatgtatcagagatggttggtaatttatatggagaaaatgattctcgtcgtgatgctggttttagtatctttgtttttggtattaaccttggtgcttttatttcacccattgtagtggggtacctcggacaagaagtaaatttccatcttggtttctcacttgctgctattggtatgttctttggtctcctccaatataccttagatggaaaaaaatatttgactgaagagagtctcagaccaaacgatcctttaagtcctgaagaaaagtcctctctatataaaaaagttgggcttatccttattggtattgttattgtacttattctacttcacttgatgcatatgctaacaattgaagtaattatcgatatttttagtattattgcaatcgccatcccaattatttattttatcaagattttaagtagtaaaaagatttcttctgttgagcgttctcgagtgtgggcatatatccctctctttatcgcctcaattctattttggtcaattgaagaacaaggttcagttgtcttagccttatttgcagatgaacaaacaaaactttaccttaacttctttgggcatcatattaatttcccatcaagttatttccaaagtatgaaccctctcttcattatgctttatgtaccattctttgcttggttatgggctaaatggggaagtaagcaaccttcatcacctaaaaaatttgcgtatggacttttctttgctggagcttcattcttatggatgatgctaccaggtttactctttggagttaacgctaaagtaagccctctttggttaacaatgagttgggctattgtcatcgttggggaaatgctaatctcaccagttggattatcagcaactagtaagctcgcacctaaagcattccaagctcaaatgatgagcatctggttcttaagtaatgctgcagcacaagctattaacgctcaaatcgttaaattgtacacacctgatactcaaactctttattatggtgttgttggtggtataacagttgtatttggatttatcctcttattttatgttccacgcattgaaaaactaatgtctggagttaaa

SEQ ID NO: 9396 - protein, 490 aa, Streptococcus agalactiae
MEKTKSFFGHPRGLSTLFFTEMWERFSYYGMRAILLYYMYYSVSQGGLGMDKTVAASIMAVYGSLVYLSSVIGGFVSDRILGSRKTVLYGGILIMLGHIALATPFGQTALFISIALIILGTGLLKPNVSEMVGNLYGENDSRRDAGFSIFVFGINLGAFISPIVVGYLGQEVNFHLGFSLAAIGMFFGLLQYTLDGKKYLTEESLRPNDPLSPEEKSSLYKKVGLILIGIVIVLILLHLMHMLTIEVIIDIFSIIAIAIPIIYFIKILSSKKISSVERSRVWAYIPLFIASILFWSIEEQGSVVLALFADEQTKLYLNFFGHHINFPSSYFQSMNPLFIMLYVPFFAWLWAKWGSKQPSSPKKFAYGLFFAGASFLWMMLPGLLFGVNAKVSPLWLTMSWAIVIVGEMLISPVGLSATSKLAPKAFQAQMMSIWFLSNAAAQAINAQIVKLYTPDTQTLYYGVVGGITVVFGFILLFYVPRIEKLMSGVK

SEQ ID NO: 9397 - DNA, 1386 bp, Streptococcus agalactiae
atgtcaaaaaataataatgaccacactcaaaaatctgagaatggtatggtacgcggcctagaaaatcgtcacgtacagttaattgcgattgcagggacaatcggaactgggctttttcttggtgcaggtcgttcaattagcctgacgggtccttcaatagttcttgtctatgctatcactggcgctttcatgttcttcatgatgcgtgctattggagagatgctttatcaagatccaaatcagcatacttttattaatttcattaccaaatatttaggacccggttggggatttttctcaacactttcttattggatttccctaatatttatcggtatggcagagattacagccgtaggagagtatgttcaattttggttccctgaatggccatcctggattatccaaattgtttttttagctatcctaagttctatcaacttaattgctgtaaaagcattcggagaaaccgagttttggtttgctatgataaaagttattgcaattcttggtttaatagcaaccggtatctttatggtattgacaaactttgacaccggtcacggataccatgcttcaatctcaaatatcaccaatcattttgaatggttccctaaaggtaaattgaatttcttcatggctttccaaatggtattctttgcttatttagctattgaatttgtcggagtaacaacttctgaaacagctaatccacgtaaagttttaccaaaagcaatccaagaaattccgatgcgtattattttattctacgcaggttcattattagcaattatggccatcttcccatggcaacagttaccagttaatgagtcacctttcgttacagtattcaaactagctgggattaagtgggctgccgctttgattaactttgttgtcctaacgtctgcagcatctgctcttaattctactttgtactcaacagggcgtcatttattccaattggctaatgaatcaccaaatgctcttacaaaagcgttaaaattagaccaattatctcgtcaaagcgttccaagtcgagctattattgcatcagctgtaatcgttggagcttcagcacttatcagtgttttacctggtatttcagatgccttctccttaattactgcatcatcttctggtgtttacatttctatctatgttcttattatgattgcacattggaaatatcgtaaatcacctgattttatggaagatggttataaaatgcctgcctacaaaatcctttcaccaatcacacttctcttcttcctctttgtattcgtttctctcttcttgcaagattcaacatacatcggggctattggagcaaccatctggattattggatttggtttatatagtcacttcaaacataaatcacat

SEQ ID NO: 9398 - protein, 462 aa, Streptococcus agalactiae
MSKNNNDHTQKSENGMVRGLENRHVQLIAIAGTIGTGLFLGAGRSISLTGPSIVLVYAITGAFMFFMMRAIGEMLYQDPNQHTFINFITKYLGPGWGFFSTLSYWISLIFIGMAEITAVGEYVQFWFPEWPSWIIQIVFLAILSSINLIAVKAFGETEFWFAMIKVIAILGLIATGIFMVLTNFDTGHGYHASISNITNHFEWFPKGKLNFFMAFQMVFFAYLAIEFVGVTTSETANPRKVLPKAIQEIPMRIILFYAGSLLAIMAIFPWQQLPVNESPFVTVFKLAGIKWAAALINFVVLTSAASALNSTLYSTGRHLFQLANESPNALTKALKLDQLSRQSVPSRAIIASAVIVGASALISVLPGISDAFSLITASSSGVYISIYVLIMIAHWKYRKSPDFMEDGYKMPAYKILSPITLLFFLFVFVSLFLQDSTYIGAIGATIWIIGFGLYSHFKHKSH

SEQ ID NO: 9399 - DNA, 2403 bp, Streptococcus agalactiae
atgaaagaaaaaattataaaatatttggaagaacacggtaaaaccagcgttaatgatttagctgctgccctagatatggcaggcgcaaaagcatttccaaaattaatcaaaacaatctcaaatttggagagccacaggcaattaagatttgacgataatggaagtctttctcttcaaaagaaagaagctaagaaaaaggaaatcacagtaaggggtctttttagagcaaataaagcaggatttggttttcttagtattgaccaagacgaagatgatatgtttatcggaaaaaacgatattgcttatgctattgatggtgacacggtagaagctgttgtaaagaaaccagcggaccgtcttaacgggactgcagcagaagcgcgtgttgttaatattgttgaacgtagtttaaagacgcttgttggtaagtttgtcttagacgatgagcgccctaaatacgcaggatatatcaaatcgaaaaatcaaaaaatcaatcaaaagatttatatacgcaaagaaccggtcgttttagacggaacagaaattatcaaagtagatattgataaatatccgacacgaggacatgattacttcgtagcaagtgttcgtgatatcgttggacatcaaggagatgttggtattgatgttttagaagtcttggaaagtatggatatcgtctcagaatttcctgaggacgttattgcagaagccaatgctatcccagatgctccaacggagaaagatttaattgggcgtgttgatttacgtcaagaggtcactttcactattgatggagcggacgccaaagatttagacgatgctgtgcatattaaattactggataatggtcattttgaacttggagttcatatcgcagatgtatcatactacgttactgaaggctctgccttaaatcgtgaagcacttagtcgtggtacgtccgtatatgtcacagatcgcgttgtaccaatgttaccagagcgtctatctaacggtatatgttcattaaatccaaatcttgatcgtttaacgcagtcttgtattatggaaattgaccaaaatgggagagttgttaatcatcaaattacacagtcagtgattaataccacttatcgtatgacttataccgctgtaaatgatattattgctggcgatgaggaaatctgctcagaatatgagtctattgtgtcctcagtacagcatatggtcactttacaccatactttggaagctatgcgtacgcgtcgtggagcgctgaattttgacacatctgaagcaaaaattatggttaatgataagggaatgccagttgatattgttattcgcaacagaggcattgctgaacgcatgattgagtcatttatgttggcggcaaatgaaacggttgctgaacattatgctcgtctaaaactgccatttatttatcgtatacacgaagagcctaaagctgaaaaattacaaaaattcatcgattatgcttctgttttcggtgttcagattcaaggaacagcaactaaaatcacccaatctgctttacaggactttatgaaaaaagtacaagggcagccaggaagtgaagtgttatctatgatgttattgcgctcgatgcaacaagctagatattctgaacacaaccatggacattatggacttgctgcggaatattacactcactttactagccccattcgacgttatccagacttgttagttcatcgtatgattcgtgattatgatgataaagcgatggataaagctgatcattttgctaaccttatcccagaaattgcaactcaaacgtctagtcttgagagacgtgccattgatgctgaacgtattgtagaggcaatgaagaaagccgaatatatggaagaatatgttggtgaggaatttgaaggtgtggttgcaagcgttgttaaatttggtatgtttgtagaattaccaaatactattgaaggattgattcacgtaacgaccttgcctgaatattatcactttaatgaacgtacgctgacgcttcaaggtgagaaatctgggaaagttttccgtgttggtcaacaaattaaggttaagttgattcgttctgataaggaaactggtgatatcgattttgattatttaccatcagattttgatattgttgaaaaggtaagtaaaagttcgcgtgagggtcgtcctaatagaagttctaaacgagaacatcagcatagaatttctgatcgtgataataagaataaaaatacatctaagaaaaaagcatctcgaaaacccaaaaggaactcggatagcaaatcacatcatcataaagacgatagaacaacaggttcaaccaagaaaaaaacgaaaaaacctttctataaaggcgttgctaagaaaggtcagaaacggaaatctaagaaaggt

SEQ ID NO: 9400 - protein, 801 aa, Streptococcus agalactiae
MKEKIIKYLEEHGKTSVNDLAAALDMAGAKAFPKLIKTISNLESHRQLRFDDNGSLSLQKKEAKKKEITVRGLFRANKAGFGFLSIDQDEDDMFIGKNDIAYAIDGDTVEAVVKKPADRLNGTAAEARVVNIVERSLKTLVGKFVLDDERPKYAGYIKSKNQKINQKIYIRKEPVVLDGTEIIKVDIDKYPTRGHDYFVASVRDIVGHQGDVGIDVLEVLESMDIVSEFPEDVIAEANAIPDAPTEKDLIGRVDLRQEVTFTIDGADAKDLDDAVHIKLLDNGHFELGVHIADVSYYVTEGSALNREALSRGTSVYVTDRVVPMLPERLSNGICSLNPNLDRLTQSCIMEIDQNGRVVNHQITQSVINTTYRMTYTAVNDIIAGDEEICSEYESIVSSVQHMVTLHHTLEAMRTRRGALNFDTSEAKIMVNDKGMPVDIVIRNRGIAERMIESFMLAANETVAEHYARLKLPFIYRIHEEPKAEKLQKFIDYASVFGVQIQGTATKITQSALQDFMKKVQGQPGSEVLSMMLLRSMQQARYSEHNHGHYGLAAEYYTHFTSPIRRYPDLLVHRMIRDYDDKAMDKADHFANLIPEIATQTSSLERRAIDAERIVEAMKKAEYMEEYVGEEFEGVVASVVKFGMFVELPNTIEGLIHVTTLPEYYHFNERTLTLQGEKSGKVFRVGQQIKVKLIRSDKETGDIDFDYLPSDFDIVEKVSKSSREGRPNRSSKREHQHRISDRDNKNKNTSKKKASRKPKRNSDSKSHHHKDDRTTGSTKKKTKKPFYKGVAKKGQKRKSKKG

SEQ ID NO: 9401 - DNA, 1167 bp, Streptococcus agalactiae
gtggcttggctcggtaatttttttactggggcaagcttttcacttgttatgccttttatggtattatatgtagaacaattaggagcacctagcaacaaagtagagtggtatgcaggcctatcagtatccttatcagccttgtcttcagctttagttgccccattatgggggcgcttagctgataaatatggtagaaaaccgatgatggtaagagcagggttgatgatgacttttactatgggaggtcttgctttcattcatagtgttacaggacttctgattttacgtatattaaacggcatttttgcaggctatgtacctaactctacagctttgatagcaagtcaagctcctcaagaggaatcaggatatgccttaggaaccttagcgacaggagtgactggaggtatgttaattggtccacttttagggggacttttagcagagtggtttggtattagggaagtttttttattagtgggaaccatattgttaatatctactttaatgaccatttttatggtaaaggaagatttcaaacccatttctaacgaagaaaccatgccaactacagaagtgttcaaaagcgttaaaagcttacaaattttaatagggctgtttgtaacaagcatgattattcaaatttctgcacaatcaattgcacctattttaacactttacattcgtcatttaggacagactgaaaacttgatgtttgtttccggattaattgtttctggtatgggattctctagtattctgagtagtccaaagctaggaagaatcggggatcgcataggcaatcatcgtttgctattattagctctactgtatagtttcctcatgtatgtcttatgttcattggcacagacttcattacagctaggggttattagattcctgtatggttttggaacaggtgccttgatgccgagtattaattcaatcttgactaaaattgctccaagacaaggtttatcaaggattttcagttataaccaaatgtttagcaatttaggacaagtattaggtccttttgtcggttcagcagtttctattcatttaggattccgatgggttttctttgtgactagcttcatcgttttagctaattttgtttggtgttttattaattttagaaaatatattagagttaaggaaattgtg

SEQ ID NO: 9402 - protein, 389 aa, Streptococcus agalactiae
MAWLGNFFTGASFSLVMPFMVLYVEQLGAPSNKVEWYAGLSVSLSALSSALVAPLWGRLADKYGRKPMMVRAGLMMTFTMGGLAFIHSVTGLLILRILNGIFAGYVPNSTALIASQAPQEESGYALGTLATGVTGGMLIGPLLGGLLAEWFGIREVFLLVGTILLISTLMTIFMVKEDFKPISNEETMPTTEVFKSVKSLQILIGLFVTSMIIQISAQSIAPILTLYIRHLGQTENLMFVSGLIVSGMGFSSILSSPKLGRIGDRIGNHRLLLLALLYSFLMYVLCSLAQTSLQLGVIRFLYGFGTGALMPSINSILTKIAPRQGLSRIFSYNQMFSNLGQVLGPFVGSAVSIHLGFRWVFFVTSFIVLANFVWCFINFRKYIRVKEIV

SEQ ID NO: 9403 - DNA, 924 bp, Streptococcus agalactiae
atgaaaaagtggttagttattgtatcatgttttgtagcatttttaggcttaggtgcctgtgctaacaagcaggatcaagccaaaaacgaaaaattaaaagtagttgtaaccaactctattttggcagatataacaaaaaatatagccggtaacaaaatcgacttacatagtattgtacctgttggtaaagatcctcatgaatatgagccattaccagcagacgttgaaaaaacaactcaagcagaccttgttttttacaacggaattaatcttgaaacaggcggtaatgcttggtttacaaaattaataaagaacgctaagaagaaagaaaacaaagattactttgcggttagcgatggagttgatgttatttatctaaatggtcaaagcggaaaaggtaaagaagacccacatgcttggttgaaccttgaaaatggtattatttactcaaaaaatattgctaagcaattaattgctaaagatccaaaaaacaaagctacttatgagaaaaacagagatgcttatgtagctaaattagaaaaattggataaagaagcaaaatctaaatttaatgccattccagctaataaaaaattaattgttactagtgaaggttgctttaaatatttctcaaaagcttatggagttccatcagcatacatctgggaaattaacactgaagaagaaggtacaccagatcaaattactagcttagttaagaaattaaaacaagtaagaccttcagctttattcgttgaatcaagtgttgacaagcgtcctatgaaatctgtttcaagagaatcaggtatcccaatttacgcagaaatcttcacagactcaattgctaaaaaaggtcaaaagggtgacagctactacgctatgatgaaatggaatcttgataagattgcagaaggtttagcaaaa

SEQ ID NO: 9404 - protein, 308 aa, Streptococcus agalactiae
MKKWLVIVSCFVAFLGLGACANKQDQAKNEKLKVVVTNSILADITKNIAGNKIDLHSIVPVGKDPHEYEPLPADVEKTTQADLVFYNGINLETGGNAWFTKLIKNAKKKENKDYFAVSDGVDVIYLNGQSGKGKEDPHAWLNLENGIIYSKNIAKQLIAKDPKNKATYEKNRDAYVAKLEKLDKEAKSKFNAIPANKKLIVTSEGCFKYFSKAYGVPSAYIWEINTEEEGTPDQITSLVKKLKQVRPSALFVESSVDKRPMKSVSRESGIPIYAEIFTDSIAKKGQKGDSYYAMMKWNLDKIAEGLAK

SEQ ID NO: 9405 - DNA, 645 bp, Streptococcus agalactiae
atgactccaaataaagcagattacctaaaatgcattcatgaattaggtgaaaaaaacaacaaaatttccaataagaaaatcgctgaaatgatgcaagtctcggctcctgccgtgtcagaaatgattaaaaaaatgataagtgaacaactgattgttaaagataaagatttaggatattatcttaccaaacaaggtttattagttgtttctgacctttaccgtaaacatcgtctagtagaggtatttttagttaaccatttgcactatactgctgatgatattcatgaagaagcggaagttttagaacatactgtatcaacaacttttgttgatcaattagaaaagttgttagactttccacaattttgtccacacggtgggactattcctaaaaagggagagtttttagtagaaattaaccaaatgacattggaccaaattagtcagcttggcacatatgttatcagtcgtgttcatgatgattttcagctactgaaatacctagaacaacaccgtttgcatatcaacgataccattgaattgacacaaattgacccttatgcaaaaacttatcacatcacctataacgatgaaaatctaacaatccctgagcgtatcgcaagtcaaatatatgtatctgctaca

SEQ ID NO: 9406 - protein, 215 aa, Streptococcus agalactiae
MTPNKADYLKCIHELGEKNNKISNKKIAEMMQVSAPAVSEMIKKMISEQLIVKDKDLGYYLTKQGLLVVSDLYRKHRLVEVFLVNHLHYTADDIHEEAEVLEHTVSTTFVDQLEKLLDFPQFCPHGGTIPKKGEFLVEINQMTLDQISQLGTYVISRVHDDFQLLKYLEQHRLHINDTIELTQIDPYAKTYHITYNDENLTIPERIASQIYVSAT

SEQ ID NO: 9407 - DNA, 1341 bp, Streptococcus agalactiae
ttgcttatggtaaaaaaaggctttttaacgggattactcttatttggtatcttctttggtgcagggaacctcatttttccaccagcattaggtgtagcatctggacaagatttctggccagcgattttaggattttgtttgtcaggagttggattagctattattaccctcctactaggcacactaactaatggtggttataagacagagatgtcggaaaaatttagtccgtggttttctttaacatttttagttatactctacctaactattggtccactttttgctattcctagaacagcaacggtttcttttgaaattggggttgctccaattgtagggcatagtccgattgctcttttgtgttttacagcctgtttttttgctgcagcttattatctcgctattagaccaaatggtatattagatagtgttggaaaaatcttaacgcctgtttttgcctttttaattctctctttggttgttgttggagctattgcttatggaaacttggagagtgctaaggcgagtgctgactatgcaggaaaagcgtttggaagtggtgtcttagcaggctataatacacttgatgcacttgcagcagttgctttttgtctagtagcaacagaaacgcttaaaaagtttggttttaaaactaaaaaagaatatttatcaaccatttggattgttggaattgttactagtttagcatttagtattttatatattggcttaggttttttagggaataagtttcctgtcccagctgatattttagctgacccaaatgttaataaaggagcttatgtattatcacaagcatcttataaattatttggaaattttggtcgttatttcttgagtattatggtaacattgacatgctttacaacaacagttgggcttattgtgtcagtatctgaattttttgataagaactttcgttttgggaattataaattatttgctactgtttttactttgattggctttttaattgctaatcttggtttaaatgctgtaattactttttcagttcctgtgctaactttattgtatccgattgttattgttattgtcttaattattttgattaataagtggttgccgctttcaaaaaagggaatgtctttgacaattggtcttgtcactttagtgtcgtttgttgaggttctagcgggacaatggcaagaaaaaacattaactcagttagttggattcctcccctttcatactatttcaatggggtggctagttccaatgttgattggtatagtattttctttggtgctgtcagataaacaaaaaggccaagcatttgatttagagaaatttgaagga

SEQ ID NO: 9408 - protein, 447 aa, Streptococcus agalactiae
MLMVKKGFLTGLLLFGIFFGAGNLIFPPALGVASGQDFWPAILGFCLSGVGLAIITLLLGTLTNGGYKTEMSEKFSPWFSLTFLVILYLTIGPLFAIPRTATVSFEIGVAPIVGHSPIALLCFTACFFAAAYYLAIRPNGILDSVGKILTPVFAFLILSLVVVGAIAYGNLESAKASADYAGKAFGSGVLAGYNTLDALAAVAFCLVATETLKKFGFKTKKEYLSTIWIVGIVTSLAFSILYIGLGFLGNKFPVPADILADPNVNKGAYVLSQASYKLFGNFGRYFLSIMVTLTCFTTTVGLIVSVSEFFDKNFRFGNYKLFATVFTLIGFLIANLGLNAVITFSVPVLTLLYPIVIVIVLIILINKWLPLSKKGMSLTIGLVTLVSFVEVLAGQWQEKTLTQLVGFLPFHTISMGWLVPMLIGIVFSLVLSDKQKGQAFDLEKFEG

SEQ ID NO: 9409 - DNA, 1164 bp, Streptococcus agalactiae
atggaaaagagacttagtttaggagcgcttgttttagctagtacagttcttttagcagcatgtggaaatgtcggaggaggagcatcttcgacaggaacaaaaatagggaaagatattaaggtagggtataactgggaattatcaggaaacgtttcttcgtatggaaattcaatgaagaatggagctgacttagcagtaaaagaaattaatgctgctggaggggttggcggcaagaagttaaaagtcctatcacaggataataaatcagaaaatgcagaggcagcaacggttgccacaaacttggttaccaaaggagctaatgtcattatcggaccagcaacatcgggtgcagctgcatcttcaactccaaaagtaaatgcagcagcagttccaatgattgcacctgctgcgacacaagacaatttagtctatggttctgatggaaaaaccttaaatcagtatttcttccgagctacttttgtcgataattatcaaggaaagctattgtctcagtatgctacagacaaccttaaagctaaaaaagttgttctattttatgataattcatcagattactcaaagggggtagcaaaatcatttaaggaaagttatagtggaaaaattgttgatagtatgacattctccgctggtgatactgatttccaagcgtcattgactaagttgaaagggaaagaatatgatgctattgtgatgccaggttactataccgagacaggattaatagttaagcaagcgcgtgatttaggtatctctaaaccggttcttgggcctgatggttttgatagtccgaaatttgtgcaatcggcaacacctgtaggagcttcaaacgtttattatttgacaggtttcactacacaaggatcaaccaaagctaaagctttccatgatcattacgttaaggcatatggtgaagaaccatccatgttctcggctttatcatacgacgctgtgtatatggcagctaaatctgctaaaggagctaaaacttcaattgatattaaaaaagctttagctaagctgaaagattttaaaggtgtgacagggaaaatgtctattgataaaaatcacaatgttgttaaatcagcttacgttgtcaaattagaggatggaaaaacaagtagcgttaacattatttcagcaaaa

SEQ ID NO: 9410 - protein, 388 aa, Streptococcus agalactiae
MEKRLSLGALVLASTVLLAACGNVGGGASSTGTKIGKDIKVGYNWELSGNVSSYGNSMKNGADLAVKEINAAGGVGGKKLKVLSQDNKSENAEAATVATNLVTKGANVIIGPATSGAAASSTPKVNAAAVPMIAPAATQDNLVYGSDGKTLNQYFFRATFVDNYQGKLLSQYATDNLKAKKVVLFYDNSSDYSKGVAKSFKESYSGKIVDSMTFSAGDTDFQASLTKLKGKEYDAIVMPGYYTETGLIVKQARDLGISKPVLGPDGFDSPKFVQSATPVGASNVYYLTGFTTQGSTKAKAFHDHYVKAYGEEPSMFSALSYDAVYMAAKSAKGAKTSIDIKKALAKLKDFKGVTGKMSIDKNHNVVKSAYVVKLEDGKTSSVNIISAK

SEQ ID NO: 9411 - DNA, 1350 bp, Streptococcus agalactiae
atggagaatcataattctattaaacagacctatggattaatgactacaattgctatgattgtaggtgtagtgattggttcaggcatttattttaaagttgatgacatccttaaatttactggtggagatgtctttttaggcatggtaattttagtactaggttctttttcgattgtttttggaagtttgtcaatttctgagctagctattagaacgagtgaaagtggtggtattttttcttactacgaaaaatatgttagcccagctttagcagcaactttaggcttgtttgcgtcttttttgtatcttccaactttaacagcaatcgtttcatgggtagctgcattttatactttaggtgaatcatcaagtttggaatcacagattattttagctgctgtttatattttagcgcttagtctcatgaatatctttgctaagcgtattgcagggggattccaatctttaacgacctttgtaaaaatgattcctttagttctaattgctttaattggtgctttttggtctgataaagctccacaacttccacaacatttaacagctattcaaccgtcaaatgttggatggagttgggtgtcaggtctggtaccattgtattttgcatatgatggttggacaatttttgttaatattgcaccagaagtcaagaatcccaagaagaatttaccacttgcctttgtcattggtccagcgcttatcttattatcatatttggcatttttctatggtttgacacaaattttaggtgctagctttattatgacaaccggtaatgatgctattaattatgcagctaatattattttcggtcctagtgttgggcgtttattatctttcattgttattctatctgtattaggtgttgccaatggacttttacttgggacgatgcgtctacctcaagcttttgcggaacgcggatggatcaaaagtgagaggatggctaacataaatttgaagtatcaaatgtcattgccagctagtttgacggtgacggctgtagctattttttggctttttgttcattttatggttacaaaatttaacttattgccgggtagtgatattagtgaaattgctgtggtgtttaataataccagtttaatcattctttatgttttagtactcagcctttatctcaaaaaagatattaaaaataaatttaccggcttagtttcaccgattctagcaattttaggcggtttgatcctccttatcgggagtttgttaagtaatttctttacggttttaattttccaatgtttttgcttattattctgtttgatttgtcattatatctatcaaaaaaataacccaaaaactcatgaa

SEQ ID NO: 9412 - protein, 450 aa, Streptococcus agalactiae
MENHNSIKQTYGLMTTIAMIVGVVIGSGIYFKVDDILKFTGGDVFLGMVILVLGSFSIVFGSLSISELAIRTSESGGIFSYYEKYVSPALAATLGLFASFLYLPTLTAIVSWVAAFYTLGESSSLESQIILAAVYILALSLMNIFAKRIAGGFQSLTTFVKMIPLVLIALIGAFWSDKAPQLPQHLTAIQPSNVGWSWVSGLVPLYFAYDGWTIFVNIAPEVKNPKKNLPLAFVIGPALILLSYLAFFYGLTQILGASFIMTTGNDAINYAANIIFGPSVGRLLSFIVILSVLGVANGLLLGTMRLPQAFAERGWIKSERMANINLKYQMSLPASLTVTAVAIFWLFVHFMVTKFNLLPGSDISEIAVVFNNTSLIILYVLVLSLYLKKDIKNKFTGLVSPILAILGGLILLIGSLLSNFFTVLIFQCFCLLFCLICHYIYQKNNPKTHE

SEQ ID NO: 9413 - DNA, 741 bp, Streptococcus agalactiae
atgactactattataacttcaaaatcaaataatctcattaaaaaaacgaaaaagttgttacaaaaaaaatatcggaaatcttcatatcttattgaaggctggcatttatttgaggaagctgaaaaatatggtgcacaatttttaaatatttttgtgacagaaacggcaatagatcgtttgagaaaacccgagagagctattgttgttacagatgatgttttgaaagaattaactgactcacagactcctcaagggattgtagctgagattgcctttcaagagacaagatggacagatattaaaaaaggacgttttcttgtattagaagatgtgcaggatccaggaaacctaggaacaatggttcgaactgcagatgcagcgaattttgatgctgtttttttatctcagaaatctgctgatttgtataaccaaaaaacacttcgttctatgcaaggcagtcactttcatttaccagtatttagggtagaaatagagcagtttgttaacttttgtaaagcagaagggataactatgattgcgacaactttatctgaacaatcggtaaattataagaatctccctaaatatgattattttgctttaatcatgggaaatgagggacagggaatttccaaaactatgacagaagaagcagatgttttagcacatattgaaatgcctggacaagcagaaagtcttaatgtagcagtagctgcgggagtagtcattttcagcttaatt

SEQ ID NO: 9414 - protein, 247 aa, Streptococcus agalactiae
MTTIITSKSNNLIKKTKKLLQKKYRKSSYLIEGWHLFEEAEKYGAQFLNIFVTETAIDRLRKPERAIVVTDDVLKELTDSQTPQGIVAEIAFQETRWTDIKKGRFLVLEDVQDPGNLGTMVRTADAANFDAVFLSQKSADLYNQKTLRSMQGSHFHLPVFRVEIEQFVNFCKAEGITMIATTLSEQSVNYKNLPKYDYFALIMGNEGQGISKTMTEEADVLAHIEMPGQAESLNVAVAAGVVIFSLI

SEQ ID NO: 9415 - DNA, 1206 bp, Streptococcus agalactiae
atgaaacgatttttaaaagcttggagaaaaacaagcttgataaaaaaaataacaattggagtcgttattggcttattcttgggtattttagtccctaaagcctctgcgattggtttacttggtcaactttttgtaggagggttgaaagctattgcccctcttttagttttcactttagttattagtgccttgtcgcaacaccgtgagggcggtaagaccaatatgtcaacgataattggtttgtatatcactgcaacttttgcagcggccctaatcgctgttgttgtgaactatattttccctttgacactgatattgaaaacgccagcaaagacagacttattacctcccaaggggatttcagaagtctttcaatctcttttgttgaaaattgttgataatcccattcatgccattaccgaggccaattatatgagtattctattttgggcggttatttttggtttggcgatgcgaagcagtaatcagcgtacaaaagatttaatgcaaacttttgctgatgctacttcacaagttgtcaaatggattatcaatttggccccaattggtattatggggttggttttcactagcatttcagaaaacggtattggtatactaggtgattatggtcttttaatattagttttggtgggtacgatgttatttgtagctcttgtcgttaacccaatcattgcttttgttatgatgcgtaaaaatccttaccctttggtattacgatgcttaaaggattcaggtattacagctttctttacacgtagttctgcggcgaatattcctgttaatatgagactatgtgaggatttaggattagataaagacacttactcagtatctatcccgcttggtgcagctatcaatatggctggtgcagctattacaattaatatcctgactttagcagcagtaaatactttaggaattactgttgattttccaacagcattcttattaagtgtggttgctgctgtatcagcatgtggagcttctggtgtaactggtggttcacttttattgattccggtggcatgtagcttatttggtatttcaaatgacgttgcaatgcaagtcgtaggagttggtttcattgtaggggtgatacaggattcgtgtgagacagccttaaattcatcgacagacgttctgttcacggctgtagctgaaaaatcagtttttggaaaaaaa

SEQ ID NO: 9416 - protein, 402 aa, Streptococcus agalactiae
MKRFLKAWRKTSLIKKITIGVVIGLFLGILVPKASAIGLLGQLFVGGLKAIAPLLVFTLVISALSQHREGGKTNMSTIIGLYITATFAAALIAVVVNYIFPLTLILKTPAKTDLLPPKGISEVFQSLLLKIVDNPIHAITEANYMSILFWAVIFGLAMRSSNQRTKDLMQTFADATSQVVKWIINLAPIGIMGLVFTSISENGIGILGDYGLLILVLVGTMLFVALVVNPIIAFVMMRKNPYPLVLRCLKDSGITAFFTRSSAANIPVNMRLCEDLGLDKDTYSVSIPLGAAINMAGAAITINILTLAAVNTLGITVDFPTAFLLSVVAAVSACGASGVTGGSLLLIPVACSLFGISNDVAMQVVGVGFIVGVIQDSCETALNSSTDVLFTAVAEKSVFGKK

SEQ ID NO: 9417 - DNA, 1368 bp, Streptococcus agalactiae
ttgatgaaactaaaaaacacttatatcattatcggcttgatgctttttgcgctgttctttggagccggtaatcttatttatccagcctacttaggtatctactctggttctaattgggcgtgggctatcattgggttctgcttaacaggcgtaactttacccctacttggtgttgcagctgtggcgtactcaggagcaaccgatgttgaaagcttcaccaaacctgtctctaaaacatatgctattttctttgcagtagcactatacctatctattggacctttctttgccattcctcgaacaggggcaacctcattctcagttggtattcaacctatcttaggcgacagctccttagtcaaaattatctatggtttaattttctttggtatttcttatttcttagctattagacctagtcagattgtagatcgtattggtaaatatctaactccctttttactaactgttattagtattttaattattgcctcactcatccatccagctgctatcgttggaacaccacataacgcttcaacgaatgtcagcgatgctttcaaggatttaccattcctagcaggactgattcaggggtatggtacaatggatgcccttgcatcaattgcttttgctattatcgttattcaagcaagtaaacagtacggagcaattaccaaaaaagaaattacttctatggcacttaaatctggtgctatcgctacatttcttttagcttttatttatatttttgtaggacgtattggtgcaacttcacaaagcttgtttaaatttgcaaatggttccttcttacttcacaatactccaatagacggtgggcatgttcttagtcaatcagctaacttctatttaggaattgtgggacaagctattttaggtacggctatttttcttgcttgcttaacaacagctactggattaatcactgcttgtgcggaatacttccacaaattacttccaaagattagtcacattacttgggctacaatctttactttaattgctattacgttctattttggtggtttatcagagattatccgttggtcactaccagttctctaccttctctatccattaactatagtcttaattttcttagtcttttttgatcaaaaatttgaaagtagccgcattgtctaccaaacttctattgccgccactgctgtcgctgctttatacgatgccttatcaaaactcggcgaaatgactggtttatttaccattccatccgctttgaccacattctttactaaagttgttcctttaggtgaatattctatgggatggattagttttgcaatttgtggtgtcttagttggtcttattctaaaaaaagtaaaagca

SEQ ID NO: 9418 - protein, 456 aa, Streptococcus agalactiae
MMKLKNTYIIIGLMLFALFFGAGNLIYPAYLGIYSGSNWAWAIIGFCLTGVTLPLLGVAAVAYSGATDVESFTKPVSKTYAIFFAVALYLSIGPFFAIPRTGATSFSVGIQPILGDSSLVKIIYGLIFFGISYFLAIRPSQIVDRIGKYLTPFLLTVISILIIASLIHPAAIVGTPHNASTNVSDAFKDLPFLAGLIQGYGTMDALASIAFAIIVIQASKQYGAITKKEITSMALKSGAIATFLLAFIYIFVGRIGATSQSLFKFANGSFLLHNTPIDGGHVLSQSANFYLGIVGQAILGTAIFLACLTTATGLITACAEYFHKLLPKISHITWATIFTLIAITFYFGGLSEIIRWSLPVLYLLYPLTIVLIFLVFFDQKFESSRIVYQTSIAATAVAALYDALSKLGEMTGLFTIPSALTTFFTKVVPLGEYSMGWISFAICGVLVGLILKKVKA

SEQ ID NO: 9419 - DNA, 1053 bp, Streptococcus agalactiae
atgagagctgcaacttatctttcagctaatgaattatcacttactgataaggctaaacctcaagtaataaaacccacagatgcggttgtaagacttgtcaaaacaaccatttgtggtactgatctacatatccttggtggcgatgttcctgcttgtaaaccaggaacaactttaggtcatgaaggcattggtatcgtcgaagaagttggttctgctgtcaatcattttaaagtcggagataaagtaattatttcttgtgtcactgcctgtaatacttgctattactgtaagcaccagttgccttcacattgtgaagatggcgggtggattttaggacatcttattgaaggtactcaagcagaatatgttcatattccacatgcagatggtagcctttatcatgcacctgaaggtgtttgtgacgatgcattggttatgttatctgatattttaccaacttcatacgaaatcggcgtcttaccttctcacattaaaccaggtgatactgtttgtattgtaggcgctggaccaattggactatctgccttactaactgcacaattctattctcctgccaaaattattatggttgatttatctcaaaaacgacttgaagcctctaaaaaatttggtgcaacacacaccattctatcaacgtctactcaagaagttaaagaagaaattgataaaattaccaaaggccgtggcgttgatgtcgtattagaatgtgttggttatcctgcaacatttgatatttgtcaaaatgtagtttctattggaggacatatcgcaaatgttggtgttcatggtaaacctgttgaatttaacctccaagatttatggataaaaaatataacccttaatactggattagttaatgctaatacaactgaaatgctccttgaagttcttgagacaggcaaaatcgatgcaacacaactagtaacacatcacttcaagctatctgaaatcgaagaagcttataaggtatttaaagctgctgaagaaaacaatactctcaaagttatcatcgaaaacgatattactccagcc

SEQ ID NO: 9420 - protein, 351 aa, Streptococcus agalactiae
MRAATYLSANELSLTDKAKPQVIKPTDAVVRLVKTTICGTDLHILGGDVPACKPGTTLGHEGIGIVEEVGSAVNHFKVGDKVIISCVTACNTCYYCKHQLPSHCEDGGWILGHLIEGTQAEYVHIPHADGSLYHAPEGVCDDALVMLSDILPTSYEIGVLPSHIKPGDTVCIVGAGPIGLSALLTAQFYSPAKIIMVDLSQKRLEASKKFGATHTILSTSTQEVKEEIDKITKGRGVDVVLECVGYPATFDICQNVVSIGGHIANVGVHGKPVEFNLQDLWIKNITLNTGLVNANTTEMLLEVLETGKIDATQLVTHHFKLSEIEEAYKVFKAAEENNTLKVIIENDITPA

SEQ ID NO: 9421 - DNA, 1128 bp, Streptococcus agalactiae
atgagggcaaatggtgaaaagatattgcggttaaatactggaaatccagctgcctttggcttcgaagcgccagatgaagtcattcgtgatttaattacgaatgcgcgtgaatcagaaggttactctgattcgaaaggtattttttcagctcgtaaggctgttatgcagtattaccagttacaaaacatccatgttgacatggatgatatatacattgttaatggtgttagtgagggaatctctatgtcaatgcaagctttgcttgataatgatgacgaggttctagttccaatgccagattacccgttatggacagcttgtgttagccttgctggtggaaatgctgtgcattatatttgtgatgaggaagctaattggtatcctgatattgatgatatcaaatcaaaaatcacatccaaaacaaaagcaattgtcctcattaatccaaataatccaactggagcagtctatccgcgtgaaattctgcaagagattgtggatatcgctagacaaaatgacttgattattttttcagacgaggtttatgaccgtttagttatggatggaatggagcatatcccaattgcttctattgcagaggatatttttacagttactttatctggcttatctaaatcacatcgcatctgtggtttccgcgttggttggatggtattgtctggtccgcgacaacatgttaaaggttatattgaaggtttgaatatgttagctaacatgaggctgtgttcaaatgttcttgctcaacaggttattcaaacatcgttaggcggacagcaatctattgatagtatgttgttgccaggaggtcgtatctacgagcaacgtaattatatccataaagcaattaatgaaatacctggtttatctgctgtaaaaccaaatgctggactgtatcttttccctaaaattgatacagatatgtaccgtattgataatgatgaagagtttgtgcttaatttcttaaaacaagaaaaagtattactaacacacggtagaggatttaatatgaataccgctgaccattttagaattgtttacttaccacgtgttgatgaattgactgaactacaagaaaaaatggctcgctttttaagccaatacaagcgc

SEQ ID NO: 9422 - protein, 376 aa, Streptococcus agalactiae
MRANGEKILRLNTGNPAAFGFEAPDEVIRDLITNARESEGYSDSKGIFSARKAVMQYYQLQNIHVDMDDIYIVNGVSEGISMSMQALLDNDDEVLVPMPDYPLWTACVSLAGGNAVHYICDEEANWYPDIDDIKSKITSKTKAIVLINPNNPTGAVYPREILQEIVDIARQNDLIIFSDEVYDRLVMDGMEHIPIASIAEDIFTVTLSGLSKSHRICGFRVGWMVLSGPRQHVKGYIEGLNMLANMRLCSNVLAQQVIQTSLGGQQSIDSMLLPGGRIYEQRNYIHKAINEIPGLSAVKPNAGLYLFPKIDTDMYRIDNDEEFVLNFLKQEKVLLTHGRGFNMNTADHFRIVYLPRVDELTELQEKMARFLSQYKR

SEQ ID NO: 9423 - DNA, 285 bp, Streptococcus agalactiae
atggctaaatacgaaattctttatattattcgtccaaacattgaagaagaagctaaaaacgctttggtagcacgttttgattctatcttatctgacaacggtgcaactgttgttgaatcaaaagattgggaaaaacgtcgtcttgcatacgaaatccaagatttcactgaaggactttaccatatcgttaacgttgaagctgaagatgcagtagctcttaatgagtttgatcgtctttcaaaaatcaacggtgacattcttcgtcacatgatcgttaaagtagac

SEQ ID NO: 9424 - protein, 95 aa, Streptococcus agalactiae
MAKYEILYIIRPNIEEEAKNALVARFDSILSDNGATVVESKDWEKRRLAYEIQDFTEGLYHIVNVEAEDAVALNEFDRLSKINGDILRHMIVKVD

SEQ ID NO: 9425 - DNA, 1122 bp, Streptococcus agalactiae
atgtggcctgaagatagaatcgcttcttttcgtcgcacacttttagggtggtatgaccaagaaaaacgtgatctcccttggcgaagaactactaatccatactatatttgggtttctgaaatcatgttgcaacaaacacaagttaatacagtaatcccttattataaacgttttctagagtggtttcctcaaataaaagatttggcagacgctcctgaagaacaattactaaaggcatgggagggactaggctattattctcgggtgcgtaatatgcaaaaggctgcacagcaagtgatggttgattttggtggcatatttcctcacacttatgatgatattgcttcattaaaagggattggtccttatactgcaggtgctatcgccagcatctcattcaacttaccagagcctgctgttgatggcaatgtgatgcgtgtcatggctcgtttgtttgaagttaattatgacatcggtgaccctaaaaatcgtaaaatttttcaagctattatggaaatactaattgaccctgacagacccggtgattttaaccaagcacttatggatctgggtacagacatcgaatccgctaagacacctagacctgatgaaagccctattcgtttctttaatgctgcttatttgaatggtacttatagtaaatatcccataaaaaatactaagaaaaagcctaaaccaatgcgaattcaggcttttgtcattcgtaaccaaaatggtcaatatctactggagaaaaatactaaagggagacttctagggggtttttggtcatttcctattatcgaaacgtcacctctttctcaacaattagatttatttgatgacaatcaatccaaccccataatctggcaaacccaaaatgaaactttccaaagagaatatcaattaaagccccaatggactgataatcactttccaaatattaagcacacttttagtcaccagaagtggacaatagaactcatagagggggtggtcaaagcaacagatttacctaatgctcctcacctaaagtgggtagcaattgaggacttttctctgtatccctttgcaacaccacaaaagaaaatgctagagacctacttaaaacagaaaaatgct

SEQ ID NO: 9426 - protein, 374 aa, Streptococcus agalactiae
MWPEDRIASFRRTLLGWYDQEKRDLPWRRTTNPYYIWVSEIMLQQTQVNTVIPYYKRFLEWFPQIKDLADAPEEQLLKAWEGLGYYSRVRNMQKAAQQVMVDFGGIFPHTYDDIASLKGIGPYTAGAIASISFNLPEPAVDGNVMRVMARLFEVNYDIGDPKNRKIFQAIMEILIDPDRPGDFNQALMDLGTDIESAKTPRPDESPIRFFNAAYLNGTYSKYPIKNTKKKPKPMRIQAFVIRNQNGQYLLEKNTKGRLLGGFWSFPIIETSPLSQQLDLFDDNQSNPIIWQTQNETFQREYQLKPQWTDNHFPNIKHTFSHQKWTIELIEGVVKATDLPNAPHLKWVAIEDFSLYPFATPQKKMLETYLKQKNA

SEQ ID NO: 9427 - DNA, 867 bp, Streptococcus agalactiae
atgaagactacaaaagttttttcagttttatcgttatctgttgctgtatttatgatgacagcatgtcagtcaaaccacagtactaaaaaagctgatatgtctccagataaggtggagcaaaagacgaaatttaaaaatatttctctaagttctaataaactgttggctaaggaaaacactatgtctgtcctttggtatcaaaattctgcagaagccaaggctttatatttacaaggttataatgttgctaaaatgaagttagatgattggttacaaaagcccagtgaaaaaccatattcaattatcttagatttagatgaaacagttttagataatagcccatatcaagcaaagaatattaaagatggctctagtttcacgccagagagttgggataaatgggtgcaaaagaaatcagctaaggctgttgcgggtgccaaagaatttttgaagtatgctaatgaaaagggaataaaaatttattatgtctcagatcgtacagatgctcaagttgatgcgactaaagaaaatttagagaaggaaggtatacctgttcaagggaaagaccacttgcttttccttaaaaaaggaatgaaatctaaagagagtcgccgtcaggcagttcaaaaagataccaatttaattatgctttttggagataatttagttgattttgctgatttttctaaatcatctagtacagatagagaacaactactaactaaacttcaaagtgagtttggtagtaaatttattgttttcccaaatcctatgtacggttcttgggaaagtgctatttatcaaggaaaacatctggatgttcaaaaacaattgaaagaacgacaaaaaatgttgcattcgtatgat

SEQ ID NO: 9428 - protein, 289 aa, Streptococcus agalactiae
MKTTKVFSVLSLSVAVFMMTACQSNHSTKKADMSPDKVEQKTKFKNISLSSNKLLAKENTMSVLWYQNSAEAKALYLQGYNVAKMKLDDWLQKPSEKPYSIILDLDETVLDNSPYQAKNIKDGSSFTPESWDKWVQKKSAKAVAGAKEFLKYANEKGIKIYYVSDRTDAQVDATKENLEKEGIPVQGKDHLLFLKKGMKSKESRRQAVQKDTNLIMLFGDNLVDFADFSKSSSTDREQLLTKLQSEFGSKFIVFPNPMYGSWESAIYQGKHLDVQKQLKERQKMLHSYD

SEQ ID NO: 9429 - DNA, 411 bp, Streptococcus agalactiae
atgcctacaattaaccagttggtacgtaaaccacgtaaatctaaagttgaaaaatcagattcacctgctttgaatattggttacaacagtcacagaaaagttcacactaaattatctgcaccacaaaaacgtggtgttgcaactcgtgttggaactatgacacctaaaaaacctaactctgcccttcgtaaatttgctcgtgtacgtttgagcaaccttattgaagttactgcttacattccaggtatcggacacaacttgcaagaacacagtgttgtgcttatccgtggtggacgtgtaaaagaccttccaggggtacgttaccatatcgttcgtggtgcacttgatactgcaggtgtagctgatcgtaaacaaggccgttctaaatacggtgctaaacgtcctaaaggg

SEQ ID NO: 9430 - protein, 137 aa, Streptococcus agalactiae
MPTINQLVRKPRKSKVEKSDSPALNIGYNSHRKVHTKLSAPQKRGVATRVGTMTPKKPNSALRKFARVRLSNLIEVTAYIPGIGHNLQEHSVVLIRGGRVKDLPGVRYHIVRGALDTAGVADRKQGRSKYGAKRPKG

SEQ ID NO: 9431 - DNA, 1353 bp, Streptococcus agalactiae
atgaaaaaagaaagtatatctattaaagatatcttgtggtttattattccgtcgttatttggagtattattattaatgactccatttaaatataatggtatgacaacagtagctgtctctgtaatctctaagacaattaatcaatggattaacgctgtttttcctatacattatattattttactaatcatttttatttcatgtgtgttagcactttgttatcgtctgtttagacctagctttattgaaaaaaatgacttgctaaaagaaatttctgacattaccattttctggctgattattcgtttgatcggtttggcacttggtctgatgacggttttacatattggtcctgaaatggtatgggggaaagagacaggcggccttatcctttttgatttgattggtggtttgtttaccattttccttgctgcgggttttattcttccatttttgacagaatttggtctactggagtttgttggtgtcttcctaactcccattatgcgtccattctttcagctacctggtcggtcagcagttaattgtgtagcctcatttgtaggtgatggtactattggaattgctttgaccgataagcagtatgttgagggttattataccagtagagaagctgcaacgatttccactactttttcagcagtatcaatcactttttgtcttgttgttttgcagaatgttggcttaactgattattttggccatttttatctaacagtcatcattagcagtgttgtctgtgcattcattatcccttatatccctcccttatctcgtcaatcaaatagttattacactaaaccaaagaaagaaacatctgaggtaattccggatggttataacaagatagagtggggacttaagcttgccatcgataaatcaaaagcaaatggaaacatgaagacttttgtcaataatgcctctaagacagtacttagtttatggtttggcgttatgccaacaattatgactgtcggaacaatagctttgattatttcagtatcaacacctatttttaaaattttaggtacaccattccttccgttccttgaacttttagggattccagaagcagatattgcgagtcaaaccatgattgttggtttttcagatatggttgttccttcgataatggcggctgaaattcacagtgagatgacaagatttattgtcgcaacagtttctattgtgcaattaatttatatgtctgagactggtgcggtgatattaggttccaagatccctatcaacattctagaattatttatcatttttatagagagaacaattatttcattacctattattgttttgatggcacatcttttcttt

SEQ ID NO: 9432 - protein, 451 aa, Streptococcus agalactiae
MKKESISIKDILWFIIPSLFGVLLLMTPFKYNGMTTVAVSVISKTINQWINAVFPIHYIILLIIFISCVLALCYRLFRPSFIEKNDLLKEISDITIFWLIIRLIGLALGLMTVLHIGPEMVWGKETGGLILFDLIGGLFTIFLAAGFILPFLTEFGLLEFVGVFLTPIMRPFFQLPGRSAVNCVASFVGDGTIGIALTDKQYVEGYYTSREAATISTTFSAVSITFCLVVLQNVGLTDYFGHFYLTVIISSVVCAFIIPYIPPLSRQSNSYYTKPKKETSEVIPDGYNKIEWGLKLAIDKSKANGNMKTFVNNASKTVLSLWFGVMPTIMTVGTIALIISVSTPIFKILGTPFLPFLELLGIPEADIASQTMIVGFSDMVVPSIMAAEIHSEMTRFIVATVSIVQLIYMSETGAVILGSKIPINILELFIIFIERTIISLPIIVLMAHLFF

SEQ ID NO: 9433 - DNA, 951 bp, Streptococcus agalactiae
atgaaaaaattaacaaaaggcagccacattcgtgttcttagtccctcttcttccattgagcgtctgggtggttttgaggctaacctattagccaaagaagtactagaaaagctgggatttcaagtgtcattctctaagcactatctagaaaatgatatcctctattctgcttcgattactagccgtgtagaagatttacatgaagcatttgccgacccttctgttgatgccatattagcaaccattggcggattcaattccaacgagcttttaccatatttagattatgatttaatctctaagaatcccaaaataatttgtggttactcagattcaacggccttccttaatgctatttttgccaaagcaaaaatccaaacttacatgggccctgcttattcttctttcaaaatgaaggaaggtcaaccttaccaaacacaagcttggcttactgccatgacagaaaaccactatgaactttggcctagtgaagaatggtctagtgatccctggtatgatcccagcaaaccacgccaatttttcccaacagaatggaaaatttataatcacggaaaagcttccggtacgattatcggaggtaatctctctacgtttggcctacttcgaggtactccttatgcaccgaaaattgaacgctatgtcctcttgattgaagaggctgaggaaagtaatttttatgaatttgaccgcaaccttgctgcaattttacaagcttatcctcatccacaagctattcttatggggcgctttcctaaagaatgcggcatgactccacaagtctttgaatatatcctttcaaaacatgctattttcaaggaaattcctgttatttatgatatggattttgcgcacacccaacctcttttgacagtgactattggagctgagctaagcgttgacactactacattatctctatctataaaagaa

SEQ ID NO: 9434 - protein, 317 aa, Streptococcus agalactiae
MKKLTKGSHIRVLSPSSSIERLGGFEANLLAKEVLEKLGFQVSFSKHYLENDILYSASITSRVEDLHEAFADPSVDAILATIGGFNSNELLPYLDYDLISKNPKIICGYSDSTAFLNAIFAKAKIQTYMGPAYSSFKMKEGQPYQTQAWLTAMTENHYELWPSEEWSSDPWYDPSKPRQFFPTEWKIYNHGKASGTIIGGNLSTFGLLRGTPYAPKIERYVLLIEEAEESNFYEFDRNLAAILQAYPHPQAILMGRFPKECGMTPQVFEYILSKHAIFKEIPVIYDMDFAHTQPLLTVTIGAELSVDTTTLSLSIKE

SEQ ID NO: 9435 - DNA, 750 bp, Streptococcus agalactiae
atgtttatatttaaaagaaaaaaacaagtagaaatgcctttggagaaaataccagcacatattggtattatcatggatggtaacggacgttgggcaaaaaaacgtttaaaaccacgcgttatgggacataaggcggggatggatgctcttcaagaagttacaatagcagcttcaggattaggtgttaaagtactaactgtctatgccttttctacagaaaattggtcacgtccagatgatgaagttaagtttattatgaaccttccggttaaattttttgataaatatgtaccagagttagataaaaataatgtacgtgtacaggtcatcggagatactcataaattacctaaggcaacatacgatgcaatgcaacgcgcttgtttgaggacaaaacataattcggggctcgtcttgaattttgcgctaaattatggcggacgttcagaaatcactaatgccattaaggaaattgctcaggatgttttggaagctaagttgaatcctgacgatattacagaggatttagtagcaaatcatttaatgacaaatagcttaccctatctttatagagaccctgatttgattatccgaactagtggagagttacgcttgagtaactttttaccttggcaatcagcttatagtgaattttactttactcccgttttatggccagattttaaaaaagacgaactacataaggccattgtggattataatcaacgccatcgtcgatttggtagtgta

SEQ ID NO: 9436 - protein, 250 aa, Streptococcus agalactiae
MFIFKRKKQVEMPLEKIPAHIGIIMDGNGRWAKKRLKPRVMGHKAGMDALQEVTIAASGLGVKVLTVYAFSTENWSRPDDEVKFIMNLPVKFFDKYVPELDKNNVRVQVIGDTHKLPKATYDAMQRACLRTKHNSGLVLNFALNYGGRSEITNAIKEIAQDVLEAKLNPDDITEDLVANHLMTNSLPYLYRDPDLIIRTSGELRLSNFLPWQSAYSEFYFTPVLWPDFKKDELHKAIVDYNQRHRRFGSV

SEQ ID NO: 9437 - DNA, 339 bp, Streptococcus agalactiae
atgagcttacctattattatgcttgttgttatggttggtatgatgttcttcatgcaacgtcagcaaaagaaacaagcacaagaacgtcaaaaacaattgaatgctgttcaaaaaggtgatgaaattgtcacaattggtggtctttttggagtagttgatgaagttaatactgaagcacaacgaatggttttagatgttgatggtgtctatttgacgtttgagttggcagctatcaaatctgttgtctctaaggcagcaacaccaacagaaccagttgaagatgttaagattattgaagtcaatgaagacgaaaataaagaaacagccatcgaaactgaa

SEQ ID NO: 9438 - protein, 113 aa, Streptococcus agalactiae
MSLPIIMLVVMVGMMFFMQRQQKKQAQERQKQLNAVQKGDEIVTIGGLFGVVDEVNTEAQRMVLDVDGVYLTFELAAIKSVVSKAATPTEPVEDVKIIEVNEDENKETAIETE

SEQ ID NO: 9439 - DNA, 282 bp, Streptococcus agalactiae
atgttaaaaccattaggtgatcgtgtgatcatttcgtttgttgaaactgaagagaaatctgtcggtggttttgttcttgcaggagcaagccatgatgcgacaaagacagccaaagttcttgctgtgggtgacggtattcgtaccttaacaggggaattagttgcaccgagcgttgcagagggtgatactgttttagtcgaaaatggtgctggtctggaagttaaagacggtaacgaaaaagtgacagttgttcgcgaaagtgacattgttgctgtcgttaaa

SEQ ID NO: 9440 - protein, 94 aa, Streptococcus agalactiae
MLKPLGDRVIISFVETEEKSVGGFVLAGASHDATKTAKVLAVGDGIRTLTGELVAPSVAEGDTVLVENGAGLEVKDGNEKVTVVRESDIVAVVK

SEQ ID NO: 9441 - DNA, 354 bp, Streptococcus agalactiae
atgtctactttaacaataattattgcaacattaactgctttggaacatttttatattatgtatttggagacgttagccacccagtcaaatatgactgggaagatttttagtatgtctaaagaagagttgtcatatttacccgttattaaactttttaagaatcaaggtgtatacaacggcttgattggcctattcctcctttatgggttatatatttcacagaatcaagaaattgtagctgtttttttaatcaatgtattgctagttgctatttatggtgctttgacagttgataaaaaaatcttattaaaacagggtggtttacctatattagctcttttaacattcttattt

SEQ ID NO: 9442 - protein, 118 aa, Streptococcus agalactiae
MSTLTIIIATLTALEHFYIMYLETLATQSNMTGKIFSMSKEELSYLPVIKLFKNQGVYNGLIGLFLLYGLYISQNQEIVAVFLINVLLVAIYGALTVDKKILLKQGGLPILALLTFLF

SEQ ID NO: 9443 - DNA, 870 bp, Streptococcus agalactiae
atgtctaaaaaaattaagaattttatactattaaatattggatctctaattgttgcatttggtttcaacgctttctttcttcataatcatattgtcacgggggggattagtggtttggcagttagttttcatgaagtatttggttgggattctgctttttttattatgattatcaatattccattgctccttctttgctactttggcttaggtaaacaaacctttttaaaaactgtctatggttcttggatttttcctgtttttattaagttaacacaaagtgtaccaactttgacccacaacccactcctcgcagcactttttggaggtgttattgtaggatgtggtttggggattgttttttggagcgactcttcaactggtggaacggggattatcattcaattcttaggaaaatatactcctataagccttggacaaggggttatattgattgatggacttgttacaattgttggtttcctagcttttgacagtgatacggttatgttttctattattgggttgataactattagttatattattaatgctatccaaactggatttacaaccttaagcactgtcttaatcgtttctcaagagcaccaaaaaattaagacatatatcaatactgtcgcagatagaggagtaacagaaattcccgttaaagggggatattctggaactaatcaaatcatgcttatgacaactattgctggttatgagtttgctaaattacaagaggcaatagcagaaattgacgaaacagccttcataacagtaactccaacatcacaagcttctggacgtggatttagtcttcaaaaaaatcatggacgtcttgatgaagacattcttatgccaatg

SEQ ID NO: 9444 - protein, 290 aa, Streptococcus agalactiae
MSKKIKNFILLNIGSLIVAFGFNAFFLHNHIVTGGISGLAVSFHEVFGWDSAFFIMIINIPLLLLCYFGLGKQTFLKTVYGSWIFPVFIKLTQSVPTLTHNPLLAALFGGVIVGCGLGIVFWSDSSTGGTGIIIQFLGKYTPISLGQGVILIDGLVTIVGFLAFDSDTVMFSIIGLITISYIINAIQTGFTTLSTVLIVSQEHQKIKTYINTVADRGVTEIPVKGGYSGTNQIMLMTTIAGYEFAKLQEAIAEIDETAFITVTPTSQASGRGFSLQKNHGRLDEDILMPM

SEQ ID NO: 9445 - DNA, 1227 bp, Streptococcus agalactiae; identical to SEQ ID NO: 8873

SEQ ID NO: 9446 - protein, 409 aa, Streptococcus agalactiae
MKKKLVSSLLKCSLIIIVSFAGGAFASFVMNHNDNIPNGGVTKTSKVNYNNITPTTKAVKKVQNSVVSVINYKQQESRSDLSDFYSHFFGNQGGNTDKGLQVYGEGSGVIYKKDGKNAYVVTNNHVIDGAKQIEIQLADGSKAVGKLVGSDTYSDLAVVKIPSDKVSNIAEFADSSKLNIGETAIAIGSPLGTEYANSVTQGIVSSLKRTVTMTNEEGQTVSTNAIQTDAAINPGNSGGALINIEGQVIGINSSKISSTSNQTSGQSSGNSVEGMGFAIPSNDVVKIINQLESNGQVERPALGISMAGLSNLPSDVISKLKIPSNVTNGIVVASIQSGMPAQGKLKKYDVITKVDDKEVVSPSDLQSLLYGHQVGDSITVTFYRGENKQTVTIKLTKTSKDLAKQRANN

SEQ ID NO: 9447 - DNA, 966 bp, Streptococcus agalactiae
atgtcttattctaatttaaaattgtttgcactgtcatcaaacaaagaactagcgaaaaaagtgtctcagacgattggaattccgctaggtcaatcgacagttcgccaattttctgatggtgagattcaagttaatattgaagagtctattcgtggccatcatgtttttattttacaatcaacaagctcaccagttaatgataatttgatggaaattttaattatggttgacgctttaaagcgtgctagtgcggagtctgttagtgtggtaatgccttactatgggtatgctcgtcaagatcgcaaggcacgttctcgtgaacctattacttcgaaactcgttgcgaacatgctagaagttgctggtgttgatcgtcttttaacagttgatttacatgcagctcaaattcagggattctttgatattcccgttgatcaccttatgggggctccccttattgcagattactttgatcgtcagggattggttggtgatgatgttgttgtcgttagtcctgatcatggtggcgtaacacgtgcacgtaagctggcacagtgtttaaagacaccgattgctatcattgataagcgccgtagtgttactaaaatgaatacatctgaagtaatgaatattattggtaatatcaaaggtaaaaaatgtattttaattgatgatatgattgatactgcaggtactatttgccatgctgcagacgctttagctgaagcaggggcaacagcggtttatgcttcatgtactcaccctgttttatcagggccggctttggataatattcaaaattcagctattgaaaaattaattgtgttagatacgatttacctccctgaagaacgtttgattgataagattgaacaaatttcaattgcggaattgattggtgaagctattatccgtattcacgagaaacgtcctttatcaccattatttgaaatgaataaactaaaa

SEQ ID NO: 9448 - protein, 322 aa, Streptococcus agalactiae
MSYSNLKLFALSSNKELAKKVSQTIGIPLGQSTVRQFSDGEIQVNIEESIRGHHVFILQSTSSPVNDNLMEILIMVDALKRASAESVSVVMPYYGYARQDRKARSREPITSKLVANMLEVAGVDRLLTVDLHAAQIQGFFDIPVDHLMGAPLIADYFDRQGLVGDDVVVVSPDHGGVTRARKLAQCLKTPIAIIDKRRSVTKMNTSEVMNIIGNIKGKKCILIDDMIDTAGTICHAADALAEAGATAVYASCTHPVLSGPALDNIQNSAIEKLIVLDTIYLPEERLIDKIEQISIAELIGEAIIRIHEKRPLSPLFEMNKLK

SEQ ID NO: 9449 - DNA, 1173 bp, Streptococcus agalactiae
atgacattagagaaacgatttaataagtacttagatagaatagaggtctccttaattcgtcagtttgatcaatctatttcagatatacctggaatggtaaaattaactcttggagaaccagattttaccactcctgatcatgttaaagaagcagctaaatcagctattgatgcgaatcaatcgtattacactggtatgagcggtttattagctctaaggcaagctgctgcagattttgcaaaggataaatataatcttacttataatcctgattgtgagatcttggttacgataggtgccacagaagctctgtctgcatctcttatagctattttagaagctggtgatgttgttctattacctgcccccgcttatccaggatatgagccaatagttaaccttgtaggagctgatatcgtagaaattgatactagagaaaatgactttagactaactcctgaaatgttagaaacggctattatccaacaaggtgaaaaattaaaggctgttttacttaattatcctactaaccctacaggtattacctattcaaggcaagaaattgctgcattagctgaagtccttaaaaaatatgatatttttgttattagtgatgaagtttattctgagttaacttacactggtcagcagcatgtttcaattgcagaatatttacctaaccaaactatcttaattaatggcttatcaaaatcacatgctatgactggttggagagttggattggtgtatgctcctgaagcatttattgctcaaatcattaaaagtcatcaatacatggtgacagctgctagtactatttcgcaatttgctggggtagaagccttatctgtgggtaaaaatgatacgttacctatgcgtcaaggatatattaaacgtagagattatatcattgataaaatgtctaaacttggtttcaaaataattaaaccgagtggcgctttttatatctttgctaaaatacctgatagctatccacaggattctttcaagttttgtcaggattttgcttatcaacaagctgtagctattattccaggagtggcttttggtaaatatggtgaaggatatatacgtctttcttatgctgctagtatggaagttattgaaacagcaatggctagattgaaagtttttatggaatcatatgagggt

SEQ ID NO: 9450 - protein, 391 aa, Streptococcus agalactiae
MTLEKRFNKYLDRIEVSLIRQFDQSISDIPGMVKLTLGEPDFTTPDHVKEAAKSAIDANQSYYTGMSGLLALRQAAADFAKDKYNLTYNPDCEILVTIGATEALSASLIAILEAGDVVLLPAPAYPGYEPIVNLVGADIVEIDTRENDFRLTPEMLETAIIQQGEKLKAVLLNYPTNPTGITYSRQEIAALAEVLKKYDIFVISDEVYSELTYTGQQHVSIAEYLPNQTILINGLSKSHAMTGWRVGLVYAPEAFIAQIIKSHQYMVTAASTISQFAGVEALSVGKNDTLPMRQGYIKRRDYIIDKMSKLGFKIIKPSGAFYIFAKIPDSYPQDSFKFCQDFAYQQAVAIIPGVAFGKYGEGYIRLSYAASMEVIETAMARLKVFMESYEG

SEQ ID NO: 9451 - DNA, 660 bp, Streptococcus agalactiae
atgttttttgtaaagcatgcttcaaagtcaaaattcaatgctgtgctccaacctttgactattgctcattttattttaaaaattaatgataatggtctttcttatattgatgattataaagaagttttagcatttcaagaaaccaattcagacttgtttaagttgtcatatgcgagttatattacttctttggctgatgtggctattagtgataatgtagcggatgctcaattatttattttcctaaagaaaacgttagaattgattgaggacggtttagattatgagattctaacgaatatttttgaagtacaactactagagaggttcggtgttgctttaaattttcatgattgtgttttttgtcatagggtaggattaccttttgatttttcacacaaatattctggattattatgtccaaaccattattataaagacgagagaagaaaccacctagatcctaatatgctgtacttaatcaatcgttttcagtcaattcaatttgatgatttacaaacaatttctgtgaaacctgagatgaaacttaaaattcgtcaatttttggacatgatttacgatgaatatgtagggattcatcttaaaagtaaaaaatttattgatgatttgtctagttggggaagtattatgaaatcagat

SEQ ID NO: 9452 - protein, 220 aa, Streptococcus agalactiae
MFFVKHASKSKFNAVLQPLTIAHFILKINDNGLSYIDDYKEVLAFQETNSDLFKLSYASYITSLADVAISDNVADAQLFIFLKKTLELIEDGLDYEILTNIFEVQLLERFGVALNFHDCVFCHRVGLPFDFSHKYSGLLCPNHYYKDERRNHLDPNMLYLINRFQSIQFDDLQTISVKPEMKLKIRQFLDMIYDEYVGIHLKSKKFIDDLSSWGSIMKSD

SEQ ID NO: 9453 - DNA, 849 bp, Streptococcus agalactiae
atgaaaaaaacattatacattaccaataaactcttttttgctaactggtttgtgccagttattggtgcagttctaattcaagttatcggcatcattgtaagtagacgccttgtagtaaaattgctacctgatgattataaattcaatttatacattgcgcttttactatttgttcctattttggcaagtattttactatttttaatctattttcaaaaaagggattttacttccttgggatttactaaagataataatgttttaacaacgatctcaggatttattactggtagtttactgatgttttttatttatatttgccactggttatcaggttttgtggaaatttcttccagcaattccttttcttttggaccttttttctttttatttcttgcatactttatccaaagcttgacagaggaaattttatttagaggatatgttatgacaacagttaccaaatttaaaggtagttttgcaggtgttttatgtaattctatgttgttttcttttatccactttagaaactatggtatcacagcaatagcactttttaatttatttttacttggtattattttttctattctttttaatatgaccaaaaatattctttttgttacaggagttcatactacatggaattttactatgggatgtgtattaggtaataaggttagtgggggggattctcctgtttctctttttagaattactgaaaattctagctttgctctttggaatggtggggattttggttttgaagggggagtactatgttctttgatattagtaggttgtttagcatacttttctttggaaagcgtgagagtatctgttagatat

SEQ ID NO: 9454 - protein, 283 aa, Streptococcus agalactiae
MKKTLYITNKLFFANWFVPVIGAVLIQVIGIIVSRRLVVKLLPDDYKFNLYIALLLFVPILASILLFLIYFQKRDFTSLGFTKDNNVLTTISGFITGSLLMFFIYICHWLSGFVEISSSNSFSFGPFFFLFLAYFIQSLTEEILFRGYVMTTVTKFKGSFAGVLCNSMLFSFIHFRNYGITAIALFNLFLLGIIFSILFNMTKNILFVTGVHTTWNFTMGCVLGNKVSGGDSPVSLFRITENSSFALWNGGDFGFEGGVLCSLILVGCLAYFSLESVRVSVRY

SEQ ID NO: 9455 - DNA, 990 bp, Streptococcus agalactiae
atgaagaaaattgctatagatgctatgggtggagattacgctcccaaagctattgtagagggtgttaatcaagctatttcagattttagtgatattgaagtacaactctatggcgatcagaaaaaaattgagaaatatttaacagtaacggagcgagttagtattattcatactgaagaaaaaattaattctgatgatgagcctgctaaagctgttcgtcgtaaaaaacagtcttcgatggtcttaggagctaaggcagtcaaagatggtgttgcacaggcctttatttctgcagggaatacaggagctttattagctgctggtttgtttgtagtaggacgtataaaaggtgttgatcgaccaggcttaatgtcaactatgcctacgttagatggtgtgggttttgatatgcttgatttaggagctaatgcagaaaacacagcttctcatcttcatcaatatgctattttagggtcgttttatgcaaaaaatgtccgtggtattgaagttcctcgtgtaggtctcttaaataacggaacggaagaaacaaaaggcgattctcttcataaagaagcttatgaactgttagcagcagagccttctattaattttattggaaatattgaagcacgtgatttgatgtctagtgtagcagatgttgttgtcactgatggttttactggaaatgctgttctaaagacaatggaaggtacagctatgagtattatgggaagcctaaaatcttcaattaaatcaggtggcgtgaaagctaaattaggagcacttctattaaaagatagcctatatcagctaaaagatagtatggactattcaagcgcgggtggagcggttctttttggtttaaaagctccaatagtaaaatgccatggatcaagtgattctaaagctgtttattctactttgaagcaagttcgtacaatgttggaaactcaagtagttgatcaattagttgatgcctttacagatgaa

SEQ ID NO: 9456 - protein, 330 aa, Streptococcus agalactiae
MKKIAIDAMGGDYAPKAIVEGVNQAISDFSDIEVQLYGDQKKIEKYLTVTERVSIIHTEEKINSDDEPAKAVRRKKQSSMVLGAKAVKDGVAQAFISAGNTGALLAAGLFVVGRIKGVDRPGLMSTMPTLDGVGFDMLDLGANAENTASHLHQYAILGSFYAKNVRGIEVPRVGLLNNGTEETKGDSLHKEAYELLAAEPSINFIGNIEARDLMSSVADVVVTDGFTGNAVLKTMEGTAMSIMGSLKSSIKSGGVKAKLGALLLKDSLYQLKDSMDYSSAGGAVLFGLKAPIVKCHGSSDSKAVYSTLKQVRTMLETQVVDQLVDAFTDE

SEQ ID NO: 9457 - DNA, 237 bp, Streptococcus agalactiae
atgtcaagagatgaagtttttgaaaagatgctggaattattaaggcagcaacttggtgacccacagttagatatcacaccagagtcatcgttacatgatgatttagcaattgactctatcgctttaacagagtttattatcaatttggaagatgtgtttcatctagagattccagatgaggctgtcgaacacatgtcaagcgtccaacaactattagattatatcattgaacataag

SEQ ID NO: 9458 - protein, 79 aa, Streptococcus agalactiae
MSRDEVFEKMLELLRQQLGDPQLDITPESSLHDDLAIDSIALTEFIINLEDVFHLEIPDEAVEHMSSVQQLLDYIIEHK

SEQ ID NO: 9459 - DNA, 588 bp, Streptococcus agalactiae
atgcctcttttagctttggcagctcaagaagcaggagcggttggtataagagccaatagtgtccgcgacattaaggaaattcaagaggttactaatttacctatcatcggcattattaaacgtgaatatcctccacaagaaccatttatcactgctacgatgacagaggtggatcaattagctagtttagatattgcagtaatagccttagattgtacacttagagagcgtcatgatggtttgagtgtagttgagtttattcaaaagataaaaaggaaatatcctgaacagttgttaatggctgatataagtacttttgaagaaggcaaaaatgcttttgaagcaggagttgattttgtgggtacaactctatctggatacacagattacagccgccaagaagaaggaccggatatagaactccttaataagctctgtcaagccggtatagatgtgattgcggaaggtaaaattcatactcctaagcaggctaatgaaattaatcatataggtgttgcaggaattgtagttggtggtgctatcactagaccaaaagaaatagcggagcgtttcatctcaggacttagt

SEQ ID NO: 9460 - protein, 196 aa, Streptococcus agalactiae
MPLLALAAQEAGAVGIRANSVRDIKEIQEVTNLPIIGIIKREYPPQEPFITATMTEVDQLASLDIAVIALDCTLRERHDGLSVVEFIQKIKRKYPEQLLMADISTFEEGKNAFEAGVDFVGTTLSGYTDYSRQEEGPDIELLNKLCQAGIDVIAEGKIHTPKQANEINHIGVAGIVVGGAITRPKEIAERFISGLS

SEQ ID NO: 9461 - DNA, 1089 bp, Streptococcus agalactiae
atgaactcatttaagaccattgggattattggtggtggtcagctggggcagatgatggcgattgcggctatctacatgggccacaaggtcattacgctggatccagctagcgactgccctgcctcccgcgttagcgaggtgattgtggcaccttacgatgatgttgaggctttgggaacattagctgcgcgttgcgatgttttgacctatgagtttgagaatgtcgatgccgatggtctggatgccgttgtgtcagctggtcagctaccgcaggggactgatctgctccgcatttctcaaaaccgtatctttgaaaaagactttctggcaaataaggctggcgtgactgtcgctccctataaggtggtgacatctagccttgacctagaggggcttgacttgaccaagacctatgtcctcaagacagcgacaggtggttatgacggtcatgggcaaaaggttatccgctcagcagaagacctgccagaggcgcagcaattagccaactcagctcagtgtgtcttggaagagtttgtcaacttcgaccttgaaatatcagtcatcgtgtctggaaatggtcaggatgtgacggtctttcccgttcaggaaaatatccaccgcaacaatatcctgtcaaaaaccatcgtaccagctcgcatctcagaccaactagctgacaaggctaaggaaatggctgtgcagattgccaagaaactccagctatcaggaaccctctgtgtggaaatgtttgcgaccgcagatgacatcatcgtcaatgaaattgccccacgtccccacaactcagggcactactctatcgaagcctgcgacttttcacagtttgacacccacatcttgggcgtactgggcgcaccgcttccgccaatcaaactccatgctccagccgttatgttcaatgtcctaggacaacatgtccagcaggcaattgaccatgttgcccaaaaccctagcgcccacctccacatgtatggtaaactagaagcaaaacataaccgcaaaatgggacacgtgacggtgtttagcgatgtacctgatgaggtggaagagtttgaagaaaggatggatttc

SEQ ID NO: 9462 - protein, 363 aa, Streptococcus agalactiae
MNSFKTIGIIGGGQLGQMMAIAAIYMGHKVITLDPASDCPASRVSEVIVAPYDDVEALGTLAARCDVLTYEFENVDADGLDAVVSAGQLPQGTDLLRISQNRIFEKDFLANKAGVTVAPYKVVTSSLDLEGLDLTKTYVLKTATGGYDGHGQKVIRSAEDLPEAQQLANSAQCVLEEFVNFDLEISVIVSGNGQDVTVFPVQENIHRNNILSKTIVPARISDQLADKAKEMAVQIAKKLQLSGTLCVEMFATADDIIVNEIAPRPHNSGHYSIEACDFSQFDTHILGVLGAPLPPIKLHAPAVMFNVLGQHVQQAIDHVAQNPSAHLHMYGKLEAKHNRKMGHVTVFSDVPDEVEEFEERMDF

SEQ ID NO: 9463 - DNA, 2640 bp, Streptococcus agalactiae
atgactgaaaaaactaaagcagtagaaactacagatgttgctcttgcaattgatacattggttcaaaatggtttaaaagcacttgatgagatgcgtcaacttaatcaagaacaagttgattatattgtagctaaagcttctgttgcagccttggatgcccatggagaacttgctcttcatgcagtagaagaaactggtcgtggtgtctttgaagataaagcgacaaaaaatttatttgcatgtgaacacgtcgttaacaacatgcgtcatacaaagacagtgggagttattgaagaagacgatgtcacaggcttgacattaattgctgaaccagtgggagttgtctgtggtatcacgccaacaaccaacccaacttcaactgctattttcaagtcattaatctctcttaaaacacgtaatccaattatttttgccttccacccatcagcacaagaatcatcagcacatgcagcacgtattgttcgtgatgctgctattgctgctggagctcctgaaaattgtgtccaatggattgaacaaccatcaattgatgcaactaatgctttgatgaaccatgatggtattgccactatccttgcgacaggtggtaatgcgatggttaaagctgcctactcatgtgggaaacctgcccttggtgtaggtgctgggaatgttccagcttatgttgaaaaatcagctaatatccgacaagccgctcacgatattgttatgtctaaatcatttgataacggtatggtatgtgcatcagaacaggctgttattattgataaagaaatttataaagaatttgttgaagaatttaaatcttatcatacctatttcgttaataagaaagaaaaagctcttcttgaagaattctgttttggtgcaaaagcaaatagcaaaaactgtgctggtgcaaaattaaatccaaatattgttggaaaatcagcagtttggattgctgaacaagctggatttactgttccagaaggaacaaatattcttgccgcagaatgtactgaagttagtgaaaaagaacctttgacacgtgaaaaactatcacctgttattgcagtattgaaagctgaatctacagaagatggtgttgaaaaagctcgtcaaatggttgagtttaatggtctagggcactcagctgctattcatacaaaagatgcagacttagctcgtgaatttggaactagaattcgtgctatccgtgttatttggaattctccttctacttttggtggtattggggatgtttacaatgctttcttgccatcattgactcttggttgtggttcgtatggacgtaactcagttggtgataacgttagtgctataaatctcttgaatatcaaaaaagtaggaagacgtagaaataatatgcaatggtttaaagtcccttcaaaaacatacttcgaacgtgattctattcaatatttgcaaaaatgtcgcgatgttgaacgtgtcatgattgttacagatcacgccatggttgagcttggtttcttggatcgtatcattgaacaacttgatcttcgtcgcaataaagttgtttatcagatttttgctgaagtagaaccagatccagacattacaacagtaatgaaaggaacagatttgatgcgtaccttcaaaccagacactattattgcattaggtggtggttctcctatggatgctgcgaaagttatgtggctcttctatgaacaaccagaagttgatttccatgacctcgttcaaaaattcatggatatccgtaaacgtgcgttcaaattcccagaacttggtaagaaaacaaaatttgttgctattccaacaacttctggaacaggttctgaagtgacaccatttgccgttatctctgacaaagcaaataatcgtaaatatccaatcgctgattattcattaacaccaactgtagctatcgttgatccggcccttgttatgactgttcctggttttattgcggctgatacgggtatggatgtattgacacatgcaacagaggcttatgtttcacagatggcaaatgattatacagacggacttgctcttcaagcaattaaaattgtgtttgactacttagaacgctcagtaaaagatgctgattttgaagcacgtgaaaagatgcacaatgcgtcaactatggcaggtatggctttcgccaatgcattcttaggtatttctcactcaatggcgcataaaattggcgcacaattccataccgtacacggacgtacaaatgcaattcttttgccgtatgttatccgctataatggaactcgtccagctaaaacagcaacatggcctaagtacaattactatcgtgctgacgaaaagtatcaagatatcgctaaattactcggcttaccagcagcaacaccagaagaagctgtcgaatcatatgcaaaagctgtgtatgaccttggaacacgtttaggtattaagatgaatttccgcgaccaaggcattgatgaaaaagaatggaaagaaaaatctcgtgaactagctttcttagcatatgaagatcaatgttcaccagcaaatccacgccttccgatggtagatcacatgcaagaaatcatcgaagatgcttattatggttatgaggaacgtccaggacgtcgtaag

SEQ ID NO: 9464 - protein, 880 aa, Streptococcus agalactiae
MTEKTKAVETTDVALAIDTLVQNGLKALDEMRQLNQEQVDYIVAKASVAALDAHGELALHAVEETGRGVFEDKATKNLFACEHVVNNMRHTKTVGVIEEDDVTGLTLIAEPVGVVCGITPTTNPTSTAIFKSLISLKTRNPIIFAFHPSAQESSAHAARIVRDAAIAAGAPENCVQWIEQPSIDATNALMNHDGIATILATGGNAMVKAAYSCGKPALGVGAGNVPAYVEKSANIRQAAHDIVMSKSFDNGMVCASEQAVIIDKEIYKEFVEEFKSYHTYFVNKKEKALLEEFCFGAKANSKNCAGAKLNPNIVGKSAVWIAEQAGFTVPEGTNILAAECTEVSEKEPLTREKLSPVIAVLKAESTEDGVEKARQMVEFNGLGHSAAIHTKDADLAREFGTRIRAIRVIWNSPSTFGGIGDVYNAFLPSLTLGCGSYGRNSVGDNVSAINLLNIKKVGRRRNNMQWFKVPSKTYFERDSIQYLQKCRDVERVMIVTDHAMVELGFLDRIIEQLDLRRNKVVYQIFAEVEPDPDITTVMKGTDLMRTFKPDTIIALGGGSPMDAAKVMWLFYEQPEVDFHDLVQKFMDIRKRAFKFPELGKKTKFVAIPTTSGTGSEVTPFAVISDKANNRKYPIADYSLTPTVAIVDPALVMTVPGFIAADTGMDVLTHATEAYVSQMANDYTDGLALQAIKIVFDYLERSVKDADFEAREKMHNASTMAGMAFANAFLGISHSMAHKIGAQFHTVHGRTNAILLPYVIRYNGTRPAKTATWPKYNYYRADEKYQDIAKLLGLPAATPEEAVESYAKAVYDLGTRLGIKMNFRDQGIDEKEWKEKSRELAFLAYEDQCSPANPRLPMVDHMQEIIEDAYYGYEERPGRRK

SEQ ID NO: 9465 - DNA, 354 bp, Streptococcus agalactiae
gtgatttcgaaaccagataaaaataaaatccgccaaaaacgccaccgtcgtgttcgcggtaaactctctggaactgctgatcgcccacgtttgaacattttccgttctaatacaggcatctacgctcaagtaattgatgacgtagcgggtgtaacgctcgcaagtgcatcaactcttgataaagaagtttctaacggaacaaaaacagaacaagccgttgttgtcggtaaacttgttgctgaacgcgcagtagctaaaggtatttctgaagtggtgtttgaccgcggtggatatctctatcacggacgtgtaaaagctttggctgactcagctcgtgaaaacggattgaaattc

SEQ ID NO: 9466 - protein, 118 aa, Streptococcus agalactiae
MISKPDKNKIRQKRHRRVRGKLSGTADRPRLNIFRSNTGIYAQVIDDVAGVTLASASTLDKEVSNGTKTEQAVVVGKLVAERAVAKGISEVVFDRGGYLYHGRVKALADSARENGLKF

SEQ ID NO: 9467 - DNA, 1161 bp, Streptococcus agalactiae
atgggtgaacttccatttctaaatatgcttaacttagttagtggtaatgcaatgagaaacttttcggtattctctatgggagttagcccttacattactgcgtctattgttgttcagttacttcaaatggatattcttccgaagtttgttgaatggggaaaacaaggagaggtaggtcgtcgtaagcttaaccaagctacacgttatatttctttgttccttgcattcgtacaatcaattggtattactgctggttttaacactctatcaagtgttgctttagttaaaactccgaatgtacaaacatatttgcttattggtgcaatccttacaacaggtagtatggtggttacttggctaggtgaacaaattactgataagggattcggaaatggagtgtctatgattatctttgcgggtatcatttcttccattccaagtgcaattacaactatctacgaagatttctttgtaaatgtacgctcttcagcaattacaaattcttacatctttgtcgggatccttatcgtagcagtattagcaattgtattttttacaacatttattcaacaagctgaatacaaaattccaatccaatatacaaaacttgttcaaggagctcctacaagttcatatcttcctctaaaagtaaatccagctggtgttattcccgttatctttgctagctcgattacaacaattccaagtacgattattcctttctttcaaaatggcaaagaaattccttggcttactaaactccaagaattacttaattatcaaaccccagtcggtatgattatctatgctatcttgattattctgttctctttcttctatacttttgtacaagtaaaccctgaaaagacagcagagaatcttcaaaaaaattcgtcctacattccaagtattcgaccaggacgagaaacagaagaatatatgtcatcgctattgaaaaaattagcaacaattggttcagtatttctagcatttatttccttgttaccaattattgctcaacaagcgttgcatttgtcatcaagtattgcgttaggtgggacaagcttactcattttgattgcaacgggtattgaaggtatgaaacaactcgagggctatcttttgaagagacgctatgttggattcatgaatacaacagaa

SEQ ID NO: 9468 - protein, 387 aa, Streptococcus agalactiae
MGELPFLNMLNLVSGNAMRNFSVFSMGVSPYITASIVVQLLQMDILPKFVEWGKQGEVGRRKLNQATRYISLFLAFVQSIGITAGFNTLSSVALVKTPNVQTYLLIGAILTTGSMVVTWLGEQITDKGFGNGVSMIIFAGIISSIPSAITTIYEDFFVNVRSSAITNSYIFVGILIVAVLAIVFFTTFIQQAEYKIPIQYTKLVQGAPTSSYLPLKVNPAGVIPVIFASSITTIPSTIIPFFQNGKEIPWLTKLQELLNYQTPVGMIIYAILIILFSFFYTFVQVNPEKTAENLQKNSSYIPSIRPGRETEEYMSSLLKKLATIGSVFLAFISLLPIIAQQALHLSSSIALGGTSLLILIATGIEGMKQLEGYLLKRRYVGFMNTTE

SEQ ID NO: 9469 - DNA, 459 bp, Streptococcus agalactiae
ttgtttgataaagtaaagccaatcgtaatgaagctgagaagaaattattttgttcaactttgggaatatgatgattggattcaagaaggacgtattgtactttttaggttgcttgaagagcatccgtatttattggataatgaaagcaaactattcatttactttaaaacaaaattttcaaattatttaaacgatgtattaagacaccaagattgtcaaaagcgacaatttaataaaatgccttatgaagaaataagtgaagttagtcactatgttaagagtaaaggactagttttagatgactatattgcttatcgtgatactttaacaaaagtggaagaaactttgtcagatattgataaagaaaaatttgaaaaactgattagtggtgaacgttttgcggggaagaaacaattcatacgagatattcaaccctttttcaatgcttttaaagcggat

SEQ ID NO: 9470 - protein, 153 aa, Streptococcus agalactiae
MFDKVKPIVMKLRRNYFVQLWEYDDWIQEGRIVLFRLLEEHPYLLDNESKLFIYFKTKFSNYLNDVLRHQDCQKRQFNKMPYEEISEVSHYVKSKGLVLDDYIAYRDTLTKVEETLSDIDKEKFEKLISGERFAGKKQFIRDIQPFFNAFKAD

SEQ ID NO: 9471 - DNA, 444 bp, Streptococcus agalactiae
atgtcaaaagtacgtggctttgaattagttagccaatttagcaataaagagttattaccaaaacgagaaacagctcacgcagctggctatgatttaaaagtagctaaaaaaacggttattgaacctggtgaaattacattggtcccgaccggtattaaagcatacatgcaaccaggggaggtcctgtacctttatgatcgttcatcgaatccacgtaaaaaagggattgtcctaataaattcagttggtgttattgatggtgactactataataaccaagtcaatgaaggacatatttttgcacagatgcaaaatattactgatcaggctgttattttagaagaaggggaacggattgttcaggctgtttttgccccattcttattggcagatgacgatcaggctacaggaatgcgtacaggtggttttggtagtactggaaaa

SEQ ID NO: 9472 - protein, 148 aa, Streptococcus agalactiae
MSKVRGFELVSQFSNKELLPKRETAHAAGYDLKVAKKTVIEPGEITLVPTGIKAYMQPGEVLYLYDRSSNPRKKGIVLINSVGVIDGDYYNNQVNEGHIFAQMQNITDQAVILEEGERIVQAVFAPFLLADDDQATGMRTGGFGSTGK

SEQ ID NO: 9473 - DNA, 1206 bp, Streptococcus agalactiae
atgtacgggggaacatgtatcaacattggatgtattccgacaaaaacgcttttagtatcagctagcaaaaatcatgattttcaagaagctatgactactagaaatgaagttacaagtcgtttacgtgctaaaaattttgctatgttggataataaagacactgtggatgtttataatgctaaagcccgctttatatcaaataaagtggtcgaattaacaggaggagctgacaaacaagaacttacagctgatgttattattatcaatactggtgctaagtcagtacaattaccaatcccaggattagctgattctcaacatgtttatgattcaacggcaatccaagaattggctcatcttcctaaacggttaggtatcattggaggcggtaatattgggcttgaatttgcgactttatattccgaattagggagcaaagtgacagttattgatagtcaatcccgtatctttgcgcgtgaggaagaggaattatcagagatggctcaagattatttagaagagatggggatatcttttaaattatcagccgatatcaaatctgtgcaaaatgaagatgaagacgttgttattagctttgaggatgaaaaattaagctttgatgcagtattatatgcaacaggacgtaagccaaatacagaaggtttagcacttgaaaatacagatattaaattgacagaacgtggagctattgctgttgatgaatattgccaaacttctgttgagaatatttttgcagttggtgatgttaatggcggccctcaattcacatatatttctttagatgactcacgtattgtcttaaattatttgaattgtgataaggattattctctaaaaaatcgaggagcagtaccgacttcaacctttacaaatcctcctttagcaacggtaggtctagatgaaaagaccgctaaggaaaaaggatatcaagttaaatctaatagccttcttgtttctgccatgccacgtgcacatgttaataatgaccttagaggtatttttaaagttgtggtagatactgagacaaatcttattttgggagctcgcttatttggtgcagaatcccatgaattaattaatatcatcacaatggcaatggataataaaatcccatatacttatttccaaaaacaaattttcactcacccaacaatggtagagaattttaatgatttgtttaacttt

SEQ ID NO: 9474 - protein, 402 aa, Streptococcus agalactiae
MYGGTCINIGCIPTKTLLVSASKNHDFQEAMTTRNEVTSRLRAKNFAMLDNKDTVDVYNAKARFISNKVVELTGGADKQELTADVIIINTGAKSVQLPIPGLADSQHVYDSTAIQELAHLPKRLGIIGGGNIGLEFATLYSELGSKVTVIDSQSRIFAREEEELSEMAQDYLEEMGISFKLSADIKSVQNEDEDVVISFEDEKLSFDAVLYATGRKPNTEGLALENTDIKLTERGAIAVDEYCQTSVENIFAVGDVNGGPQFTYISLDDSRIVLNYLNCDKDYSLKNRGAVPTSTFTNPPLATVGLDEKTAKEKGYQVKSNSLLVSAMPRAHVNNDLRGIFKVVVDTETNLILGARLFGAESHELINIITMAMDNKIPYTYFQKQIFTHPTMVENFNDLFNF

SEQ ID NO: 9475 - DNA, 1452 bp, Streptococcus agalactiae
ttggctaataagattcgtgtgcgttatgcaccaagtccaacaggattgttacacatcggaaatgcgcgtactgcgctctttaactacctttatgctcgccatcatggtggggattttgttattcgtattgaagatactgaccgaaaacgccacgtcgaagatggtgaacgctctcaattggagaacttacgttggctaggtatggactgggatgaaagtcctgaaacacatgaaaattatcgtcaatcagaacgccttgagctctaccaacgttatattgatcagttgttagcagaaggtaaagcctacaagtcctatgtgactgaggaagaattagcagcagagcgtgaacgccaagaattggcaggcgaaacacctcgctatatcaacgaatttatcggaatgtcagaaactgaaaaagaagcttacattgcagagcgtgaagcagcaggcatcattccgacagtacgccttgctgttaatgaatctgggatttataaatggactgatatggtaaaaggtgacattgagtttgaaggctctaatatcggcggagactgggttattcagaagaaagatggttatccaacttacaatttcgcagtagtcattgatgatcatgacatgcaaatttcgcatgttatccgtggcgatgaccatattgcaaatacgccaaaacaattaatggtttatgaagcactcggttgggaagcgccacaatttggtcacatgacattgattataaactcagagactggtaagaaattatcaaaacgcgacaccaatactcttcaatttatcgaagactatcgtaaaaaaggttatatgtcggaagctgtctttaatttcattgcccttcttggctggaatcctggtggagaagaagaaatcttctcacgcgagcaattaattaatctatttgatgaaaatcgtcttagcaaatcaccagcagcattcgatcagaagaaaatggattggatgagtaatgattacctaaaaaatgctgattttgagagtgtttttgcactttgcaaaccattcttagaagaagctggtcgacttacagacaaagctgaaaaattagttgagctttatcaacctcaattaaaatcagctgatgagattgtaccattaacagaccttttctttgcagattttccagaactaacagaagccgaaaaagaagtaatggcagctgaaacagtcccaacagtcttatctgcttttaaggaaaagttagtatcgctttctgacgaagaattcactagagatactattttccctcaaattaaggctgttcaaaaagaaacaggtattaaaggtaagaacctatttatgcctattcgtattgcggtttctggtgaaatgcatggaccagagttaccagatactatttatttattaggtaaagaaaaatcagttcaacatatcgataatatgttagcaaaatta

SEQ ID NO: 9476 - protein, 484 aa, Streptococcus agalactiae
MANKIRVRYAPSPTGLLHIGNARTALFNYLYARHHGGDFVIRIEDTDRKRHVEDGERSQLENLRWLGMDWDESPETHENYRQSERLELYQRYIDQLLAEGKAYKSYVTEEELAAERERQELAGETPRYINEFIGMSETEKEAYIAEREAAGIIPTVRLAVNESGIYKWTDMVKGDIEFEGSNIGGDWVIQKKDGYPTYNFAVVIDDHDMQISHVIRGDDHIANTPKQLMVYEALGWEAPQFGHMTLIINSETGKKLSKRDTNTLQFIEDYRKKGYMSEAVFNFIALLGWNPGGEEEIFSREQLINLFDENRLSKSPAAFDQKKMDWMSNDYLKNADFESVFALCKPFLEEAGRLTDKAEKLVELYQPQLKSADEIVPLTDLFFADFPELTEAEKEVMAAETVPTVLSAFKEKLVSLSDEEFTRDTIFPQIKAVQKETGIKGKNLFMPIRIAVSGEMHGPELPDTIYLLGKEKSVQHIDNMLAKL

SEQ ID NO: 9477 - DNA, 984 bp, Streptococcus agalactiae
atgagtacgattagacaagtcgccgagaaagctggcgtatcaacatctactgtctcaaggtatatatcccaaaatggttacgttagtcaaaaagcaagtcaaaaaatcgagcaagctatccgcgaactccattatgttccaaatttccttgcacaatctctgaaaaccaaaaaaaatcaacttgttggattactacttcccgatatttcaaaccctttctttccaagacttgctagaggagttgaagaatttctaaaagaacagggttatcgtgtcatgcttggcaacacaaataacaagagccatttagaagaagagtacttaaatgtgctattacaaagtaatgctgcagggattattacaacacacgatttcaccaaaaatcatcctgaaatagatattccagttgtagttgttgaccgcgttaatcaagaaacacagtacggcgttttctctgataataaagagggaggaaaattagcagctcaagctatttggacagcaggtgctaccaatatattactcattcgtggtccgctagataaagctgataaccttaatcaaaggtttcaaggaagccaaaattacctattaaacaaaggggcttgttttgctatcgaagatagtgccagttttgattttgcagagattcaaattgaagcgaaaactttacttgaccaccatccagacattgatagcattatcgctccatctgatatacatgctattgcctacctacacgagattcttaatcgagggaagcgaatccctgaagatgtacaaattattggttatgatgatattttaatgagccaatttatctacccttcgttgtcaactattcaccaatcatcatatattatgggacaaaaagcagctgaattaattttcaaaattactaatcaattacctattaccaataagcgtattaaattacccgttcattatgtcgaacgtgaaaccctaaggaggaaaatagatgag

SEQ ID NO: 9478 - protein, 328 aa, Streptococcus agalactiae
MSTIRQVAEKAGVSTSTVSRYISQNGYVSQKASQKIEQAIRELHYVPNFLAQSLKTKKNQLVGLLLPDISNPFFPRLARGVEEFLKEQGYRVMLGNTNNKSHLEEEYLNVLLQSNAAGIITTHDFTKNHPEIDIPVVVVDRVNQETQYGVFSDNKEGGKLAAQAIWTAGATNILLIRGPLDKADNLNQRFQGSQNYLLNKGACFAIEDSASFDFAEIQIEAKTLLDHHPDIDSIIAPSDIHAIAYLHEILNRGKRIPEDVQIIGYDDILMSQFIYPSLSTIHQSSYIMGQKAAELIFKITNQLPITNKRIKLPVHYVERETLRRKIDE

SEQ ID NO: 9479 - DNA, 882 bp, Streptococcus agalactiae
atgtcattaattattcttacggttattttggttttagtgattgttctgttgataacttctttatacgttgttaaacaacagacagtagccatcattgaacgctttggtaaatatcaaaagactgctactagcggtattcatattcgtgtaccattgggtatcgataagattgcagcacgagtgcagttacgtcttttacagagtgaaattatcgttgagacaaaaacaaaagataatgtttttgtcactttaaatattgctacacaatatcgtgtcaatgaaaataacgttacagacgcttattacaaattaataaagccagaagctcagattaaatcttatatcgaagatgctttgcgttcatcagtacctaaacttacattagacgagctatttgaaaagaaagatgaaatagccttggaagttcaacatcaagtggcagaagaaatgtcaacatacggctacatcattgttaagactttaattactaaggttgagccagatgcagaagtaaaacaatccatgaacgaaatcaatgctgcacaacgtaaacgtgtagcagctcaagaattagcgaatgctgataagatcaaaattgtaactgctgcagaagcagaagcagaaaaagatcgtctacatggtgtgggtattgcgcaacaacgtaaagcaattgtagatgggttagctgattcgattcaagaattgaaagatgctaacgtgacattgacagaagaacaaatcatgtctatcttgttaacaaatcaatatttagatactttaaatacatttgctattaatggtaatcaaacgattttcttaccaaataacccagaaggtgttgaagatattcgtacacaagttttatctgctcttaaaacaaga

SEQ ID NO: 9480 - protein, 294 aa, Streptococcus agalactiae
MSLIILTVILVLVIVLLITSLYVVKQQTVAIIERFGKYQKTATSGIHIRVPLGIDKIAARVQLRLLQSEIIVETKTKDNVFVTLNIATQYRVNENNVTDAYYKLIKPEAQIKSYIEDALRSSVPKLTLDELFEKKDEIALEVQHQVAEEMSTYGYIIVKTLITKVEPDAEVKQSMNEINAAQRKRVAAQELANADKIKIVTAAEAEAEKDRLHGVGIAQQRKAIVDGLADSIQELKDANVTLTEEQIMSILLTNQYLDTLNTFAINGNQTIFLPNNPEGVEDIRTQVLSALKTR

SEQ ID NO: 9481 - DNA, 1881 bp, Streptococcus agalactiae
atgaagaaatgttttttggctatttgtttagctcttagtttttttatggtttcagttcaagcagatgaggtggactataacattcctcattatgagggtaatctaactattcacaatgataatagtgctgattttacagagaaggttacttaccaatttgattcgtcctataatggacagtatgtcacattaggtacggcgggtaagttacctgacaattttgatattaataataagccacaggttgaagtttcaattaatggtaaagtaaggaaagttagttaccagatagaagatttggaggatggctaccgtttgaaagtgtttaatggtggtgaagcaggtgatactgttaaagtcaatgttcagtggaaactaaaaaatgttctatttatgcataaggatgttggtgaacttaactggattcctattagcgactgggataaaacgttagagaaagtagatttttggatatcaactgacaaaaaggttgctctttctcgtctttgggggcacttgggttatcttaaaactcctcctaaaataagacaaaataataatcgttaccatttgacagcttttaatgtaaacaaacgattagaatttcatggttattgggatagatcttattttaatctacctacaaacagtaaaaataattacaagaaaaaaattgaatatcaagagaagatgatagagcgtcatggttttatcctaagtttcttgttaaggatattattaccttcattctttattattgtgacactattcatctcaattagggtgttcctgtttagaaaaaaagttaataaatacgggcaattccctaaggaacatcatttatatgaagcacctgaggacctttcaccactagagttaactcaaagcatttatagtatgagttttaaaaattttcaagatgaggagaagaaaactcaccttatcagtcaagaacaactcattcagtcaattctattagacttgattgatagaaaagtattgaattatgatgataacttgttatctctagctaacttagatagagcttctgatgcagaaatagattttatagagtttgcttttgcggattctacgagtttgaagccagatcaactcttttctaattaccaatttagttataaagaaacactacgtgaactgaaaaagcagcacaaggcttcagatctgcaaactcaaatgagacgccgaggaagtaatgccttatcaagaattacgcgtctcacaaggttgatttctaaagacaatataaactctcttagaagaaagggaatttcatccccttatcgtaaaatgtcttcagaagagtctaaagaattatctaggttgaaaagattcagttacctatcacctcttatttcttttgttgttataatttatacgctttttttaaattattttacctatttctgtatctatctcttattgtttggtgttatcctgttgttgaataaaatcatttttatgatgacaagaaaaataagtaacggttatattgtaactgaagatggagcaagtcgtgtctaccaatggactagttttaggaacatgctaagggatatcaaatcgtttgatcgttcagagttagaaagtatcgtattatggaatcgaatattggtttacgctactttattcggctacgctgaccgtgttgagaaagcactcagagtgaaccaaatagatattccagaaagatttgcaaacattgatagtcatcaatttgcgatttcagtcaatcaatctagtaatcatttttcaacgataactgaagatgttagtcacgcttctaattttagtgttaattcaggcggttcttcaggtggtttctcaggcggcggaggcggcggaggtggtggtgccttc

SEQ ID NO: 9482 - protein, 627 aa, Streptococcus agalactiae
MKKCFLAICLALSFFMVSVQADEVDYNIPHYEGNLTIHNDNSADFTEKVTYQFDSSYNGQYVTLGTAGKLPDNFDINNKPQVEVSINGKVRKVSYQIEDLEDGYRLKVFNGGEAGDTVKVNVQWKLKNVLFMHKDVGELNWIPISDWDKTLEKVDFWISTDKKVALSRLWGHLGYLKTPPKIRQNNNRYHLTAFNVNKRLEFHGYWDRSYFNLPTNSKNNYKKKIEYQEKMIERHGFILSFLLRILLPSFFIIVTLFISIRVFLFRKKVNKYGQFPKEHHLYEAPEDLSPLELTQSIYSMSFKNFQDEEKKTHLISQEQLIQSILLDLIDRKVLNYDDNLLSLANLDRASDAEIDFIEFAFADSTSLKPDQLFSNYQFSYKETLRELKKQHKASDLQTQMRRRGSNALSRITRLTRLISKDNINSLRRKGISSPYRKMSSEESKELSRLKRFSYLSPLISFVVIIYTLFLNYFTYFCIYLLLFGVILLLNKIIFMMTRKISNGYIVTEDGASRVYQWTSFRNMLRDIKSFDRSELESIVLWNRILVYATLFGYADRVEKALRVNQIDIPERFANIDSHQFAISVNQSSNHFSTITEDVSHASNFSVNSGGSSGGFSGGGGGGGGGAF

SEQ ID NO: 9483 - DNA, 621 bp, Streptococcus agalactiae
atggatgaattagacttgccagaaaactttaaaaatagtggtatgttaagttttcgagtaacacctaaaaaagatcgcattgatgtttttgttacaaagtctgaattaagtaaagatttaaatttagaagaattagcagatttgggtgacatttcaaaaatgtctccagaagacttttttaaaacattggaacaatcgatgttggaaaaaggggatacggatgcccatgccaaattagcagaaattgaaaatatgatggataaagcaactcaagaagtagttgaggaaaatgtttctgaagaacaacctgaaaaggaagtagaaacgattggatatgttcactatgtctttgattttgataatattgaagctgtagttcgattttcacaaacgattgattttccaatagaagcttctgaactctataaaaatggtaaaggctatcatatgacaattttgctagacttggaaaaccaaccaagctactttgctaatttgatgtatgctcgaatgcttgaacatgctaatgtgggcacaaaaacacgagcttacttgaaagagcatagtattcaattgattcatgatgatgctatttcaaaattacaaatgattgagatggga

SEQ ID NO: 9484 - protein, 207 aa, Streptococcus agalactiae
MDELDLPENFKNSGMLSFRVTPKKDRIDVFVTKSELSKDLNLEELADLGDISKMSPEDFFKTLEQSMLEKGDTDAHAKLAEIENMMDKATQEVVEENVSEEQPEKEVETIGYVHYVFDFDNIEAVVRFSQTIDFPIEASELYKNGKGYHMTILLDLENQPSYFANLMYARMLEHANVGTKTRAYLKEHSIQLIHDDAISKLQMIEMG

SEQ ID NO: 9485 - DNA, 1107 bp, Streptococcus agalactiae
ttgtatgaaaaagatgctaacaaacccgctgctattgcttccttgactaaaataatgaccgtttatatggtctataaagaaattgataacggtaacctcaagtggaataccaaagtaaatatatctgactacccttatcaactaacacgcgaatctgatgctagtaatgttcctttagaaaaaaggcgctatactgttaaacagctcgtggacgctgccatgatttctagtgctaacagtgcagccattgctttggctgaacatatttcaggaaccgaaagtaaatttgttgataaaatgactgctcaattggaaaagtggggaattcatgatagccacctagtcaatgcttctggcttaaataatagtatgttaggcaatcacatttatccaaaatcgtcacaaaacgacgaaaataaaatgagtgcacgtgatattgctattgttgcctaccatttggtcaacgaatatccttccattcttaagattactagtaagtccgttgctaaatttgataaagatattatgcattcttataactacatgctaccagatatgcctgtctttagaccaggtattacaggtttgaaaactgggacaacggaattagctggccaatcttttattgctacatctactgaaagtggaatgagactactcactgttattatgcatgctgataaggccgataaagacaaatatgctcgctttacagcaactaactctctcttgaactatatcacaaacacctacgaacctaaccttgtattagctaaaggagctgcatataaaggtaaagaagcaagtgtgagagacggaaaagaacaatcggtcatcgctgttgctaaaaacgatttgaaagtagtacagaagaaaaatatcactaaacaaaatcagttaaaaattaactttaaaaaagagcttactgctcctattacaaaaaaagagaacctagggaaagcttattacgttgaccttaataaggttggaaaaggctatctcataaaggaacctagcgttcatttagtggcaaaagatagtattgagcgcagtttcttcctcaaagtgtggtggaatcattttgtgcgctacgttaacgaaaaactt

SEQ ID NO: 9486 - protein, 369 aa, Streptococcus agalactiae
MYEKDANKPAAIASLTKIMTVYMVYKEIDNGNLKWNTKVNISDYPYQLTRESDASNVPLEKRRYTVKQLVDAAMISSANSAAIALAEHISGTESKFVDKMTAQLEKWGIHDSHLVNASGLNNSMLGNHIYPKSSQNDENKMSARDIAIVAYHLVNEYPSILKITSKSVAKFDKDIMHSYNYMLPDMPVFRPGITGLKTGTTELAGQSFIATSTESGMRLLTVIMHADKADKDKYARFTATNSLLNYITNTYEPNLVLAKGAAYKGKEASVRDGKEQSVIAVAKNDLKVVQKKNITKQNQLKINFKKELTAPITKKENLGKAYYVDLNKVGKGYLIKEPSVHLVAKDSIERSFFLKVWWNHFVRYVNEKL

SEQ ID NO: 9487 - DNA, 810 bp, Streptococcus agalactiae
atgctacttgatatgctttcctatgattttatgcaacgagcgctcttagcagttgtggctattagtatttttgctccaattttaggcatcttcctaattttacgtcgtcagagtttgatgagtgatactttgagtcacgtttccttagccggtgttgcattaggcgttgttttaggtatctcgcctacatggtcaactattttcgttgttactttggcggcagttgtattagagtatttgcgtactgtatacaaacattatatggaaatatcaactgctatcctgatgtcgatggggttggctatatctttaatcgttatgagtaaagctcataatgttggtaatgtcagtcttgaacagtatttatttggttctattattactattgggaaggaacaagtgattgctttgtttgttattgcattaatcacttttattttaaccatcctatttattagaccaatgtatatattaacgtttgatgaggatacagcttttgtagatggattgcctgtgcgtacaatgtctattttgttcaatgttgttacaggtattgctattgcattaacaattcctgccgcaggtgctctattggtgtcaactattatggttttaccagctagtattgctatgcggttaggtcgaaattttaaaactgttatttttctgggtatgttaattggatttgtgggaatggtagctggtattttcctttcgtattattgggagacacctgctagtgcaacaataacgatgatttttattggcattttcctattagttagcttagtaggcttgcttcgcaaacgt

SEQ ID NO: 9488 - protein, 270 aa, Streptococcus agalactiae
MLLDMLSYDFMQRALLAVVAISIFAPILGIFLILRRQSLMSDTLSHVSLAGVALGVVLGISPTWSTIFVVTLAAVVLEYLRTVYKHYMEISTAILMSMGLAISLIVMSKAHNVGNVSLEQYLFGSIITIGKEQVIALFVIALITFILTILFIRPMYILTFDEDTAFVDGLPVRTMSILFNVVTGIAIALTIPAAGALLVSTIMVLPASIAMRLGRNFKTVIFLGMLIGFVGMVAGIFLSYYWETPASATITMIFIGIFLLVSLVGLLRKR

SEQ ID NO: 9489 - DNA, 846 bp, Streptococcus agalactiae
atgaataaggcattattagagggaaaagatttatcaaaaatgttaggagagttaggtttttctgacactgttatcacacaggttgcattagctgatttgcatggtaacatttcaaggagcctactaaagattgagtcttatttagctaatcttttgttagttagaaaaaaagtaatagaagtagctacttacccattgatattattgtcttttctggtgctaattatgattggccttaggaattatttaatgccccaattaggagaaaataattttgcaactagactgattacaaatgtgccgaatattttcttattacttttagcagttgtacttatttttagtttaatattttatattattcaaaagcgattgtcgcgcattaaagtagcttgttttttaacaacaattcccttagttggatcatatgttaagctttatttaactgcttactatgcccgtgagtggggaaatttattaagtcaaggtattgaattggaccaaattgttaaagtaatgcaaaatcagaaatccaaactttttagggaaataggatatgacatggaagaaggttttctatcaggtaaagcatttcaccaaaaagtattagactatccgtttttcttaactgagcttagtttaatgattgaatatggccaagttaaggcgaaattaggaacagagttagatatatatgctgatgagaagtgggaggatttttttacaaaattagctagagcgacccagttaatccaacccgttatttttatttttgtagctcttatcattgttatgatttatgcagcaatgctgttaccaatgtatcaaaatatggagatattatca

SEQ ID NO: 9490 - protein, 282 aa, Streptococcus agalactiae; identical to SEQ ID NO: 8494

SEQ ID NO: 9491 - DNA, 663 bp, Streptococcus agalactiae
gtgtcatttattattagaaaaggcaaaattttagctttgctaatagcatttttagttattaatcaacttgttcctatattggctgtgtggctcctaaagaatcactatcaaacgccttttactagtatattgttgattggcttagaattacttattattgctcttttcctttattatgccaaggttaaacaaataatcagatggaaagcattattgacaaggaaagcattagttactattctcttaggttggttatcattgagggttccacaaattattggttacctcattatgactatgcaaggggttaaagatacagcaaatcaaacagtaattatggaattaacaaagcaacttccactagctttgatgttaatttttgccataattggtgcccctattatggaagaaattatatttcgctatattatccctaaagaactttttgcgaaacatcaaaaatggggttttgtcatcggtactttagcttttgctcttattcattccccttctgatataggtagttttattatttatgctgggatgggtgctattttatcttttgtttattataaaactgagcacttagaatatagtataatgattcattttattaacaatgctcttgcttatagcgtgttaatcagtacaatgatgaataac

SEQ ID NO: 9492 - protein, 221 aa, Streptococcus agalactiae
MSFIIRKGKILALLIAFLVINQLVPILAVWLLKNHYQTPFTSILLIGLELLIIALFLYYAKVKQIIRWKALLTRKALVTILLGWLSLRVPQIIGYLIMTMQGVKDTANQTVIMELTKQLPLALMLIFAIIGAPIMEEIIFRYIIPKELFAKHQKWGFVIGTLAFALIHSPSDIGSFIIYAGMGAILSFVYYKTEHLEYSIMIHFINNALAYSVLISTMMNN

SEQ ID NO: 9493 - DNA, 642 bp, Streptococcus agalactiae
atggaaaaagtcattatttttgatatggacggcgttattgttgattccgagtacacgtttttagataataagacagaaatgttacgtgaggagggtattgatacggacgtctcgtatcaataccagtacatggggactacttttgaattcatgtggcaagctatgaaagaggagtttggcttaccgaaaacagtaaaagagtatattgctgagatgaacagacgtcgacaagcgattgtggcgcgtgatggtgttaggcccatcaaaggagctcagcgactgattcattggttacaccaacatggctatcgcttagcagttgcgtcctcatctccaatggtagatattaagcgtaatctaaaagagttgggtgtgacagaatgctttgaatacatggttacaggagaagatgtatcgtcttctaaaccagcaccagatgtttttcttagagctgcagagcttttagatgtagaccctaaagtttgtatagttatagaagatacaagaaatgggagtttagctgctaaggcagcaggaatgtattgctttggctttgctaatcctgattatccaccgcaagatttatcaatggcagacaaggttatttcagattatcaagatatctatatttatcttccggag

SEQ ID NO: 9494 - protein, 214 aa, Streptococcus agalactiae
MEKVIIFDMDGVIVDSEYTFLDNKTEMLREEGIDTDVSYQYQYMGTTFEFMWQAMKEEFGLPKTVKEYIAEMNRRRQAIVARDGVRPIKGAQRLIHWLHQHGYRLAVASSSPMVDIKRNLKELGVTECFEYMVTGEDVSSSKPAPDVFLRAAELLDVDPKVCIVIEDTRNGSLAAKAAGMYCFGFANPDYPPQDLSMADKVISDYQDIYIYLPE

SEQ ID NO: 9495 - DNA, 738 bp, Streptococcus agalactiae
atgaaaattttaattcttgatgatgaaatgtttgccagacaagaattatcgtttttagttgaacatagccaggaggttgacaaccctgagatttttcaggctgaggatatcagtgaagccgaaaaaatcttatttagacagcaaattgatttaatttttttagatatttcgcttagtgaagaaaatggctttactttggctaatcagttgagccaacttgcacatcccccacttgttgtttttgcgacagcttatgataactacgctgtgaaagcttttgaaagtaacgctgttgattatatcatgaaaccgtttgaacaacagcgcgttgatatggctctatcaaaagtgaagaaattgagccaactcaccactgcttcagatgtagagcaagcaatacctaaaaaagccagtgttgaattgttaaccttgacattatcagatcgcagtgttgttgttaaaatgcaagatattgttgcagctagtgttgaagatggcgaattaactgttagtacagttcagaaaacttacactattcggaagacactcaattggtttaagtcacgcgctgtagcaccatattttctccagattcatcgaaacacagtgattaatctagagatgattgaggaaattcaaccttggtttaatcatactttgttactaattatgtctaatggagagaaatttccagtaggtcgatcgtatttaaaagacctaaatgagcatttaaccatg

SEQ ID NO: 9496 - protein, 246 aa, Streptococcus agalactiae
MKILILDDEMFARQELSFLVEHSQEVDNPEIFQAEDISEAEKILFRQQIDLIFLDISLSEENGFTLANQLSQLAHPPLVVFATAYDNYAVKAFESNAVDYIMKPFEQQRVDMALSKVKKLSQLTTASDVEQAIPKKASVELLTLTLSDRSVVVKMQDIVAASVEDGELTVSTVQKTYTIRKTLNWFKSRAVAPYFLQIHRNTVINLEMIEEIQPWFNHTLLLIMSNGEKFPVGRSYLKDLNEHLTM

SEQ ID NO: 9497 - DNA, 990 bp, Streptococcus agalactiae
atggaagattttattgaaatgaatgaaccattgtttgcgacctacgttgatttgagtgaaggttgtccgtctcatgataccttagagcgtgtgattagtcttgttaattcagaccgtttaaaagagcttaaagttcaatttgagcaatcattgacaagcttagatgccgttcatcaactgatttcagtggacggtaaaacgattcgaggcaatcgaggtaaaaatcagaagcctgttcatattgtaacggcttatgatgggggtcatcatcttagtttgggacaggtagcggttgaggagaaaagtaatgaaattgttgccattcctcagttattgcggacaattgatatccgtaaaagcattgtaacgatagacgcaatgggcacgcagacggctatcgttgatacgattataaaaggtaaagcagactattgcttagccgtcaaaggaaatcaagaaacactttatgatgatattgctctttattttagtgatgtcaacttattggaagaactccaagaaaatgcgcagtattatcagactgttgaaaaatctaggggacagattgaagttagagaatactgggtgtcttccgatatcaaatggttgtgtcaaaaccatcccaaatggcataagttacgtggtattgggatgactcgtaacacgattgataaggatggtcagctgagtcaagagaatcgttattttatctttagctttaagccggatgtcctcacatttgccaattgtgtacgaggtcattggcagatagagagtatgcactggttattggacgttgtttatcatgaagatcatcatcagacattggataaaagagccgcatttaacctaaatcttatccgaaaaatgtgcttatattttctcaaagtgatggtatttcctaaaaaagacctcagttatcgtcgcaaacaacggtatatttctgtccatttggaagattatttagtccaattatttggagaaagaggc

SEQ ID NO: 9498 - protein, 330 aa, Streptococcus agalactiae
MEDFIEMNEPLFATYVDLSEGCPSHDTLERVISLVNSDRLKELKVQFEQSLTSLDAVHQLISVDGKTIRGNRGKNQKPVHIVTAYDGGHHLSLGQVAVEEKSNEIVAIPQLLRTIDIRKSIVTIDAMGTQTAIVDTIIKGKADYCLAVKGNQETLYDDIALYFSDVNLLEELQENAQYYQTVEKSRGQIEVREYWVSSDIKWLCQNHPKWHKLRGIGMTRNTIDKDGQLSQENRYFIFSFKPDVLTFANCVRGHWQIESMHWLLDVVYHEDHHQTLDKRAAFNLNLIRKMCLYFLKVMVFPKKDLSYRRKQRYISVHLEDYLVQLFGERG

SEQ ID NO: 9499 - DNA, 750 bp, Streptococcus agalactiae
atggtaggccttgcagcagggctcgccattaaaggttacaagccataccttcatacttttggtcctttcgcgtcaaggcgtgtctttgatcaagtattcttatcgttaggttactcacaattatcagctacgattattggctcagatgcaggaattagcgcagaaatgaatggcggaactcatatgccttttgaagagttaggtctactaaggttaattcccaaagcgactatttttgaggttagtgatgatattcagtttgaagcaattttaaaacaaacattaagtattgatggcctaaaatacattagaactattcgtaaggcccccactgcagtttatgagggacgcgaagatttttcaaagggttttatacaattacgccagggaaaagatattactcttgtagcaagtggtattatggtttctagagcgatagaagcagccgactacctcaaagaactagggattgaggcctcagttatcgacctttttaaaattaagccccttccagaagaactgaaaccattactgatagatcaatccattgtaactattgagaatcataaccgtattggcggtatcggaagtgcattatgcgaatggcttagtatggagaaagacactactgttagtcgtatgggtattgatgagcgatttggtcaggtaggtcagatggaatatttattagaggagtatggactcgctgttaaagatatagtacagcattgcaaatcaatttataaatca

SEQ ID NO: 9500 - protein, 250 aa, Streptococcus agalactiae
MVGLAAGLAIKGYKPYLHTFGPFASRRVFDQVFLSLGYSQLSATIIGSDAGISAEMNGGTHMPFEELGLLRLIPKATIFEVSDDIQFEAILKQTLSIDGLKYIRTIRKAPTAVYEGREDFSKGFIQLRQGKDITLVASGIMVSRAIEAADYLKELGIEASVIDLFKIKPLPEELKPLLIDQSIVTIENHNRIGGIGSALCEWLSMEKDTTVSRMGIDERFGQVGQMEYLLEEYGLAVKDIVQHCKSIYKS

SEQ ID NO: 9501 - DNA, 2127 bp, Streptococcus agalactiae
atgtcaaaacaagtctttgaaatgatttttgctggaaaaaaattagttgttgaaactggccaagtggctaaacaagcaaatggatcagttgtcgttcgttatggagattctactgtactcacagcagcagttatgtctaagaaaatgtcaacaggtgattttttcccacttcaagtcaattacgaagaaaaaatgtatgctgctgggaaatttccgggtggctttaacaaacgtgaagggcgtccaagtacggatgctaccttaacagcacgtcttattgatagaccaatccgtccgatgtttgctgagggatttcgtaacgaagtacaggtcatcaatactgttctttcatttgatgaaaatgctagcgcaccaatggctgctatgtttggttcatcattagcattatcgatttccgatattcctttcaatgggccaattgctggagttcaagttgcttatgttgatggtaattttattattaatccgacagcacaagaacaagaggcttctgcgttagaattaacggttgcaggtactaaagaagcgattaacatggttgaatctggagcgaaagaactttcagaagaaatcatgctagaggctcttcttaaaggacatgaggctgtctgtgaattaatcgcctttcaagaagagattgttactgctattggtaaagaaaaagccgaggtagaacttcttcaagttgatccagaacttcaagcagaaattattgctactcataacatagctttacaggctgcagtacaagttgaagagaaaaaggctagagaagcagctacagaagcagttaaagaagtagttataggtgaatatgaggcacgttacgctgaacatgaagaatatgatcgcattatgcgtgatgttgctgaaattttagaacaaatggaacatgcagaagttcgtcgcctcattacagaagataagattcgtcctgatggacgtcgtgtggatgagattcgtccattagacgcagagattgattttttaccacaagttcatggatcaggtctctttacacgaggacaaacccaagcattatcagtattaacgttagcacctatgggtgaagcacaaatcattgatgggctaacaccagagtataagaaacgctttatgcaccactataacttcccacaatattcagttggtgagacgggacgttatggagctgcagggcgtcgtgaaattggtcacggtgctttaggagagcgtgcattagaacaagtccttccaagattggaggagtttccgtatgctatccgactagttgcagaagttttagaatcaaacggttcatcatctcaggcttctatatgtgctggaacgcttgctcttatggcaggtggtgtgcctataaaagctccagttgctggtattgccatggggctcatatcagatggaacaaactatacagtcctcactgatattcaaggattagaagaccattttggcgatatggactttaaagttgcgggtacacgtgaagggattacagcacttcaaatggatattaaaattgaaggtattacccctcaaattttggaagaagctcttgcgcaagctaaaaaagcacgctttgaaattcttgatgtccttcatggagctatcgcagagccacgtccacaattagcaccaacggcacctaagattgatatgataaaaatcgatgttgataagattaaagttgtcatcggtaaaggtggcgaaactatcgataaaatcatcgctgaaacaggtgttaagattgatattgatgaagaaggaaatgtatctatcttctctagtgatcaggctgctattgatcgtacgaaagacattattgcaagtttagtacgtgaagcaaaagtgggagaagtttaccatgctaaagtagttcgtatcgagaaattcggtgcctttgtcaacctctttgataaaacagatgcattggtacatatttcagaaattgcatggacacgtacagcaaatgtagctgatgttcttgaaattggtgaagaagttgatgtgaaagtcatcaaaattgatgataaagggcgagttgatgcttctatgaaagcattgttaccacgtcctccaaaagctgacaatcctaaaaaggaatct

SEQ ID NO: 9502 - protein, 709 aa, Streptococcus agalactiae
MSKQVFEMIFAGKKLVVETGQVAKQANGSVVVRYGDSTVLTAAVMSKKMSTGDFFPLQVNYEEKMYAAGKFPGGFNKREGRPSTDATLTARLIDRPIRPMFAEGFRNEVQVINTVLSFDENASAPMAAMFGSSLALSISDIPFNGPIAGVQVAYVDGNFIINPTAQEQEASALELTVAGTKEAINMVESGAKELSEEIMLEALLKGHEAVCELIAFQEEIVTAIGKEKAEVELLQVDPELQAEIIATHNIALQAAVQVEEKKAREAATEAVKEVVIGEYEARYAEHEEYDRIMRDVAEILEQMEHAEVRRLITEDKIRPDGRRVDEIRPLDAEIDFLPQVHGSGLFTRGQTQALSVLTLAPMGEAQIIDGLTPEYKKRFMHHYNFPQYSVGETGRYGAAGRREIGHGALGERALEQVLPRLEEFPYAIRLVAEVLESNGSSSQASICAGTLALMAGGVPIKAPVAGIAMGLISDGTNYTVLTDIQGLEDHFGDMDFKVAGTREGITALQMDIKIEGITPQILEEALAQAKKARFEILDVLHGAIAEPRPQLAPTAPKIDMIKIDVDKIKVVIGKGGETIDKIIAETGVKIDIDEEGNVSIFSSDQAAIDRTKDIIASLVREAKVGEVYHAKVVRIEKFGAFVNLFDKTDALVHISEIAWTRTANVADVLEIGEEVDVKVIKIDDKGRVDASMKALLPRPPKADNPKKES

SEQ ID NO: 9503 - DNA, 582 bp, Streptococcus agalactiae
atggggtggtggaaagaaagtatagctattgtcaaagaacaagatccagctgctcgtagttctctagaagttattttaacttatccaggaataaaagctcttgcagctcataggctatctcattttttatggaatcataattttaaattgttagcacgtatgcacagtcaattttggcgtttctggacacaaattgaaattcatcccggagcgacgatttcggaaggggtttttattgaccacggttcaggattggtcattggagaaactgccattgtagagaaaggtgctatgctataccatggggttacattgggtggcacaggtaaagacaaaggcaaacgacacccaaccatacgtaaaggagcgctaatttcagcacattctcaaatcattggtccaattgaggttggagaaaatgctaaagtcggtgctgcagcagttgtccttgcagatgtgccagcagacgtaacagtagttggtgttccagctaaagttgtccgtgtccatggtcaaaaggatgatcttcaaatccgaagtattgaacatgatcgagaagaaagttattattcgtccaaactt

SEQ ID NO: 9504 - protein, 194 aa, Streptococcus agalactiae
MGWWKESIAIVKEQDPAARSSLEVILTYPGIKALAAHRLSHFLWNHNFKLLARMHSQFWRFWTQIEIHPGATISEGVFIDHGSGLVIGETAIVEKGAMLYHGVTLGGTGKDKGKRHPTIRKGALISAHSQIIGPIEVGENAKVGAAAVVLADVPADVTVVGVPAKVVRVHGQKDDLQIRSIEHDREESYYSSKL

SEQ ID NO: 9505 - DNA, 297 bp, Streptococcus agalactiae
atgcagggttttaccaaacctaatcagttacatcggaaagcaacccaatatgtttctgctaatgcccaagcattgttaattaatgccatgttagaagaaaatattttaactgatgaagagcagttaatttataaacgaggacgtaatgcgaatagtcatacaaaagctaaaaatgctgatattattacctatcgtatgtctacaggttttgaggctcttatggggtacttggatatgactggtcagataaagcgcttggaaactctaatacagtggtgtattgaaaccattgaaaaa

SEQ ID NO: 9506 - protein, 99 aa, Streptococcus agalactiae
MQGFTKPNQLHRKATQYVSANAQALLINAMLEENILTDEEQLIYKRGRNANSHTKAKNADIITYRMSTGFEALMGYLDMTGQIKRLETLIQWCIETIEK

SEQ ID NO: 9507 - DNA, 444 bp, Streptococcus agalactiae
atgaacaaaacaactttcatggctaaaccaggccaagttgaacgcaaatggtacgttgttgacgcagcagatgtacctcttggacgtctttctgcagtagttgctagcgtacttcgcggaaaaaacaaaccaactttcacaccacacactgatacaggtgactttgtgattgttatcaatgctgaaaaagttaaattaactggtaaaaaagcgtcagataaaatctactacactcactcaatgtatccaggtggtttgaaacaaatctcagcaggtgaacttcgttctaaaaatgctgttcgtttgattgaaaaatcagttaaaggcatgcttccacataacactcttggacgtgcacaaggtatgaaattgaaagtatttgttggcggtgagcatacacatgctgcacaacaaccagaagtacttgatatctcaggacttatc

SEQ ID NO: 9508 - protein, 148 aa, Streptococcus agalactiae
MNKTTFMAKPGQVERKWYVVDAADVPLGRLSAVVASVLRGKNKPTFTPHTDTGDFVIVINAEKVKLTGKKASDKIYYTHSMYPGGLKQISAGELRSKNAVRLIEKSVKGMLPHNTLGRAQGMKLKVFVGGEHTHAAQQPEVLDISGLI

SEQ ID NO: 9509 - DNA, 996 bp, Streptococcus agalactiae
atggtccgactccgaaggggtcggcttggggctactcccccaagaatgtcattttacgtaggcctttgcgcagacaaaaaaatcggcgccgttaggcgaccgccaaaaagaaaggaggtttgtttgaaattaaaagtcagcttagacaatatcactatgacagcctatatcaaatctaaaaagtatttagctatgaaacaactcatagaaacccatttagctattactgttcaaactgcgatgactgacatgtttcgagccaccactggggatggaatccacgttgtgctccatatgaattatgacaaacaaaaaggacaagaccgcaaggctcgtccatttcgcttggagtttaatcccaataaactccgtttagttgacagtgaaattatagatactattataccatttcttgaagatatttcaatatcacgtgctgatttagcttttgatctatttgaggttgattgtagtgagtttgtgctcgaaaaaaagggcagaccaaccgcaaccaaggaatttcgttctagtactggaacgttagaaacaaaatatctaggtgctccacgttctgaaaaacaagttaggctatataacaagaaaaaggaacaactccaaaatggtactgataaagataaagactttgcaagtcaatttaagcactggtggcgcttggaatttcaattaagaagccgttcaattgatgagatattcgaggttattgatactattatttttaaaccattcaatcttaaaggcttatctattgagacccaaatctatctaactgctcttattcacgataaaaatatctggaaaaaactccatagaaatacaagagcaagatacaaaaaaattttagaaactcatcaaacatcagatactgattatttaggtttgctgaaagacttgttgaagcatgaaagaccaagactagaaaatcagctcgcttattatgggggtaggatagacaaaaatagctttcaacccttttgt

SEQ ID NO: 9510 - protein, 332 aa, Streptococcus agalactiae
MVRLRRGRLGATPPRMSFYVGLCADKKIGAVRRPPKRKEVCLKLKVSLDNITMTAYIKSKKYLAMKQLIETHLAITVQTAMTDMFRATTGDGIHVVLHMNYDKQKGQDRKARPFRLEFNPNKLRLVDSEIIDTIIPFLEDISISRADLAFDLFEVDCSEFVLEKKGRPTATKEFRSSTGTLETKYLGAPRSEKQVRLYNKKKEQLQNGTDKDKDFASQFKHWWRLEFQLRSRSIDEIFEVIDTIIFKPFNLKGLSIETQIYLTALIHDKNIWKKLHRNTRARYKKILETHQTSDTDYLGLLKDLLKHERPRLENQLAYYGGRIDKNSFQPFC

SEQ ID NO: 9511 - DNA, 432 bp, Streptococcus agalactiae
atgagaataaaagattatgctgatagtctaggagttagtagccaatctatctataaacgcatacgctctccaaaatataaagaaaggttgaaaggtcatttataccgagacaaccaaaaggttgaaaatcttgatttgataggcattaaaatacttgaagattatcattttgagaatgatgtcattgaactggaaaaaacgctgggtgatattcaagaagaattcgagcaagaaaagaagggaatgcaatatcggatagatagactagctgataagttaactcctttacttgaggataaccaaaacttggtacaaaaaaattatgagttactcaactatgttcggagcttggaacgacagaagctattgctgattattgctttagctgtcatggtaatcactttattagtggcaatatggcttgccatcttt

SEQ ID NO: 9512 - protein, 144 aa, Streptococcus agalactiae
MRIKDYADSLGVSSQSIYKRIRSPKYKERLKGHLYRDNQKVENLDLIGIKILEDYHFENDVIELEKTLGDIQEEFEQEKKGMQYRIDRLADKLTPLLEDNQNLVQKNYELLNYVRSLERQKLLLIIALAVMVITLLVAIWLAIF

SEQ ID NO: 9513 - DNA, 288 bp, Streptococcus agalactiae
atgtcacaaattaaactaacacctgaagaactccgtatttcagcacaaaaatatacaacaggatcacaatcaattacagatgtgttaacagttttgactcaagaacaagctgttattgatgaaaattgggatggtacagcatttgatagctttgaagcccaattcaatgaattatctccaaaaatcacacaatttgcacaattattagaagatataaatcaacaattattgaaagttgcggatgttgtcgaacaaacagactcagatattgcctcacaaattaataaa

SEQ ID NO: 9514 - protein, 96 aa, Streptococcus agalactiae
MSQIKLTPEELRISAQKYTTGSQSITDVLTVLTQEQAVIDENWDGTAFDSFEAQFNELSPKITQFAQLLEDINQQLLKVADVVEQTDSDIASQINK

SEQ ID NO: 9515 - DNA, 102 bp, Streptococcus agalactiae
atggaggaattttgtatggtaagtactcaatatatgaaagtaaccttacgagaaaaattcccagataaattaacatatgttgatttagaagaacttgtgata

SEQ ID NO: 9516 - protein, 34 aa, Streptococcus agalactiae
MEEFCMVSTQYMKVTLREKFPDKLTYVDLEELVI

SEQ ID NO: 9517 - DNA, 924 bp, Streptococcus agalactiae
atgcttaaaaaatcgcactttttacagatatttacactttgcttagccctcttaacgatttctggttgtcaattaaccgatactaaaaagtctggtcataccacaattaaggttgctgcccaaagttctacagagtctagtattatggcaaatattatcaccgaattaattcatcacgaattaggatacaacacaactttaataagcaatcttggttcctctacggttactcaccaagctttgctccgtggtgatgctgacattgctgccacacgttatacaggaacagacatcacagggactcttggtttaaaagctgttaaagaccctaaagaagcttctaagattgtaaaaactgaattccaaaaacgctacaatcaaacttggtatcctacttatggtttttctgatacttatgcattcatggttactaaagagtttgccagacagaataaaatcactaagatctctgatcttaaaaaattatcaacaactatgaaggcaggggttgatagttcatggatgaatcgcgagggagatggatacactgatttcgctaaaacatacggttttgaattttcacatatttaccctatgcaaattggcttagtctatgatgcggttgaaagtaacaaaatgcaatctgtattaggctactccactgacggtcgtatttcgagctatgatttagaaattttaagggatgataaaaaattctttcctccttatgaagcctctatggttgtcaacaattctatcatcaaaaaagatcctaaactaaaaaaattactccatcgactcgatggtaaaatcaatttaaaaacgatgcaaaaccttaattatatggtagatgataaacttttagaaccttcagttgttgccaaacaatttttagaaaaaaaccattattttagaggagataaa

SEQ ID NO: 9518 - protein, 308 aa, Streptococcus agalactiae
MLKKSHFLQIFTLCLALLTISGCQLTDTKKSGHTTIKVAAQSSTESSIMANIITELIHHELGYNTTLISNLGSSTVTHQALLRGDADIAATRYTGTDITGTLGLKAVKDPKEASKIVKTEFQKRYNQTWYPTYGFSDTYAFMVTKEFARQNKITKISDLKKLSTTMKAGVDSSWMNREGDGYTDFAKTYGFEFSHIYPMQIGLVYDAVESNKMQSVLGYSTDGRISSYDLEILRDDKKFFPPYEASMVVNNSIIKKDPKLKKLLHRLDGKINLKTMQNLNYMVDDKLLEPSVVAKQFLEKNHYFRGDK

SEQ ID NO: 9519 - DNA, 159 bp, Streptococcus agalactiae
atgaaaaaatatataaaatggttaattcccatatctattattgggatgttactagtaggctgtcaaatgaataggggacctaaaagtcagtcaaacgaagtaaaaaatagcaagcaatcagaagtgaagaaaggtaaaaatatgataaaaaagaacagt

SEQ ID NO: 9520 - protein, 53 aa, Streptococcus agalactiae
MKKYIKWLIPISIIGMLLVGCQMNRGPKSQSNEVKNSKQSEVKKGKNMIKKNS

SEQ ID NO: 9521 - DNA, 801 bp, Streptococcus agalactiae
atgagcccttatactttcttacgtgctataggccctgagccttggaatgctgcatacgttgaaccatcacgtcgtccagctgacggccgctatggcgaaaatccaaaccgtctttaccaacatcatcaatttcaagtggtaatgaagccttcgccgtcaaatattcaagaactttatttgaagtctttggaattactaggtatcaatccacttgagcatgatatccgttttgttgaagataactgggaaaatccatctacaggttcagctggattaggttgggaagtttggcttgatggaatggaaataacacaatttacttatttccaacaagtaggtggacttcaaacaggtcctgtaacttctgaagttacttatggactagagcgtttagcctcttatattcaagaggtagattctgtttatgatattgagtgggcaccaggtgttaaatatggtgaaatctttactcagccagagtatgagcattcaaaatattcatttgagatatcagaccaagtaatgttacttgaaaactttgagaaatttgaaagagaagcaaaacgtgctttagaagaaggacttgttcatccagcttatgactacgtccttaaatgttcacacacctttaatttattagatgcacgtggagcagtatctgttactgagcgtgcaggctatattgcacgtatccggaatttagcacgtgttgttgctaaaacctttgttgccgaacgtaaaaaacttggtttcccacttttggatgaggaaactcgtatcaaattacttgctgaggaagac

SEQ ID NO: 9522 - protein, 267 aa, Streptococcus agalactiae
MSPYTFLRAIGPEPWNAAYVEPSRRPADGRYGENPNRLYQHHQFQVVMKPSPSNIQELYLKSLELLGINPLEHDIRFVEDNWENPSTGSAGLGWEVWLDGMEITQFTYFQQVGGLQTGPVTSEVTYGLERLASYIQEVDSVYDIEWAPGVKYGEIFTQPEYEHSKYSFEISDQVMLLENFEKFEREAKRALEEGLVHPAYDYVLKCSHTFNLLDARGAVSVTERAGYIARIRNLARVVAKTFVAERKKLGFPLLDEETRIKLLAEED

SEQ ID NO: 9523 - DNA, 1278 bp, Streptococcus agalactiae
atgacttgtgcgcagaaattacgccaattaaatcctaattgggatatcgttttgattgataaagaaattcatccagattatgttccaaatggcttaaattggtattatcgtcacgaaattagtggtttaaatcaggccatgtggcagacagaagaagagcaacggttgcagaatatacgctgtctatttggtctaaaagttgagaaaattaataaagaagatagggaattaatgttatcagatggttcttctgtctattatgatcaattgatttgtgccatgggctcccaagcagaatcaacttatattgatggggctgatgcgcaaggtgttttaacaacaaaaacttatgcaactagtcaaaatgctaagcaggtattagataaaagtcataaggtagcagttgttggggcaggtatcatcggtttagatattgcttatagtttacatgaatcagggaaggcggtcactttgttagaagctcaagaaagaccagacttcaggcatacagatcctgatatgtcccttcctttacttgatgcgatggctgaatcaaaactacattttttccaaaatcaaaaggttgagaaaattactgtaacccgagaagaaaaactttgtttgcgaacgctaacaggagacacctttacagttgatgctgtcatattagctgttaattttcgtccggatagtcgtcttttaactgggttggttgatttaagtgttgataatagtgttgttgtaaatgattatttccaaacgagtgaccctaatatctatgctattggcgatttgatttggtcgtattttaaaggtcttaatagtgcttattatatgcccttaattaaccaagcaatccgttcggcacaaatgttggcataccatttatcgggacatgctgttccaaaattaaaaataacacgcgctacaggatctaaacactttggctattatagagctaacattggattaactgaattggaagctggtttttacgaggataccgttagtgttacttatttccctaaagaacagtatgatttaaggataaaattgattgctaaccaaaaaacgggccatttattgggggctcaattaatctcaaaggaaaattgtttggctactgccaatcagcttgttcaagctatatcgtgtgatatgacagattttgatctggcttttcaagatttcatttatacagctagagaatctgagatggcttatatgttgcatcaagcagctatcaacctttatgaaaagaggattgggctatgcgaa

SEQ ID NO: 9524 - protein, 426 aa, Streptococcus agalactiae
MTCAQKLRQLNPNWDIVLIDKEIHPDYVPNGLNWYYRHEISGLNQAMWQTEEEQRLQNIRCLFGLKVEKINKEDRELMLSDGSSVYYDQLICAMGSQAESTYIDGADAQGVLTTKTYATSQNAKQVLDKSHKVAVVGAGIIGLDIAYSLHESGKAVTLLEAQERPDFRHTDPDMSLPLLDAMAESKLHFFQNQKVEKITVTREEKLCLRTLTGDTFTVDAVILAVNFRPDSRLLTGLVDLSVDNSVVVNDYFQTSDPNIYAIGDLIWSYFKGLNSAYYMPLINQAIRSAQMLAYHLSGHAVPKLKITRATGSKHFGYYRANIGLTELEAGFYEDTVSVTYFPKEQYDLRIKLIANQKTGHLLGAQLISKENCLATANQLVQAISCDMTDFDLAFQDFIYTARESEMAYMLHQAAINLYEKRIGLCE

SEQ ID NO: 9525 - DNA, 1410 bp, Streptococcus agalactiae
atggaaaaagaaaggcgtgttcaatatcggctactttcttttttaagaggctctcctcaggcaatagcactgaagttagctttattagaaactggtttaagtcgagcaacttttcttaaatatatcaataatcttaatagctactttgaacaagaaaaagttaattgtcgaatcgtttattataaggataagttatttttagaagaggattataacttatccaatcaagaagtgttgaaagctctgatgaaagatagtattaaatacactatcttaatatctttatttaatcagcgtcagttcacaatcgttggtctttctcaagaattgatggttagtgaggctactttaaatcgtcatcttgctcatctcaatgaattgttagcggaatttgatattgctatttcacaaggaaaacagattggtgatgaattgcaatggcgttatttttattatgaattattcaagcaactatggtcttatgacaagtgccaaaatatgataaagaaattagacttagactcattaattctattaatagagcgcttggctcaacatactttaactcgagaagctcatcaaaatctgggactttggtttagtatttgtcatcatcgtctccttgctatggaaaaaatatctgataatctcaagcctattgtgaaacattatcaatgtaatgctttttataaacggttagacgcagccttagttttgtatatgagtcgttttgctcttgagtatagggaaggagaagttctggcaacttttgcttttctacattcacaaaatattttaccaatcaatacaatggaatacatcatgggatttggaggcccgattattgattgtgtaaccgaaacaatcatctactttaaaaaggagagtattttagctgacgagacatcagatcaggttatttaccaacttggtcagttatatagccattattatttctttaaaggtcatattttagttgaacaacctgatttagaacaaacgtatcgacttattgatcataatatgagggataagttgcatcatatttcaaagaagattattgcaaatgttaatcgaattagacctttaacagaagatggttgttctttgctgactttacatttgttggaattgcttattttctcgaaaaatagtcaaaaaatgccctttaggattggtctagatatgacaggtaatgctgtggaacagtcattgttggaatatcgcattcgacaacatttctctggtaataattctattcaagtcgaaccttatgacgaaggaaagggatttgatatggttatttatcagagtcactcaagaccttataaagccaaactaacctattgccttaataaaggtgcttcagagcgagaactacaggaaatagattcacttatttatgacaat

SEQ ID NO: 9526 - protein, 470 aa, Streptococcus agalactiae
MEKERRVQYRLLSFLRGSPQAIALKLALLETGLSRATFLKYINNLNSYFEQEKVNCRIVYYKDKLFLEEDYNLSNQEVLKALMKDSIKYTILISLFNQRQFTIVGLSQELMVSEATLNRHLAHLNELLAEFDIAISQGKQIGDELQWRYFYYELFKQLWSYDKCQNMIKKLDLDSLILLIERLAQHTLTREAHQNLGLWFSICHHRLLAMEKISDNLKPIVKHYQCNAFYKRLDAALVLYMSRFALEYREGEVLATFAFLHSQNILPINTMEYIMGFGGPIIDCVTETIIYFKKESILADETSDQVIYQLGQLYSHYYFFKGHILVEQPDLEQTYRLIDHNMRDKLHHISKKIIANVNRIRPLTEDGCSLLTLHLLELLIFSKNSQKMPFRIGLDMTGNAVEQSLLEYRIRQHFSGNNSIQVEPYDEGKGFDMVIYQSHSRPYKAKLTYCLNKGASERELQEIDSLIYDN

SEQ ID NO: 9527 - DNA, 1869 bp, Streptococcus agalactiae
atggcttatgtgctttggaataaattcttaaatgtaaacccaaaaacaagtcgcaattggacaaaccgtgaccgttttgtgctatcagctgggcatggttcagctcttctttatagcctacttcatttagctggctatgatttatcaattgatgatttaaaacaatttcgccaatggggatcaaaaacacctggacatccagaagttaaccatactgatggtgtagaagcaacaactggacctttagggcaaggtattgctaatgctgttggtatggcaatggctgaagctcatttggctgctaaatttaataaaccaggctttgatttagttgatcattacacttatacacttcatggtgatggttgtttgatggagggtgttagccaagaagctgccagtcttgctggacacttaaaacttggtaaattggtccttctttatgattcaaatgatatctcacttgatggtccaacatctcaatcatttacagaagatgttaaaggacgttttgaatcatatggttggcaacatatcttagttaaagatggtaatgatttagaagcgattgctgcagcaattgaagctgctaaagctgaaactgataaaccaaccattattgaagttaaaactattattggatttggcgcagagaaacagggaacatcttcagttcatggagcgccacttggtgcagaaggtattacttttgccaagaaggcttatgtatgggaatatccagactttactgttcctgctgaagttgcagatcgatttgcctcagatcttcaagcgcgtggtgcgaaggcagaagaggcatggaatgatctttttgctaaatatgaagttgagtatccagaattagcaactgaatacaaagaagcttttgctggccaagctgagacagttgaactgaaagctcatgacctaggttcatcagtggctagtcgtgtttcaagccaacaagctattcaacaattatcgactcaattaccgaacctctggggagggtcagcagacctctcagcttctaataacacaatggtagcagcagaaacagatttccaagcaagtaactacgctgggcgtaatatttggtttggtgtacgtgaatttgcaatggctgctgcaatgaatggaattgcgcttcacggtgggactcgtgtttatgggggtacgttctttgtcttctcaaactacttgttaccagcagtacgtatggctgcacttcaaaacttgccaactgtctatgttatgacacatgattctattgctgttggagaagatgggccaactcatgagccaatagaacaattagcatcagtgcgctcaatgcctaatttgaacgttatccgtcccgcagacggtaatgaaacaaacgctgcatggcaacgagctgtatcagagacagatcgaccaacgatgcttgttttaacacgtcaaaacttaccagttcttgaaggaacatcagaattagcccaagaaggggttaataaaggtgcttatattttatcagaagctaaaggtgaacttgatggtatcatcattgcaacaggttcagaagttaaattagctttagatactcaagacaaacttgagtcagagggcatccatgttcgcgtcgtatctatgccagcacaaaacatttttgatgaacaagaggcttcatatcaagagcaagtgcttccatcagctgttacaaaacgtcttgctattgaggcaggatcaagcttcggttggggtaaatatgttggtttaaatgggctaacacttactattgatacttggggagcatcagcaccaggtaacagaattttcgaagagtatggctttacagttgagaatgctgtatcgctatataaagaactt

SEQ ID NO: 9528 - protein, 623 aa, Streptococcus agalactiae
MAYVLWNKFLNVNPKTSRNWTNRDRFVLSAGHGSALLYSLLHLAGYDLSIDDLKQFRQWGSKTPGHPEVNHTDGVEATTGPLGQGIANAVGMAMAEAHLAAKFNKPGFDLVDHYTYTLHGDGCLMEGVSQEAASLAGHLKLGKLVLLYDSNDISLDGPTSQSFTEDVKGRFESYGWQHILVKDGNDLEAIAAAIEAAKAETDKPTIIEVKTIIGFGAEKQGTSSVHGAPLGAEGITFAKKAYVWEYPDFTVPAEVADRFASDLQARGAKAEEAWNDLFAKYEVEYPELATEYKEAFAGQAETVELKAHDLGSSVASRVSSQQAIQQLSTQLPNLWGGSADLSASNNTMVAAETDFQASNYAGRNIWFGVREFAMAAAMNGIALHGGTRVYGGTFFVFSNYLLPAVRMAALQNLPTVYVMTHDSIAVGEDGPTHEPIEQLASVRSMPNLNVIRPADGNETNAAWQRAVSETDRPTMLVLTRQNLPVLEGTSELAQEGVNKGAYILSEAKGELDGIIIATGSEVKLALDTQDKLESEGIHVRVVSMPAQNIFDEQEASYQEQVLPSAVTKRLAIEAGSSFGWGKYVGLNGLTLTIDTWGASAPGNRIFEEYGFTVENAVSLYKEL

SEQ ID NO: 9529 - DNA, 303 bp, Streptococcus agalactiae
atgaagaaggagtgtcgtgatttttatcggcagatacagcatacttacaatgatatatctgtccgtgaagatgcagtgctatcatcaatactattatcagcatcgaatggtttgataaaaactagcgatgtacctcgtgttgcttatgagttaactcagcaattggaaaataatgagatagaaaaatctttcgagtcattagctacagttaaggaattgaaaaaatctgctaaaaaattgtctgagagatatgagcaaaataaggtaacaacgggattgctttctaaagtatttggaaatcat

SEQ ID NO: 9530 - protein, 101 aa, Streptococcus agalactiae
MKKECRDFYRQIQHTYNDISVREDAVLSSILLSASNGLIKTSDVPRVAYELTQQLENNEIEKSFESLATVKELKKSAKKLSERYEQNKVTTGLLSKVFGNH

SEQ ID NO: 9531 - DNA, 894 bp, Streptococcus agalactiae
atgcttgatattaagccggatggtatctatgtagatgctactttaggtggggcaggacacagcgaatatcttctttcacaattaggcccagatgggcacctttacgcatttgaccaagaccagaaggctattgacaatgctcatatacgtttaaagaaatatgtggataccggtcaagtaacctttatcaaagataatttcagaaatctatcttctaacttaaaagcattaggagtgtcggaaattaatggtatttgttatgatttaggtgtatcaagcccacagctggacgagcgtgaacgcggtttctcatataaacaagacgccccccttgatatgcgaatgaatagagagcagagtcttacagcttatgacgttgtgaacacttatagttatcatgatttagtaaggattttctttaagtatggcgaagataaattttcaaaacaaattgctcgaaaaattgagcaagtacgagctgaaaaaacaatatctacaacaacagaattggctgagattatcaaatcgtctaaatctgccaaagaactgaagaaaaaaggtcatccagctaaacaaatttttcaagctattcgtattgaagtcaatgacgaactaggagctgcagatgaatctatacaacaagcaatggacttattagctgttgatggtcgtatatctgtcatcacttttcattctttagaagatcgtcttactaagcaactttttaaagaagcatcaacagtagaagtacctaaaggtcttccttttataccagatgatttacaacctaagatggagctcgttaatcgtaaacccatcttaccaagtcaagaagaactagaagcgaacaatcgtgcccattcagcgaaattgagagtagcgcgtcgtattcga

SEQ ID NO: 9532 - protein, 298 aa, Streptococcus agalactiae
MLDIKPDGIYVDATLGGAGHSEYLLSQLGPDGHLYAFDQDQKAIDNAHIRLKKYVDTGQVTFIKDNFRNLSSNLKALGVSEINGICYDLGVSSPQLDERERGFSYKQDAPLDMRMNREQSLTAYDVVNTYSYHDLVRIFFKYGEDKFSKQIARKIEQVRAEKTISTTTELAEIIKSSKSAKELKKKGHPAKQIFQAIRIEVNDELGAADESIQQAMDLLAVDGRISVITFHSLEDRLTKQLFKEASTVEVPKGLPFIPDDLQPKMELVNRKPILPSQEELEANNRAHSAKLRVARRIR

SEQ ID NO: 9533 - DNA, 2190 bp, Streptococcus agalactiae
atgggatttattatcttagctattgtaataggtgggctcctatttgcatactacgttagtcgttctccgaaattaaccgatcaagctttaaaatccgttaactctagtttggtttatgatggtaataataaacttattgccgatttaggctcagaaaagcgtgaaagtgttagtgcggatagcattccactaaatttggttaacgctatcacttctatcgaagataaacgtttctttaaacatagaggtgtcgatatttatcgtattttaggtgcagcttggcataatcttgttagtagtaatacgcaaggtggttcaacccttgatcaacagttgattaaactggcttacttttctaccaataaatctgaccaaacgttaaaacgtaaatcacaggaagtttggcttgcgcttcaaatggagcgtaaatacaccaaagaagaaattcttactttctatattaataaagtttatatgggaaatgggaattatggtatgagaacaacagctaaatcatactttggtaaagacctaaaggaattatctattgcacaacttgctttgctcgctggtattcctcaagcacctacacaatatgacccttataaaaacccagaatctgctcaaacaagacgtaataccgttcttcagcagatgtatcaagataaaaacatttctaaaaaggaatacgaccaagctgttgcaactccagtaactgatggcttaaaagaattaaagcaaaaatctacttatccaaaatatatggataactacttaaaacaagttattagtgaagttaaacaaaaaactggtaaagatatctttactgctgggctaaaagtgtatactaatatcaacactgatgcacaaaaacaactatatgacatctacaacagtgacacttacatcgcttatccaaacaatgaattacaaatagcatctaccatcatggatgcgactaatggtaaagtcattgcacaattaggcgggcgtcatcagaatgaaaatatttcatttgggacaaatcaatctgtcttaacagaccgcgattggggttctacaatgaaacctatctcagcttatgcacctgctattgatagtggtgtctataattcaacaggtcaatcattaaacgactcagtttactactggcctggtacttctactcaactatatgactgggatcgtcaatatatgggttggatgagtatgcagaccgctattcaacaatcacgtaacgtccctgctgtcagagcacttgaagccgctggattagacgaagcaaaatctttccttgaaaaattaggcatatactatccagaaatgaactattcaaatgctatttcaagtaacaacagtagcagtgatgcaaaatatggtgcaagtagtgagaaaatggcagcggcttactcggcttttgcaaacggcggaacttactataaaccgcaatatgttaataaaattgaatttagcgatggaaccaatgatacttatgcagcgtctggtagccgtgcgatgaaagagactactgcctacatgatgacggatatgctgaaaacagtactaacatttggtactggtactaaagcagctatccctggtgttgcacaagctggtaagactggtacttccaactatacggaagatgagttagctaaaattgaagcaactactggtatctacaatagcgccgttggtacaatggctcctgatgaaaactttgtcggctatacttctaagtacacaatggcaatttggactggttataaaaatcgccttacaccactttatggtagccaactggatattgctactgaggtttatcgtgcaatgatgtcctacctaactggcggatacagtgcagattggacaatgccagaagggctctatcgaagcggaagctacttgtatatcaatgggacaactacaaccggcacttactcttcttctgtctataagaatatctatcaaaattctggacagtcaagtcaaagcagtagttcaacatcctctgagaaacaaaaagaggataagaatacagcaaatgatgccaattcatcatccccacaagtcgaaacacctaataatggtaatgctactacccctaataattccaatcaaactgtgccaggaactggacatggtaatggtaatggtaatggtaacaacaatacagtacctaacggtaat

SEQ ID NO: 9534 - protein, 730 aa, Streptococcus agalactiae
MGFIILAIVIGGLLFAYYVSRSPKLTDQALKSVNSSLVYDGNNKLIADLGSEKRESVSADSIPLNLVNAITSIEDKRFFKHRGVDIYRILGAAWHNLVSSNTQGGSTLDQQLIKLAYFSTNKSDQTLKRKSQEVWLALQMERKYTKEEILTFYINKVYMGNGNYGMRTTAKSYFGKDLKELSIAQLALLAGIPQAPTQYDPYKNPESAQTRRNTVLQQMYQDKNISKKEYDQAVATPVTDGLKELKQKSTYPKYMDNYLKQVISEVKQKTGKDIFTAGLKVYTNINTDAQKQLYDIYNSDTYIAYPNNELQIASTIMDATNGKVIAQLGGRHQNENISFGTNQSVLTDRDWGSTMKPISAYAPAIDSGVYNSTGQSLNDSVYYWPGTSTQLYDWDRQYMGWMSMQTAIQQSRNVPAVRALEAAGLDEAKSFLEKLGIYYPEMNYSNAISSNNSSSDAKYGASSEKMAAAYSAFANGGTYYKPQYVNKIEFSDGTNDTYAASGSRAMKETTAYMMTDMLKTVLTFGTGTKAAIPGVAQAGKTGTSNYTEDELAKIEATTGIYNSAVGTMAPDENFVGYTSKYTMAIWTGYKNRLTPLYGSQLDIATEVYRAMMSYLTGGYSADWTMPEGLYRSGSYLYINGTTTTGTYSSSVYKNIYQNSGQSSQSSSSTSSEKQKEDKNTANDANSSSPQVETPNNGNATTPNNSNQTVPGTGHGNGNGNGNNNTVPNGN

SEQ ID NO: 9535 - DNA, 330 bp, Streptococcus agalactiae
atggcaagtattatttatagcccaaaagatatttttgagcaagattttaaagttagtatgcggggatatgacaagaaagaagtcgatgtatttctggatgatgtcatcaaagattacgaaaattatcttgagcaaattgagaagctccaaatggaaaatagacgtctacaacaagctttagacaaaaaagaaagcgaagcttcaaatgtaagaaattcagggacagctatgtataatcaaaaaccgattgcccaatctgcaaccaattttgatattttaaaacgcattagccgccttgagaaagaagtttttggaagacaaattagagaa

SEQ ID NO: 9536 - protein, 110 aa, Streptococcus agalactiae
MASIIYSPKDIFEQDFKVSMRGYDKKEVDVFLDDVIKDYENYLEQIEKLQMENRRLQQALDKKESEASNVRNSGTAMYNQKPIAQSATNFDILKRISRLEKEVFGRQIRE

SEQ ID NO: 9537 - DNA, 906 bp, Streptococcus agalactiae
atgattgcctggtctacaatgttgacatatattttctacatgacaatttttataaatagtggtttcatctggtatatttactttctgagtaatttactcgtctatcgctttagagataaattgaagtcttttagattcattagttttgcttgtactctagccacagtggtatttttatgcttctttaaggcatcagactttggtgatagaatcatgtttctaattgttcctattttttgtatcggttacatgtggattgctattgaaaatagaaatagcgaagaacaaagagaaaaaattgcagagcaaaatcagtatatcaatattttgtcagctgaaaatgaacgtaaccgtatagggcgtgatttgcatgatagtttaggacatacatttgctatgatgacactaaagacagaactagcgttaaagttgttagaaaaaaggaactatgataaggtacaaaaagaactatcagaattaaatcatattagtcatcaatcgatgagtgaggtccgtcaaattgtttctaacctcaagtatcgtacagtagtggaagaaattgatgagttgtaccgcttgtttcaattatctaacattaagttaacagttgttaataagttagagacgtcacaactaagtccagtaacacaatctacaatcacaatgatattaaaggaattatccaataatattgttaagcatgctgaagctgatagcgtggagttgagtttagtaaggcaaggtgctactataaatattgagatgattgataatggttgtggttttacaaaccttgacggagatgagttgcatagtattcaagagagattaactatcgttgaagggacactaacgattttgtcccgaagtaaaccaactcatattcaggtggtattgaaagaggta

SEQ ID NO: 9538 - protein, 302 aa, Streptococcus agalactiae
MIAWSTMLTYIFYMTIFINSGFIWYIYFLSNLLVYRFRDKLKSFRFISFACTLATVVFLCFFKASDFGDRIMFLIVPIFCIGYMWIAIENRNSEEQREKIAEQNQYINILSAENERNRIGRDLHDSLGHTFAMMTLKTELALKLLEKRNYDKVQKELSELNHISHQSMSEVRQIVSNLKYRTVVEEIDELYRLFQLSNIKLTVVNKLETSQLSPVTQSTITMILKELSNNIVKHAEADSVELSLVRQGATINIEMIDNGCGFTNLDGDELHSIQERLTIVEGTLTILSRSKPTHIQVVLKEV

SEQ ID NO: 9539 - DNA, 1887 bp, Streptococcus agalactiae
atggcggatgtttatctagctcgagatctaattttagataatgaagaggtcgcaataaaagtattgcgaaccaattatcaaacagatcagattgcggttgctcgcttccagagagaagcacgagcaatggctgagctgacacatcctaatattgtcgctattcgtgatataggtgaagaagacggacagcagttcttagtaatggaatatgttgatggattcgatttaaaaaagtatattcaagacaatgcacccctatcaaataatgaagttgttcgaatcatgaatgaagtcctttcagccatgtcactggcacatcagaaaggtatcgtacaccgtgatttaaaacctcaaaatattttattaactaaaaaagggactgtaaaagttacagatttcggtattgcggtagcgtttgctgaaactagtttaacgcaaacgaattctatgttaggtagtgttcattatttatcgccagagcaggcgcgtggttcaaaagcgactgttcagagtgatatttatgccatgggaatcatgctttttgaaatgttaactggccatattccttatgatggggatagtgcagttactattgccctacagcacttccaaaaaccactaccatcaatccttgcagaaaataaaagcgttccacaagctttggaaaacattgtcattaaagcaacagctaaaaagctaacagatcgctataagacaacttatgagatgggacgtgatttatcaactgctctaagctcgacacgtcaccgtgaaccaaaacttgtttttaatgatactgagagtactaagacactacccaaagtaacatctacagtatcatctctaacgacagaacaactgttgcgtaatcaaaaacaggccaaaacaacagaaaaaataactcctgattctgcgagtaacgataaaacgaagtctaaaaagaaggcttctcatcgacttcttggtacaatcatgaaattattctttgcactctgtgttgtaggaataattgtatttgcttataaaattttagtaagtcctacgactattcgtgttccagatgttagcaacaaaacagtagctcaagcaaaaatgacattggaaaattctggattgaaagtaggagctattcgtaatattgagagtgatagtgtttcagaaggacttgtcgtaaaaacagaccctgctgcaggacgttctcgcagagaaggggctaaagttaatctttatattgccactccaaacaagagtttcactctaggtaattataaggaacataattacaaagatatcctcaaagatcttcaaggcaaaggtgttaaaaaatctttaatcaaggttaagcgtaaaattaataatgattatactactggtacaatcttagcacagtcgcttccagaaggaacatcttttaatcctgatggtaataagaaattaacacttacggttgctgttaatgatccaatgattatgcctgatgtaacaggtatgactgttggagaagtaatagaaaccttgacagacctcggattagatgcagataatcttgtcttctatcaaatgcaaaatggcgtttatcaaacagtagtaacacctccatcttcaagtaagatagcaagtcaggatccttattacggaggagaagttggattaaggagaggagataaagttaagctgtatcttcttggttctaaaacaacgaataactcatcatctacgccaatagattcttcggcttcaagctcaacaggaacaactacctcggattctgtaagctcatcaacggatgctagcacttctgatagtagtagcacttctacaagtagttcaacactaccaagtgatagtacaactaatacaggaacagctaacaatccattaactcaa

SEQ ID NO: 9540 - protein, 629 aa, Streptococcus agalactiae
MADVYLARDLILDNEEVAIKVLRTNYQTDQIAVARFQREARAMAELTHPNIVAIRDIGEEDGQQFLVMEYVDGFDLKKYIQDNAPLSNNEVVRIMNEVLSAMSLAHQKGIVHRDLKPQNILLTKKGTVKVTDFGIAVAFAETSLTQTNSMLGSVHYLSPEQARGSKATVQSDIYAMGIMLFEMLTGHIPYDGDSAVTIALQHFQKPLPSILAENKSVPQALENIVIKATAKKLTDRYKTTYEMGRDLSTALSSTRHREPKLVFNDTESTKTLPKVTSTVSSLTTEQLLRNQKQAKTTEKITPDSASNDKTKSKKKASHRLLGTIMKLFFALCVVGIIVFAYKILVSPTTIRVPDVSNKTVAQAKMTLENSGLKVGAIRNIESDSVSEGLVVKTDPAAGRSRREGAKVNLYIATPNKSFTLGNYKEHNYKDILKDLQGKGVKKSLIKVKRKINNDYTTGTILAQSLPEGTSFNPDGNKKLTLTVAVNDPMIMPDVTGMTVGEVIETLTDLGLDADNLVFYQMQNGVYQTVVTPPSSSKIASQDPYYGGEVGLRRGDKVKLYLLGSKTTNNSSSTPIDSSASSSTGTTTSDSVSSSTDASTSDSSSTSTSSSTLPSDSTTNTGTANNPLTQ

SEQ ID NO: 9541 - DNA, 930 bp, Streptococcus agalactiae
atggaagggaaaagccaatctgagattgccaatgaattaggaatttatcgtacaacaataagtcgtatgttagccaaagcgagagaagaaggtcttgttagaatcgaaatttcagattttaatccagaaatttttcagttagaatcctattttaaaagtaaatatcaccttaaagatattgagattgtttcttcgcgaaaagatagcgatacttcagagatagagaaggatttagcacatgtagctgcagctatgattcgaaaaaaaattaaagagaatgacaaggtggggattgcttgggggaggacacttagtaaagtagttgaagcaatgcgtcctcatccggtttctcaagtttcttttgttcctttggccggaggtccaagtcatattaatgcacgctatcacgttaatactctggtttacgaaatgtcaaggcgtttccaaggaagttgtactttcattaatgcaactctagttcaagaaaacgctaatttagcgaaaggaatattaacttcaaaatattttgaggggctaatggataattgggaaaaacttgatgtggcaattgtgggcgttggtggtaaacctaaaagcaatgaacaacagtggcttgaccttttaaatcaagatgattttcaatgcttggatgaagaagcagctgtaggtgaaattacttgtcgtttttttaatcattcaggtgatcctgtgaatcaacatttagctaaaaggacaataggaattaccttagaacaactacagaaagttcctaatagaatagcggttgctcatggcaattataaggctgcggcactcttagccgttttaaaaaaggggtatattaatcatttagttactgatttttccacagccttaaatattttaagattagataaagacacctttgtggatactatatatcaaaagagc

SEQ ID NO: 9542 - protein, 310 aa, Streptococcus agalactiae
MEGKSQSEIANELGIYRTTISRMLAKAREEGLVRIEISDFNPEIFQLESYFKSKYHLKDIEIVSSRKDSDTSEIEKDLAHVAAAMIRKKIKENDKVGIAWGRTLSKVVEAMRPHPVSQVSFVPLAGGPSHINARYHVNTLVYEMSRRFQGSCTFINATLVQENANLAKGILTSKYFEGLMDNWEKLDVAIVGVGGKPKSNEQQWLDLLNQDDFQCLDEEAAVGEITCRFFNHSGDPVNQHLAKRTIGITLEQLQKVPNRIAVAHGNYKAAALLAVLKKGYINHLVTDFSTALNILRLDKDTFVDTIYQKS

SEQ ID NO: 9543 - DNA, 321 bp, Streptococcus agalactiae
atggaaatcatagtcgcagaccaaattattatggggctcattttgaatgctggggatgctaaacaacatatctatcaagccttaaaacttgcaaaagaaggaaattttgcagaaagtaagattgaaatagaactagcagatagtgcactcctagaagctcataatcttcaaacacaattccttgcacaagaagcaggagggacaaggacagatatctcagcactctttattcattctcaggatcatttgatgacaagtattactgagattaacttgattaaagaaattattgatttacgccaggaattacatattcaaaaa

SEQ ID NO: 9544 - protein, 107 aa, Streptococcus agalactiae
MEIIVADQIIMGLILNAGDAKQHIYQALKLAKEGNFAESKIEIELADSALLEAHNLQTQFLAQEAGGTRTDISALFIHSQDHLMTSITEINLIKEIIDLRQELHIQK

SEQ ID NO: 9545 - DNA, 1086 bp, Streptococcus agalactiae
atgaaagttttcgcaagtccatcgcgctatatacaaggaaaggatgctttattccaaagtattgaacatatcaaatctttaggtcagactccacttatcctttgtgatgatgttgtttataatatcgttggagaaaggtttttatcttatctacaagacgatttgttaccacatcgtgtttcctttaacggagaagcatctgataatgaaatcaatcgtgtcgttgctgttgcgaaagaaaagaatagtgaccttattattggacttggtggtggaaaaactattgactctgcaaaggcaattgcagataaagttaatttaccagtggtcattgcaccaacagtagcttcaacagatgccccaacatcagcgttatcagtaatctatacagatgaaggagcttttgaaaaatatattttttattcaaagaatccagacttagttttagttgatactcaagtaattgcccaagcgccaaaacgtttactagcttctgggatagcagatggcttagctacttgggttgaagcgagagcagtcttacaaaaaaatgggatagcgatggctggcggtagacagactttagcgggcgtggcaattgcccaagcatgtgagcgtactttatttaatgatagtttacaagctttagcggcttgtgatgccaaagtggttacaaaagctttagaaaatgttattgaagctaataccttacttagtggtttaggttttgaaagtgcaggattagctgcagctcatgctattcataatggttttactgccttgagtggagatattcatcacttaacccatggtgaaaaagttgcctatggaacgttgacgcaacttttcctcgaaaatagaccaaaggaagaaattgatcgctacattaatctttaccaagcgattggaatgccaactacacttgcagaactccatttgggtgatgcaacatatgaagaacttttaaaagttggtcagcaagcaacaattgaaggtgaaacaatacatgaaatgccattcaaaattagtgcagaggatgtcgctgcagccctgttaacggttgaccgttatgtttcaaatcatcaa

SEQ ID NO: 9546 - protein, 362 aa, Streptococcus agalactiae
MKVFASPSRYIQGKDALFQSIEHIKSLGQTPLILCDDVVYNIVGERFLSYLQDDLLPHRVSFNGEASDNEINRVVAVAKEKNSDLIIGLGGGKTIDSAKAIADKVNLPVVIAPTVASTDAPTSALSVIYTDEGAFEKYIFYSKNPDLVLVDTQVIAQAPKRLLASGIADGLATWVEARAVLQKNGIAMAGGRQTLAGVAIAQACERTLFNDSLQALAACDAKVVTKALENVIEANTLLSGLGFESAGLAAAHAIHNGFTALSGDIHHLTHGEKVAYGTLTQLFLENRPKEEIDRYINLYQAIGMPTTLAELHLGDATYEELLKVGQQATIEGETIHEMPFKISAEDVAAALLTVDRYVSNHQ

SEQ ID NO: 9547 - DNA, 1209 bp, Streptococcus agalactiae
atgacagatgctttgatacaatattatcaaaattatattaacggtaaagatattgttaaagaccaaacttggattatcaatcgttatcaagaaattattagtgatttgtctttaggaagcactattgcagaagaaattactcgctctatagagcagctagcttcacttcccatagaaaataatcagtttttatatgattgttttttagcagccggtgaagataacaacgcaaagttagttgcaacgttttttaatcaaaatgacattcctgcaagatatgttcatccaaacgaagcaggaattattgtaactaaagaaccatgtaatgcacgaattattccaggaagttatgataagattgagaacttatgtctatacaatgaggttcttgttatccctggattttttggagtcacagaagataaccaaatttgtaccttttcaagagggggatctgacattactggatccctaattgcagcaggcataaaagcagacctttatgagaacttcacagatgttgatggtatatttgcagcacatccaggtgtagttaagaaccctcacgctatccctgagcttacttataaagaaatgcgtgaattagcctatgcgggtttttcggttttacatgatgaagctttacttcctgcctatcgtggcagaatccctcttgttattaaaaatacaaataatccccaacagcctggtacaaaaatagttttaaagcatactcgtagtaacatagcagtaactgggatcgcttctgatagccgttttgctagcataaacgtatctaaatacttaatgaatagagaagtaggtttcggccgaaaagtactacaaattttagaggatttaaatattagttttgaacatatgccaactggcatagatgatctatccattgtcttacgtgaaaaagaattgacaccaatcaaagaacaagaaatcttaaattacctaactcgtaaactagaagtagattacgttgacatccaacacaatctatctacaatcgtaattgtaggtgaaaatatgaaaagtcagattggagtcactgcaacagcgacacaagccttatcaagagaaaaaatcaatatcaccatgatatcacaaggttcaagcgaagtctccattatgttcgttataaacagtaaggatgaaaaaagagctattaaagcactatatgaaacattcttccaaaaa

SEQ ID NO: 9548 - protein, 403 aa, Streptococcus agalactiae
MTDALIQYYQNYINGKDIVKDQTWIINRYQEIISDLSLGSTIAEEITRSIEQLASLPIENNQFLYDCFLAAGEDNNAKLVATFFNQNDIPARYVHPNEAGIIVTKEPCNARIIPGSYDKIENLCLYNEVLVIPGFFGVTEDNQICTFSRGGSDITGSLIAAGIKADLYENFTDVDGIFAAHPGVVKNPHAIPELTYKEMRELAYAGFSVLHDEALLPAYRGRIPLVIKNTNNPQQPGTKIVLKHTRSNIAVTGIASDSRFASINVSKYLMNREVGFGRKVLQILEDLNISFEHMPTGIDDLSIVLREKELTPIKEQEILNYLTRKLEVDYVDIQHNLSTIVIVGENMKSQIGVTATATQALSREKINITMISQGSSEVSIMFVINSKDEKRAIKALYETFFQK

SEQ ID NO: 9549 - DNA, 585 bp, Streptococcus agalactiae
gtgatgaaagctgctgttgagagcgatgatattagctcattaactaaaattgctgagttagttaatcagatatcgtatgatttactacagctagagaaacctgttgttatgtgtgtagatggggctgtagctggtgccgcagctaatattgcattagcagctgattttgttatcgcaagcaagaagagtaaatttatccaggcttttgtgggtgtcggtttagctccagatgcaggaggtttattgttacttagtaaatcaatcggtataactcgtgcagtgcaactagctttaactggagaaagcttatctgctgaaaaagctgaagctttgggaattgtttataaactttgtgaatcagataaaataggtaaaattaaggatcaactattaaagcgtttaagtagacattctataaactcatatcaagccataaaatcattagcttgggaagctgcttttaaagattgggaacaatataaaaagcttgaattacaactgcaagaatcattagcctttaagcaagattttaaagaaggtgttcgggcacacgctgatagaaggcgtcctaattttttaggcaaa

SEQ ID NO: 9550 - protein, 195 aa, Streptococcus agalactiae
MMKAAVESDDISSLTKIAELVNQISYDLLQLEKPVVMCVDGAVAGAAANIALAADFVIASKKSKFIQAFVGVGLAPDAGGLLLLSKSIGITRAVQLALTGESLSAEKAEALGIVYKLCESDKIGKIKDQLLKRLSRHSINSYQAIKSLAWEAAFKDWEQYKKLELQLQESLAFKQDFKEGVRAHADRRRPNFLGK

SEQ ID NO: 9551 - DNA, 222 bp, Streptococcus agalactiae
atggcagtatttgaaaaagtacaagaaattattgttgaagaacttggtaaagatgcagaagaagtaacgttgaacactacttttgacgatcttgatgctgattcgcttgatgttttccaagtgatttcagaaattgaagatgcatttgatatccaaattgagacagaagaaggactaaatactgttggtgatttagttgcttatgttgaagaaaaagtaaaa

SEQ ID NO: 9552 - protein, 74 aa, Streptococcus agalactiae
MAVFEKVQEIIVEELGKDAEEVTLNTTFDDLDADSLDVFQVISEIEDAFDIQIETEEGLNTVGDLVAYVEEKVK

SEQ ID NO: 9553 - DNA, 498 bp, Streptococcus agalactiae
ttggatattcaagagattaaggatttaatgactcaatttgatgagtcaagtctgagagaattttcattcaaaacaagtgacggtgagctgtcttttagtaaaaatgagggaaaagctccacttgtcccaactatgtctcctatgagtcatcaacctgaagcgactccaactatagcaactcctgtctctaatgaagcaggtgagcaaacgaaacaagctactgaagtagtttcagaaatcccagagtcgactgtgactgttgcagaaggtgacgttgtcgaaagtcctttagttggggttgcttatttagcttctggaccagataaacctaactttgtttcagtaggtgatagcgtgaagaagggacaaactttgatgattattgaggcaatgaaggtgatgaatgaagtgcctgccccccatgatggtgtagttactgaaattcttgtagccaatgaagaagttattgaatttggtaaaggattggtacgaatcaaa

SEQ ID NO: 9554 - protein, 166 aa, Streptococcus agalactiae
MDIQEIKDLMTQFDESSLREFSFKTSDGELSFSKNEGKAPLVPTMSPMSHQPEATPTIATPVSNEAGEQTKQATEVVSEIPESTVTVAEGDVVESPLVGVAYLASGPDKPNFVSVGDSVKKGQTLMIIEAMKVMNEVPAPHDGVVTEILVANEEVIEFGKGLVRIK

SEQ ID NO: 9555 - DNA, 615 bp, Streptococcus agalactiae
ttggcagggcgtcctgtgacgattgtcggtattcaaaaaggtaagaaccttcaagataatttagaccgtcattttggtcaaccacatcctgaaggttatcgtaaggctttacgtttaatgaaacaagctgagaagtttggaagacctgttataaccttcatcaatactgctggagcatatcctggggtaggtgctgaggagcgaggtcagggtgaagcaattgctagaaacctcttagaaatgagtgatttaaaagtccctattatagctattattattggtgaagggggttctggaggagcattagctttagctgttgccgataaggtttggatgttggaacatactgtttattctattttaagtcctgagggctttgcctctattttatggaaagatggtacaagaacaacagaagcagcacaattaatgaagatgactgctggagaactttaccatatggaagttgtagacaaagtaatccctgaacatggttatttttcaagtgagattgtcgatatgattaagacaagtttaatttcagagttagaagtgctctcacaattatctcttgaggatttattggaacaacgttaccaacgttttagaaaatat

SEQ ID NO: 9556 - protein, 205 aa, Streptococcus agalactiae
MAGRPVTIVGIQKGKNLQDNLDRHFGQPHPEGYRKALRLMKQAEKFGRPVITFINTAGAYPGVGAEERGQGEAIARNLLEMSDLKVPIIAIIIGEGGSGGALALAVADKVWMLEHTVYSILSPEGFASILWKDGTRTTEAAQLMKMTAGELYHMEVVDKVIPEHGYFSSEIVDMIKTSLISELEVLSQLSLEDLLEQRYQRFRKY

SEQ ID NO: 9557 - DNA, 630 bp, Streptococcus agalactiae
atgtatcaagaattaaatgattatttagaattccaatcaatgaagtatattatgcctgagaaggcaggcgctttaaaggacgatatgcaaacttttaaggcaaagggccaacttgctaggaatagctttacagagttatcaagagccttagaacaacgtatggatggctttaaaatgcaaagagtgagtaattgggctaatcaagctcaagtagggcgtccacatttttgggtttattatcgaaaggatacagaccaattagatgatgtggctgttgcgctaagggtttatggtgtaaaagatagttttggggttagccttgaggtaagctttgtagagaggcaaaaatctgataagacactcgagaagcaggctagagtgttatcgattccgattgcctctccattgtattttatggtccaaaggcaaggtgaaactcatcgagaagaaggcaatgaggaaaatcgtcaacgtttaatgcaagaaattaagtcagggaaggtaaggaaagtattggtaaaatatgacgttcttttgactgaaaaccagagcttagaaaatattctgcaacgattgttagaaggctttgagaaagtgttaccttactatcaagtttgtcaaactattagc

SEQ ID NO: 9558 - protein, 210 aa, Streptococcus agalactiae
MYQELNDYLEFQSMKYIMPEKAGALKDDMQTFKAKGQLARNSFTELSRALEQRMDGFKMQRVSNWANQAQVGRPHFWVYYRKDTDQLDDVAVALRVYGVKDSFGVSLEVSFVERQKSDKTLEKQARVLSIPIASPLYFMVQRQGETHREEGNEENRQRLMQEIKSGKVRKVLVKYDVLLTENQSLENILQRLLEGFEKVLPYYQVCQTIS

SEQ ID NO: 9559 - DNA, 990 bp, Streptococcus agalactiae
atgttcatgattgttattacgcatgttcttggaaaaggtggtctgagatcttcggttgagggacacgcagactcctattttatagtaacgtggattatccaagtcttagtttatggggccgttaactgttacgcactaataagtggttatgtgggaattaattcgcgttatcgttactcaaaattactgtctatctgggcacaggtttttttctacacctttacaataacagcactttttgcaatcacaggtcatgaagtgaccttgcttaattggagagatgcttttttccctattgtcagtgggcagtattggtacattactgcttactttggtctattggtttttatgcctgttattaataatggattaaatgccttgactgataaacaattaaaacaattggttttgttaatgtttattattttttcaattttaccagctgttttaaataatcgtgttccagaattttcattgagcaagggttttgaaatgacttggctactgattttatatattattggtgcctatttgaaacgtattgatttaaatatatttaaaacgtcatatttacttataatttatctattatcattggttgctacttatgccatgaagtttagcgttggtgatatttggtattggtatgtttcgcctactttaactttaggggcggtaagtttgtttatattatttgctagagcaagcattaagccctcgggattcttaaagaaaataattgttgtattagccccttcaaccttgggagtttatctctgtcatctccacccactaatagtaaaatattttgtaagagattttgcagagacgtttgtttatgagtccatttatctttacccatttttaattttaggagcagggattttaatttatttgttggcttttattgtagaacgtattagattacgaatatttaaagcaatccatttttctaactttttgagatggtttgatgacaagttcccatat

SEQ ID NO: 9560 - protein, 330 aa, Streptococcus agalactiae
MFMIVITHVLGKGGLRSSVEGHADSYFIVTWIIQVLVYGAVNCYALISGYVGINSRYRYSKLLSIWAQVFFYTFTITALFAITGHEVTLLNWRDAFFPIVSGQYWYITAYFGLLVFMPVINNGLNALTDKQLKQLVLLMFIIFSILPAVLNNRVPEFSLSKGFEMTWLLILYIIGAYLKRIDLNIFKTSYLLIIYLLSLVATYAMKFSVGDIWYWYVSPTLTLGAVSLFILFARASIKPSGFLKKIIVVLAPSTLGVYLCHLHPLIVKYFVRDFAETFVYESIYLYPFLILGAGILIYLLAFIVERIRLRIFKAIHFSNFLRWFDDKFPY

SEQ ID NO: 9561 - DNA, 300 bp, Streptococcus agalactiae
atggggaataaagttggaaaatttttagttggtgaccaggcattagaattctataacgataaaaatgtcaacgactatattcaaattccatggacatcaatcaatcaaattggagctaatgttagtcgaaaaaaaattagtcgtcactttgaggtctttacagaccaaggaaaatttttattcgcctctaaagactctggaacgatattaaagcatgcgagacgacatattggagacgataaagttgttaagcttcctaccctcatccagaccattttaaaaatattcaagtttaaaaaa

SEQ ID NO: 9562 - protein, 100 aa, Streptococcus agalactiae
MGNKVGKFLVGDQALEFYNDKNVNDYIQIPWTSINQIGANVSRKKISRHFEVFTDQGKFLFASKDSGTILKHARRHIGDDKVVKLPTLIQTILKIFKFKK

SEQ ID NO: 9563 - DNA, 723 bp, Streptococcus agalactiae
atgttaaaaattgaaaatgttacaggggggtatgttaatatcccagttttaaaaaatatttcttttgaagtaaatgatggagagttagttggattaattgggcttaatggtgcaggaaaatcaaccactattaacgagattattggtattttgagaccctatcaaggagatattacaattgatggtattagtcttgaagccgaccaagaactttatagaaagaaaataggctttattcctgagacaccaagtctctatgaggagctaactctcagggaacatttagaaacggtagctatggcgtatgatattgccaccgatgaagttatggcacgtgcgcaaaaactattagagatgtttcgtctaacagataaattagactggtttccaatgcatttttcaaagggaatgaaacaaaaggttatgattatttgtgcttttgttgtatctccaagtttatttattgttgatgaaccatttttaggtttggatccactagctatttcagatttgattaatcttctagcagaagaaaaagctaaagggaaatctattttgatgtcaacacacgtattagattctgccgaaaaaatgtgtgatcgttttgttattttacataaaggagaaatacgggcagttggaaccctagaggaattacgggctatttttggagacagtaatgctaatttaaatgacatctacatagctctgacaaaagaggtg

SEQ ID NO: 9564 - protein, 241 aa, Streptococcus agalactiae
MLKIENVTGGYVNIPVLKNISFEVNDGELVGLIGLNGAGKSTTINEIIGILRPYQGDITIDGISLEADQELYRKKIGFIPETPSLYEELTLREHLETVAMAYDIATDEVMARAQKLLEMFRLTDKLDWFPMHFSKGMKQKVMIICAFVVSPSLFIVDEPFLGLDPLAISDLINLLAEEKAKGKSILMSTHVLDSAEKMCDRFVILHKGEIRAVGTLEELRAIFGDSNANLNDIYIALTKEV

SEQ ID NO: 9565 - DNA, 1137 bp, Streptococcus agalactiae
atgctagaagccttccgtattttggaagaagaaaaacacattaataaagaagatattattgatgcagttactgagtcactaaaatctgcctataagcgtcgttatggtcaatcagaatcatgcgttattgaatttaacgagaagaaagcagactttaccgtctatactgttcgtgaagttgttgatgaagtttttgatagccgtttggaaattagcctaaaagatgcccttgctattagctcagcgtatgaacttggtgataagattcgctttgaggaatctgttacagaatttggacgcgtggcagctcagtcagcaaaacaaactattatggaaaaaatgcgtcgtcaaatgcgtgaagtaaccttcaatgaatacaaacaacacgaaggtgaaattatgactggtactgttgaacgatttgaccaacgttttatttatgtcaatctcggttcacttgaggcgcaattatcgcatcaagatcagattcctggagagagctttaaatctcatgatatgattgatgtttatgtctataaagtggagaataatcctaaaggagtcaacgtttttgttagccgtagtcatccagagtttatcaaacgcattatggagcgagaaattccagaagtatttgatggaactgttgagattatgagcgtctctcgtgaggctggagatcgtactaaagttgctgtacgcagtcataattcaaacgttgatgcgattggaacaattgttggacgcggtggaagtaacattaaaaaagttatcagtaatttccatcctaaacgcgttgatgctaaaacaggattggagatcccggttgaagaaaacattgatgttattcaatgggttgaagatccagcggaattcatttacaatgctattgcaccagccgaagttgatatggtactttttgatgatgaagatacaaaacgtgctactgtagttgttccagatagcaagttatcgctagctattggtcgccgaggacaaaatgtgcgtttagcagctcatttgactggctatcgtattgatattaaatctgcaagtgaatacgaaaaaatggaagcgcaagaacttcaaactgaggaagtagctcaagaatctgaagttatttcagataaggcagaa

SEQ ID NO: 9566 - protein, 379 aa, Streptococcus agalactiae
MLEAFRILEEEKHINKEDIIDAVTESLKSAYKRRYGQSESCVIEFNEKKADFTVYTVREVVDEVFDSRLEISLKDALAISSAYELGDKIRFEESVTEFGRVAAQSAKQTIMEKMRRQMREVTFNEYKQHEGEIMTGTVERFDQRFIYVNLGSLEAQLSHQDQIPGESFKSHDMIDVYVYKVENNPKGVNVFVSRSHPEFIKRIMEREIPEVFDGTVEIMSVSREAGDRTKVAVRSHNSNVDAIGTIVGRGGSNIKKVISNFHPKRVDAKTGLEIPVEENIDVIQWVEDPAEFIYNAIAPAEVDMVLFDDEDTKRATVVVPDSKLSLAIGRRGQNVRLAAHLTGYRIDIKSASEYEKMEAQELQTEEVAQESEVISDKAE

SEQ ID NO: 9567 - DNA, 348 bp, Streptococcus agalactiae
atggctaatcatcgtattgatcgcgttggaatggaaattaaacgtgaagtcaatgagattttgcgtctccgagttaatgatccacgtgtacaagatgtcacaattactgatgttcagatgttgggtgacctttcaatggctaaagtattttatactattcattcgacacttgcttctgataatcaaaaagcacaaattggtttagaaaaagcaactggtactattaagcgtgaacttggcaaaaaccttactatgtataaaataccagatttacaatttgttaaagatgaatctattgaatacggaaataagattgatgaaatgttgcgcaatctagataaaaaagat

SEQ ID NO: 9568 - protein, 116 aa, Streptococcus agalactiae
MANHRIDRVGMEIKREVNEILRLRVNDPRVQDVTITDVQMLGDLSMAKVFYTIHSTLASDNQKAQIGLEKATGTIKRELGKNLTMYKIPDLQFVKDESIEYGNKIDEMLRNLDKKD

SEQ ID NO: 9569 - DNA, 810 bp, Streptococcus agalactiae
atgataaaattaattgctattgatatggatggaacgcttttaaatgatgaaaagaaaattccaaaggaaaatatccaagctattaaagaagcaactcaagcaggtattaaaattgtactgtgtactgggcgaccgatgtcaggtatacttccttattttaatgaactaggtttaacaaaagaggagtatattatcatgaataatggttgtagcacttatagcacgaaagattggcaattgattgattctgcaactttaacacatgatgaactcatctttcttgaggaggttgttaaagaatttcccaacgtttgtttaacattaacagctgaaaatacattttacgctgttggagaggaagttcctgaaattgttgcttatgatgctgatttagtttttacaaaagcaaagtcaacaagtttagatgctcttcgcaatcaagaagaaattgtctttcaagcaatgtacatgggattagatgcagatgtaactgcttttcaagaagctgttgaagaagccttaatctcgaaatttagtggagttcgaagccaagactatatttatgagattatgcctcaaggagtaacaaaagcaagaggcttaaaatccttgatagcaaaattaggactggatattaatcaagttatggccatcggtgatgctcctaacgatattgaattattagatttagttcccaatagcgttgctatggggaatgcatcagatgagattaaatctagatgtaaatatataacggtggataataacaaagcaggggttgctaaagctatttatgactatgctttacgt

SEQ ID NO: 9570 - protein, 270 aa, Streptococcus agalactiae
MIKLIAIDMDGTLLNDEKKIPKENIQAIKEATQAGIKIVLCTGRPMSGILPYFNELGLTKEEYIIMNNGCSTYSTKDWQLIDSATLTHDELIFLEEVVKEFPNVCLTLTAENTFYAVGEEVPEIVAYDADLVFTKAKSTSLDALRNQEEIVFQAMYMGLDADVTAFQEAVEEALISKFSGVRSQDYIYEIMPQGVTKARGLKSLIAKLGLDINQVMAIGDAPNDIELLDLVPNSVAMGNASDEIKSRCKYITVDNNKAGVAKAIYDYALR

SEQ ID NO: 9571 - DNA, 438 bp, Streptococcus agalactiae
atggtttatcattttcaaaatccaagtgattttatgttaaaaaattatttaacaaaagcaaagaccatcgcagttgtaggactgtcagaccgtcaagaaactgcagcttatcaagtatcaaaaataatgcaagaagcaggttatcaaattattccagttaatcctaaaaatgcaggacagaaaatacttgggcaaatgacatatgcctcacttaaggatgtcactgaacatattgatattgttaatatttttcgacgtagcgagtatttacctgatattgcaagagaatttttagaagtagacgctgatattttctgggctcagcttggacttgaaagtcaagaagcagagacaattctaaagcaagcaggacacaaacagattgtcatgaataaatgtctgaaagttgaatgccaaaaattacactcagaaactaac

SEQ ID NO: 9572 - protein, 146 aa, Streptococcus agalactiae
MVYHFQNPSDFMLKNYLTKAKTIAVVGLSDRQETAAYQVSKIMQEAGYQIIPVNPKNAGQKILGQMTYASLKDVTEHIDIVNIFRRSEYLPDIAREFLEVDADIFWAQLGLESQEAETILKQAGHKQIVMNKCLKVECQKLHSETN

SEQ ID NO: 9573 - DNA, 477 bp, Streptococcus agalactiae
atggacagtcattcacatggtcatagacctctcgatgcttatgaaaacgtcctagagcatctccgtgaaaaacgtattcgaattactgagactcgaaaagctattatttcctatatggttaatagtcgtgagcatccgagtgcagaaaagatttacaatgatttattaccagaatatcctaacatgagcttggcaacagtttacaataaccttaaggtccttgtggatgaggggtttgtgacagagctaaaactttgcaattatagtacaacttattatgattttatggggcatcagcacctaaacattgcctgtgaagattgtgggaaaatcgttgattttgtcgatgttgacttattggatatttctagagaagcacaccaacaaacaggttttgaagtgactagagttcagttagtagcttatggtatctgtccggagtgtcagaggaagcgtaaggataaatataaaaaagat

SEQ ID NO: 9574 - protein, 159 aa, Streptococcus agalactiae
MDSHSHGHRPLDAYENVLEHLREKRIRITETRKAIISYMVNSREHPSAEKIYNDLLPEYPNMSLATVYNNLKVLVDEGFVTELKLCNYSTTYYDFMGHQHLNIACEDCGKIVDFVDVDLLDISREAHQQTGFEVTRVQLVAYGICPECQRKRKDKYKKD

SEQ ID NO: 9575 - DNA, 738 bp, Streptococcus agalactiae
atgacgaattcagaaattaaaaatgaggcaaaaactatattaagcaatcttcaaggtaagaatcaactttttttactcccgattctccttagtattattacgttatatatatcattttattatcaatataataatatgacactacttgatttttttgtacctcttccagtttatttcttttacacactttttattatttcagtcagttttgtaatgttagatgtcgtcaaaaatcagaaactaaacgttagattctcggacaatacttatgtattttcaagccatattttctggaaattactctcagtacttgttctaaaaggactaattttatctttcttttatctactaagtacttttggtctactaatcatcatttcaagttttaggctacttttgagtggtaaccttatccttgcccctgttttaatagttgttagtagcctaattactactaaggcagttataaaactcgttcaacaatattactcctatagtatctcaactttagtattttacactcaattagaaagtggaaactatgagggaccgtctaaagtactggttgctagtcgagaactaatgaatggtaataaacttagactcttccttttagacttaagttttattggttggcagttccttacaatcttcagtttcggattagtctatatctatctccttccttaccaaactactgcgcgcttaatcttttatagaaacattacaaaaaatagc

SEQ ID NO: 9576 - protein, 246 aa, Streptococcus agalactiae
MTNSEIKNEAKTILSNLQGKNQLFLLPILLSIITLYISFYYQYNNMTLLDFFVPLPVYFFYTLFIISVSFVMLDVVKNQKLNVRFSDNTYVFSSHIFWKLLSVLVLKGLILSFFYLLSTFGLLIIISSFRLLLSGNLILAPVLIVVSSLITTKAVIKLVQQYYSYSISTLVFYTQLESGNYEGPSKVLVASRELMNGNKLRLFLLDLSFIGWQFLTIFSFGLVYIYLLPYQTTARLIFYRNITKNS

SEQ ID NO: 9577 - DNA, 1140 bp, Streptococcus agalactiae
atgactgatcatccaataaaatatcgattaattaaacaggaaaaacacacaggagccagacttggtgaaataatcacaccacatggtacatttccgacaccaatgtttatgcctgttgggacacaagcaactgttaagacacaatctcctgaagaactaaaagaaatgggttcaggaattattctatcaaatacctaccatttatggttacgtccaggtgatgaattgattgctaaagctggaggtttacataaattcatgaactgggatcaggctattctaacagacagtggaggctttcaggtttattctttggctgatagtcgaaacatcactgaagaaggagtaacctttaaaaaccatttaaatggtgcgaaaatgtttttatcaccagaaaaagctatttcaattcaaaataaccttggttctgatattatgatgagttttgatgagtgtccacaattttaccagccttatgattatgtaaaaaaatcaattgagcgaacaagccgttgggcagaacgtggattaaatgcccaccgccgtcctcatgatcaaggactatttggtattgttcaaggggcagggtttgaggatttacgtcgtcaatcagcacgagatttagtatcgatggattttccaggttattcaattggagggcttgcggtcggagaaacacatgatgagatgaatgcagttcttgattttactgttccaatgcttccgaatgataagcctcgttatttgatgggagttggtgcaccagatagtttaatagacgccgttatccgaggagtagatatgtttgattgcgtcttacctactcgtattgctcgaaatgggacatgtatgacaagtcaaggtcgcttagttgttaagaatgctaaatttgcagaagattttacgcctcttgatccaaattgcgattgctatacttgtaaaaattatacacgcgcttatattcgtcacttattgaaagcagatgaaacttttggtattcgtttgactagttaccataatctttatttccttgtcaatcttatgaaagatgtcagacaagctattatggatgataatcttctagaattccgtcaagattttatggagcgctatggctatggcatgaataaccgtaatttt

SEQ ID NO: 9578 - protein, 380 aa, Streptococcus agalactiae
MTDHPIKYRLIKQEKHTGARLGEIITPHGTFPTPMFMPVGTQATVKTQSPEELKEMGSGIILSNTYHLWLRPGDELIAKAGGLHKFMNWDQAILTDSGGFQVYSLADSRNITEEGVTFKNHLNGAKMFLSPEKAISIQNNLGSDIMMSFDECPQFYQPYDYVKKSIERTSRWAERGLNAHRRPHDQGLFGIVQGAGFEDLRRQSARDLVSMDFPGYSIGGLAVGETHDEMNAVLDFTVPMLPNDKPRYLMGVGAPDSLIDAVIRGVDMFDCVLPTRIARNGTCMTSQGRLVVKNAKFAEDFTPLDPNCDCYTCKNYTRAYIRHLLKADETFGIRLTSYHNLYFLVNLMKDVRQAIMDDNLLEFRQDFMERYGYGMNNRNF

SEQ ID NO: 9579 - DNA, 327 bp, Streptococcus agalactiae
ttgaaaaaaacctatcgggtaaaaagtgataaggattttcaaatgattttcagcagaggtaaaaatgttgctaatcgaaaatttgttatctactatttagaaaaagaacaaaaacactttcgtgtgggaatctctgttagtaagaaattaggaaatgctgttgttcgtaacgctattaaaagaaaaattaggcatgttttactctctcagaaaacagcgctgcaagattatgattttgtcgtgattgcgcgtaaaggtgtagaggaattggactatcaagcattagaaaaaaatcttatacacgttttaaaaatagcaggactcatc

SEQ ID NO: 9580 - protein, 109 aa, Streptococcus agalactiae
MKKTYRVKSDKDFQMIFSRGKNVANRKFVIYYLEKEQKHFRVGISVSKKLGNAVVRNAIKRKIRHVLLSQKTALQDYDFVVIARKGVEELDYQALEKNLIHVLKIAGLI

SEQ ID NO: 9581 - DNA, 3699 bp, Streptococcus agalactiae; identical to SEQ ID NO: 8525

SEQ ID NO: 9582 - protein, 1233 aa, Streptococcus agalactiae
MDKHHSKKAILKLTLITTSILLMHSNQVNAEEQELKNQEQSPVIANVAQQPSPSVTTNTVEKTSVTAASASNTAKEMGDTSVKNDKTEDELLEELSKNLDTSNLGADLEEEYPSKPETTNNKESNVVTNASTAIAQKVPSAYEEVKPESKSSLAVLDTSKITKLQAITQRGKGNVVAIIDTGFDINHDIFRLDSPKDDKHSFKTKTEFEELKAKHNITYGKWVNDKIVFAHNYANNTETVADIAAAMKDGYGSEAKNISHGTHVAGIFVGNSKRPAINGLLLEGAAPNAQVLLMRIPDKIDSDKFGEAYAKAITDAVNLGAKTINMSIGKTADSLIALNDKVKLALKLASEKGVAVVVAAGNEGAFGMDYSKPLSTNPDYGTVNSPAISEDTLSVASYESLKTISEVVETTIEGKLVKLPIVTSKPFDKGKAYDVVYANYGAKKDFEGKDFKGKIALIERGGGLDFMTKITHATNAGVVGIVIFNDQEKRGNFLIPYRELPVGIISKVDGERIKNTSSQLTFNQSFEVVDSQGGNRMLEQSSWGVTAEGAIKPDVTASGFEIYSSTYNNQYQTMSGTSMASPHVAGLMTMLQSHLAEKYKGMNLDSKKLLELSKNILMSSATALYSEEDKAFYSPRQQGAGVVDAEKAIQAQYYITGNDGKAKINLKRMGDKFDITVTIHKLVEGVKELYYQANVATEQVNKGKFALKPQALLDTNWQKVILRDKETQVRFTIDASQFSQKLKEQMANGYFLEGFVRFKEAKDSNQELMSIPFVGFNGDFANLQALETPIYKTLSKGSFYYKPNDTTHKDQLEYNESAPFESNNYTALLTQSASWGYVDYVKNGGELELAPESPKRIILGTFENKVEDKTIHLLERDAANNPYFAISPNKDGNRDEITPQATFLRNVKDISAQVLDQNGNVIWQSKVLPSYRKNFHNNPKQSDGHYRMDALQWSGLDKDGKVVADGFYTYRLRYTPVAEGANSQESDFKVQVSTKSPNLPSRAQFDETNRTLSLAMPKESSYVPTYRLQLVLSHVVKDEEYGDETSYHYFHIDQEGKVTLPKTVKIGESEVAVDPKALTLVVEDKAGNFATVKLSDLLNKAVVSEKENAIVISNSFKYFDNLKKEPMFISKKEKVVNKNLEEIILVKPQTTVTTQSLSKEITKSGNEKVLTSTNNNSSRVAKIISPKHNGDSVNHTLPSTSDRATNGLFVGTLALLSSLLLYLKPKKTKNNSK

SEQ ID NO: 9583 - DNA, 906 bp, Streptococcus agalactiae
atgaaaacgataaaagattggcaaataaatatttgcttagcgacctataatggtcaaaaataccttcgccagcaattagatagcataatacaacaaggttatactgactggatttgtttaataagggacgatggatctactgatgatacagtagctattattaaagaatatgttaatagagattcacgttttatatttattaattctaacgatgacagaaagttaggaagtcaccgcagtttttacgagttggttaactataaaaaagcagatttttatgttttctcagaccaggatgatgtttggaaagaaaatcgtttagaacgttaccttgaagaagcagagaaatttaaccaagaactaccattgcttgtttattcgaactggacttctgtagatgaaaaattaacagtattgaaagaacataatccagcaacagttattcaagaacaaattgcctttaaccaaataaatggtatggttatcatgatgaatcatgagttagcaaagctttgggaatatcgtcaaattggcgcccatgattcttatgttggaactctagcttacgccgttggaaatgtggcttatatttctgacagtacagtcctttggcgtagacaagtaggggcagagtcgctaaacaattacgggagacaatatggggtggctacgttttggcagatgataaatacttcttttgatcgtgcttcgcttatttttgctcaagtatccgataaaatgtccctggagcgtaaactcttctttagtcgttttatagaattaaaaaatgccaatctaatgagaaggatttatcttttatcaaaattaaaactccgtcggaaatcattgaaagaaacagttgctatgactatcctacttttaacaggttacggtaaaccaaaagca

SEQ ID NO: 9584 - protein, 302 aa, Streptococcus agalactiae
MKTIKDWQINICLATYNGQKYLRQQLDSIIQQGYTDWICLIRDDGSTDDTVAIIKEYVNRDSRFIFINSNDDRKLGSHRSFYELVNYKKADFYVFSDQDDVWKENRLERYLEEAEKFNQELPLLVYSNWTSVDEKLTVLKEHNPATVIQEQIAFNQINGMVIMMNHELAKLWEYRQIGAHDSYVGTLAYAVGNVAYISDSTVLWRRQVGAESLNNYGRQYGVATFWQMINTSFDRASLIFAQVSDKMSLERKLFFSRFIELKNANLMRRIYLLSKLKLRRKSLKETVAMTILLLTGYGKPKA

SEQ ID NO: 9585 - DNA, 396 bp, Streptococcus agalactiae
atgatacttgctggagtaactttagaaaatgtaaagtcaaatcaagaaggtatccagcaagccattggcatttgtaaaacacaacctgattttcgtttcgattacagtgccacttatcaagtagagacaagtgtccaagccccaaaagggttagaaattattaggatcccaagcgctacctatgcagtcatttctgttaaaggtccaatgccatcgagtcttcaagaaacatggcgaaaaataatacaaggattttttcaagagaataatctaaaaccagctaactcgccaaacttagaaatttattcatctcaacatccacaagatactgattatcaaatggaaatttggcttgctatcgcagatattactaataactcgaaaacaaacttaatc

SEQ ID NO: 9586 - protein, 132 aa, Streptococcus agalactiae
MILAGVTLENVKSNQEGIQQAIGICKTQPDFRFDYSATYQVETSVQAPKGLEIIRIPSATYAVISVKGPMPSSLQETWRKIIQGFFQENNLKPANSPNLEIYSSQHPQDTDYQMEIWLAIADITNNSKTNLI

SEQ ID NO: 9587 - DNA, 522 bp, Streptococcus agalactiae
atggtaaaagatagacaaattcagaaaacaaaagtagcgatttataatgcttttataagcttgctacaggaaaatgattattctaaaataacggttcaagatgtaatcggacttgcaaatgtaggaagatcaactttttactctcactatgaaagcaaagaagtgttactcaaggagctctgtgaagacctttttcaccacttatttaagcagggtagagatgttacgtttgaagagtatttagttcatatcttaaaacattttgaacaaaatcaagatagtatcgctacgttattattatctgacgatccctattttttattacgctttagaagtgaattagaacacgatgtttaccctagattgcgtgaggagtatattacaaaggtggacattcctgaagatttcttaaaacaatttcttttatccagttttatcgagaccttaaagtggtggcttcatcaaagacagaaaatgactgttgaagatttactaaaatattatttaactatggtagagagg

SEQ ID NO: 9588 - protein, 174 aa, Streptococcus agalactiae
MVKDRQIQKTKVAIYNAFISLLQENDYSKITVQDVIGLANVGRSTFYSHYESKEVLLKELCEDLFHHLFKQGRDVTFEEYLVHILKHFEQNQDSIATLLLSDDPYFLLRFRSELEHDVYPRLREEYITKVDIPEDFLKQFLLSSFIETLKWWLHQRQKMTVEDLLKYYLTMVER

SEQ ID NO: 9589 - DNA, 1191 bp, Streptococcus agalactiae
atgattgattttctactgttgaaatcattacacagtcttctaggtctaactattactgtttgtgatcaaaatttttctgttatcagagagtataaatccgagaaaactatttcacttttttacaatcattaccttattttaagtaactttagtaaaactcaacatgattttttatttcattatggctctttaggagaactttttcttgtccaccatattcaacaatattatattatcatcggtccctggcgtagcaatgttattgaccctttacttcttaagaaaaagctgactgaaacacaaatcaatgctagtgaacaagactactttattgatagactatcccaattacctttcttctcacttagtcaaatccgagaattactaatagtaaccaattattgtctaactggggttgtgaaagataaattatcagagcccttacattactacacgaaagggtggagcaactcctttgatctagataaaattaagcaattttctaaacagaatatgagttcttacaaatatcagtatcattttgaaaataatattctaaaagctgttaaatcaggtagtgaatttcttttgaaagaaacagtggaacaatttagcaattctatcgtacctataatcagtggagatgaattgcgatctgaaaaaaactactccatcatgatttatgatcgtctctcacaggctaccatccaagcaggacttgatatcgaaacagcttatcgagcacgagatcgttttataaaagaaaacgagtcaactataagtctaaatgaagttttaaaattacgtgatactgctatcttattctatactcaacaagttcattctttaaaaaaacatctcgaaacccctcattctcaaactattgtcgcagtgattcgatatcttgaaaataatctaaatcgctttattaaaacagaagaaatagctaaagaatgtcacatgagtgaatcgaagttacgaaaactatttaagcaagaaaaacacatcactattcaacaatattttctaaacttaaaaatcgaagctgctaagcaattactagatgaaaataagaaagtagaagaagtttccaatttacttggattttccacttcttctaatttttcaaggacatttaaaaaaatagtgggaattagcccactagaatataagcaaaagcctaagacaata

SEQ ID NO: 9590 - protein, 397 aa, Streptococcus agalactiae
MIDFLLLKSLHSLLGLTITVCDQNFSVIREYKSEKTISLFYNHYLILSNFSKTQHDFLFHYGSLGELFLVHHIQQYYIIIGPWRSNVIDPLLLKKKLTETQINASEQDYFIDRLSQLPFFSLSQIRELLIVTNYCLTGVVKDKLSEPLHYYTKGWSNSFDLDKIKQFSKQNMSSYKYQYHFENNILKAVKSGSEFLLKETVEQFSNSIVPIISGDELRSEKNYSIMIYDRLSQATIQAGLDIETAYRARDRFIKENESTISLNEVLKLRDTAILFYTQQVHSLKKHLETPHSQTIVAVIRYLENNLNRFIKTEEIAKECHMSESKLRKLFKQEKHITIQQYFLNLKIEAAKQLLDENKKVEEVSNLLGFSTSSNFSRTFKKIVGISPLEYKQKPKTI

SEQ ID NO: 9591 - DNA, 1362 bp, Streptococcus agalactiae
  misc_feature (1)..(1362): n = a, c, g, or t
atgtttagaaggtctaaaaataacagttatgatactttacagacgaaacaacggttttcaattaagaagtttaagtttggtgcagcttctgtactaattggtattagttttttaggaggttttactcaagggcaatttaatatttctacagatactgtgtttgcagctgaagtaatttcaggaagtgctgttacgttaaacacaaatatgactaaaaatgttcagaatggtagagcatatatagatttatatgatgtgaaaaatgggaaaatagatccattacaattaattacgttaaattcacctgatttaaaagctcagtatgtcattaggcaaggcggcaattatttcacacaaccttctgaattgactactgttggtgcagctagtattaattatacagtattgaagacagatggaagtcctcatacgaagcctgatggacaagtggatattgtaaacgtttcattgactatttacaattcttcagctttgagagataaaatagatgaagttaaaaagaaagcggaagaccctaaatgggacgagggaagtcgcgataaagttttgataagtttagatgatatcaaaacagatattgataataatcctaagacgcaatcagacattgccaataaaataactgaagttactaatttagaaaaaatactagtacctcgaatcccagatgccgataagaatgatccagcaggtaaagatcagcaagtcaatgtaggtgagacaccgaaggcagaagattctattggtaacttaccagatcttccgaaaggtacaacagtagcctttgaaactccagttgatacggcaacaccgggagacaaaccagcaaaagttgttgtgacttacccagatggttcaaaagatactgtagatgtgactgttaaggttgtcgatccacgtacagatgccgataagaatgatccagcaggtaaagatcagcaagtcaatgtaggtgagacaccgaaggcagaagattctattggtaacttaccagatcttccgaaaggtacaacagtagcctttgaaactccagttgatacggcaacaccgggagacaaaccagcaaaagttgttgtgacttacccagatggttcaaaagatactgtagatgtgactgttaaggttgtcgatccacgtacagatgccgataagaatgatccagcaggtaaagatcagcaagtcaatgtaggtgagacaccgaaggcagaagattctattggtaacttaccagatcttccgaaaggtacaacagtagcctttgaaactccagttgatacggcaacaccgggagacaaaccagcaaaagttgttgtgacttacccagatggttcaaaannnnnt

SEQ ID NO: 9592 - protein, 454 aa, Streptococcus agalactiae
  MISC_FEATURE (1)..(454): Xaa = Any Amino Acid
MFRRSKNNSYDTLQTKQRFSIKKFKFGAASVLIGISFLGGFTQGQFNISTDTVFAAEVISGSAVTLNTNMTKNVQNGRAYIDLYDVKNGKIDPLQLITLNSPDLKAQYVIRQGGNYFTQPSELTTVGAASINYTVLKTDGSPHTKPDGQVDIVNVSLTIYNSSALRDKIDEVKKKAEDPKWDEGSRDKVLISLDDIKTDIDNNPKTQSDIANKITEVTNLEKILVPRIPDADKNDPAGKDQQVNVGETPKAEDSIGNLPDLPKGTTVAFETPVDTATPGDKPAKVVVTYPDGSKDTVDVTVKVVDPRTDADKNDPAGKDQQVNVGETPKAEDSIGNLPDLPKGTTVAFETPVDTATPGDKPAKVVVTYPDGSKDTVDVTVKVVDPRTDADKNDPAGKDQQVNVGETPKAEDSIGNLPDLPKGTTVAFETPVDTATPGDKPAKVVVTYPDGSKXX

SEQ ID NO: 9593 - DNA, 4167 bp, Streptococcus agalactiae
atgtttagaaggtctaaaaataacagttatgatactttacagacgaaacaacggttttcaattaagaagtttaagtttggtgcagcttctgtactaattggtattagttttttaggaggttttactcaagggcaatttaatatttctacagatactgtgtttgcagctgaagtaatttcaggaagtgctgttacgttaaacacaaatatgactaaaaatgttcagaatggtagagcatatatagatttatatgatgtgaaaaatgggaaaatagatccattacaattaattacgttaaattcacctgatttaaaagctcagtatgtcattaggcaaggcggcaattatttcacacaaccttctgaattgactactgttggtgcagctagtattaattatacagtattgaagacagatggaagtcctcatacgaagcctgatggacaagtggatattgtaaacgtttcattgactatttacaattcttcagctttgagagataaaatagatgaagttaaaaagaaagcggaagaccctaaatgggacgagggaagtcgcgataaagttttgataagtttagatgatatcaaaacagatattgataataatcctaagacgcaatcagacattgccaataaaataactgaagttactaatttagaaaaaatactagtacctcgaatcccagatgccgataagaatgatccagcaggtaaagatcagcaagtcaatgtaggtgagacaccgaaggcagaagattctattggtaacttaccagatcttccgaaaggtacaacagtagcctttgaaactccagttgatacggcaacaccgggagacaaaccagcaaaagttgttgtgacttacccagatggttcaaaagatactgtagatgtgactgttaaggttgtcgatccacgtacagatgccgataagaatgatccagcaggtaaagatcagcaagtcaatgtaggtgagacaccgaaggcagaagattctattggtaacttaccagatcttccgaaaggtacaacagtagcctttgaaactccagttgatacggcaacaccgggagacaaaccagcaaaagttgttgtgacttacccagatggttcaaaagatactgtagatgtgactgttaaggttgtcgatccacgtacagatgccgataagaatgatccagcaggtaaagatcagcaagtcaatgtaggtgagacaccgaaggcagaagattctattggtaacttaccagatcttccgaaaggtacaacagtagcctttgaaactccagttgatacggcaacaccgggagacaaaccagcaaaagttgttgtgacttacccagatggttcaaaagatactgtagatgtgactgttaaggttgtcgatccacgtacagatgccgataagaatgatccagcaggtaaagatcagcaagtcaatgtaggtgagacaccgaaggcagaagattctattggtaacttaccagatcttccgaaaggtacaacagtagcctttgaaactccagttgatacggcaacaccgggagacaaaccagcaaaagttgttgtgacttacccagatggttcaaaagatactgtagatgtgactgttaaggttgtcgatccacgtacagatgccgataagaatgatccagcaggtaaagatcagcaagtcaatgtaggtgagacaccgaaggcagaagattctattggtaacttaccagatcttccgaaaggtacaacagtagcctttgaaactccagttgatacggcaacaccgggagacaaaccagcaaaagttgttgtgacttacccagatggttcaaaagatactgtagatgtgactgttaaggttgtcgatccacgtacagatgccgataagaatgatccagcaggtaaagatcagcaagtcaatgtaggtgagacaccgaaggcagaagattctattggtaacttaccagatcttccgaaaggtacaacagtagcctttgaaactccagttgatacggcaacaccgggagacaaaccagcaaaagttgttgtgacttacccagatggttcaaaagatactgtagatgtgactgttaaggttgtcgatccacgtacagatgccgataagaatgatccagcaggtaaagatcagcaagtcaatgtaggtgagacaccgaaggcagaagattctattggtaacttaccagatcttccgaaaggtacaacagtagcctttgaaactccagttgatacggcaacaccgggagacaaaccagcaaaagttgttgtgacttacccagatggttcaaaagatactgtagatgtgactgttaaggttgtcgatccacgtacagatgccgataagaatgatccagcaggtaaagatcagcaagtcaatgtaggtgagacaccgaaggcagaagattctattggtaacttaccagatcttccgaaaggtacaacagtagcctttgaaactccagttgatacggcaacaccgggagacaaaccagcaaaagttgttgtgacttacccagatggttcaaaagatactgtagatgtgactgttaaggttgtcgatccacgtacagatgccgataagaatgatccagcaggtaaagatcagcaagtcaatgtaggtgagacaccgaaggcagaagattctattggtaacttaccagatcttccgaaaggtacaacagtagcctttgaaactccagttgatacggcaacaccgggagacaaaccagcaaaagttgttgtgacttacccagatggttcaaaagatactgtagatgtgactgttaaggttgtcgatccacgtacagatgccgataagaatgatccagcaggtaaagatcagcaagtcaatgtaggtgagacaccgaaggcagaagattctattggtaacttaccagatcttccgaaaggtacaacagtagcctttgaaactccagttgatacggcaacaccgggagacaaaccagcaaaagttgttgtgacttacccagatggttcaaaagatactgtagatgtgactgttaaggttgtcgatccacgtacagatgccgataagaatgatccagcaggtaaagatcagcaagtcaatgtaggtgagacaccgaaggcagaagattctattggtaacttaccagatcttccgaaaggtacaacagtagcctttgaaactccagttgatacggcaacaccgggagacaaaccagcaaaagttgttgtgacttacccagatggttcaaaagatactgtagatgtgactgttaaggttgtcgatccacgtacagatgccgataagaatgatccagcaggtaaagatcagcaagtcaatgtaggtgagacaccgaaggcagaagattctattggtaacttaccagatcttccgaaaggtacaacagtagcctttgaaactccagttgatacggcaacaccgggagacaaaccagcaaaagttgttgtgacttacccagatggttcaaaagatactgtagatgtgactgttaaggttgtcgatccacgtacagatgccgataagaatgatccagcaggtaaagatcagcaagtcaatgtaggtgagacaccgaaggcagaagattctattggtaacttaccagatcttccgaaaggtacaacagtagcctttgaaactccagttgatacggcaacaccgggagacaaaccagcaaaagttgttgtgacttacccagatggttcaaaagatactgtagatgtgactgttaaggttgtcgatccacgtacagatgccgataagaatgatccagcaggtaaagatcagcaagtcaatgtaggtgagacaccgaaggcagaagattctattggtaacttaccagatcttccgaaaggtacaacagtagcctttgaaactccagttgatacggcaacaccgggagacaaaccagcaaaagttgttgtgacttacccagatggttcaaaagatactgtagatgtgactgttaaggttgtcgatccacgtacagatgccgataagaatgatccagcaggtaaagatcagcaagtcaatggtaaaggaaataaactaccagcaacaggtgagaatgcaactccattctttaatgttgtagctttgacaattatgtcatcagttggtttattatctgtttctaagaaaaaagaggat

SEQ ID NO: 9594 - protein, 1389 aa, Streptococcus agalactiae
MFRRSKNNSYDTLQTKQRFSIKKFKFGAASVLIGISFLGGFTQGQFNISTDTVFAAEVISGSAVTLNTNMTKNVQNGRAYIDLYDVKNGKIDPLQLITLNSPDLKAQYVIRQGGNYFTQPSELTTVGAASINYTVLKTDGSPHTKPDGQVDIVNVSLTIYNSSALRDKIDEVKKKAEDPKWDEGSRDKVLISLDDIKTDIDNNPKTQSDIANKITEVTNLEKILVPRIPDADKNDPAGKDQQVNVGETPKAEDSIGNLPDLPKGTTVAFETPVDTATPGDKPAKVVVTYPDGSKDTVDVTVKVVDPRTDADKNDPAGKDQQVNVGETPKAEDSIGNLPDLPKGTTVAFETPVDTATPGDKPAKVVVTYPDGSKDTVDVTVKVVDPRTDADKNDPAGKDQQVNVGETPKAEDSIGNLPDLPKGTTVAFETPVDTATPGDKPAKVVVTYPDGSKDTVDVTVKVVDPRTDADKNDPAGKDQQVNVGETPKAEDSIGNLPDLPKGTTVAFETPVDTATPGDKPAKVVVTYPDGSKDTVDVTVKVVDPRTDADKNDPAGKDQQVNVGETPKAEDSIGNLPDLPKGTTVAFETPVDTATPGDKPAKVVVTYPDGSKDTVDVTVKVVDPRTDADKNDPAGKDQQVNVGETPKAEDSIGNLPDLPKGTTVAFETPVDTATPGDKPAKVVVTYPDGSKDTVDVTVKVVDPRTDADKNDPAGKDQQVNVGETPKAEDSIGNLPDLPKGTTVAFETPVDTATPGDKPAKVVVTYPDGSKDTVDVTVKVVDPRTDADKNDPAGKDQQVNVGETPKAEDSIGNLPDLPKGTTVAFETPVDTATPGDKPAKVVVTYPDGSKDTVDVTVKVVDPRTDADKNDPAGKDQQVNVGETPKAEDSIGNLPDLPKGTTVAFETPVDTATPGDKPAKVVVTYPDGSKDTVDVTVKVVDPRTDADKNDPAGKDQQVNVGETPKAEDSIGNLPDLPKGTTVAFETPVDTATPGDKPAKVVVTYPDGSKDTVDVTVKVVDPRTDADKNDPAGKDQQVNVGETPKAEDSIGNLPDLPKGTTVAFETPVDTATPGDKPAKVVVTYPDGSKDTVDVTVKVVDPRTDADKNDPAGKDQQVNVGETPKAEDSIGNLPDLPKGTTVAFETPVDTATPGDKPAKVVVTYPDGSKDTVDVTVKVVDPRTDADKNDPAGKDQQVNVGETPKAEDSIGNLPDLPKGTTVAFETPVDTATPGDKPAKVVVTYPDGSKDTVDVTVKVVDPRTDADKNDPAGKDQQVNVGETPKAEDSIGNLPDLPKGTTVAFETPVDTATPGDKPAKVVVTYPDGSKDTVDVTVKVVDPRTDADKNDPAGKDQQVNGKGNKLPATGENATPFFNVVALTIMSSVGLLSVSKKKED

SEQ ID NO: 9595 - DNA, 183 bp, Streptococcus agalactiae
ttgtataactattgtatcactaaatgcaatacaacgcaaacaaaaaaggaaatcgtctttcccaatgaagaggctctagaatactatctagtcacactatttaatgattacaacttcaagcaagaacaacgaatccacaaaggttttggccaatgtacagacacacttgaaagcctatttgat

SEQ ID NO: 9596 - protein, 61 aa, Streptococcus agalactiae
MYNYCITKCNTTQTKKEIVFPNEEALEYYLVTLFNDYNFKQEQRIHKGFGQCTDTLESLFD

SEQ ID NO: 9597 - DNA, 309 bp, Streptococcus agalactiae
atggcaaagcgtattaaaccgaataaaaaaagagagcttttgaaagctaaagggatcaattggaaggatgttcgactatctcaaactttacaagaagtcgcattaccgaaaaagacggctcctgaagcgccaaaggcagtcgatcttttagaaggtttaactgctaataaacaagatgttttaaaagaagctggccttgtcagccttgaagcatttgcgaaagtaagtgaagcagatgttttagcactaaaaggtattggtccagcagctattaaacagttagttgataatggtgttgtttttgcaaaa

SEQ ID NO: 9598 - protein, 103 aa, Streptococcus agalactiae
MAKRIKPNKKRELLKAKGINWKDVRLSQTLQEVALPKKTAPEAPKAVDLLEGLTANKQDVLKEAGLVSLEAFAKVSEADVLALKGIGPAAIKQLVDNGVVFAK

SEQ ID NO: 9599 - DNA, 576 bp, Streptococcus agalactiae
ttgaagtatatgcagattctagaagatttcgatggcaaagcattaccaaaactagaaacggatcggcttatcttgcgtcagcgaacggtgggggatgtcccagccatgtttgattacgtttgcttggaagaggttgcctatccagcaggactcagcccaatagcttctttagaagatgagtacgattattttgaaaatcgctactatcaaaatctggaaaaggcaaaattaccatctggttatggtattaccgttaaaggaagtgatcgtattatcggatcctgcgcctttaaccatcgccatgaagacgatgttttcgagatttgctatctgcttcatcctgactactggggtcatggctatatgacagaagctgtcgccgctttgattgaagtcggttttacccttctcaatctccacaaaatcgaaatccgctgctatgattacaataagcaaagccggcgcgtggcagaaaaactaggattcacccttgaagctaccattcgtgatcgtaaggataatcaagacaatcgctgtgtcaatttgatatatggtttgctgaggagtgagtgggag

SEQ ID NO: 9600 - protein, 192 aa, Streptococcus agalactiae
MKYMQILEDFDGKALPKLETDRLILRQRTVGDVPAMFDYVCLEEVAYPAGLSPIASLEDEYDYFENRYYQNLEKAKLPSGYGITVKGSDRIIGSCAFNHRHEDDVFEICYLLHPDYWGHGYMTEAVAALIEVGFTLLNLHKIEIRCYDYNKQSRRVAEKLGFTLEATIRDRKDNQDNRCVNLIYGLLRSEWE

SEQ ID NO: 9601 - DNA, 1173 bp, Streptococcus agalactiae
atgacccagtttaccacagaattacttaacttcctagctcaaaaacaagatattgatgaatttttccgttcgtctcttgaaactgccatgaatgaccttctccaagtggagctatccgccttccttggctatgaaccatacgataaggcaggttacaacaccggtaatagtcgtaatggtgcttatacacgtcgatttgagaccaagtatggtgttgttaatttgttgatccctagagatcgaaacggggagttcagtccagccttaatcccaagttacggtcgtcgagacaatcatttagaagaaatggttatcaagctttatcgaactggagtcacaacacgtgaaatcagcgacatcattgagcgtatgtatggtcatcattacagtccagcaacagtatctaatatctcgaaagcgacacaggaaaacgtggctagctttcatgaacgttccttagaagctaactataccgtattatatcttgatgggacttaccttcctctgagacgtggtacagttagtaaggaatgcatccacattgcactaggcgtcacatcatatgggcataaggctatccttggatatgacatcgcacccaatgaaaacaatgcttcgtggtcagaccttctagaaagatttaagggtcaaggtgtacaacaagtctctcttgttgtgagtgatggttttaatggacttgatcagcttatccagcaagccttcccaatggccaaacaacagcgttgccttgtccatattggccgaaatattgcaagtaaggtgaaacgagcagatcgtgctctaattttggagcagtttaaaacaatttatcgcgcgatcaatgtagaggaagcaaagcaagccttagatagctttatcaatgagtggaaaccacactacaagaaggtaatagagaccttagaatcaatcgaaaatctattgatcttttatgaatttcctcatcagatctggggaagtatctactcgaccaaccttattgaatcacttaacaaagaaatcaaacgtcaaaccaaaaagaaagtcgtctttcccaatgaagaatccctagaacgctatctcgtcacactatttagtgattacaacttcaagcaaggacaacgaatccacaaaggttttggccaatgtacggacacacttgaaagcctatttgat

SEQ ID NO: 9602 - protein, 391 aa, Streptococcus agalactiae
MTQFTTELLNFLAQKQDIDEFFRSSLETAMNDLLQVELSAFLGYEPYDKAGYNTGNSRNGAYTRRFETKYGVVNLLIPRDRNGEFSPALIPSYGRRDNHLEEMVIKLYRTGVTTREISDIIERMYGHHYSPATVSNISKATQENVASFHERSLEANYTVLYLDGTYLPLRRGTVSKECIHIALGVTSYGHKAILGYDIAPNENNASWSDLLERFKGQGVQQVSLVVSDGFNGLDQLIQQAFPMAKQQRCLVHIGRNIASKVKRADRALILEQFKTIYRAINVEEAKQALDSFINEWKPHYKKVIETLESIENLLIFYEFPHQIWGSIYSTNLIESLNKEIKRQTKKKVVFPNEESLERYLVTLFSDYNFKQGQRIHKGFGQCTDTLESLFD

SEQ ID NO: 9603 - DNA, 537 bp, Streptococcus agalactiae
atgagagtagtagcaggaacatttggagggcgtcctttaaaaacgcttgatggaaaaacaactcgtccaacaactgataaggttaaaggcgctatttttaatatgattggtcctttttttgaaggtggtcgtgttttagaccttttttctggcagtggtagcttagctattgaggcgatctcaaggggaatggaccaagctgtcctagttgaaaaagataggcgtgcgcaggtcgttattcaagaaaatattgcaatgactaagagtccggagcaatttcaattattaaaaatggaagccaaccgtgctttagaacaattaacgggacaatttgatttggtcttgttggacccgccatatgctaaggaagaaattgtaaagcaaatccaaatcatggatagcaagggtttattaggcgatgatatcatgattgcttgtgaaacggacaaatcagttgatttacctgaagaaattgcttcttttgggatatggaaacagaaaatttatggcatttctaaagtaacggtctacgttcgt

SEQ ID NO: 9604 - protein, 179 aa, Streptococcus agalactiae
MRVVAGTFGGRPLKTLDGKTTRPTTDKVKGAIFNMIGPFFEGGRVLDLFSGSGSLAIEAISRGMDQAVLVEKDRRAQVVIQENIAMTKSPEQFQLLKMEANRALEQLTGQFDLVLLDPPYAKEEIVKQIQIMDSKGLLGDDIMIACETDKSVDLPEEIASFGIWKQKIYGISKVTVYVR

SEQ ID NO: 9605 - DNA, 432 bp, Streptococcus agalactiae
atgctgttttacgcaggtgcagatgttgctattatcaattctggcttaattgttcagccatttgaaaaagacttttcgaggaaaaatctccacgaatcattacctcatcaaatgcgcctcgctaaattgacagtgagtagtcaagaacttttagagatttatgaaactatttatcaacaaggtcaatttttagcgcaacaaaagattcatggtatgggctttcgtggcaagtgctttggagaagttttacattcgggatttgattacaaaaatggaaaaatagtgtataatgagaaagatattgatgccaaagaagaagtgattcttgtaatcgttgatcagtattattttgcatcgtattttgagtgtttaaaaacgaaaaaagtagacttgcttttcctgaattactcagagatgtggcagcagattatt

SEQ ID NO: 9606 - protein, 144 aa, Streptococcus agalactiae
MLFYAGADVAIINSGLIVQPFEKDFSRKNLHESLPHQMRLAKLTVSSQELLEIYETIYQQGQFLAQQKIHGMGFRGKCFGEVLHSGFDYKNGKIVYNEKDIDAKEEVILVIVDQYYFASYFECLKTKKVDLLFLNYSEMWQQII

SEQ ID NO: 9607 - DNA, 1104 bp, Streptococcus agalactiae
atgcctaaaaaaactgatacacccgcctataaaccctctatttatagcttaactcgcgatgaactaatagcttgggctattgaacatggagaaaagaaattccgtgcttcacaaatctgggactggctctataaaaagcgtgtgcaaagcttcgatgaaatgactaacatttccaaagattttattgcacttttgaacgagaattttgttgttaatcctctaaaacaacgtattgttcaagaatctgctgatggaactgttaaatacctttttgaattacctgatggcatgctgattgagacggttttgatgcgtcaacattatggtttatcagtatgtgtaacgactcaagttggttgtaacattggttgcactttctgtgcaagtggtttaataaagaaacaacgtgatcttaacaatggcgaaatcactgctcaaattatgcttgttcaaaaatattttgatgaacgtggacaaggtgagcgcgttagtcacattgtggtcatgggaataggtgaaccctttgataactataccaatgtattaaaattcttgcgtacagttaatgatgataatggattagctattggtgcacgtcacattacagtgtctacttcaggtttagcacataaaattcgtgaatttgcaaatgaaggtgtacaagttaacttagcagtatctcttcatgctccaaataacgatttacgatcaagtatcatgcgtattaatcgttctttccctcttgaaaagttgtttgcggctattgaatattatattgagacgactaaccgtcgtgtaacatttgagtatattatgttaaatggtgtcaacgataccccagaaaatgctcaagagttagcagatttaacgaaaaagattcgcaaattatcttatgtcaatttaattccttacaatcctgtctcagaacatgaccagtatagtcgtagtcctaaagagcgtgtagaagctttctatgacgttttgaagaaaaatggagttaactgtgttgttcgtcaagaacatggtacggacattgatgcagcttgcgggcaattacgttcaaacacaatgaaacgcgatcgtcaaaaagcgaaggtagggcag

SEQ ID NO: 9608 - protein, 368 aa, Streptococcus agalactiae
MPKKTDTPAYKPSIYSLTRDELIAWAIEHGEKKFRASQIWDWLYKKRVQSFDEMTNISKDFIALLNENFVVNPLKQRIVQESADGTVKYLFELPDGMLIETVLMRQHYGLSVCVTTQVGCNIGCTFCASGLIKKQRDLNNGEITAQIMLVQKYFDERGQGERVSHIVVMGIGEPFDNYTNVLKFLRTVNDDNGLAIGARHITVSTSGLAHKIREFANEGVQVNLAVSLHAPNNDLRSSIMRINRSFPLEKLFAAIEYYIETTNRRVTFEYIMLNGVNDTPENAQELADLTKKIRKLSYVNLIPYNPVSEHDQYSRSPKERVEAFYDVLKKNGVNCVVRQEHGTDIDAACGQLRSNTMKRDRQKAKVGQ

SEQ ID NO: 9609 - DNA, 585 bp, Streptococcus agalactiae
gtgcaaggaaaggtctataaaatgttactattggtagataattacgattcttttacctataatttaaagcaatatttaagtgtctataaagaggtattcgtcataaaaaatgatgttcctaacctttttttattagctgagagcgcagaagccatcgtcttatcacctggaccaggacacccaaaggatgctgggaaaatggtagaattaatcaatcagtttataggaaagaaacctattctaggtatctgtttggggcatcaagcgcttgccgagtgcttgggtgggcgattaaatttagcaaatcacgttatgcatggtaaacaaagttgggtaacaataaacgaccatactagtttgtttaagggaattgatagtccaacccaagttatgcgttatcattcattggtagtgactgatttaccagagaatattgctgttattgcacgatcaaatgaggataatgaaatcatggcattccattgccccagcttaaaggtatatgcgatgcagtttcatcctgagtcaatcgggagtattgatggaatgaaaatgattgaaaactttttgacgttaattaatgac

SEQ ID NO: 9610 - protein, 195 aa, Streptococcus agalactiae
MQGKVYKMLLLVDNYDSFTYNLKQYLSVYKEVFVIKNDVPNLFLLAESAEAIVLSPGPGHPKDAGKMVELINQFIGKKPILGICLGHQALAECLGGRLNLANHVMHGKQSWVTINDHTSLFKGIDSPTQVMRYHSLVVTDLPENIAVIARSNEDNEIMAFHCPSLKVYAMQFHPESIGSIDGMKMIENFLTLIND

SEQ ID NO: 9611 - DNA, 990 bp, Streptococcus agalactiae
atgtcatttcaaacaaattatatccatttggctgacgaaatattatctggaaagactagcatttcttatgaacaagcgctggaaattctaaatagcgatgagaactggtgggaaatctacgctgctgccttataccttaaaaatcaagttagccgaaataatattcgccttaacgttttattaagtgctaagcaaggactttgtgcagaaaattgtggttactgttctcaatctaaagaaagcactgctgacattgataaatttggtctgcttcctcaaaatgtcattctaaaacaggctattgtcgctcatcaaaatggtgctagcgtcttttgtattgcgatgagtggaactaagcctagcaagagagaaattgagcagttatgtcaagtcatccctgaaatcaaaaaaagcctccctctagaaatatgccttaccgctggttttttggatagagaacaacttcatcagctaaaacaagcaggaattgaccgtatcaatcataatctcaacacccccgaagaaaactaccccaacattgcaacgacgcatagcttcaaagatcgttgtgatactttagaaagaattcacaatgaagacattgatgtttgttctggattcatttgtggtatgggagagagcgatgaggggctcatcacattagctttcagactaaaagagctggacccctattctatccctgtcaattttttacttgctgttgaaggaacacctcttggaaaatataactatttgactcccattaaatgcttaaaaattatggccatgttgcgttttgtttttcctttcaaggaattaagattaagcgctggacgagaggtccattttgagaattttgaatcattagtcaccttacttgttgactcaacttttttgggaaattacctaacagagggcggtcgcaatcaacataccgatattgaattcttggaaaaattacaactaaatcatactaaaaaggaattaatt

SEQ ID NO: 9612 - protein, 330 aa, Streptococcus agalactiae
MSFQTNYIHLADEILSGKTSISYEQALEILNSDENWWEIYAAALYLKNQVSRNNIRLNVLLSAKQGLCAENCGYCSQSKESTADIDKFGLLPQNVILKQAIVAHQNGASVFCIAMSGTKPSKREIEQLCQVIPEIKKSLPLEICLTAGFLDREQLHQLKQAGIDRINHNLNTPEENYPNIATTHSFKDRCDTLERIHNEDIDVCSGFICGMGESDEGLITLAFRLKELDPYSIPVNFLLAVEGTPLGKYNYLTPIKCLKIMAMLRFVFPFKELRLSAGREVHFENFESLVTLLVDSTFLGNYLTEGGRNQHTDIEFLEKLQLNHTKKELI

SEQ ID NO: 9613 - DNA, 492 bp, Streptococcus agalactiae
atgaaaaaactatttaaaaaagcgatagctatgtgccgagatttgccgcttaattttgtaattgttgaacttagtttgtatcaaagagaggatggctcatctgataatattaaatggatttctaagagaattcttgaggtaacggtaactgatcagcaatggatttaccatttgaggatgcttaatttaccaaaacttaagccaatgtcactagcatccagtgactgtcctgcaagggaagagaaggctagtcttatttcaatagaagaatgtcaaaaattcactagcttagtgcgagataaaaatccttttcaccaaggggaagcagctattgtgcctgcggctctattattggaaaaaataatggaagttagaaaaggaaaaataaaggagattcatttgacttttttatctccagtaagggtgaatcaagaattctcagtgcaagtagtggataacacagtgattatttttcagcatcaaatattatgg

SEQ ID NO: 9614 - protein, 164 aa, Streptococcus agalactiae
MKKLFKKAIAMCRDLPLNFVIVELSLYQREDGSSDNIKWISKRILEVTVTDQQWIYHLRMLNLPKLKPMSLASSDCPAREEKASLISIEECQKFTSLVRDKNPFHQGEAAIVPAALLLEKIMEVRKGKIKEIHLTFLSPVRVNQEFSVQVVDNTVIIFQHQILW

SEQ ID NO: 9615 - DNA, 1353 bp, Streptococcus agalactiae
atgaaaacaataacaacatttgaaaataaaaaagttttagtccttggtttagcacgatctggagaagctgctgcacgtttgttagctaagttaggagcaatagtgacagttaatgatggcaaaccatttgatgaaaatccaacagcacagtctttgttggaagagggtattaaagtggtttgtggtagtcatcctttagaattgttagatgaggatttttgttacatgattaaaaatccaggaataccttataacaatcctatggtcaaaaaagcattagaaaaacaaatccctgttttgactgaagtggaattagcatacttagtttcagaatctcagctaataggtattacaggctctaacgggaaaacgacaacgacaacgatgattgcagaagtcttaaatgctggaggtcagagaggtttgttagctgggaatatcggctttcctgctagtgaagttgttcaggctgcgaatgataaagatactctagttatggaattatcaagttttcagctaatgggagttaaggaatttcgtcctcatattgcagtaattactaatttaatgccaactcatttagattatcatgggtcttttgaagattatgttgctgcaaaatggaatatccaaaatcaaatgtcttcatctgattttttggtacttaattttaatcaaggtatttctaaagagttagctaaaactactaaagcaacaatcgttcctttctctactacggaaaaagttgatggtgcttacgtacaagacaagcaacttttctataaaggggagaatattatgtcagtagatgacattggtgtcccaggaagccataacgtagagaatgctctagcaactattgcggttgctaaactggctggtatcagtaatcaagttattagagaaactttaagcaattttggaggtgttaaacaccgcttgcaatcactcggtaaggttcatggtattagtttctataacgacagcaagtcaactaatatattggcaactcaaaaagcattatctggctttgataatactaaagttatcctaattgcaggaggtcttgatcgcggtaatgagtttgatgaattgataccagatatcactggacttaaacatatggttgttttaggggaatcggcatctcgagtaaaacgtgctgcacaaaaagcaggagtaacttatagcgatgctttagatgttagagatgcggtacataaagcttatgaggtggcacaacagggcgatgttatcttgctaagtcctgcaaatgcatcatgggacatgtataagaatttcgaagtccgtggtgatgaattcattgatactttcgaaagtcttagaggagag

SEQ ID NO: 9616 - protein, 451 aa, Streptococcus agalactiae
MKTITTFENKKVLVLGLARSGEAAARLLAKLGAIVTVNDGKPFDENPTAQSLLEEGIKVVCGSHPLELLDEDFCYMIKNPGIPYNNPMVKKALEKQIPVLTEVELAYLVSESQLIGITGSNGKTTTTTMIAEVLNAGGQRGLLAGNIGFPASEVVQAANDKDTLVMELSSFQLMGVKEFRPHIAVITNLMPTHLDYHGSFEDYVAAKWNIQNQMSSSDFLVLNFNQGISKELAKTTKATIVPFSTTEKVDGAYVQDKQLFYKGENIMSVDDIGVPGSHNVENALATIAVAKLAGISNQVIRETLSNFGGVKHRLQSLGKVHGISFYNDSKSTNILATQKALSGFDNTKVILIAGGLDRGNEFDELIPDITGLKHMVVLGESASRVKRAAQKAGVTYSDALDVRDAVHKAYEVAQQGDVILLSPANASWDMYKNFEVRGDEFIDTFESLRGE

SEQ ID NO: 9617 - DNA, 603 bp, Streptococcus agalactiae
atggcattaaaagatagatttgacaaaattatttcttattttgacactgacgatgtaagtgaaaatgaagtacacgaagtacaagagagaacttcagtgcaaagagattccagagcagctacagcacaggaagcttctcagcgtagtcatatgactaactccgcagaggaagagatgattggtagtcgtccgagaacttatacctatgatcctaatcgtcaggagagacaaagggtacagagagacaatgcttatcagcaagctactcctagggttcaaaataaagactcagttcgacaacagagagaacaagtaacaattgctctgaagtatccccgtaagtatgaggatgcacaagaaattgttgatttacttatcgttaatgaatgtgtcttgattgattttcaatatatgcttgatgcgcaagcacgacgttgcttggattatattgatggtgcaagtagagtattatatggttcattacaaaaggttgggagttcaatgtttctattaacaccagccaatgttatggttgatattgaggagatgaatattccaaagactggtcaagagacgagttttgattttgatatgaagagacga

SEQ ID NO: 9618 - protein, 201 aa, Streptococcus agalactiae
MALKDRFDKIISYFDTDDVSENEVHEVQERTSVQRDSRAATAQEASQRSHMTNSAEEEMIGSRPRTYTYDPNRQERQRVQRDNAYQQATPRVQNKDSVRQQREQVTIALKYPRKYEDAQEIVDLLIVNECVLIDFQYMLDAQARRCLDYIDGASRVLYGSLQKVGSSMFLLTPANVMVDIEEMNIPKTGQETSFDFDMKRR

SEQ ID NO: 9619 - DNA, 690 bp, Streptococcus agalactiae
atgaatttttcatttttaccacaatattggtcctattttaattatggtgtgatggtaaccattatgatttcaacatgtgttgttttttttggaactattataggtgtgttaattgctttagtaaagcgtactaatttacattttctcacaatattagctaatttctatgtatgggtatttcgtgggacaccgatggtagttcaaattatgattgctttcgcatggatgcattttaacaatttaccaacgattagctttggtgttttagatttagattttacacgacttttacctggtatcattatcatttccttaaatagtggtgcctatatttcggaaattgtacgtgcagggattgaggctgtaccatctggacaaatagaagcagcttactcgttggggattcgacctaaaaatacacttcgctatgttatcttaccccaagcttttaaaaatattttacctgctctagggaatgaatttattacaattattaaagatagtgctctccttcaaactattggtgtcatggaattatggaacggagcacaatcagttgtaacggctacttactcaccagttgcaccgttattatttgcagcattttactatttaatgttgacaacgattctctcagctttgttaaaacaaatggagaaatatcttgggaaaggggtaaaaatagatggt

SEQ ID NO: 9620 - protein, 230 aa, Streptococcus agalactiae
MNFSFLPQYWSYFNYGVMVTIMISTCVVFFGTIIGVLIALVKRTNLHFLTILANFYVWVFRGTPMVVQIMIAFAWMHFNNLPTISFGVLDLDFTRLLPGIIIISLNSGAYISEIVRAGIEAVPSGQIEAAYSLGIRPKNTLRYVILPQAFKNILPALGNEFITIIKDSALLQTIGVMELWNGAQSVVTATYSPVAPLLFAAFYYLMLTTILSALLKQMEKYLGKGVKIDG

SEQ ID NO: 9621 - DNA, 1692 bp, Streptococcus agalactiae
atgaattataaagagatttatcaagagtggttagaaaacgactcactcggtaaagatattaagtcagatttagaagctattaaaggcgatgaatctgaaattcaggatcgtttttacaaaacattagaatttggaacggcgggattgagaggtaaacttggagcaggaaccaatcgtatgaatacttatatggtggggaaagcagcacaagcattagctaatacgattattgatcatggccctgaagctattgcacgtggaattgcagttagttatgatgtccgttatcaatctaaggaatttgcagaattaacttgttccattatggcagcaaatggtattaagtcttatatttataaagggattcgcccaacaccaatgtgctcatatgctattcgtgctctaggatgtgtttcgggtgtgatgattactgctagtcataatcctcaagcttataatggttataaggcatattggaaagaaggatctcagattttagatgatattgctgatcaaattgccaatcatatggatgctataaccgattatcagcaaattaagcaaataccctttgaagaggctctggcaagtggttcggcaagttatatcgatgagagtattgaagaagcatataaaaaagaagtgcttggtttaactattaatgatactaatattgataagtcagtccgggtagtttatactcctttaaatggcgtaggaaatttacctgtgcgcgaagttttaagacgccgtggttttgaaaatgtttatgtggtacctgagcaggaaatgcccgatcctgattttacaacggttggctatccaaaccctgaagttcctaaagcatttgcctattcagaatctctaggaaagtcagttgatgcagatatcttacttgccacagatccagattgtgaccgagtagcattggaagtcaaagatagtaagggagaatatattttcttaaatggtaataagataggggcacttctttcctattatattttttcacaacgatgtgccttagggaatttgccacatcatcctgtattggtaaaatccattgtaactggtgatctatcaaaagttattgcagataaatataatattgaaactgttgaaactttaacaggatttaaaaatatttgtggaaaagctaatgaatatgatatctcaaaggataaaacttatctctttggctatgaagaaagtattggtttttgctatggcacttttgtacgtgataaagatgctgtgagtgcttcaatgatggtagtagaaatgactgcctattataaagaacgagggcaaacacttttagacgttttgcaaaccatttacgataaatttggctattacaacgagcgccaattttctcttgagttagagggtgctgaggggcaagaacgtattagtcgtattatggaggattttagacaggacccaatattacaagtaggtgagatgacattggagaattctattgatttcaaggatggttataaggattttccaaagcaaaattgtttaaaatattattttaatgagggttcatggtatgctttaaggccgtcagggacggaacctaagataaaatgttacctttatacgattggttgtacagaagcagatagtttatcgaaacttaatgcaattgagtcggcttgtcgtgctaaaatgaatagtactaaa

SEQ ID NO: 9622 - protein, 564 aa, Streptococcus agalactiae
MNYKEIYQEWLENDSLGKDIKSDLEAIKGDESEIQDRFYKTLEFGTAGLRGKLGAGTNRMNTYMVGKAAQALANTIIDHGPEAIARGIAVSYDVRYQSKEFAELTCSIMAANGIKSYIYKGIRPTPMCSYAIRALGCVSGVMITASHNPQAYNGYKAYWKEGSQILDDIADQIANHMDAITDYQQIKQIPFEEALASGSASYIDESIEEAYKKEVLGLTINDTNIDKSVRVVYTPLNGVGNLPVREVLRRRGFENVYVVPEQEMPDPDFTTVGYPNPEVPKAFAYSESLGKSVDADILLATDPDCDRVALEVKDSKGEYIFLNGNKIGALLSYYIFSQRCALGNLPHHPVLVKSIVTGDLSKVIADKYNIETVETLTGFKNICGKANEYDISKDKTYLFGYEESIGFCYGTFVRDKDAVSASMMVVEMTAYYKERGQTLLDVLQTIYDKFGYYNERQFSLELEGAEGQERISRIMEDFRQDPILQVGEMTLENSIDFKDGYKDFPKQNCLKYYFNEGSWYALRPSGTEPKIKCYLYTIGCTEADSLSKLNAIESACRAKMNSTK

SEQ ID NO: 9623 - DNA, 711 bp, Streptococcus agalactiae
atggcagctttggcctgtgtcaaaactggtgcaggattagttactgtagcaacccaaagttgcaatatcccctctttgcatagtcaactaccagaggtaatggcgtttgatagtgatgattacaaatggttggaaaaatcaattgttcaaagtgatgttattgtaattggtcctggattaggagtatcagaatcatctcgaaaaattttgaaccagaccatggagaagattcaatcacatcaaagtgtcatccttgacggatcagccttgactctgttatcagaaggtgcgtttccgcaaacaaaggctaaaaatttagtgttgacacctcatcaaaaagaatgggagcgattgtcaggtatcgctgtatcgcaacagacaaaagaaaatacccaaaccgctcttaaatcttttcccaaagggacgattttagtcgctaagagttcgcatacgcgtatttttcaagatttagacgaaaaagaaattatagtaggaggtccttaccaggcgactggagggatgggggatactttgtgtggtatgattgcaggtatgttagcgcaatttaaagaagcctctcctctagataaggtatcagtgggagtttatctacattcggcaattgctcaaggattatctaaagaagcctatgttgttctaccgacaacgattagtgatgagattccaaaagaaatggctagactatctaaa

SEQ ID NO: 9624 - protein, 237 aa, Streptococcus agalactiae
MAALACVKTGAGLVTVATQSCNIPSLHSQLPEVMAFDSDDYKWLEKSIVQSDVIVIGPGLGVSESSRKILNQTMEKIQSHQSVILDGSALTLLSEGAFPQTKAKNLVLTPHQKEWERLSGIAVSQQTKENTQTALKSFPKGTILVAKSSHTRIFQDLDEKEIIVGGPYQATGGMGDTLCGMIAGMLAQFKEASPLDKVSVGVYLHSAIAQGLSKEAYVVLPTTISDEIPKEMARLSK

SEQ ID NO: 9625 - DNA, 1218 bp, Streptococcus agalactiae
atgtatcatgttaccgttggaatatccgaaaaagaatatgatgcctttgctattgcatcgtctcaaaccaatctcctccactcttcaaagtgggcacaagtaaaatcaaattggcaaaatgaacgtttaggcttttataaagatgaccaattagttgctgtagctagcatcttaattaaatcattaccacttggttttacaatgctttatattccacgtggacctattatggactacagcaataaagaattagttaactttgtgttaaaaacactaaaaaactttggacgaaagaaacgtgctgtttttgcaaaattcgatccagcacttcttctacgtcaatatcaccttaaagaagagaatgtcgccgaagagatagatgaaagtagacaggcaattgataatcttaagtcagcaggtgcccaatggataggtccaacgaaagccatttccgaaaccatccaacctcgttttcaagcgaatatctataccaaagcaaatatagaagaaaactttccaaaacacactaaacgtctgataaaagatgcaaagcatcgcggtgttcaaatttatcgtgccaacattgatgatttacctaaattcgccacggttgtagcattaaccgagaatcgtaaaggtgtagctttacgtaatgaaaactatttccatcaactaatgacaatttatggagaagatgcctatctctatttagctaaagtcaatcttcctaaaagattagcgcaatttaaagaacaacttcttcaaatccaaaaagatttatcagaaactccatcccatcaaaaaagtcgcctgacaaggctaaatcaacaagaagcttctgttaaacaatatatccttgaatttcaggagtttagcaagaaatatccagatgagcctgtcattgcaggaattttgtccattcgttttggcaatgtcctggagatgttgtatgctggtatggatgatagcttccgtaaattttatccacagtatctcttgaatgctagggtgttcgaagatgctttcaaaaacgatattgtatctgctaatctaggcggtgtcgagggaagtcttaacgatggtttaacaaaatttaaaagtaacttcaatccaatgtttgaagaatatattggcgagtttaatctagcaatcaatccattattatataaattggccaacctagcctatactattcgaaaaaaacaaagacactctcac

SEQ ID NO: 9626 - protein, 406 aa, Streptococcus agalactiae
MYHVTVGISEKEYDAFAIASSQTNLLHSSKWAQVKSNWQNERLGFYKDDQLVAVASILIKSLPLGFTMLYIPRGPIMDYSNKELVNFVLKTLKNFGRKKRAVFAKFDPALLLRQYHLKEENVAEEIDESRQAIDNLKSAGAQWIGPTKAISETIQPRFQANIYTKANIEENFPKHTKRLIKDAKHRGVQIYRANIDDLPKFATVVALTENRKGVALRNENYFHQLMTIYGEDAYLYLAKVNLPKRLAQFKEQLLQIQKDLSETPSHQKSRLTRLNQQEASVKQYILEFQEFSKKYPDEPVIAGILSIRFGNVLEMLYAGMDDSFRKFYPQYLLNARVFEDAFKNDIVSANLGGVEGSLNDGLTKFKSNFNPMFEEYIGEFNLAINPLLYKLANLAYTIRKKQRHSH

SEQ ID NO: 9627 - DNA, 810 bp, Streptococcus agalactiae
atgacttcaattaaacttgttgccgtagatattgacggcaccctattaaatagtaagcgtgaaattacacctgaagtggctaaagctgttcaagaagcaaaatcaaaaggcgttaaaattgttattgctacaggacgtccaatcatcggagtccaagatcttttagaagaattgaaactcaatgaagagggagattatgttatcacctttaacggcggtctagttcaagacacagccacaggagatgacatcatcaaagaaaccttaacctatgaagactatctggatttcgaactgttagcgcgtaaattaggcgtccacatgcacgccattacaaaagaaggaatttacacagcaaatcgtgatattggtaaatatacaatacacgaagtaactttagttaatatgccgctcttctatcgtactcctgaagaaatgggagacaaagaaatcattaaactaatgatgattgatcaacctgacatcttagatgcagcaattgctaaaattccaaaaaaagttctcgataactacactattgtaaaatcaactcctttttatttagaaattttacccaaaaacgttaataaaggcactgcacttctccaccttgcagagaaaatgggattaactgtagatcaaacaatggctattggtgatgaagaaaatgaccgtgctatgcttgaagttgttggaaatcctgttgttatgcaaaacggcaatcctgaactaaaaaaaatagcaaaatatatcaccaaatcaaacgaggaaagtggcgtagcctacgcactacgtgaatgggtaataaac

SEQ ID NO: 9628 - protein, 270 aa, Streptococcus agalactiae
MTSIKLVAVDIDGTLLNSKREITPEVAKAVQEAKSKGVKIVIATGRPIIGVQDLLEELKLNEEGDYVITFNGGLVQDTATGDDIIKETLTYEDYLDFELLARKLGVHMHAITKEGIYTANRDIGKYTIHEVTLVNMPLFYRTPEEMGDKEIIKLMMIDQPDILDAAIAKIPKKVLDNYTIVKSTPFYLEILPKNVNKGTALLHLAEKMGLTVDQTMAIGDEENDRAMLEVVGNPVVMQNGNPELKKIAKYITKSNEESGVAYALREWVIN

SEQ ID NO: 9629 - DNA, 927 bp, Streptococcus agalactiae
atggttatcatgattaatttctttagacatttctgggaatcgcttaaaaacttgaaacgtaacttttggatgacttttgcttctgtaacatcagttaccataaccttacttcttgtaggcttgttttcatcagttttactgaatgttgaaaagttaacaactgatgtttcaggtaattttactatcagtgcctttttaaatgttgactcaacggatgctcaaaaacaagtcaaagataaggacggaaagctaaaagataatcctgattatcataaagtttacgacaaaattaaacgtatttctggtgtagagaaagtcacttattcaagtaaagctgaacaattaaaagaagttcaaaaagagtatggttcagatgttattgatgatacctataaagatgctttgttagatgtttacgtagttgggacaagttctgcaaaagtttctaagagtgtcagtgaagcaattggacgcattgaaggtgttgattatactaaagaacctattgattcaacaaaactatctaatctcacagataacatccgtatatggggatttggtggtgttgccttattaattgtccttgctatctttttgatttcaaatactattcgtatgtcgattatgtcacgccgtacagatattgaaatcatgagattagttggcgctaaaaattcttatattcgaggaccgttcttttttgaaggtgcttgggtagggattttaggggctatcgttccatcgctgattttctattttggttatcaatttgtgtttaacaagtttaatccaaaatttgagacaagccatgtttcattgtatcctatggatattatggttccagcaattattggtggtatggtgattattggtattattattggctcacttgggtctgtcctatcaatgagacgttaccttaagatt

SEQ ID NO: 9630 - protein, 309 aa, Streptococcus agalactiae
MVIMINFFRHFWESLKNLKRNFWMTFASVTSVTITLLLVGLFSSVLLNVEKLTTDVSGNFTISAFLNVDSTDAQKQVKDKDGKLKDNPDYHKVYDKIKRISGVEKVTYSSKAEQLKEVQKEYGSDVIDDTYKDALLDVYVVGTSSAKVSKSVSEAIGRIEGVDYTKEPIDSTKLSNLTDNIRIWGFGGVALLIVLAIFLISNTIRMSIMSRRTDIEIMRLVGAKNSYIRGPFFFEGAWVGILGAIVPSLIFYFGYQFVFNKFNPKFETSHVSLYPMDIMVPAIIGGMVIIGIIIGSLGSVLSMRRYLKI

SEQ ID NO: 9631 - DNA, 762 bp, Streptococcus agalactiae
atgtcaaaagttgctattgttactggtgctggtcaaggaattggatttgctattgcgaaacgtcttcatgcagacggctttaaaataggcgttttagactataatgaagagactgctcaggctgcggttgataaactatcacctgaggatgctgttgcagttgtagcagatgtttcaaaacgtgatcaagtttttgatgctttccaaaaagttgtagatacttttggtgatttgaatgttgttgttaacaatgcaggtgttgccccaacaactcctcttgacactattactgaagagcagtttgaaaaggcttttgcaatcaatgtcggaggaactatttggggaagccaagcagctcagaaacattttagagaattaggtcatggcggaaaaattataaatgcaacttcacaagcaggatgtgaagggaatcctaatttgactgtttatggtggtacaaaatttgcagttcgtggtattacacagactttggcaaaagatttagcatcagaaggaatcacagtcaatgcttacgcaccaggtattgttaaaacacctatgatgtttgatattgcccatgaagttggtaagaatgcaggcaaagatgatgaatggggtatggagcagtttgccaaagatatcactttgaaacgcttgtctgaaccagaagatgttgctaatgcagtaggcttcttagcgggagatgattcaaattatatcactggacaaacaatagttgtcgatgggggtatggtattccat

SEQ ID NO: 9632 - protein, 254 aa, Streptococcus agalactiae
MSKVAIVTGAGQGIGFAIAKRLHADGFKIGVLDYNEETAQAAVDKLSPEDAVAVVADVSKRDQVFDAFQKVVDTFGDLNVVVNNAGVAPTTPLDTITEEQFEKAFAINVGGTIWGSQAAQKHFRELGHGGKIINATSQAGCEGNPNLTVYGGTKFAVRGITQTLAKDLASEGITVNAYAPGIVKTPMMFDIAHEVGKNAGKDDEWGMEQFAKDITLKRLSEPEDVANAVGFLAGDDSNYITGQTIVVDGGMVFH

SEQ ID NO: 9633 - DNA, 1191 bp, Streptococcus agalactiae
atgacctatttgtcagaacgtgtactcaatatggaagagagtgttactttagctgcgggagctaaagcaagagaactcagagtacaaggaagagatattcttagtttaactttaggggagcctgactttgctactcctaaaaacattcagcaagcggctattgaggctataacagatggacgtgcaagtttttacacaccatcaagtggtttgccggagttgaagtcagcaattaatgcgtattttgaacgtttttatggctactcccttaaacctaatcaggtggttgtgggaactggtgctaagtttatcctttatactttctttatgacagtactgaatcccggtgatgaagtaattattccgactccttattgggtatcttatgctgatcagattaagatggctgaaggtaagccagtttttgtcacagcaaaagaagttaatcacttcaaagtaactgtggaacagttagaagctgttaggactgataagacaaaagtcatacttcttaatagtccatcaaatcctacaggtatgatttataaagctgaggagttggaggctattggaaattgggcagtcgaacatgatatcctaattttagcagatgatatttacggtcgattggtttacaatggcaatatttttacccctatttcaagcctttcagagtctattcgaaaccaaacgatagtcataaatggagtttctaagacttatgcgatgacaggttggcgtgttggttttgcagtgggtaatcatgatattatagcggcaatgtctaaagtagtcagtcaaacaacttctaaccttacggctgtctcacagtatgctactattgaggctttaaatggttctcaagagtcatttgaaaaaatgaggctagcatttgaagaacgccttaatatcatttatccattgttgtgtcaggtccctgggtttgaggttgttaaaccacaaggtgctttttatcttttcccaaatgttacaaaagcaatggaaatgaaaggatatacggatgttacagcattcacggatgccattcttgaagaagttggacttgctttagtaacgggtgctggttttggagcgccggaaaatgttcgtctgagttatgctacagatcttgaaacccttaaagaagctgttcgtagactgcatgtctttatgggaagtaatgaaattaat

SEQ ID NO: 9634 - protein, 397 aa, Streptococcus agalactiae
MTYLSERVLNMEESVTLAAGAKARELRVQGRDILSLTLGEPDFATPKNIQQAAIEAITDGRASFYTPSSGLPELKSAINAYFERFYGYSLKPNQVVVGTGAKFILYTFFMTVLNPGDEVIIPTPYWVSYADQIKMAEGKPVFVTAKEVNHFKVTVEQLEAVRTDKTKVILLNSPSNPTGMIYKAEELEAIGNWAVEHDILILADDIYGRLVYNGNIFTPISSLSESIRNQTIVINGVSKTYAMTGWRVGFAVGNHDIIAAMSKVVSQTTSNLTAVSQYATIEALNGSQESFEKMRLAFEERLNIIYPLLCQVPGFEVVKPQGAFYLFPNVTKAMEMKGYTDVTAFTDAILEEVGLALVTGAGFGAPENVRLSYATDLETLKEAVRRLHVFMGSNEIN

SEQ ID NO: 9635 - DNA, 711 bp, Streptococcus agalactiae
atggtagttgacatgcgtagtcgtcttttctttagagaaattaactctattttggatagccttgaaattaatgataatattaactttaagattctatttttagatgctactgacaccgagctagtgtcacgatataaagagacacgtcgtagccaccctcttgctgccgacggcagagtgttagatggtatttctctagagagagaactattagcaccgcttaaaagtatgagtcagaacgttgtggacactagtgaattaacaccaagacaactacgtaaggtcatttctaaagaattctcaaatcaagatagtcaaagttcttttcgtatcgaagttatgagttttggttttaaatatggtatacctttggatgcggatttagtattcgatgtgcgttttttaccaaatccatactataaaccagaattaagagataagacaggtttagatactgaggtttatgactatgtcatgagttttgatgaatcagatgatttttatgaccatcttcttgccttaataaagccaatcttaccaggctatcaaaatgaagggaaatctgttttgactgtggcaatcggatgtacaggtgggcaacatcgtagcaccgcttttgctcatagattatcagaagatttaaaagcagattggacagttaatgaaagccatcgtgataaaaataagcgtaaggagacggtaaatcgttca

SEQ ID NO: 9636 - protein, 237 aa, Streptococcus agalactiae
MVVDMRSRLFFREINSILDSLEINDNINFKILFLDATDTELVSRYKETRRSHPLAADGRVLDGISLERELLAPLKSMSQNVVDTSELTPRQLRKVISKEFSNQDSQSSFRIEVMSFGFKYGIPLDADLVFDVRFLPNPYYKPELRDKTGLDTEVYDYVMSFDESDDFYDHLLALIKPILPGYQNEGKSVLTVAIGCTGGQHRSTAFAHRLSEDLKADWTVNESHRDKNKRKETVNRS

SEQ ID NO: 9637 - DNA, 258 bp, Streptococcus agalactiae
atgaaaaaagacatccatccagattatcgtccagttgttttcttagatacaactacaggttacaaattccttagtggttcaactaaatcaactaaagaaacagtagaattcgaaggtgaaacttacccacttattcgtgtggaaatctcatcagattcacatccattctatacaggacgtcaaaaattcactcaagcagatggacgtgtggaccgtttcaacaaaaaatatggtctcaaagacgcaaacgctgctcaa

SEQ ID NO: 9638 - protein, 86 aa, Streptococcus agalactiae
MKKDIHPDYRPVVFLDTTTGYKFLSGSTKSTKETVEFEGETYPLIRVEISSDSHPFYTGRQKFTQADGRVDRFNKKYGLKDANAAQ

SEQ ID NO: 9639 - DNA, 441 bp, Streptococcus agalactiae
atggctttagcaaagattgtttatgctagcatgaccggaaatactgaagaaattgctgacattgttgctgataaattacgtgacttgggtctagatgttgaagtagaagagtgtacgatggttgatgctgcagattttgaagatgctgacattgcaattgttgccacttatacatatggtgatggagatttaccagatgaaatcgtggacttttatgaagatttagcagaggttgatttatctggtaaagtttacggcgtagtgggttcaggtgatactttctatgattacttctgcaaatctgttgatgagttcgaggctcaattcgcattaacaggagcacaaaaaggtgctgattgtgttaaagttgatttagcggcagaagacgaagacattgaaaacttagaagcttttgctgaagaaattgcttctaaacttaac

SEQ ID NO: 9640 - protein, 147 aa, Streptococcus agalactiae
MALAKIVYASMTGNTEEIADIVADKLRDLGLDVEVEECTMVDAADFEDADIAIVATYTYGDGDLPDEIVDFYEDLAEVDLSGKVYGVVGSGDTFYDYFCKSVDEFEAQFALTGAQKGADCVKVDLAAEDEDIENLEAFAEEIASKLN

SEQ ID NO: 9641 - DNA, 345 bp, Streptococcus agalactiae
atgaatccattaattcaaagtttgacagaaggtcaacttcgttctgatatccctgagttccgtgctggtgatactgtacgtgttcacgctaaagttgtcgaaggtactcgcgaacgtattcagatctttgaaggtgttgttatctcacgtaaaggtcaaggaatctcagaaatgtacacagtacgtaaaatttctggtggtatcggtgtagagcgtacattcccaattcacactcctcgtgttgataaaatcgaagttgttcgttatggtaaagtacgtcgtgctaaactttactacttacgcgcattgcaaggtaaagctgcacgtattaaagaaatccgtcgt

SEQ ID NO: 9642 - protein, 115 aa, Streptococcus agalactiae
MNPLIQSLTEGQLRSDIPEFRAGDTVRVHAKVVEGTRERIQIFEGVVISRKGQGISEMYTVRKISGGIGVERTFPIHTPRVDKIEVVRYGKVRRAKLYYLRALQGKAARIKEIRR

SEQ ID NO: 9643 - DNA, 795 bp, Streptococcus agalactiae
atgcatctaggaaaatatataaaaaagtatcgagataccaataatctgagcatggctgaattcgctaaagaatcaggcatcagcaaagcttacgtttctattcttgaaaaaaacagagatcctcgtaacggaaaagaaatcatcccatctattccgattataaagaaagtttctgacacaattggcatctcttttgatgatttattaaattcgctagacgaaaatcagatagtcgcgttaaatgaaacgaaaactgaaaaaaatctaacttcctctaccctacaaaaaatcacttctacttcttctcaattagaacaacctagacaagaaaaagtccttagcttcgctaacgaacaattagaagaacaaaataaagttgtttctatgttcgatagaaaagttgaggagacagaaaattatatcactgactacgttgaggggttagttgctgctggtctgggggcataccaagaagacaatttacatatggaagttaaactacgggctgatgatgtccccgataagtatgatactattgcgaaagtagctggtaattcaatggaaccacttattcaagataacgatttactgttcgtcaaggtatctagtcaagtcgatatgaatgatatagggatattccaagtcaatggaaaaaactttgtaaaaaaactcaaacgtgattatgacggcgcttggtacttgcaaagtttaaataaaagctatgaggaaatctatctttcagagaacgacaacatccgcacgataggagaagtcgtagatatttacagggagaat

SEQ ID NO: 9644 - protein, 265 aa, Streptococcus agalactiae
MHLGKYIKKYRDTNNLSMAEFAKESGISKAYVSILEKNRDPRNGKEIIPSIPIIKKVSDTIGISFDDLLNSLDENQIVALNETKTEKNLTSSTLQKITSTSSQLEQPRQEKVLSFANEQLEEQNKVVSMFDRKVEETENYITDYVEGLVAAGLGAYQEDNLHMEVKLRADDVPDKYDTIAKVAGNSMEPLIQDNDLLFVKVSSQVDMNDIGIFQVNGKNFVKKLKRDYDGAWYLQSLNKSYEEIYLSENDNIRTIGEVVDIYREN

SEQ ID NO: 9645 - DNA, 747 bp, Streptococcus agalactiae
atgaatcaactaataaacatcaccctaaacgaaaatcaagaaccagttgtcagtggtagagatttacacaatgtacttaatataaaaactcaatatactaaatggcttgaaaggatgtcggaatatggttttgaagaaaacgttgactatatagctattagtcaaaaaagactaacagctcaaggtaaccgtacagaatatatagaccacgttctcaagctagacatggcaaaagagattgctatgttacagcgaaacgagaaatcaaaacaggtacgcaaatacttcatccaggttgaaaaagacttcaatagtcctgagaaaatcatggcgagagccttgctcatggcagataagaaaatcactaacttaacgatggaaaataatcaattgcagttagatttaaaagaagctcaaaagcaagcgcgttatcttgatctaatcattgagagcaagggagctttgcgagtaacacagattgctgctgattatggtatgtctgtcaataaattcaataaaacactattagaatttggtgtgcagcacaaagtgaatggacaatggattctctataaacgacatatgggcaaaggttacacagacagtcacacatttgactatcaagacaaaaacggccatacaagagccaatgtgacgacgacgtggacacaaaaggggcgtctattcctgtacgagttgttgaaagacaacaatattttgccactaattgaacaggaagacattgta

SEQ ID NO: 9646 - protein, 249 aa, Streptococcus agalactiae
MNQLINITLNENQEPVVSGRDLHNVLNIKTQYTKWLERMSEYGFEENVDYIAISQKRLTAQGNRTEYIDHVLKLDMAKEIAMLQRNEKSKQVRKYFIQVEKDFNSPEKIMARALLMADKKITNLTMENNQLQLDLKEAQKQARYLDLIIESKGALRVTQIAADYGMSVNKFNKTLLEFGVQHKVNGQWILYKRHMGKGYTDSHTFDYQDKNGHTRANVTTTWTQKGRLFLYELLKDNNILPLIEQEDIV

SEQ ID NO: 9647 - DNA, 222 bp, Streptococcus agalactiae
atggaaaatccaatgacaggagtagcaatactagcatttatcgctttacttgcatatctcggcaatcgtaatagcaatcaaaagacaattactaagactgttgagacggtgttagataactaccaagttgtgcgaaaggttgagagaccaaaacgcacggattttatagagttacctaccccaggatcatgcgggaaagtttggggcaaggatagacctttt

SEQ ID NO: 9648 - protein, 74 aa, Streptococcus agalactiae
MENPMTGVAILAFIALLAYLGNRNSNQKTITKTVETVLDNYQVVRKVERPKRTDFIELPTPGSCGKVWGKDRPF

SEQ ID NO: 9649 - DNA, 252 bp, Streptococcus agalactiae
atggttgaaatcagaattaacggtgagtcaatcacatttgatagcaattttagggatgcgcttatatttacggtagatcacctaaaaaattatgacgatccttctttgaggcagacttacaacgagtttaaagattatacagacgaggacttgatgggatatatcagcacagaatttgatgtagacccggaaatgtttgttgatactaattcagacagcagatggaaaattaaacaacgaattttagaggac

SEQ ID NO: 9650 - protein, 84 aa, Streptococcus agalactiae
MVEIRINGESITFDSNFRDALIFTVDHLKNYDDPSLRQTYNEFKDYTDEDLMGYISTEFDVDPEMFVDTNSDSRWKIKQRILED

SEQ ID NO: 9651 - DNA, 384 bp, Streptococcus agalactiae
atgaccaaggatgccgaacttcgttatacaccaagtaatcaagcggtagctactttttcacttgcagttaatcgtaattttaaaaatcaatctggcgaacgtgaggctgattttattaactgtgttatttggcgccaacaagctgaaaacttggctaactgggcaaaaaaaggtgctttggttggaattacaggtcgtatccaaacgcgtaattatgaaaaccaacaaggtcaacgtatctatgtaacagaagttgttgcggaaaatttccaattattagaaagtcgcaatagccaacaacagactaatcaaagcggcaatagttctaattcttattttggcaatgccaacaaaatggatatttcagatgatgacttaccattc

SEQ ID NO: 9652 - protein, 128 aa, Streptococcus agalactiae
MTKDAELRYTPSNQAVATFSLAVNRNFKNQSGEREADFINCVIWRQQAENLANWAKKGALVGITGRIQTRNYENQQGQRIYVTEVVAENFQLLESRNSQQQTNQSGNSSNSYFGNANKMDISDDDLPF

SEQ ID NO: 9653 - DNA, 474 bp, Streptococcus agalactiae
atgacttttaagacagaatttgaaataccaatcgaaccaaaacctcaaactagacctaagttcagcaaatttggtacgtacgaagatccaaagatgaagagatggcgaaaagaggtttctggatggatagaaaaaaattatgatggaccgtttttcgatgattgcataaaggtagaggtaaccttttacatgaaagcccccaaaacgctatcaaaagagcctacacaacgttctaaaggtaaaacaatacaaatatatcagaacttcgtgcgtgagcttatatggcacgctaagaagcctgatattgataatctgattaaagctgtttttgatagtatttccgatgcaggttacgacagaatacagaaatcaggtatcgtttggtcagatgacaatatcgtatgcgatttaagagcaaagaaaaaatacagtcagaatccaagaataaaagtgaggattgaagagattgacaga

SEQ ID NO: 9654 - protein, 158 aa, Streptococcus agalactiae
MTFKTEFEIPIEPKPQTRPKFSKFGTYEDPKMKRWRKEVSGWIEKNYDGPFFDDCIKVEVTFYMKAPKTLSKEPTQRSKGKTIQIYQNFVRELIWHAKKPDIDNLIKAVFDSISDAGYDRIQKSGIVWSDDNIVCDLRAKKKYSQNPRIKVRIEEIDR

SEQ ID NO: 9655 - DNA, 345 bp, Streptococcus agalactiae
ttgacagatgaattaataaatcaattttacaaaatttttgacaatgggattgtaaggcaaattaaaaagctagatgtagattgtaaaaaagccgagcaaataagatgtagcgttacaaataacagacgtcgaaaaaccctgccaagaccgtacgttatcgaagcgtttaaagattattttgacgaagatacctatgcacagatgtatatcaaatcatatcgtgagtatcacaacccaaatgaccacgagacggaactttttgtaaaactaaaaagagcgcacaaagatactaagttagagcattacaaggaagttaagcgattgatgtacgcagcaatgaccttt

SEQ ID NO: 9656 - protein, 115 aa, Streptococcus agalactiae
MTDELINQFYKIFDNGIVRQIKKLDVDCKKAEQIRCSVTNNRRRKTLPRPYVIEAFKDYFDEDTYAQMYIKSYREYHNPNDHETELFVKLKRAHKDTKLEHYKEVKRLMYAAMTF

SEQ ID NO: 9657 - DNA, 267 bp, Streptococcus agalactiae
atgactgaacaacagatgattgattgcttgctttatgagttagcaaaaaaagacaaattgaacattagacgaaacaatatcataacgtttttatcgattgtgctgatggctatatctattttaaacgtcgcactgcaagaccactacaagtcgcaaattacagaattacggacacagttaagcaggacacaaaagcagcttaaacgtgctagtgatgatagagctagacagacaaaacggattgctgagctgactggaaatggggga

SEQ ID NO: 9658 - protein, 89 aa, Streptococcus agalactiae
MTEQQMIDCLLYELAKKDKLNIRRNNIITFLSIVLMAISILNVALQDHYKSQITELRTQLSRTQKQLKRASDDRARQTKRIAELTGNGG

SEQ ID NO: 9659 - DNA, 462 bp, Streptococcus agalactiae
atgtcagaatttaaagttattgaaacacaagaagagttggacacgattgtgaaagctcgcattgctcgagaacgtgagaagtatcaagattacgaccaactgaaaactcgtgttgaagaactagaaaccgaaaacagcagcttacaaactgctttgaatgatgctaaatcaaacactgatagctatacagagaaaattaccactttggaaaatcaaatcgctggttatgaggcagcaaatttacggacaaaggtagcgttacagtatggcttaccaatcgatttagctaatcgtttgcaaggcgatgatgaagacgggctcaaggtggatgcagaacgcttagcatcttttatcaagccgtctcaaccacaaccgccaacaaagtcaaatgaaccgattattaccgaccaaaaagaagcaggttggattgaaatggcacgtaatttagttaacaaaggagaa

SEQ ID NO: 9660 - protein, 154 aa, Streptococcus agalactiae
MSEFKVIETQEELDTIVKARIAREREKYQDYDQLKTRVEELETENSSLQTALNDAKSNTDSYTEKITTLENQIAGYEAANLRTKVALQYGLPIDLANRLQGDDEDGLKVDAERLASFIKPSQPQPPTKSNEPIITDQKEAGWIEMARNLVNKGE

SEQ ID NO: 9661 - DNA, 327 bp, Streptococcus agalactiae
atgtttacaattaacacaaaattcccacaagttcttgaggataaaagtattatgggagtgactgcaattgtgtcagttgatttaccacacgtgaaaggtaacttaacttttgatttaccacctgagtctgaaaataaatcttttgcagaaacgcttgaaaagtgtgagcagatattttacgacgaaaagtataaagataaagctcagtctgaaaaaatgactgaactaagtacatcaacatcaacaggcacacaaacacttatcaatctgataagtacgctttacgcaaaagaggttttaaaagatgaagatcttattgctattggt

SEQ ID NO: 9662 - protein, 109 aa, Streptococcus agalactiae
MFTINTKFPQVLEDKSIMGVTAIVSVDLPHVKGNLTFDLPPESENKSFAETLEKCEQIFYDEKYKDKAQSEKMTELSTSTSTGTQTLINLISTLYAKEVLKDEDLIAIG

SEQ ID NO: 9663 - DNA, 969 bp, Streptococcus agalactiae
atgaaacaacctttagctttgacatgggaagatcaaattagactacttgaaaaacgtggattaattgttaaagctgatgatgtagagaaaatcaaacatatcagttattatagaattaaagaatttgcaaaaccacttgaaataaagcaacaagatggtgaggagcaggatattttatatgataatattgagtttgcagaagttttggcaagatattatcaggataaaaacttaagaatctatctactgcacgctattgaaaaaattgaagtgtctattaaaacaaaaatttcttttgttttgggggatagatatggggcgttcggatatttaaatttctcttcatgggctaataggaataagtttacaaaatatgatattgaaaaaagacaatttaggattaaaaagaatttattgaatactgtaagaaaatctcaactaactgagttacaaaaatcaattaaccttgatctagatggattcccaacagtgtggcttgctattgatttattgatgtttggtgacatcgtttcaatcttaacaatcatgagtgagaagaacattaaacagatttgtcaatattacagttgtacaccagaagaacttgtttcgtggcttaaatgtttgaatttcataagaaatgtatgtgctcataattcaaatgtactggatattcaaatcacaacaaagcctaaacttcgttcagaatggagaaattatattgatacagtaataattaaacataacgtgactaaaccttctaataagttatccgttattattgctattgtagtctatcttgtaaatactattaattccaaatatcaatggagaaatatacagtctagtttgaaggctctttgtaaagaagatgacagtagggcaaagcttttaggttttaaagattatgattctgttaaagcaatgattaatgggataaagtgtactacttttacaaattcaaaaaaa

SEQ ID NO: 9664 - protein, 323 aa, Streptococcus agalactiae
MKQPLALTWEDQIRLLEKRGLIVKADDVEKIKHISYYRIKEFAKPLEIKQQDGEEQDILYDNIEFAEVLARYYQDKNLRIYLLHAIEKIEVSIKTKISFVLGDRYGAFGYLNFSSWANRNKFTKYDIEKRQFRIKKNLLNTVRKSQLTELQKSINLDLDGFPTVWLAIDLLMFGDIVSILTIMSEKNIKQICQYYSCTPEELVSWLKCLNFIRNVCAHNSNVLDIQITTKPKLRSEWRNYIDTVIIKHNVTKPSNKLSVIIAIVVYLVNTINSKYQWRNIQSSLKALCKEDDSRAKLLGFKDYDSVKAMINGIKCTTFTNSKK

SEQ ID NO: 9665 - DNA, 651 bp, Streptococcus agalactiae
atgaaaatattaactgttgaagatgataagttgataagagagggaataagtgaatacctttcagaatttggatatactgttattcaggctaaagatggaagggaagccttgtcaaaatttaatagtgatataaacttggttatcttagacattcagataccttttataaatggtttagaagtgttgaaagaaattagaaagaaaagcaatttaccaattctaattttgactgcatttagtgatgaagaatataaaattgatgcatttactaatttagtagatggatatgtagaaaaaccattttcattgcctgttttaaaggctagaatagattctttaattaagaagaattttggacatttagagaagtttgaatataagaatctttcggtaaattttaatagttatacagctaaaataaatgatgaaaaaatagatgtaaatgcaaaagaactcgaaatactaaaatgtttattggataatgatggacaagttttaacaagaatgcaaattattgattatgtctggaaggatagcgaagagatcccttatgatcgagtagtagatgtatatataaaagaacttagaaaaaaattacaattagactgtataactactataagaaatgtaggatataaattggagagaaaa

SEQ ID NO: 9666 - protein, 217 aa, Streptococcus agalactiae
MKILTVEDDKLIREGISEYLSEFGYTVIQAKDGREALSKFNSDINLVILDIQIPFINGLEVLKEIRKKSNLPILILTAFSDEEYKIDAFTNLVDGYVEKPFSLPVLKARIDSLIKKNFGHLEKFEYKNLSVNFNSYTAKINDEKIDVNAKELEILKCLLDNDGQVLTRMQIIDYVWKDSEEIPYDRVVDVYIKELRKKLQLDCITTIRNVGYKLERK

SEQ ID NO: 9667 - DNA, 585 bp, Streptococcus agalactiae
atggctaccgttaagacaaaaacagctcttaaaaagactcaaaaaacgtatcctcaaaacttactcaaccagaaatttaatcctgataaacctaatcaagtatggtctactgacttcacctatatttctattggatataagaaatatgtctatctctgcgcaataattgatctctattctagaaaatatattgcttggaaattgagtcatcgtatggatgcaaagttagcatgtgacactctagaattagctcttaataaaagaaagattgaaggaacacttctctttcattccgaccaagggtcacaatttaaggccagggaatttagaaaaataattgatgacaacaatatcatgcattctttttctaaacctagatatccttatgataatgccgtaactgaagcatttttcaagtatttaaagcatagacaaatcaaccaaaaaaattatcaaaatatcaaacaggttcaattagactgctttgaatacattgagaatttttataacaattacatcccacatacggctaatctaggactaacccctaatcagaaagaagaaaattattttaacgcaataaaa

SEQ ID NO: 9668 - protein, 195 aa, Streptococcus agalactiae
MATVKTKTALKKTQKTYPQNLLNQKFNPDKPNQVWSTDFTYISIGYKKYVYLCAIIDLYSRKYIAWKLSHRMDAKLACDTLELALNKRKIEGTLLFHSDQGSQFKAREFRKIIDDNNIMHSFSKPRYPYDNAVTEAFFKYLKHRQINQKNYQNIKQVQLDCFEYIENFYNNYIPHTANLGLTPNQKEENYFNAIK

SEQ ID NO: 9669 - DNA, 1203 bp, Streptococcus agalactiae
atgtcacaaaaatcaaactattttaaagggcaaattgattatgctgttgtgataccagtattttttttattaatgattggtttagcctcaatttatgttgcaacgatgaatgattatccttctaatatctatatcgcgatgtttcagcaggtgtcttggattattatggggtgtattattgcatttgtcgttatgcttttcagtactgaatttttatggaaagccacgccctatctgtatgctttaggactaaccctaatggttcttcccttaattttttatagtccacagctttttgcggcaacaggtgctaaaaattgggtgaccattggctcggtaactttgtttcaaccgtcagagtttatgaagatttcctatattttaatgttatctcgaataactgttagttttcatcagaaaaatcgcaaaacttttcaagatgattggaagttgctaggattgtttggtttggttacattgccagtgatgattcttctaatgttacaaaaagatttaggaacagcattagttttccttgccattttgtcaggtttaatccttttatcgggcatatcttggtggataatcttgccaattttatctactatcgttctttttatagctagctttttgatgatttttatctcaccaaacggcaaggaatggttttataatttggggatggatacatatcaaatcaaccgtttatctgcttggattgatccatttagttttgcagactcaattgcttatcaacaaacacagggtatggtatcaattggaagtggcggggtaacaggtaaaggttttaatattttagagctctcggttcctgttcgtgaaagtgacatgatttttactgtcattgctgagaattttggcttcattggttcggcgattgttttagggttatatctcattatcatttaccgtatgttaaggatcaccattgaatctaataatcaattttatacttttatatcaactggttttatcatgatgattgttttccatgtttttgaaaatattggtgcagcagttggtatattacctctaacaggaatcccacttccgtttatttcgcaaggtggaagttcattactaagtaatcttattggaattggattggtcttatccatgtcttatcaaaatacagttcgtcaggccaaggctaatggatcacatttgaagtatcgtagtata

SEQ ID NO: 9670 - protein, 401 aa, Streptococcus agalactiae
MSQKSNYFKGQIDYAVVIPVFFLLMIGLASIYVATMNDYPSNIYIAMFQQVSWIIMGCIIAFVVMLFSTEFLWKATPYLYALGLTLMVLPLIFYSPQLFAATGAKNWVTIGSVTLFQPSEFMKISYILMLSRITVSFHQKNRKTFQDDWKLLGLFGLVTLPVMILLMLQKDLGTALVFLAILSGLILLSGISWWIILPILSTIVLFIASFLMIFISPNGKEWFYNLGMDTYQINRLSAWIDPFSFADSIAYQQTQGMVSIGSGGVTGKGFNILELSVPVRESDMIFTVIAENFGFIGSAIVLGLYLIIIYRMLRITIESNNQFYTFISTGFIMMIVFHVFENIGAAVGILPLTGIPLPFISQGGSSLLSNLIGIGLVLSMSYQNTVRQAKANGSHLKYRSI

SEQ ID NO: 9671 - DNA, 1860 bp, Streptococcus agalactiae
atgcgtccaggcatgtatatcggttcgacttcgaaagaagggcttcatcaccttgtatgggaaattgttgataactcaattgatgaagccttagctggatttgcaggacatattaaagtttacattgaaccagataactctattacagttgttgatgatggtcgcggtattccggtagatatccaagaaaaaactggaagaccagctgtagagacagtttttacagttctccatgccggtggtaaatttggtggtggcggatacaaggtttctggtggcttacatggtgtagggtcatctgttgttaatgcattgtcaacacaattagatgtcaaggtttataaaaatggcaaggttcattatcaagaataccaacgcggtgttgttgttaatgatcttgaaattatcggtgatactgacttatcaggaacaacagttcactttacgcctgacccagaaattttcactgaaaccactgtatttgattttgataaattagccaaacgtattcaggaattagcttttttaaatcgtggactaagaatctccatttcagacaagcgagaaggtcaagaagttgaaaaagaatatcactatgaaggtggtataggttcatacgttgagtttatcaatgagaacaaagaagtgatttttgaaaatcctatttatactgacggtgaattagatggtatttcagttgaagtagcaatgcagtatactactggatatcaagagactgttatgagttttgcaaataacatccacactcatgaaggaggaacgcacgaacaaggatttcgtactgccttgacacgtgtgattaatgattacgctaaaaagaataagattctcaaagaaaatgaagataatttaactggagaagatgttcgtgaaggtttaacagcagttatatctgttaaacatccaaatccacaatttgaaggacaaactaaaacaaaacttggaaattctgaagttgttaaaattacaaatcgtctctttagcgaagctttcaatcgattcctattagaaaatccacaagtagctaagaagattgttgaaaaaggaattttggcatctaaagcccgtattgcagcaaaacgggcgcgtgaagtaacacgtaaaaagtcaggcttagagatttcaaacttacctgggaaactggctgattgctcatctaataatgctgagatgaatgaactttttatagtggagggagattctgcgggagggtctgcaaaatcaggacgtaatcgtgagtttcaagcaattttaccgattaggggtaagattctaaacgttgaaaaagctacaatggataaaattttagcaaacgaagaaatccgaagtctcttcacagctatgggaactggatttggtgcagattttgatgtatcaaaagtcagatatcaaaaattagtcattatgactgatgccgatgttgatggagctcacatcagaactttacttttaactctgatttatcgttttatgcgacctgttttggaagcaggatatgtttatatcgctcaaccaccaatctatggtgtcaaagtaggaagtgagattaaagcttatattcagccaggggtcaatcaagaagaggaattacgtcaagctctagatacctatagttcaggacgttcaaaacctactgtacaacgttacaaaggtctaggtgagatggatgaccatcaactttgggaaacaacaatggatcctgaaaaccgcttgatggcacgtgtctcagttgatgatgcagcagaagcagataagattttcgatatgctaatgggagatcgagtagaaccacgacgtgaattcattgaagctaatgctgtttatagtaacttagatatc

SEQ ID NO: 9672 - protein, 620 aa, Streptococcus agalactiae
MRPGMYIGSTSKEGLHHLVWEIVDNSIDEALAGFAGHIKVYIEPDNSITVVDDGRGIPVDIQEKTGRPAVETVFTVLHAGGKFGGGGYKVSGGLHGVGSSVVNALSTQLDVKVYKNGKVHYQEYQRGVVVNDLEIIGDTDLSGTTVHFTPDPEIFTETTVFDFDKLAKRIQELAFLNRGLRISISDKREGQEVEKEYHYEGGIGSYVEFINENKEVIFENPIYTDGELDGISVEVAMQYTTGYQETVMSFANNIHTHEGGTHEQGFRTALTRVINDYAKKNKILKENEDNLTGEDVREGLTAVISVKHPNPQFEGQTKTKLGNSEVVKITNRLFSEAFNRFLLENPQVAKKIVEKGILASKARIAAKRAREVTRKKSGLEISNLPGKLADCSSNNAEMNELFIVEGDSAGGSAKSGRNREFQAILPIRGKILNVEKATMDKILANEEIRSLFTAMGTGFGADFDVSKVRYQKLVIMTDADVDGAHIRTLLLTLIYRFMRPVLEAGYVYIAQPPIYGVKVGSEIKAYIQPGVNQEEELRQALDTYSSGRSKPTVQRYKGLGEMDDHQLWETTMDPENRLMARVSVDDAAEADKIFDMLMGDRVEPRREFIEANAVYSNLDI

SEQ ID NO: 9673 - DNA, 1281 bp, Streptococcus agalactiae
atgaaattactgactaatgcaaatactctcaagggaaccatccgtgttcctggcgataaatcaataagtcacagggctattatttttgggagtatatctcagggagttacccgaattgttgatgtcttaagaggcgaggatgttttatcaactatagaggcttttaaacaaatgggggttctaattgaagacgatggcgagataatcactatctatggcaaaggatttgcaggtttaacacaaccgaataatctcttagacatgggaaactctggtacttcaatgcgtctgatagcaggtgtgttagctggtcaagagtttgaagtgacgatggttggagacaatagtttgtcaaagagacctatggatcgtatagcattgcctttaagcaaaatgggagctagaatttcgggagtaactaaccgtgatttaccaccattaaaacttcaaggtacaaaaaaattaaaacctattttttaccatttacccgtagcttctgcacaagtaaaatcagctttaatttttgcggctttacaaactaagggagaatctctcattgtagaaaaagagcaaacaaggaatcatactgaggacatgattcggcaatttggtggacatttggatattaaagataaagaaattcgactcaatggcggtcagagcttagtaggacaagatataagagttcctggtgatatttcgagtgctgccttttggatagtagcgggtcttattattcctaacagtcatattattttagaaaacgtaggtataaacgagacacgaactggaatccttgatgtcgtcagtaaaatgggtggaaaaattaagttatcttcggttgataatcaagtaaaatcagcaacccttacagttgattactctcatctacaagctactcatatttctggggctatgattccacgtctgattgatgaattacctattattgctcttttagcaacacaagctcaaggcaccacagtcatagcagatgctcaggaattaaaggtgaaagagacagatcggattcaggtcgttgtcgaatcgctaaaacagatgggtgctgatattactgctacagcagatggtatgattatacgtggtaatacccctcttcacgctgcttcacttgattgtcatggagatcatagaataggaatgatgatagctattgctgctctcttggtcaaagaaggcgaagtagatttatctggtgaagaagctattaatacaagctatcctaactttttagaacatttggagggattagttaatgcc

SEQ ID NO: 9674 - protein, 427 aa, Streptococcus agalactiae
MKLLTNANTLKGTIRVPGDKSISHRAIIFGSISQGVTRIVDVLRGEDVLSTIEAFKQMGVLIEDDGEIITIYGKGFAGLTQPNNLLDMGNSGTSMRLIAGVLAGQEFEVTMVGDNSLSKRPMDRIALPLSKMGARISGVTNRDLPPLKLQGTKKLKPIFYHLPVASAQVKSALIFAALQTKGESLIVEKEQTRNHTEDMIRQFGGHLDIKDKEIRLNGGQSLVGQDIRVPGDISSAAFWIVAGLIIPNSHIILENVGINETRTGILDVVSKMGGKIKLSSVDNQVKSATLTVDYSHLQATHISGAMIPRLIDELPIIALLATQAQGTTVIADAQELKVKETDRIQVVVESLKQMGADITATADGMIIRGNTPLHAASLDCHGDHRIGMMIAIAALLVKEGEVDLSGEEAINTSYPNFLEHLEGLVNA

SEQ ID NO: 9675 - DNA, 1353 bp, Streptococcus agalactiae
atgttacataaaaatgatattattgaaactgaaattagcgacattagccatgagggaatgggtattgccaaagtagatggctttgttttctttgttgaaaatgctcttccaggtgagattattaagatgcgcgtcttgaaattacgtaagcgtataggatatggaaaagttgaggaatatttaacgacttctcctcaccgaaatgaaggattagactatacctatttacgtacagggattgctgatttgggacatcttacttatgaacaacagctgttatttaaacaaaaacaagtagctgataacctttataaaattgctcatatatctgatgttttagtagaacctactcttggtatgacaatccctttggcatatcgaaataaagctcaggtaccagttcgtcgtgttgatggacagctagagacaggttttttcagaaaaaattcacatactctggtatccattgaagattatttaattcaggaaaaagagattgatgctctgattaattttacacgagatttattaagaaaatttgatgttaaaccatatgacgaagagcagcaatctggtttaattagaaatctcgttgttcgtcgaggacattatacagggcaattaatgttggttttggtgacaacacgtcctaaaatattccgcattgaccaaatgattgaaaagttggtgtctgcctttccttctgttgtttcaattatgcaaaatattaatgatcgtaatagcaacgttatttttgggaaagaatttcgtactctatatggttctgatactattgaggaccaaatgttaggaaatacttacgctatatcagcccaatctttttaccaagttaatactgaaatggctgaaaaactgtaccaaaaagcaatcgatttttcagatttaaactcagaggatatcgttattgatgcctattcaggtataggaacaattggcttatctgttgctaaacaagtaaaacatgtttatggtgttgaagttgttgaaaaagcagtaagtgatgccaaagaaaatgctactcgaaatgggataactaacagtacctatgttgctgattcggctgaaaatgcaatggcaaagtggcttaaagaaggtataaaaccaactgttataatggttgatccaccacgaaaaggattaacggagagttttgtatattctgctgcccaaacaaaagcagataaaatcacttatatttcttgtaattcagcgacaatggcgcgtgatatcaaactatttgaagaattagggtatcatttagtaaaaattcaaccagtagacttattcccaatgacacatcatgtggagtgtgtggctctgctcgtaaaagcc

SEQ ID NO: 9676 - protein, 451 aa, Streptococcus agalactiae
MLHKNDIIETEISDISHEGMGIAKVDGFVFFVENALPGEIIKMRVLKLRKRIGYGKVEEYLTTSPHRNEGLDYTYLRTGIADLGHLTYEQQLLFKQKQVADNLYKIAHISDVLVEPTLGMTIPLAYRNKAQVPVRRVDGQLETGFFRKNSHTLVSIEDYLIQEKEIDALINFTRDLLRKFDVKPYDEEQQSGLIRNLVVRRGHYTGQLMLVLVTTRPKIFRIDQMIEKLVSAFPSVVSIMQNINDRNSNVIFGKEFRTLYGSDTIEDQMLGNTYAISAQSFYQVNTEMAEKLYQKAIDFSDLNSEDIVIDAYSGIGTIGLSVAKQVKHVYGVEVVEKAVSDAKENATRNGITNSTYVADSAENAMAKWLKEGIKPTVIMVDPPRKGLTESFVYSAAQTKADKITYISCNSATMARDIKLFEELGYHLVKIQPVDLFPMTHHVECVALLVKA

SEQ ID NO: 9677 - DNA, 747 bp, Streptococcus agalactiae
ttggataatcaaatttataaaaaacaaatacttgagatttataccaaagcaaacaaaagacttggtgtgaagtctatcaaagtcattcttcaaagagactacgacacaaaaatctctgaaggaagaatttaccatctgatgaagaatatggcgctccctaaaatggctaccgttaagacaaaaacagctcttaaaaagactcaaaaaacgtatcctcaaaacttactcaaccagaaattttatcctgacaaacctaatcaagtatggtctactgacttcacctatatttctattggatataagaaatatgtctatctctgcgcaatacttgatctctattctagaaaatgtattgcttggaaattgagtcaccgtatggatgcaaagttagcatgtaacactctagaattagctcttaataaaagaaagattgaaggaacacttctctttcattccgaccaagggtcacaatttaaggccagggaatttagaaaaataattgatgacaacaatatcatgcattctttttctaaacctggatatccttatgataatgccgtaactgaagcatttttcaagtatttaaagcatagacaaatcaaccgaaaacattatcaaaatatcaaacaggttcaattagactgctttgaatacattgagaatttttataacaattacatcccacatacggctaatctaggactaacccctaatcagaaagaagaaaattattttaacgcaataaaa

SEQ ID NO: 9678 - protein, 249 aa, Streptococcus agalactiae
MDNQIYKKQILEIYTKANKRLGVKSIKVILQRDYDTKISEGRIYHLMKNMALPKMATVKTKTALKKTQKTYPQNLLNQKFYPDKPNQVWSTDFTYISIGYKKYVYLCAILDLYSRKCIAWKLSHRMDAKLACNTLELALNKRKIEGTLLFHSDQGSQFKAREFRKIIDDNNIMHSFSKPGYPYDNAVTEAFFKYLKHRQINRKHYQNIKQVQLDCFEYIENFYNNYIPHTANLGLTPNQKEENYFNAIK

SEQ ID NO: 9679 - DNA, 1206 bp, Streptococcus agalactiae
atggttacattcgattttaaacatgttcaaacattgcataccatatctcaactacctatttcagtcatgtcacgagacaaggaactcgttcagttatatggtaacgaagactatctgttgccttactatcagtttttaaaacatttagctatcccttataaccaagatatcactgtttatgagggtctttttgaagaatcattcttaatttttcctgtctgtcaatatcttattgctattggaccattttatccctatagccctgatatcaataggcaagaacagttatccagtcgctttctagaacaattttctcatcgtaataaaaaagaaatcttatcctatataaagcttgtcccttgttttcctactaccagtatacgtagtcttcttgtgtctatcgatgcctttttccaaacacagtttgaggctagttgccaacaagtcatcaatcatttattagaagagtcagaacagattgttgcggatcctgatattgttcttcacctaaaacatactaagaaaaactcttttcagttacccactgttttaaaccatctcaatcacattattgatctcgttaagctgggtaacactcaactgttaaagcaagaaattaatcgcctcccatcatccagtgttacctcatcttcaatccctgccctaagagctgaaaagaacttaactgttgtttacttaacaaaattactagaattaagtttcgaggaaaatactgatgtggctaaaagttatgcgctggtaaagcactatatggctttaaacgaagaggctcctgatcttattgatgtttcaagaattcgctgtgcagctcttattgatttttcagaatccttaaccaataagagcatctctgacaagcagcaaatgtacaatagtattctccattatgtggacaaccacctctactccaaactcaaagtatctgatattgccaactacctatatatctcagattcccacttacgctcagtttttaaaaaatactctgacatttccttgcaaagttatattctaaaggcaaaaattaaggagggacaattactactgcaaagaggggtaccgattggggaagtagcgaaattattacatttttacgacaccacacattttcttaaaacctttaaaaaatacgtgggaatatcttcaaacgaatatcttactaaatatcgtgagacctcatgccag

SEQ ID NO: 9680 - protein, 402 aa, Streptococcus agalactiae
MVTFDFKHVQTLHTISQLPISVMSRDKELVQLYGNEDYLLPYYQFLKHLAIPYNQDITVYEGLFEESFLIFPVCQYLIAIGPFYPYSPDINRQEQLSSRFLEQFSHRNKKEILSYIKLVPCFPTTSIRSLLVSIDAFFQTQFEASCQQVINHLLEESEQIVADPDIVLHLKHTKKNSFQLPTVLNHLNHIIDLVKLGNTQLLKQEINRLPSSSVTSSSIPALRAEKNLTVVYLTKLLELSFEENTDVAKSYALVKHYMALNEEAPDLIDVSRIRCAALIDFSESLTNKSISDKQQMYNSILHYVDNHLYSKLKVSDIANYLYISDSHLRSVFKKYSDISLQSYILKAKIKEGQLLLQRGVPIGEVAKLLHFYDTTHFLKTFKKYVGISSNEYLTKYRETSCQ

SEQ ID NO: 9681 - DNA, 990 bp, Streptococcus agalactiae
atgtcaatgattgaagtttctcaccttcagaaaaattttataaaaaccgttaaagcaccagggttaaaaggagcatttcaatcatttcttcgtcctgaaaaacacacctttgaagctgttaaagatttaacatttgatgtgcctaaaggacaaattctgggatttattggagcgaacggtgcaggaaaatctacaacaattaaaatgttaactgggattttaaaaccaacttcgggcttttgccgtattgatggcaaattgccacaagaaaaccgacaaaattatgttaaggatattggagtcgtttttgggcaacgtacgcagttatggtgggatttagctctacaagaaacctatacagtgttaaaagaaatctatgacgttcctgataaagaatttcgcaaacgcatggcttttttaaatgaggttttggaactaaatgactttataaaggatcctgttagaactttgtctctcggacagcgtatgagagcggatatcgcagcttctttattacataacccaaaggttcttttcttagatgaacccaccattggcttggacgtttcagtgaaagataatatccgacgtgcaatcacacaaattaatcaagaagaagagacaacgattttactaacgacacatgacctcagtgatattgaacaactttgtcatcgtatttttatgattgatagaggacaagaaatatttgatggcacagtttctcagctaaaagagacatttggaaagatgaaaactctttcttttgatttgcgcccaggacaagagcatatcagctctagtttaattggaaagtcggagattaatattaaacgtaatgacttagttttagatattcagtatgatagttctcgctaccaaactgctgacataattcagcagacattagcagatttttctgtacgtgaccttaaaatgacagatgcggatattgaagatatcattcgtcgcttctatagaaatgagcta

SEQ ID NO: 9682 - protein, 330 aa, Streptococcus agalactiae
MSMIEVSHLQKNFIKTVKAPGLKGAFQSFLRPEKHTFEAVKDLTFDVPKGQILGFIGANGAGKSTTIKMLTGILKPTSGFCRIDGKLPQENRQNYVKDIGVVFGQRTQLWWDLALQETYTVLKEIYDVPDKEFRKRMAFLNEVLELNDFIKDPVRTLSLGQRMRADIAASLLHNPKVLFLDEPTIGLDVSVKDNIRRAITQINQEEETTILLTTHDLSDIEQLCHRIFMIDRGQEIFDGTVSQLKETFGKMKTLSFDLRPGQEHISSSLIGKSEINIKRNDLVLDIQYDSSRYQTADIIQQTLADFSVRDLKMTDADIEDIIRRFYRNEL

SEQ ID NO: 9683 - DNA, 957 bp, Streptococcus agalactiae
ttgcctcaggaaggatgttggtatcagaaaatggaaattaaactcaaaaatattggaaaaaaatatggttcttttgaagcattgagagacattaatctcatctttgaagagggaaaattttatggccttcttggacctaatggagctggtaaaacaactttatttaaccttttaattcaaaattttaagcaaacgtcaggcgatattaagtgggaggtggatggaaaacctctatctattaaagatttttatcgtcacattggtattgtcttccaaagtaatcgcttagatgataatttaacggttgaggaaaatctaatttctagaggtgctttgtacggtttatctaaatcacaagtacgtaatcgccttaaagatcttcaaacgtatctagatatcacagcaataaaaaaacaaaaatatggcagtttatcaggaggtcaaaaacgaaaagttgatattgcacgcgccttgctgccacaaccttctctattattattagatgaaccaacgactggtttagaccctcaatctcgtcgcgatttatgggatgctatcgcacaactaaatcaacaatcgcagatgacagttgtactaattactcattatcttgaagaaatgtctgcttgtgatgttttaaatgttcttattgaaggaaacatttattattcgggagatattaaaagctttattgagcaacattccacaacaaacttgaatgtggtattgaaaccagaaaagtcattagaccaactttcgatagctgattttgttaataaatgtcaagtcctttcagaaagggagatagtatttaaggatatttctgttgaggaaatgatgcaggttatctcagacaatcaagataaatctattattgagacatttaatgttgaatattcgaacttagaggcggcgtatctcaacttgcttagagaaaaagaaaggaaaaacaatgtt

SEQ ID NO: 9684 - protein, 319 aa, Streptococcus agalactiae
MPQEGCWYQKMEIKLKNIGKKYGSFEALRDINLIFEEGKFYGLLGPNGAGKTTLFNLLIQNFKQTSGDIKWEVDGKPLSIKDFYRHIGIVFQSNRLDDNLTVEENLISRGALYGLSKSQVRNRLKDLQTYLDITAIKKQKYGSLSGGQKRKVDIARALLPQPSLLLLDEPTTGLDPQSRRDLWDAIAQLNQQSQMTVVLITHYLEEMSACDVLNVLIEGNIYYSGDIKSFIEQHSTTNLNVVLKPEKSLDQLSIADFVNKCQVLSEREIVFKDISVEEMMQVISDNQDKSIIETFNVEYSNLEAAYLNLLREKERKNNV

SEQ ID NO: 9685 - DNA, 696 bp, Streptococcus agalactiae
atggttaattattggctcattgcaggtttgacgactattatttcaatgactagtacattaggtgcctttggagttatggtgtccgacaaagaaaaaaaattaaatgaagattttaaggtcagtcctatatcaaatatcaaaattgaattgtcctatgctatatttgccgttttatttggtattgtcatgacgatgttctcttgcatctttgctatcggtatttttaacggctttaattccttgctagagtattcagctatggattatttaactattttagggatcgtttccttagggactgttttatctgcggcgatgattttacctattttagcctttattcatactagttcagcttttacgactcttagcacaattgtagggacttttattggttttatttcaggagtatatctctcaattggctcggtaggaaaagcattacaacaggttatgacatggtttccattgactcaaatcaattctcttttgaaacaggtcttaatgaagggttctattgcgaaggtatttgacaaagccaacgaagccactgtctctaactataaagaatcatatggtgttgttttgcgtaatgctgatggagaaaggctgagtaatcactttatgttgatttatatcattgccctcattcttattttattggcaattcattttattattaaaaaggttaaaaaa

SEQ ID NO: 9686 - protein, 232 aa, Streptococcus agalactiae
MVNYWLIAGLTTIISMTSTLGAFGVMVSDKEKKLNEDFKVSPISNIKIELSYAIFAVLFGIVMTMFSCIFAIGIFNGFNSLLEYSAMDYLTILGIVSLGTVLSAAMILPILAFIHTSSAFTTLSTIVGTFIGFISGVYLSIGSVGKALQQVMTWFPLTQINSLLKQVLMKGSIAKVFDKANEATVSNYKESYGVVLRNADGERLSNHFMLIYIIALILILLAIHFIIKKVKK

SEQ ID NO: 9687 - DNA, 2154 bp, Streptococcus agalactiae
ttgggaaagaattatagcgagcataaacagcatctcttcgacttaaaagaaggaatttctaaacatttatataaaaatcacgactctattttagaatcttatacaggaagcataactagtgacccagaggttcctgagcaatacaaagatgagacacgtaattttaaatttgcttttaccgcttttgaagaggctcttgcttcttcaggtgttaatttaaaagcttatcataatattgctgtgtgtttagggacctcacttgggggaaagagtgctggtcaaaatgccttgtatcaatttgaagaaggagagcgtcaagtagatgctagtttattagaaaaagcatctgtttaccatattgctgatgaattgatggcttatcatgatattgtgggagcttcgtatgttatttcaaccgcctgttctgcaagtaataatgccgtaatattaggaacacaattacttcaagatggcgattgtgatttagctatttgtggtggctgtgatgagttaagtgatatttctttagcaggcttcacatcactaggagctattaatacagaaatggcatgtcagccctattcttctggaaaaggaatcaatttgggtgagggcgctggttttgttgttcttgtcaaagatcagtccttagctaaatatggaaaaattatcggtggtcttattacttcagatggttatcatataacagcacctaagccaacaggtgaaggggcggcacagattgcaaagcagctagtgactcaagcaggtattgactacagtgagattgactatattaacggtcacggtacaggtactcaagctaatgataaaatggaaaaaaatatgtatggtaagtttttcccgacaacgacattgatcagcagtaccaaggggcaaacgggtcatactctaggggctgcaggtattatcgaattgattaattgtttagcggcaatagaggaacagactgtaccagcaactaaaaatgagattgggatagaaggttttccagaaaattttgtctatcatcaaaagagagaatacccaataagaaatgctttaaatttttcgtttgcttttggtggaaataatagtggtgtcttattgtcatctttagattcacctctagaaacattacctgctagagaaaatcttaaaatggctatcttatcatctgttgcttccatttctaagaatgaatcactttctataacctatgaaaaagttgctagtaatttcaacgactttgaagcattacgctttaaaggggctagaccacccaaaactgtcaacccagcacaatttaggaaaatggatgatttttccaaaatggttgccgtaacaacagctcaagcactaatagaaagcaatattaatctaaaaaaacaagatacttcaaaagtaggaattgtatttacaacactttctggaccagttgaggttgttgaaggtattgaaaagcaaatcacaacagaaggatatgcacatgtttctgcttcacgattcccgtttacagtaatgaatgcagcagctggtatgctttctatcatttttaaaataacaggtcctttatctgtcatttcgacaaatagtggagcgcttgatggtatacaatatgccaaggaaatgatgcgtaacgataatctagactatgtgattcttgtttctgctaatcagtggacagacatgagttttatgtggtggcaacaattaaactatgatagtcaaatgtttgtcggttctgattattgttcagcacaagtcctctctcgtcaagcattggataattctcctataatattaggtagtaaacaattaaaatatagccataaaacattcacagatgtgatgactatttttgatgctgcgcttcaaaatttattatcagacttaggactaaccataaaagatatcaaaggtttcgtttggaatgagcggaagaaggcagttagttcagattatgatttcttagcgaacttgtctgagtattataatatgccaaaccttgcttctggtcagtttggattttcatctaatggtgctggtgaagaactggactatactgttaatgaaagtatagaaaagggctattatttagtcctatcttattcgatcttcggtggtatctcttttgctattattgaaaaaagg

SEQ ID NO: 9688 - protein, 718 aa, Streptococcus agalactiae
MGKNYSEHKQHLFDLKEGISKHLYKNHDSILESYTGSITSDPEVPEQYKDETRNFKFAFTAFEEALASSGVNLKAYHNIAVCLGTSLGGKSAGQNALYQFEEGERQVDASLLEKASVYHIADELMAYHDIVGASYVISTACSASNNAVILGTQLLQDGDCDLAICGGCDELSDISLAGFTSLGAINTEMACQPYSSGKGINLGEGAGFVVLVKDQSLAKYGKIIGGLITSDGYHITAPKPTGEGAAQIAKQLVTQAGIDYSEIDYINGHGTGTQANDKMEKNMYGKFFPTTTLISSTKGQTGHTLGAAGIIELINCLAAIEEQTVPATKNEIGIEGFPENFVYHQKREYPIRNALNFSFAFGGNNSGVLLSSLDSPLETLPARENLKMAILSSVASISKNESLSITYEKVASNFNDFEALRFKGARPPKTVNPAQFRKMDDFSKMVAVTTAQALIESNINLKKQDTSKVGIVFTTLSGPVEVVEGIEKQITTEGYAHVSASRFPFTVMNAAAGMLSIIFKITGPLSVISTNSGALDGIQYAKEMMRNDNLDYVILVSANQWTDMSFMWWQQLNYDSQMFVGSDYCSAQVLSRQALDNSPIILGSKQLKYSHKTFTDVMTIFDAALQNLLSDLGLTIKDIKGFVWNERKKAVSSDYDFLANLSEYYNMPNLASGQFGFSSNGAGEELDYTVNESIEKGYYLVLSYSIFGGISFAIIEKR

SEQ ID NO: 9689 - DNA, 1209 bp, Streptococcus agalactiae
atgagtaaatttttatttgctcctttcatgatgaatttaggagagagccaaagattatcaaaactggctaattgtttatatgaacaaggacatgatattcatatccttggagacaattattatccatttttatttaataatgatgcttatcgctatcaccactgtgtagaagataaatctgtttataatagtaagcgatatgatgctttcttttctctttcaacagactttaattttttatcagaagaagaaattgaacgcatctgttctattgaaagagacttgttacgccaagaaaaatttgatgctgtattgacaggttaccgtctatctattgttacaagttgtcgtttagaaagcataccattaatttggattatttcaggggcaacgcatatcagtgaaattgttgaaaactcagaaggaatattgcctaatgggaagataagtaaagctagtaagcctcaaacaaaggattttatcaaaagagtaatcactacttattcaacaaatgttaaaacgtggaataactatattaaaaaatatggtggcaaaacttttaataatgctttagaattatttactggtgatctaaacttggtaacagattactctttgttttatgaatttgataaagattcgtcctataaaacgataggacctattttgatagataatgtaggtttttcaaaatgcagccaaattaatcaagacaataagactgtactgctcagctttggtacttcatttaaacgagattgggtggaatcttttttaaagacattaccaaggcattatcattatttactgacaagctgtggtgaggctataaacattccaggaagttatattgagatagttgattttattgattttaaaaccatagataaagagatttatttcgctattatacacggtgggcaaggaacagtttatgcgatggctgcacaaggtattccctttataggtatccctttctttaacgaacaattttggaatattaagaagttcagtaaagaaaagtgcgcttatttggtaaagaaacctgatgtaagagagatacgtaaagcaattagctgtcttgaaagagactatgatatctataaaagttatatgataagactaagccaaggaattaaagaagaagcagaggcatctttacaaaaagcggaggcagaaattgaatcctttatcagaaaaagacaaagt

SEQ ID NO: 9690 - protein, 403 aa, Streptococcus agalactiae
MSKFLFAPFMMNLGESQRLSKLANCLYEQGHDIHILGDNYYPFLFNNDAYRYHHCVEDKSVYNSKRYDAFFSLSTDFNFLSEEEIERICSIERDLLRQEKFDAVLTGYRLSIVTSCRLESIPLIWIISGATHISEIVENSEGILPNGKISKASKPQTKDFIKRVITTYSTNVKTWNNYIKKYGGKTFNNALELFTGDLNLVTDYSLFYEFDKDSSYKTIGPILIDNVGFSKCSQINQDNKTVLLSFGTSFKRDWVESFLKTLPRHYHYLLTSCGEAINIPGSYIEIVDFIDFKTIDKEIYFAIIHGGQGTVYAMAAQGIPFIGIPFFNEQFWNIKKFSKEKCAYLVKKPDVREIRKAISCLERDYDIYKSYMIRLSQGIKEEAEASLQKAEAEIESFIRKRQS

SEQ ID NO: 9691 - DNA, 1083 bp, Streptococcus agalactiae
atgcaaagaaaatcctatttaaaatccatgagtgttcttactttaacagcttgtcttatatcaggatatgtggttaaagatattgctatgttacatgcagtatctgccagtgagaagaaagcaaataatgtcagtccgagagaaaatctctacagggctgtcaatgataattggctagccaatacaaaactcaaacaagggcagactagtgttaatagtttttcagaaattgaggataaattaaagcaactgttagtgtctgatatggctaaaatggcctcaggaaagattgaaacaaccaatgatgaacagaaaaaaatggttgcatactataaacaaggtatggactttaaaacaagagataaaaatggtctcaaacctctaaaaccagttttacaaaaacttgaagcagtctcttcaatgaaagactttcaaagtttggcccatgattttgtgatgagtggttttgttttaccatttggtttgactgtggaaaccaatgctcgagataatagccaaaagcaattggtgcttcgtcaagcacccgcattacttgaatcacctgaccaatataagaagggcaataaagaaggtgaggctaaattatcagcttaccgtacttcagcaatggctttgcttaaacaagctggaaaaagtaacattgaagatagaaaactagttaaacaagctatagcatttgatagactcttatcagaaaaaacgcaagttgatcaaagtaaaatcacagctgaaagtgagacagctgcggggcgatataaccctgaaagtatggaaacggttcacaattacgccaaggaatttgactttaaagaattgattgaaaaactagttgggccaacgaataaggcagtcaatgtagaagataaaacttattttaaacaggttaatgatgttataaatagtaaacaattagccaatatgaaagcatggatgatgatttctatgctagttgatcaatcagattttctaggagaacaaaatcgtcaagcagcgagtgcttttaagaatgttgcgtctggtttgactcagattgaatcgaaagaaaaaatgcttacacccaat

SEQ ID NO: 9692 - protein, 361 aa, Streptococcus agalactiae; identical to SEQ ID NO: 8764

SEQ ID NO: 9693 - DNA, 858 bp, Streptococcus agalactiae
atgcatccccaaggcgctgttgatttgacaaaatataaggcaaaaccggtcaaagattatggtaaaaaaatcgatgttggtgatggcaagaaaatgaacatttatgaaactggtcagggaaaaattccaattgtttttattcctggtcaagctgagatttcgccacgctatgcttataagaatttaattgagcggttaagtaaaaaatataaaatttatacagtagaaccattaggctatggtctcagtgatattcctactaaaccacgtacgctagaaaacattacaaaagaaattcacacaggcctaaataaaattggagttaaaaatttctaccttgcagctcactcacttggcggtatgtattctttaaattatgctaaaaattatccagaagaagtcagaggatttattggtatggataccagtacaccttggatggaaggggaacaaaaaacaaagtatgaccctgaaagtgctaaatgggcaatgaaattaccagatgttgatgataagactaacgaacagtatctgtcaattgcgaaaaaaattaacggcaataagtctcaacgagatgaagatgagcgcttaggtgataatcttggtaaattgaagaatgtaaaattccctaaagggatgccaactaagtattttcttgctgatcaatctgtggagggaatcaagctacgtcaagcagattttaaaggtttgaaaaattgggatcagcagcatattgatttatctgaagatccaaaagatgcttccgttgaaatttttaaaggtagtcacaatattttccaaacacaatatgaacatatggctaaagctattgatggatttatccaatcccatcaaaag

SEQ ID NO: 9694 - protein, 286 aa, Streptococcus agalactiae
MHPQGAVDLTKYKAKPVKDYGKKIDVGDGKKMNIYETGQGKIPIVFIPGQAEISPRYAYKNLIERLSKKYKIYTVEPLGYGLSDIPTKPRTLENITKEIHTGLNKIGVKNFYLAAHSLGGMYSLNYAKNYPEEVRGFIGMDTSTPWMEGEQKTKYDPESAKWAMKLPDVDDKTNEQYLSIAKKINGNKSQRDEDERLGDNLGKLKNVKFPKGMPTKYFLADQSVEGIKLRQADFKGLKNWDQQHIDLSEDPKDASVEIFKGSHNIFQTQYEHMAKAIDGFIQSHQK

SEQ ID NO: 9695 - DNA, 1227 bp, Streptococcus agalactiae
gtgaacctatggacattaagtttagcttatttgaaacgtcaaaaaatgaaaacagtaaccttgttcttagtttttctaactataggcacatgtttaatcagtctgatgagtattcagcattctttggaaaaaaatatcctaacaaaacaagggaaaagcatttatttaacctccaaagaaaaggcttattggcctgaacaagcatacgaagctttgaaaaaagcaaaaatggttgagtcagtagaggcaagtttaagcattgatgttggtagccgtttaaaatctgtatcaccatataactcttctaaagaagagaatcaagttacattagcaggttatcaaagtacagaagatttacgagcttttcagacaaaagcattggtcttaaagaaaggaagccatttagcggccgataatacaaaacaagtactagttccattgaagttagcacaaaagaatcatttaagtgtgggtaacaaattgagattaggcaaagaaaatgttactattgcaggaatttatgatgcgaatagtgctaagtctaaaaatacttttaatcccaatattgataatacattgattgctcaggcaacattggttaggaagattagtaaacaaaaaggttatcagacggttgcagtgcgcttaagtgataaacgtttagtggatacagttatccaaaacatcaaacaatggccgcttgatttcgggaaattagatgttcaaacagctaaagagttttatggagattcttatcgtaatatcgagacattgcatcgtctagtgggacgaatcattcttattgttagtctcgtggcgatggcaatattagttgtcatgctaacattttggattaataaccgcattaaagagacgggaattttactcgctatcggaaaaactaagtttgaaatcataggtcattatctgatagaagtactgttagtagcaggtgctgccttcacactatctattattggtggtgtctttcttggaaaaacatttgcagctggccttttatcacaagttaatggtggtgtgagttcacaaattgtacaaaatagtagtctaattattgatagaattgataacctcgctgtttctgttggagtaatggatgtctttagactctatgctcagggtgctttaatttgcttatttgcagttgtattatctagttattctattcttaaactacaaccaaagcaaatattgtcacgaatgtca

SEQ ID NO: 9696 - protein, 409 aa, Streptococcus agalactiae
MNLWTLSLAYLKRQKMKTVTLFLVFLTIGTCLISLMSIQHSLEKNILTKQGKSIYLTSKEKAYWPEQAYEALKKAKMVESVEASLSIDVGSRLKSVSPYNSSKEENQVTLAGYQSTEDLRAFQTKALVLKKGSHLAADNTKQVLVPLKLAQKNHLSVGNKLRLGKENVTIAGIYDANSAKSKNTFNPNIDNTLIAQATLVRKISKQKGYQTVAVRLSDKRLVDTVIQNIKQWPLDFGKLDVQTAKEFYGDSYRNIETLHRLVGRIILIVSLVAMAILVVMLTFWINNRIKETGILLAIGKTKFEIIGHYLIEVLLVAGAAFTLSIIGGVFLGKTFAAGLLSQVNGGVSSQIVQNSSLIIDRIDNLAVSVGVMDVFRLYAQGALICLFAVVLSSYSILKLQPKQILSRMS

SEQ ID NO: 9697 - DNA, 579 bp, Streptococcus agalactiae
atgtcggatgttgtcgaaaaacaaacaactaaatcgtttataatgaacgtattaaatggtttagctttagggactgttattgtcttgataccaggagcaatccttggagaattaatgaaagctttactgccaatgtggagcggctttgcaactttaatcgctgcaacagcagttgcaacaagtatgatggggcttgttattggtattatggttggtctcaattttaaatttaatcccattcaatcagcatcactaggattagcggttatgtttgcaggtggagctgcaaccttccttaaaggcgctattatgctaaaaggaacaggcgatatcattaacatgggaattactgctgccttaggtgtccttttgatccaatttttatctgacaagacgaaatcattcactttgattgtcattccaacagtaacactcttactagttggaggagtaggtcatgtgttattaccttatgtcaaaatgattaccaccatgattggacaagggacacgccgtacgcatgaaaactttctcttcatccttttgtgcccggacatcaattttgaaaagattcctttt

SEQ ID NO: 9698 - protein, 193 aa, Streptococcus agalactiae
MSDVVEKQTTKSFIMNVLNGLALGTVIVLIPGAILGELMKALLPMWSGFATLIAATAVATSMMGLVIGIMVGLNFKFNPIQSASLGLAVMFAGGAATFLKGAIMLKGTGDIINMGITAALGVLLIQFLSDKTKSFTLIVIPTVTLLLVGGVGHVLLPYVKMITTMIGQGTRRTHENFLFILLCPDINFEKIPF

SEQ ID NO: 9699 - DNA, 1023 bp, Streptococcus agalactiae
atggcaaaaattatttcattaggtgaggttcttttgcgattatctccacctcaatatcacacactgatgcaggctaatcacctaaaatgccaattcggtggttcagaacttaatgtcttagcaagccttgctcaactaggttaccatgtaggattggtctcagctttgcctgataatgatttgggcaagatggcaagtcaatttatattgtcacagcaaattagtccagctgctataattaaaaaagaaggacgactaggaatttattactatgaacaaggattttcggtaagaacaaataaggttatctacgatcgtaactattcatctttttgggaaagtaccttgagtgattatgattttacttctatttttaagggagtggattggtttcatgtttctggaattactccagcactaaccaaggacttatatgaggtgactcggttccttatgacaaaagctaaagaaggaggtgtaaaagtatcgattgatctcaattttcgtgagagtttatggtcatcttttcaagaggcacgtgagcaattatcgccactattaggattattagatgtttgctttggcttagagccgatttatttagctggcgaaagtgaagatttaaaagatgagttgggcttatccagaccttaccttgatattgaattacttgaaaagataacccaaaagattgtccaagaatatgggttagactatattgcctttactcaaagggaaatggaatatactaatcagtatatgttaaaatcatatttgtatcataataatatgttatatcaaactgataaaactggcgttgaagtattagatcgtgtggggacaggagatgcctttgctgcaggtttaattcatgcgcttctggaaaaagaaactcctcaaagggccttagaaatagctatggctacatttaaatacaaacataccattcaaggagatatcaatatcatgacacgagatgatattgcttacctcattgaaaaagaaacaaatgatattaaacga

SEQ ID NO: 9700 - protein, 341 aa, Streptococcus agalactiae
MAKIISLGEVLLRLSPPQYHTLMQANHLKCQFGGSELNVLASLAQLGYHVGLVSALPDNDLGKMASQFILSQQISPAAIIKKEGRLGIYYYEQGFSVRTNKVIYDRNYSSFWESTLSDYDFTSIFKGVDWFHVSGITPALTKDLYEVTRFLMTKAKEGGVKVSIDLNFRESLWSSFQEAREQLSPLLGLLDVCFGLEPIYLAGESEDLKDELGLSRPYLDIELLEKITQKIVQEYGLDYIAFTQREMEYTNQYMLKSYLYHNNMLYQTDKTGVEVLDRVGTGDAFAAGLIHALLEKETPQRALEIAMATFKYKHTIQGDINIMTRDDIAYLIEKETNDIKR

SEQ ID NO: 9701 - DNA, 1797 bp, Streptococcus agalactiae
atgttatatccattattgacaaaaacaagaaatacttatgatttaggcggtatttggaactttaaattaggagaacataatccaaatgaattactaccttcagatgaagtcatggttatcccgacttcatttaatgatttgatggtaagtaaagaaaaacgtgattatataggtgatttttggtatgaaaaagtcattgaagtacctaaagtatcagaggatgaagagatggtgctgcgttttggctcagtgacacatcaagctaaaatttatgttgacggtgtattggtaggagagcataagggaggttttactccttttgaagttcttgttcctgaatgtaagtataataatgagaaaattaaggtatcaatttgtgctaataacgttttagactataccacgcttccggtcggaaattatagtgaaatcattcaagaagatggtagcattaagaagaaagtacgtgagaattttgatttcttcaattatgcaggtgtgcatcgtcctcttaagttgatgatacgtcctaaaaatcatatttttgatattacaattacaagtcgtctatcagatgatttacagtcagcagatttacattttttagtggagactaatcaaaaggttgacgaagttagaattagcgtttttgatgaagataacaaactagtgggtgaaacgaaggatagcagattatttcttagtgatgtccatctttgggaagttttaaatgcctatctgtacacagcgcgtgttgaaatttttgttgataatcaactccaagatgtctatgaggaaaattttggtcttagagaaatagaagtgacaaatggtcaattcctattgaatcgcaaacctatttattttaaaggatttggtaaacatgaagatacgttcattaatggcagaggtttgaatgaagctgctaacttaatggatttgaatcttttgaaggatatgggggcaaactcttttagaacatcccattatccttattctgaagaaatgatgcgtttagcagatcgaatgggagtgttagtgatagatgaggttccagcagtagggttatttcaaaattttaacgcttccttagatttgtcaccaaaagataatggtacgtggaatttgatgcaaacaaaagcggcgcatgaacaagctatccaagaattagtgaagcgtgataaaaatcatcctagcgtcgtgatgtgggtagtcgctaacgaaccggctagtcatgaagcgggagcacatgattattttgagccattagtaaaactttataaagatttagaccctcaaaaacgtcctgtcaccttggttaatattttaatggcaaccccagatagagaccaagtgatggacctggttgatgttgtctgccttaatcgttactatggttggtacgttgaccacggtgatttaacaaatgcagaagtaggtataagaaaagagttattagaatggcaagataaatttcctgacaaaccaattatcataacggagtatggcgctgatacgttaccgggattacattctacttggaatattccatatacagaagaatttcaatgtgatttttatgaaatgagtcatcgtgtttttgatggtattcctaatttagttggtgagcaagtctggaattttgcagactttgaaactaatctgatgatacttcgtgtacaggggaatcacaaaggtctcttttcaaggaatcgccagccgaaacaagtcgtcaaagaatttaaaaaacgctggatgactattcctcattaccataataaaaaaaatagtgtaaaa

SEQ ID NO: 9702 - protein, 599 aa, Streptococcus agalactiae
MLYPLLTKTRNTYDLGGIWNFKLGEHNPNELLPSDEVMVIPTSFNDLMVSKEKRDYIGDFWYEKVIEVPKVSEDEEMVLRFGSVTHQAKIYVDGVLVGEHKGGFTPFEVLVPECKYNNEKIKVSICANNVLDYTTLPVGNYSEIIQEDGSIKKKVRENFDFFNYAGVHRPLKLMIRPKNHIFDITITSRLSDDLQSADLHFLVETNQKVDEVRISVFDEDNKLVGETKDSRLFLSDVHLWEVLNAYLYTARVEIFVDNQLQDVYEENFGLREIEVTNGQFLLNRKPIYFKGFGKHEDTFINGRGLNEAANLMDLNLLKDMGANSFRTSHYPYSEEMMRLADRMGVLVIDEVPAVGLFQNFNASLDLSPKDNGTWNLMQTKAAHEQAIQELVKRDKNHPSVVMWVVANEPASHEAGAHDYFEPLVKLYKDLDPQKRPVTLVNILMATPDRDQVMDLVDVVCLNRYYGWYVDHGDLTNAEVGIRKELLEWQDKFPDKPIIITEYGADTLPGLHSTWNIPYTEEFQCDFYEMSHRVFDGIPNLVGEQVWNFADFETNLMILRVQGNHKGLFSRNRQPKQVVKEFKKRWMTIPHYHNKKNSVK

SEQ ID NO: 9703 - DNA, 615 bp, Streptococcus agalactiae
atgttaaatcaattgaaaaacaactatttctttgctgttattcgagggaaatcatctgaggatgcgctcgaaatcgcaaagcatgctattttgggtggtattcggaatattgaagtaactttttcgactcctgaagcaagcaaagtcatcaaacaattatcagatgactttaaaaataataaagaaattattgtgggggccggaacggtcatgacaactgaacttgctaaagaggctattgatgctggagctaaatttttggttagcccacactttgattcagatattgctaatttagctaatgaaaacaaggtttattatttcccaggctgtgcaacggcaacagaaatcgtggtagctagaaagtataaatgtcagattataaagctttttccaggtggagttgtgggtccaggttttatcaaagatattcatggtcctattccagatgttgatttaatgccatcaggtggcgtctctgtttcaaatgtagttgaatggagaaaagcaggagcagttgcggttggtgttggctcagcattatctagtaaagtagccacagaaggctatgatagtgttactaaaatagctaaacagtttgtttctgcacttgat

SEQ ID NO: 9704 - protein, 205 aa, Streptococcus agalactiae
MLNQLKNNYFFAVIRGKSSEDALEIAKHAILGGIRNIEVTFSTPEASKVIKQLSDDFKNNKEIIVGAGTVMTTELAKEAIDAGAKFLVSPHFDSDIANLANENKVYYFPGCATATEIVVARKYKCQIIKLFPGGVVGPGFIKDIHGPIPDVDLMPSGGVSVSNVVEWRKAGAVAVGVGSALSSKVATEGYDSVTKIAKQFVSALD

SEQ ID NO: 9705 - DNA, 837 bp, Streptococcus agalactiae
atgtcaaaaacaattacatttaccaataaagttgtcgtcataacaggtgcaggcggtgttctctgtggttatatggctaaagaatttgcgaaagcaggcgctaaagtggcattattagatttgaatcaagaagctgctcaaacatttgctgatgaaattgtagaagaaggtggtatcgctaaggcttataaagctaacgttttgtctaaagaaaaccttgaagaagtgcatcaagccgttttagaggatcttggaccaactgatattttagttaatggtgcaggaggcaacaatcctaaagctacaactgataatgaatttcacgaattagacttaccttcagaaacaaaaaccttctttgagttagatgaagctggtattagctttgtttttaacttaaattatttaggaacattattgccaacgcaagtatttgcccaagatatggttggacgtgaaggagcgaatattattaatatctcttcaatgaatgcttttacccctctgaccaaaataccagcttattctggagctaaagcagctattagtaacttcacacaatggctagctgttcatttctcaaaagttggtatccgttgtaatgctattgcacctggtttcttggtaacaaatcagaaccgaagcttgttatttactgaggacggtcagccaactgcgcgtgctgagaaaattcttaataatacaccaatgggaagatttggagaagcaagtgagctgattggcggattgttctttttagcagatgaaaaatcatcaagttttgttaatggcgttgtccttccgattgatggtggatttgctgcttactctggtgtt

SEQ ID NO: 9706 - protein, 279 aa, Streptococcus agalactiae
MSKTITFTNKVVVITGAGGVLCGYMAKEFAKAGAKVALLDLNQEAAQTFADEIVEEGGIAKAYKANVLSKENLEEVHQAVLEDLGPTDILVNGAGGNNPKATTDNEFHELDLPSETKTFFELDEAGISFVFNLNYLGTLLPTQVFAQDMVGREGANIINISSMNAFTPLTKIPAYSGAKAAISNFTQWLAVHFSKVGIRCNAIAPGFLVTNQNRSLLFTEDGQPTARAEKILNNTPMGRFGEASELIGGLFFLADEKSSSFVNGVVLPIDGGFAAYSGV

SEQ ID NO: 9707 - DNA, 945 bp, Streptococcus agalactiae
atggcaactgttagtcgtgtggtaaatggaaataaaaatgtcaaggaaaatacacgtaagaaagtccttgaagttattgatcgtcttgactatcgtccaaatgctgtggcgcgtggtttagcaagtaaaaaaacgacaactgttggtgttgtcattcctaatatcgcaaatagctacttttcaattttagcgcgtggtattgatgatattgcagcaatgtacaaatataacattgtccttgcttcaagtgatgaagacgatgataaagaggttaatgttgttaatactttgtttgctaagcaagtagacggtattatttttatgggacaccacttaactgaaaagattcgtgcagagttctctcgttcacgcacaccgattgttttagcaggtactgtggaccttgagcatcaattaccaagtgttaatatcgattacaaagcagcagcagttgatgttattgatattttagctggcaatcataaagacattgcttttgtatcaggaccacttattgacgatattaatggcaaggttcgtttggcaggatacaaagaaggtctcaagaaaaatggcttaaactttaaagaggggttggtttttgaagccaactaccgttatgctgaaggctttgcattagctcaacgcgtgattaatgctggagcaacagcagcatatgttgctgaggatgagttagcggcaggtttgttaaatggtctttttgaggcaggtaaacgtgttcctgaagattttgaaattatcacaagcaatgactcgccaatcgcacaatatacacgtcctaacttaacttctatcagtcaaccggtctatgatttgggtgctgttagcatgcgtatgctaacaaaaattatgcacaaagaagagttggaagaaaaagaaatagtgcttaatcacgggattgttaaacgtggcacaacaaataat

SEQ ID NO: 9708 - protein, 315 aa, Streptococcus agalactiae
MATVSRVVNGNKNVKENTRKKVLEVIDRLDYRPNAVARGLASKKTTTVGVVIPNIANSYFSILARGIDDIAAMYKYNIVLASSDEDDDKEVNVVNTLFAKQVDGIIFMGHHLTEKIRAEFSRSRTPIVLAGTVDLEHQLPSVNIDYKAAAVDVIDILAGNHKDIAFVSGPLIDDINGKVRLAGYKEGLKKNGLNFKEGLVFEANYRYAEGFALAQRVINAGATAAYVAEDELAAGLLNGLFEAGKRVPEDFEIITSNDSPIAQYTRPNLTSISQPVYDLGAVSMRMLTKIMHKEELEEKEIVLNHGIVKRGTTNN

SEQ ID NO: 9709 - DNA, 1017 bp, Streptococcus agalactiae
atggcaaagaccgctcttaatattccttttacagttgaagggatagaaaattattatcaaaatataaaaatgatactgtctttagcagataaatggagcatacctaaagatgatctattactttttttaaagggcctcaaggctattgatgatataaaagttggctctcctatttttaagtatttttggacttctttaagtttacaagcacccctcaaagctttagaattcgtgttagagcaggctaaaatgccaactgaattgtcaggagaattatcagaaacacaatacttggtcgcacagttttcagatgagttagctccacatgatgatttctggatagccttatcacaagttatttatgattcttttcctgggaatagtctagccgaagatactgtattaaataggaaactccatcaattccgctatttgatttctagtcagcaagcacagtatgttcgacgatactttaaagatgttggtatgactgatagagatgctttagtaaactacctatcatgtttaagagaaccagatagtatcgcctactatgaatctgctcgcttgcataataaacgtcggagaaatggtgaaatctttggtttcccagatgatgagccggttattaatagtaagcttttaatttcattccatacggaatttattattgatgacaaaggaaactttttaaacgagattgacgcagaagtaataacacgtaatggtattatcaatggagctagctttaattatgcttttaaaaataatacacgtcataaagaattagatgttgatcctgtaaagttagacccaaaatttcgaaacgatatgactagaggttatagatcgccaaatctatctagaaggaaatggtttttctttaaagaagaggattacgattgtagttatttcaataaaaaaggatattacgcatttggaaggcgtagtgctaagcaatcggttgataaacaagtcaaatacttgaagaaggctgtgcagaaaatgcgcatcaac

SEQ ID NO: 9710 - protein, 339 aa, Streptococcus agalactiae
MAKTALNIPFTVEGIENYYQNIKMILSLADKWSIPKDDLLLFLKGLKAIDDIKVGSPIFKYFWTSLSLQAPLKALEFVLEQAKMPTELSGELSETQYLVAQFSDELAPHDDFWIALSQVIYDSFPGNSLAEDTVLNRKLHQFRYLISSQQAQYVRRYFKDVGMTDRDALVNYLSCLREPDSIAYYESARLHNKRRRNGEIFGFPDDEPVINSKLLISFHTEFIIDDKGNFLNEIDAEVITRNGIINGASFNYAFKNNTRHKELDVDPVKLDPKFRNDMTRGYRSPNLSRRKWFFFKEEDYDCSYFNKKGYYAFGRRSAKQSVDKQVKYLKKAVQKMRIN

SEQ ID NO: 9711 - DNA, 684 bp, Streptococcus agalactiae
atgaaagaattaagatcaaagctggaaaaagactatggtattgtttttgctaatcaagaattattagatacagcttttacccatacatcatacgcaaatgagcatcgcctcctaaacatttcacataatgaacgtttggaatttttaggagacgctgttctacaattacttatttcacagtatctttttacaaagtaccctcaaaaggcagaaggtgatttatcaaaattacgttcaatgattgttcgtgaggaaagtcttgcaggtttttcacgtctatgtggctttgatcactatattaaacttggaaaaggagaagaaaaatctggtggacgtaatcgtgacactattttaggagatttatttgaggcttttttaggagctttattattagacaaaggtgttgaagtggttcatgcctttgttaacaaggtaatgatccctcacgttgaaaaagggacctatgagcgtgttaaagattacaagacaagcttgcaagaattacttcaatctcatggggatgtaaaaatagattatcaagttactaatgaaagtggtccagcacatgcaaaggaatttgaggtgactgtatctgtcaaccaagaaaatttgagccaaggaattggacgatcaaagaaagctgctgaacaagacgctgccaaaaatgctttagcaacgttacaa

SEQ ID NO: 9712 - protein, 228 aa, Streptococcus agalactiae
MKELRSKLEKDYGIVFANQELLDTAFTHTSYANEHRLLNISHNERLEFLGDAVLQLLISQYLFTKYPQKAEGDLSKLRSMIVREESLAGFSRLCGFDHYIKLGKGEEKSGGRNRDTILGDLFEAFLGALLLDKGVEVVHAFVNKVMIPHVEKGTYERVKDYKTSLQELLQSHGDVKIDYQVTNESGPAHAKEFEVTVSVNQENLSQGIGRSKKAAEQDAAKNALATLQ

SEQ ID NO: 9713 - DNA, 3357 bp, Streptococcus agalactiae
atgccagacgttatatttgctggtacagaaaatcgtaagccccttaattatgcgcaagtgagtgttactttagataatagcgaccattttatcgaaaatatagctgacgaagttcgagttgaacgtcgtatttttcgaaacggagatagtgaatatttaatagatggacgcaaagttcgcttacgtgatattcatgatttatttatggatactggattaggaagagattctttttctattatttcccaaggacgcgttgaagctatttttaatagtaaaccagaagagcgccgtgccatatttgaagaagccgctggtgttctgaaatacaaaacacgtaagaaagaaacacaatccaaattagaacaaactcaagggaacttagatcgcttagaggatattatttatgaattggacatgcaagtccaaccattagaaaaacaagcaagtattgccaagcgttttttagtattagatgaggaacgacaaggactccacttatctattttgattgaagatattttacaacatcaatcagatttaactactgttgaggaaaagctattgacagtaagaaaagagttagcaacttattaccaacaacgtcagtcccttgaagatgaaaatcaatcgttaaaacagaaacgtcaccatttatctgaagaaattgaggctaaacagttagctcttttagacgttacaaagttaaagtcagatttggaacgccaaattgatctgattcgtttagagtcaaaccaaaaggctgaaaaaaaagaagaggcaggtcaacgcttagcagagttagaaattaaagctaaagattgtagtgaccagattacccaaaaaaatatagagttaactactctgtcggaaaaaatagcccaaataagatcagaaattgttagtacagaaagttccttggagcgtttttcaactaatccggatcagattattgaaaaacttcgagaagactttgttaccttgatgcaagaagaagccgacacttcaaacgctttaacagctttactagctgatatagagaatcaaaaacaagcttctcaagctaaatctcaagaaatacaagaagttagcaaaaatttagaagtattaaaaagtaacgcaaaggtagcattggaacgatttgaggctgcaaagaagaatgttcgtcagttattatctcactaccaagatttaggtcaaaccttgcaaaatctagaaggtgagtataagaatcagcagtcaattttatttgatcatttagatgaaatcaaatcaaagcaagcacgtatttcgagtttagaatctattttgaaaaatcatagtaatttctatgctggagtgaagtcagttctacaggctaaggaccagcttggaggtatcataggtgctgttagtgagcatcttagctttgacaaacattaccaaacagcattggagatagctttgggaggtagcagccaacacatcattgttgaagacgagagtgctgccaaacgttcaattgcttttttaaagaaaaaccgccaaggtagagcgacatttctgcctttaactacaataaaaccaagagaattagcacaacattatctctcaaaattacaaagttctcaagggtttttaggaatagctagtgaattggtaacctatgatcaacgcttgtcaaacatttttaaaaataacttagggttaactgctatttttgatacggttgataatgctaatgtagctgcgagacaattgaattatcaagtacgtttagtaaccttagatggaacagagttacgccctggagggtcgtactcagggggagcaaatcgtcaaaataatactgtttttatcaagcctgaattggataatctaaaaaaagaattgaaacaggcacaaagtaaacaattaattcaagaaaaagaagttgccacattgttagagcaactcaaagagaaacaagaaaccttagcacaacttaagaatgatggagaacaagctcgtcttgaggaacaaagagctgatatagagtatcaacaactatcagaaaagcttgctgatttaaataaactatataatggcttgcaattaagcagcggggcgttggaacaaactacttctgaaaatgaaaaaaatcgtttagaaaaagaacttgaacaatttgctattaaaaaagaagagttgacaacttcaattgctcaaattaaggaagataaagattcaattcaagaaaaagtcaataatctaacaacattattgtcagaggcacagctagaagaacgtgatttgctaaacgagcagaaatttgaacgtgccaactgtacacgtctagagattaccttgtctgaaataaaacgtgacattagtaatttacaaacattactaagccatcaggacagtcaattagacaaagaagagcttccacgtatagaaaaacagttgctacaagtaaataatagaagagaaaatgacgaagaaaagcttgtgagtctccgttttgaattggaggattgtgaagctgctttagatgatttagctgcttctctggctaaagagggacaaaaaaatgaaagtcttattcgtcagcaagctcaattagagtcacaatgtgaacaattatctcaacaattgatgatattctcacgtcaattatcagaagactatcagatgacattggatgaagcgaaggtaaaagcaaatgtcttggaagatattttgatggcgcgtgaacaattgaaatctctacaagctaaaattaaagctttaggacctgttaatattgatgcaattgctcaatttgaagaagttcatgaacgattgaccttccttaacacacagcgagacgacttagttcatgccaaaaatttattactagagacgattacagatatggatgatgaagttaagactcgttttaaatcgacatttgaagccattcgtcatagtttcaaagaaacctttgtacagatgtttggtggaggttctgcggaccttattctgacagaaggtgatttattatcagctggggttgatatttcggttcaacctcctggtaaaaaaatccagtctttaaacttgatgtcaggtggtgaaaaagcattatcagcgttagcattattatttgccattatccgtgttaagacaattccatttgtcatcttggatgaagttgaggccgctttagatgaagcaaatgttaagcgatttggcgattatcttaatcgatttgataaatcaagtcaatttatcgttgttactcaccgaaaagggactatgtctgctgctgatagtatctatggggtaacgatgcaagaatcaggcgtttccaaaattgtttctgtaaaattaaaagaagctcaagaaatgaccaat

SEQ ID NO: 9714 - protein, 1119 aa, Streptococcus agalactiae
MPDVIFAGTENRKPLNYAQVSVTLDNSDHFIENIADEVRVERRIFRNGDSEYLIDGRKVRLRDIHDLFMDTGLGRDSFSIISQGRVEAIFNSKPEERRAIFEEAAGVLKYKTRKKETQSKLEQTQGNLDRLEDIIYELDMQVQPLEKQASIAKRFLVLDEERQGLHLSILIEDILQHQSDLTTVEEKLLTVRKELATYYQQRQSLEDENQSLKQKRHHLSEEIEAKQLALLDVTKLKSDLERQIDLIRLESNQKAEKKEEAGQRLAELEIKAKDCSDQITQKNIELTTLSEKIAQIRSEIVSTESSLERFSTNPDQIIEKLREDFVTLMQEEADTSNALTALLADIENQKQASQAKSQEIQEVSKNLEVLKSNAKVALERFEAAKKNVRQLLSHYQDLGQTLQNLEGEYKNQQSILFDHLDEIKSKQARISSLESILKNHSNFYAGVKSVLQAKDQLGGIIGAVSEHLSFDKHYQTALEIALGGSSQHIIVEDESAAKRSIAFLKKNRQGRATFLPLTTIKPRELAQHYLSKLQSSQGFLGIASELVTYDQRLSNIFKNNLGLTAIFDTVDNANVAARQLNYQVRLVTLDGTELRPGGSYSGGANRQNNTVFIKPELDNLKKELKQAQSKQLIQEKEVATLLEQLKEKQETLAQLKNDGEQARLEEQRADIEYQQLSEKLADLNKLYNGLQLSSGALEQTTSENEKNRLEKELEQFAIKKEELTTSIAQIKEDKDSIQEKVNNLTTLLSEAQLEERDLLNEQKFERANCTRLEITLSEIKRDISNLQTLLSHQDSQLDKEELPRIEKQLLQVNNRRENDEEKLVSLRFELEDCEAALDDLAASLAKEGQKNESLIRQQAQLESQCEQLSQQLMIFSRQLSEDYQMTLDEAKVKANVLEDILMAREQLKSLQAKIKALGPVNIDAIAQFEEVHERLTFLNTQRDDLVHAKNLLLETITDMDDEVKTRFKSTFEAIRHSFKETFVQMFGGGSADLILTEGDLLSAGVDISVQPPGKKIQSLNLMSGGEKALSALALLFAIIRVKTIPFVILDEVEAALDEANVKRFGDYLNRFDKSSQFIVVTHRKGTMSAADSIYGVTMQESGVSKIVSVKLKEAQEMTN

SEQ ID NO: 9715 - DNA, 126 bp, Streptococcus agalactiae
atggctattacgcacaaacgtcaagatgacttagaaagtatgttcgctagttttgctaaagtaccaaaacctaaaaaagttgattctgattcaaaacctgaacagaaagatgattctcagaaagat

SEQ ID NO: 9716 - protein, 42 aa, Streptococcus agalactiae
MAITHKRQDDLESMFASFAKVPKPKKVDSDSKPEQKDDSQKD

SEQ ID NO: 9717 - DNA, 2217 bp, Streptococcus agalactiae
ttgaaatcgctttttaaaactcttcgtaagtcaaaaatatgctataataaaagcgttatggaaaatttaaatattacacaaattgctattgatttaggtattaaagcgtcacaaatcgaaaaggttttagaattaacagatgaaggaaatactattccttttattgcccgttatcgtaaagaaatgacaggtaatttggatgaagttcaaatcaaatcaattattgaccttgataagagtatgacagctctttcagatcgtaaaactacggtcttagccaaaattgaagaacaaggaaagttgactcaagaactcaaaaaggctattgaagaagcaactaaactagcagatgttgaggaactctacctaccttataaagaaaaacgtcgtacgaaagctacgattgcacgtgaagcaggtctttttcctttagcacgtcttattttacaaaataaggataaccttgaggaagaagctcaaaactatcttacagatggttttgagacaactacgaaggcactttctggagcagtagatattcttatcgaagctttttctgaggataataaattacgttcatggacatataatgagatctggaactacagctcaatcactgcagttgttaaagatgagtcacttgatgaaaaacaggtcttcaaaatctactatgacttttctgaaaaaataagtaaactccatggctatcaagttttagcattgaatcgtggtgagaaaatgggtgttcttaaggttaattttgagcataaccttgaaaaaatgtttcgcttttttgctgttcgatttaaagaaactagccaatatatagatgaccttattgtacagactgtcaagaaaaaaatcgttccagctatggaacgccgtatccgtacagaactaagtgaaggagcagaagatggtgcaatttcactgttttcagagaatcttcgtaacttattgttagtctcaccgcttaaggggaaaatggtgttaggttttgaccctgcctttcgtacaggagcaaaattagcagtagtagaccaaactggaaaattaatgacaacacaagtgatttatccagttcctccagctaatcaagcaaaaatcgaacaatcaaaaatagagttagcaaaacttatcaaagaattcaatatagaaattattgctatagggaatggaacagcgagtcgtgaatcagaagcatttgttgcagaagttttacaagattttccagacgtatcctatgtgattgttaacgaaagtggtgcctctgtttattcagcctcagaattggcacgtcatgaatttccagacttaacggttgaaaaacgttcggccatctcaattgcaagacgtctgcaagacccattagcagaactagtcaaaattgatccaaaatctattggtgtgggtcaatatcaacatgatgttagccaaaaaaaattagcagaaaatcttgattttgttgttgaaactgtagttaaccaagtaggtgttaatgttaatacagcaagtccagccttgttagctcatgtttcaggtttaaataaaacaatatctgaaaatattgttaaatatcgtgaagagaatgggcaaattaagtcacgtgctgaaattaagaaagtgcccagattaggagcaaaagcttttgagcaagctgctggattcttacgtattcctaatgctaaaaatttcttggataatacaggtgttcaccctgagtcttatgaagctgttaaaaagttgcttgaccaactgactatcaaagaattagatgatcttgctaaagagaagttacaaaaccttgacttaattgcaacagcagaaagtattggggtaggtcaagaaacattaaaagacattatagaagatcttttgaaaccaggtcgtgatttgcgtgatgattttgaagcgcctgttttgagacatgatgttttagatgtcagtgatttaaaagttggacaggaattgcaaggaactgttcgaaacgtcgttgattttggtgcttttgttgatattggtgttcatgaagatggtctaatccaccagtctcgccttattaagcgaaaacgcgataaaaaaactagaaaaatgcctcctttacaacatccaagcaaatatctctctgttggtgatattgtaactgtttgggttgtagaggtagatgcggagcgtagcagaattggacttagtcttatcaagccagacggacttgac

SEQ ID NO: 9718 - protein, 739 aa, Streptococcus agalactiae
MKSLFKTLRKSKICYNKSVMENLNITQIAIDLGIKASQIEKVLELTDEGNTIPFIARYRKEMTGNLDEVQIKSIIDLDKSMTALSDRKTTVLAKIEEQGKLTQELKKAIEEATKLADVEELYLPYKEKRRTKATIAREAGLFPLARLILQNKDNLEEEAQNYLTDGFETTTKALSGAVDILIEAFSEDNKLRSWTYNEIWNYSSITAVVKDESLDEKQVFKIYYDFSEKISKLHGYQVLALNRGEKMGVLKVNFEHNLEKMFRFFAVRFKETSQYIDDLIVQTVKKKIVPAMERRIRTELSEGAEDGAISLFSENLRNLLLVSPLKGKMVLGFDPAFRTGAKLAVVDQTGKLMTTQVIYPVPPANQAKIEQSKIELAKLIKEFNIEIIAIGNGTASRESEAFVAEVLQDFPDVSYVIVNESGASVYSASELARHEFPDLTVEKRSAISIARRLQDPLAELVKIDPKSIGVGQYQHDVSQKKLAENLDFVVETVVNQVGVNVNTASPALLAHVSGLNKTISENIVKYREENGQIKSRAEIKKVPRLGAKAFEQAAGFLRIPNAKNFLDNTGVHPESYEAVKKLLDQLTIKELDDLAKEKLQNLDLIATAESIGVGQETLKDIIEDLLKPGRDLRDDFEAPVLRHDVLDVSDLKVGQELQGTVRNVVDFGAFVDIGVHEDGLIHQSRLIKRKRDKKTRKMPPLQHPSKYLSVGDIVTVWVVEVDAERSRIGLSLIKPDGLD

SEQ ID NO: 9719 - DNA, 132 bp, Streptococcus agalactiae
atgatgacggttggttctggtaattcatataaaggagatttgctagatgaatctccttttttcttagctttatttagaccactttttcaaaatatcttctttttttcagaaaaacgcgttagcgcttacttt

SEQ ID NO: 9720 - protein, 44 aa, Streptococcus agalactiae
MMTVGSGNSYKGDLLDESPFFLALFRPLFQNIFFFSEKRVSAYF

SEQ ID NO: 9721 - DNA, 771 bp, Streptococcus agalactiae
atgattaatccagtagcaatacgattaggccccttttctattcgctggtatgctatttgcatagtgtctggtatgttgttagcagtttacttagcaatgaaagaggcccctcgtaagaacattaagtcggatgatattctagatttcattctcatggcttttccactatccattgttggagctcgtatttattatgttatcttcgaatgggcttattactctaagcacccagtagagattatcgccatctggaatggcggtattgctatttacggagggttaattaccggggccattctccttgtgattttttcatatcgtcgcttgattaatcccattgattttctggatattgctgctccaggagtgatgattgcccaagccataggtaggtgggggaattttattaatcaagaagcatacggtagggcagtaaaaaatctgaattacgtaccaaactttataaaaaatcaaatgtatattgatggagcttaccgagtacctacatttttatatgagtctctttggaacttcctaggttttgtcatcatcatgtctattcgtcatcgaccgcgcactttaaaacaaggtgaagtggcatgtttttatttagtttggtatggatgtggacggttcattattgaagggatgaggacagatagcctttatttggcgggtttgcgcgtgtcacaatggttatcagttattttagttattatcggaattgtcatgattatttatcgtcgtcgtgaacaacatatttcatattat

SEQ ID NO: 9722 - protein, 257 aa, Streptococcus agalactiae
MINPVAIRLGPFSIRWYAICIVSGMLLAVYLAMKEAPRKNIKSDDILDFILMAFPLSIVGARIYYVIFEWAYYSKHPVEIIAIWNGGIAIYGGLITGAILLVIFSYRRLINPIDFLDIAAPGVMIAQAIGRWGNFINQEAYGRAVKNLNYVPNFIKNQMYIDGAYRVPTFLYESLWNFLGFVIIMSIRHRPRTLKQGEVACFYLVWYGCGRFIIEGMRTDSLYLAGLRVSQWLSVILVIIGIVMIIYRRREQHISYY

SEQ ID NO: 9723 - DNA, 624 bp, Streptococcus agalactiae
atgggtcaagtcagtcgtattcggaatggcataaagtcccaacaattaagtattgatgctcccaaactagtccctttattaagaaaaggggatagcgtagctgttaatggtgtttgtttgacggttcttgacaaaagtgaaacagcttttatagcagacgtcatgccagaaagtatgatgcgaacaagcttagctgctttacgacttcattctaaagttaacttagaattagcactcagaagtgactcaaggttaggggggcattttgttcttggacatgtggatggggttggaaaaatagaaaaaatccaaaaagatgatattgctgtcagattttcaattgatgctccacctagtattatgtcttatattatagagaaaggttcggtggctctagatgggattagcttaacagtggtatcatttacagagcattcttttgaagtttcggtcattccccacacgatggctcaaactaatctatccttaaaaaaggttggggatttattaaatatcgaagtggatgttttaggcaaatatgctgagaaatttttagcacccactaatagaactaatcacacttcatcggtaatggattggtcttttttatcagaaaatggctac

SEQ ID NO: 9724 - protein, 208 aa, Streptococcus agalactiae
MGQVSRIRNGIKSQQLSIDAPKLVPLLRKGDSVAVNGVCLTVLDKSETAFIADVMPESMMRTSLAALRLHSKVNLELALRSDSRLGGHFVLGHVDGVGKIEKIQKDDIAVRFSIDAPPSIMSYIIEKGSVALDGISLTVVSFTEHSFEVSVIPHTMAQTNLSLKKVGDLLNIEVDVLGKYAEKFLAPTNRTNHTSSVMDWSFLSENGY

SEQ ID NO: 9725 - DNA, 1191 bp, Streptococcus agalactiae
atggcctttagtccaataaaaaaacttttacaagacatcaaatcagggaaaatggtagtgttgatggatgacgaaaatagagagaatgaaggagaccttatttgtgcggctgaaatggtgacaaaagagtcgattaattttatggctaaatttgggaaaggattaatttgcttacctctgtctaattactatgctgaaaagttagaattagctcaaatggctagccataatactgataatcatgaaacagcttttaccatatctattgatcatctatcaactagtactgggatttctgcggaagatagagctttgacagctaagatggttgctaacgacagtagcaaagctaaagactttagacgtcctgggcacttatttcccttgttagccaaggaaggaggtgttttagctagaaatggacatactgaagcaaccgttgatctatgtcgtttagctggattaaaggaatgtggactttgttgtgaaataatggctgaagatggtagtatgatgagaaaggatgagttattagcatttgctcaaaagcacgatttagctatcgctaccataaaacaattgcaagactatagacgtcaagaagagggaggggtggttagagaaattgagattcagctaccaacgcaattcggtcattttacggcttatggatatagcgaagttgtggcaaataaggaacatgttgcccttgttaaaggggatattagtagtggtgaagatgttttatgtcgtttacactcagaatgtttgacaggtgatgtctttcattccttgagatgtgattgtggggaacaactggctaatgccctccaacaaatagaggctgaaggtcgtggagtccttctttatatgagacaggaaggtcgaggaattggtttgattaataagttaaaagcttatcatttgcaagaagaaggcttagatactttagaagctaatttggctttaggttttgaaggagatgagagagactatggagttagtgctcaacttttaaaagatttaggtataaattctataaacttactaaccaataatccagataaaatccaacaacttgaagcagaaggaatttgcgtcaaaaacagagtgccattacaggtggcagtaacagcttatgaccttaattatttaaaaactaaaaaagaaaaaatgggacatcttttagat

SEQ ID NO: 9726 - protein, 397 aa, Streptococcus agalactiae
MAFSPIKKLLQDIKSGKMVVLMDDENRENEGDLICAAEMVTKESINFMAKFGKGLICLPLSNYYAEKLELAQMASHNTDNHETAFTISIDHLSTSTGISAEDRALTAKMVANDSSKAKDFRRPGHLFPLLAKEGGVLARNGHTEATVDLCRLAGLKECGLCCEIMAEDGSMMRKDELLAFAQKHDLAIATIKQLQDYRRQEEGGVVREIEIQLPTQFGHFTAYGYSEVVANKEHVALVKGDISSGEDVLCRLHSECLTGDVFHSLRCDCGEQLANALQQIEAEGRGVLLYMRQEGRGIGLINKLKAYHLQEEGLDTLEANLALGFEGDERDYGVSAQLLKDLGINSINLLTNNPDKIQQLEAEGICVKNRVPLQVAVTAYDLNYLKTKKEKMGHLLD

SEQ ID NO: 9727 - DNA, 1488 bp, Streptococcus agalactiae
atgtctaaccaacatattgaagaattaaatgaccaacagattgttcgtcgtgaaaaaatggctgctttgactgaacaaggcattgatccttttggtaaacgatttgaacgtacagcaacatctggtcaattaaatgaaaaatacgctgacaaatcaaaagaagacttgcacgacattgaagaaactgctacaatcgctggtcgtttaatgactaagcgcggtaaggggaaagttggctttgcgcatatccaagatcgcgaaggtcaaattcaaatttatgtccgtaaagattctgttggcgaagaaaactacgaaatctttaaaaaagctgatttaggtgacttccttggtgttgaagggcaagtaatgcgtacagatatgggagaactttctatcaaggctactcatattactcacctttcaaaagcactccgtccacttcctgaaaaattccacggcctaactgatattgaaacaatctatcgtaaacgtcatcttgatttaatctcaaatcgtgacagctttgaccgttttgtaacacgctcaaaaatcatttcagaaattcgtcgctttatggatagcaatggtttcttagaggttgaaacacctgttcttcataatgaagctggtggtgcttctgctcgcccatttatcacacatcacaatgcacaagacattgacatggttcttcgtatcgcaactgaattgcatctaaaacgtcttattgtaggtggtatggagcgtgtttatgaaatcggacgtattttccgtaatgaagggatggatgcaacccacaatccagagttcacatctattgaagcctaccaagcctatgctgactaccaggatattatggacttgacagaaggtattatccagcatgttacaaaaactgtaaaaggtgatggaccaattaattatcaaggcacagaaattaaaattaatgaaccattcaaacgtgttcatatggttgatgcggttaaagaaatcactggtattgacttctggaaagaaatgactcttgaagaagcacaagctttggcacaagaaaaaaatgttccgcttgaaaaacatttcacaacagttggtcacatcattaatgccttcttcgaagaatttgttgaagacactttaattcaaccaacttttgtctttggtcatccagttgaagtgtctccacttgctaagaaaaatgatacagaccctcgttttacagaccgtttcgaactctttatcatgactaaagaatacgctaatgcttttacagaattaaatgacccaattgatcagctatctcgctttgaagcacaagcatctgctaaagaacttggcgatgatgaagcaactggagttgattacgattatgttgaagcacttgaatatggtatgccacctactggtggactaggtattggtatcgaccgtctctgtatgctgttaactgatacaacaactatccgagacgtcctacttttccctacaatgaaa

SEQ ID NO: 9728 - protein, 496 aa, Streptococcus agalactiae
MSNQHIEELNDQQIVRREKMAALTEQGIDPFGKRFERTATSGQLNEKYADKSKEDLHDIEETATIAGRLMTKRGKGKVGFAHIQDREGQIQIYVRKDSVGEENYEIFKKADLGDFLGVEGQVMRTDMGELSIKATHITHLSKALRPLPEKFHGLTDIETIYRKRHLDLISNRDSFDRFVTRSKIISEIRRFMDSNGFLEVETPVLHNEAGGASARPFITHHNAQDIDMVLRIATELHLKRLIVGGMERVYEIGRIFRNEGMDATHNPEFTSIEAYQAYADYQDIMDLTEGIIQHVTKTVKGDGPINYQGTEIKINEPFKRVHMVDAVKEITGIDFWKEMTLEEAQALAQEKNVPLEKHFTTVGHIINAFFEEFVEDTLIQPTFVFGHPVEVSPLAKKNDTDPRFTDRFELFIMTKEYANAFTELNDPIDQLSRFEAQASAKELGDDEATGVDYDYVEALEYGMPPTGGLGIGIDRLCMLLTDTTTIRDVLLFPTMK

SEQ ID NO: 9729 - DNA, 615 bp, Streptococcus agalactiae
atggaaatactgattgcaggtggtagtggttttttaggaaagcagataataaaagcagcgcttacaaaagggcataaagtggcttacttatcaagacatgaaggtaaaggtgatatatttaaggatcctagattaacctacattaggggagatattacagaagctgataagattcatttagaagacagaacttttgatatattaattgactgtattggagcgattaagcccaatcaactagatgagcttaacgttaaagcaacccaaaaagcagtagcactctgtcacaaaaatcaaataccaaagttagtttatatttcagccaacagcggctattcagcttacattaaaagtaaaaggaaggcagagcagataatcaaagcaagcggtctggattatctttttgtaagaccaggtttgatgtatggtgaagagcgacctctctcgattttccaagccaagtgtataaagttatttagtcatttgcctttcttaggtattgttgtacaaaaggtctttccaactaaggttgtgatagtggcagaagcaatcgttactacgcttaggaaaaaaccaacccaaaaaatcctttctattgaagaattaaataataaa

SEQ ID NO: 9730 - protein, 205 aa, Streptococcus agalactiae
MEILIAGGSGFLGKQIIKAALTKGHKVAYLSRHEGKGDIFKDPRLTYIRGDITEADKIHLEDRTFDILIDCIGAIKPNQLDELNVKATQKAVALCHKNQIPKLVYISANSGYSAYIKSKRKAEQIIKASGLDYLFVRPGLMYGEERPLSIFQAKCIKLFSHLPFLGIVVQKVFPTKVVIVAEAIVTTLRKKPTQKILSIEELNNK

SEQ ID NO: 9731 - DNA, 459 bp, Streptococcus agalactiae
gtgttgagatatgcttttgcgcctctgcctaacattcagccaattactgccatttttttgattacagttgtcttattcgatttaaaagaaggtgtagctactgtaactataacaatgctagtttcttcttttttaatgggctttgggccatgggtctttttgcaaatcatttccttcactttaattttatgcttgtggaaatttctgatatatccgctgacaaaagctgtatgttttggtaaaataacggaggtagtacttcaaactttctttgcaggagggttaggggttgtttatggcgtcattattgatacctgttttgcttggttatatcatatgccttggtggacttatgtattagcaggacttagttttaatatggcacacgctttatcaacttgtttattttatcctcttttgttaccgattttaaggagatttaggaatgaaaaaatacat

SEQ ID NO: 9732 - protein, 153 aa, Streptococcus agalactiae
MLRYAFAPLPNIQPITAIFLITVVLFDLKEGVATVTITMLVSSFLMGFGPWVFLQIISFTLILCLWKFLIYPLTKAVCFGKITEVVLQTFFAGGLGVVYGVIIDTCFAWLYHMPWWTYVLAGLSFNMAHALSTCLFYPLLLPILRRFRNEKIH

SEQ ID NO: 9733 - DNA, 990 bp, Streptococcus agalactiae
atggaagattttattgaaatgaatgaaccattgtttgcgacctacgttgatttgagtgaaggttgtccgtctcatgataccttagagcgtgtgattagtcttgttaattcagaccgtttaaaagagcttaaagttcaatttgagcaatcattgacaagcttagatgccgttcatcaactgatttcagtggacggtaaaacgattcgaggcaatcgaggtaaaaatcagaagcctgttcatattgtaacggcttatgatgggggtcatcatcttagtttgggacaggtagcggttgaggagaaaagtaatgaaattgttgccattcctcagttattgcggacaattgatatccgtaaaagcattgtaacgatagacgcaatgggcacgcagacggctatcgttgatacgattataaaaggtaaagcagactattgcttagccgtcaaaggaaatcaagaaacactttatgatgatattgctctttattttagtgatgtcaacttattggaagaactccaagaaaatgcgcagtattatcagactgttgaaaaatctaggggacagattgaagttagagaatactgggtgtcttccgatatcaaatggttgtgtcaaaatcatcccaaatggcataagttacgtggtattgggatgactcgtaacacgattgataaggatggtcagctgagtcaagagaatcgttattttatctttagctttaagccggatgtcctcacatttgccaattgtgtacgaggtcattggcagatagagagtatgcactggttattggacgttgtttatcatgaagatcatcatcagacattggataaaagagccgcatttaacctaaatcttatccgaaaaatgtgcttatattttctcaaagtgatggtatttcctaaaaaagacctcagttatcgtcgcaaacaacggtatatttctgtccatttggaagattatttagtccaattatttggagaaagaggc

SEQ ID NO: 9734 - protein, 330 aa, Streptococcus agalactiae; identical to SEQ ID NO: 9498

SEQ ID NO: 9735 - DNA, 177 bp, Streptococcus agalactiae
atgccttttatcaattttcatattgtattatttcctttaatatatcaaaaaattaccattatgcattatatcatctttcgaagtaaagtaaaagggagaatagcaacacgccgtacgcatgaaaactttctcttcatccttttgtgcccggacatcaattttgaaaagattcctttt

SEQ ID NO: 9736 - protein, 59 aa, Streptococcus agalactiae
MPFINFHIVLFPLIYQKITIMHYIIFRSKVKGRIATRRTHENFLFILLCPDINFEKIPF

SEQ ID NO: 9737 - DNA, 1194 bp, Streptococcus agalactiae
atggcaaaagaaaaatacgatcgtagtaaaccacacgttaacattggtacaatcggacacgttgaccacggtaaaactactttaacagcagctatcacaactgtattggcacgtcgcttgcctacttcagttaaccaaccaaaagattacgcttctatcgatgctgctccagaagagcgcgaacgcggaatcacaatcaacactgcacacgttgagtacgaaactgaaaaacgtcactatgcccacatcgacgctccaggacacgcggactacgttaaaaacatgatcactggtgctgctcaaatggacggagctatccttgtagttgcttcaactgatggaccaatgccacaaactcgtgagcacatccttctttcacgtcaagttggtgttaaacaccttatcgtattcatgaacaaagttgaccttgttgatgatgaagaattgcttgaattggttgaaatggaaattcgtgaccttctttcagaatacgacttcccaggtgatgaccttccagttatccaaggttcagctcttaaagcacttgaaggcgacgaaaaatacgaagacatcatcatggaattgatgagcactgttgatgagtacattccagaaccagaacgtgatactgacaaacctttacttcttccagttgaagatgtattctcaatcactggacgtggtacagttgcttcaggacgtatcgaccgtggtactgttcgtgtcaacgacgaagttgaaatcgttggtattaaagaagatatccaaaaagcagttgttactggtgttgaaatgttccgtaaacaacttgacgaaggtcttgcaggggacaacgttggtgttcttcttcgtggtgttcaacgtgatgaaatcgaacgtggtcaagttcttgctaaaccaggttcaatcaacccacacactagatttaaaggtgaagtttacatcctttctaaagaagaaggtggacgtcatactccattcttcaacaactaccgtccacaattctacttccgtacaactgacgtaacaggttcaatcgaacttccagcaggaacagaaatggttatgcctggtgataacgttactatcgaagttgaattgattcacccaatcgccgtagaacaaggtactactttctcaatccgtgaaggtggacgtactgttggttcaggtatcgtttcagaaatcgaagct

SEQ ID NO: 9738 - protein, 398 aa, Streptococcus agalactiae
MAKEKYDRSKPHVNIGTIGHVDHGKTTLTAAITTVLARRLPTSVNQPKDYASIDAAPEERERGITINTAHVEYETEKRHYAHIDAPGHADYVKNMITGAAQMDGAILVVASTDGPMPQTREHILLSRQVGVKHLIVFMNKVDLVDDEELLELVEMEIRDLLSEYDFPGDDLPVIQGSALKALEGDEKYEDIIMELMSTVDEYIPEPERDTDKPLLLPVEDVFSITGRGTVASGRIDRGTVRVNDEVEIVGIKEDIQKAVVTGVEMFRKQLDEGLAGDNVGVLLRGVQRDEIERGQVLAKPGSINPHTRFKGEVYILSKEEGGRHTPFFNNYRPQFYFRTTDVTGSIELPAGTEMVMPGDNVTIEVELIHPIAVEQGTTFSIREGGRTVGSGIVSEIEA

SEQ ID NO: 9739 - DNA, 1365 bp, Streptococcus agalactiae
atgaagcttagtttgcatgaagttgctaaagtagttggcgctaaaaatcaagtatcagagtttgaagacgttcccctgggaaatattgaatttgatagtcgtaatatcagtgaaggtgacttatttcttcccttaaaaggagcaagagatggacatgagtttatagagatggcttttgataatggagcaatagcaaccatttcagagaaggaaatagagggtcatccttatcttttagtgtctgatgcacttaaagcatttcaagtcttggcacagtattatattgaaaagatgaacgttgatgttattgcagtaactggctcaaatggtaagacaacaactaaagatatgatagctgcaatcttatcaaccacatataagacttataaaacacaaggaaactacaataacgagattggcttaccctatactgtgctacacatgccagaagatactgaaaaaattattttggagatgggacaggatcatcttggagatatccatgtgttatctgaaattgcaaaaccacgtattgctgttgttactttgattggtgaagcacacttagaattttttggtagtcgagaaaagattgcagaagggaaaatgcaaatcacagatggtatgagttcagatggcatattaattgcaccgggagatccaattattgatccatatcttccagcaaaccagatgactattcgttttggtcatgaccaagaattgcaagtgacagaactcaaagaagaaaaacattccttaacttttaaaactaatgctttggagcaccaattacgtataccagtacctggtaagtacaatgcaactaatgcgatggtcgctgcctatgttggaaaattattagcagtagcagaagaagatatagtggatgctctagaaaatcttcaactaactcgtaatcgcaccgaatggaagaaatcagccaatggagcagatattttatcagatgtttacaatgctaacccaacggctatgcgattgatactagaaaccttttcagctattcccaataatgatggtggaaagaagattgctcttttagctgatatgaaagaactgggagaacaatctgtggatttacataatcaaatgattatgagtatcagacctgactctattgatactttgatttgttatggccaggatattgaggggttggctcaattagcaagccagatgttcccaattggtaaagtgtatttctttaaaaagaatcaagaagtagatcagtttgatcaattgcttgcaaaagtaaaagatactcttaaggagaaagatcaaatattattaaaaggttctaactcaatgaatctttctaaaatagttgatattcttgaagtagga

SEQ ID NO: 9740 - protein, 455 aa, Streptococcus agalactiae
MKLSLHEVAKVVGAKNQVSEFEDVPLGNIEFDSRNISEGDLFLPLKGARDGHEFIEMAFDNGAIATISEKEIEGHPYLLVSDALKAFQVLAQYYIEKMNVDVIAVTGSNGKTTTKDMIAAILSTTYKTYKTQGNYNNEIGLPYTVLHMPEDTEKIILEMGQDHLGDIHVLSEIAKPRIAVVTLIGEAHLEFFGSREKIAEGKMQITDGMSSDGILIAPGDPIIDPYLPANQMTIRFGHDQELQVTELKEEKHSLTFKTNALEHQLRIPVPGKYNATNAMVAAYVGKLLAVAEEDIVDALENLQLTRNRTEWKKSANGADILSDVYNANPTAMRLILETFSAIPNNDGGKKIALLADMKELGEQSVDLHNQMIMSIRPDSIDTLICYGQDIEGLAQLASQMFPIGKVYFFKKNQEVDQFDQLLAKVKDTLKEKDQILLKGSNSMNLSKIVDILEVG

SEQ ID NO: 9741 - DNA, 378 bp, Streptococcus agalactiae
atgggaattttttcgggattaatgggaaatgcttcacaaatggataccgataaagtcgagaatcagttatctgatattctgatttcagatgaacaggttgatttagcttataccttaattcgtgatttgattgtttttactaattatcgtttaattttagtcgataaacagggggtgacaggtaaaaaggtttcttataattctataccttatgcttctatatcacgttttacagtggaaactagtggtcattttgatttagatgctgagttaaagatttggatatcatcagcaatagaaccagcagaagtacttcagtttaagaacgaccgtaacatagtgagtatacagaaagctttggcgacagctgttttaaaa

SEQ ID NO: 9742 - protein, 126 aa, Streptococcus agalactiae
MGIFSGLMGNASQMDTDKVENQLSDILISDEQVDLAYTLIRDLIVFTNYRLILVDKQGVTGKKVSYNSIPYASISRFTVETSGHFDLDAELKIWISSAIEPAEVLQFKNDRNIVSIQKALATAVLK

SEQ ID NO: 9743 - DNA, 942 bp, Streptococcus agalactiae
atgaaagagaagctatttcaggtaattggattcaataaagacgatttagcctattcttattttgatttaagtgaagaagactatcaaaatgcggaattagacttagaaagtttaccttttttatcagactacaaggttgttatttttgatcagtttcaagatattacaactgataaaaaaacttatttagatgaacaagcaatgaagcgctttgaagcctacttgcagaatcctgtagatactacgagacttgttatttgtgctccaggaaaacttgatggaaaacgtcgacttgtaaagttattgaaacgtgatgctcgtgttttagaggctaatactttaaaagaatcagatttaaagacgtattttcaaaaatatgctcaccaagaaggattagtttttgaagcaggtgtttttgatgagttattgattaagtctaactatgattttagtgatactttaacgaatatcgctttcttaaagtcatataaaacagacggtcatatttcgtccaatgatgttagagaggctatccctaaaagcctgcaagataatatatttgatttgactcaagatgtcttacttggcaggatagatttagcgcgtgatttagtaagagatttacgtctacaaggcgaagacgaaatcaaattgattgcaatcatgttaggacagtttcggatgtttttgcaagttaaaatattggctagtaaagggaagtcagagagtcaaattgtttctgaactatcccattacataggacgtaaaatcaacccttatcaagtaaaatttgctgtcagagattctagaaaccttccccttgcttttttaaaagaagcgattaggattttaatcgagactgactatgctattaaaagagggacttatgataaggattatctctttgatttagccttattaaaaattgctcataaaaagccc

SEQ ID NO: 9744 - protein, 314 aa, Streptococcus agalactiae
MKEKLFQVIGFNKDDLAYSYFDLSEEDYQNAELDLESLPFLSDYKVVIFDQFQDITTDKKTYLDEQAMKRFEAYLQNPVDTTRLVICAPGKLDGKRRLVKLLKRDARVLEANTLKESDLKTYFQKYAHQEGLVFEAGVFDELLIKSNYDFSDTLTNIAFLKSYKTDGHISSNDVREAIPKSLQDNIFDLTQDVLLGRIDLARDLVRDLRLQGEDEIKLIAIMLGQFRMFLQVKILASKGKSESQIVSELSHYIGRKINPYQVKFAVRDSRNLPLAFLKEAIRILIETDYAIKRGTYDKDYLFDLALLKIAHKKP

SEQ ID NO: 9745 - DNA, 954 bp, Streptococcus agalactiae
atgggacttttagtagatggcaaatgggttgatcaatggtatgatactgcatcaactggtggtaaattcgtccgaaccgttacacaattccgtcattgggttactaaagatggttcagcagggcctagtggggatgcaggttttaaagcagaatctggacgatatcatctctacgtttcactagcttgcccttgggcatcacgtgtattaatcatgagaaagcttaaaaatctagaatctcatatctctatctccattgttaaccctttaatgttggagaatggttggacttttcaagaatataaaggcgttattcctgatatgattaaccaaagccaatacctttaccaaatctatcaagcaagtcaaagtgattatacaggacgcgtgacagtccctgttctttgggataaaaaattccatacaatcgttaacaatgaatcatctgaaattatgcgtatgttaaatactgcatttaatcatattactggaaatactgacgattactatcccgattccttacaaggacaaattgacgaaatgaataattttatttatccaaaaataaataatggtgtctataaagctggttttgccacttctcagaacgtttatcaaaaggaagttgaaaccttattcacagctttagatcagttagaaaaacacttatctgataaccattatcttgttggagaacaatttaccgaagctgatattcgccttttcacaactttagttcgctttgacaccgtttattatggtcattttaaatgtaatttaaaagcgctacatgattacccacatttatggcattatacaaaacgtatttacaacctacctggaattgctgagacagttaattttgatcatatcaaaaaacactattacggtagccataaaaccattaaccctactggtattattccagctggacctaacttagactggacaatt

SEQ ID NO: 9746 - protein, 318 aa, Streptococcus agalactiae
MGLLVDGKWVDQWYDTASTGGKFVRTVTQFRHWVTKDGSAGPSGDAGFKAESGRYHLYVSLACPWASRVLIMRKLKNLESHISISIVNPLMLENGWTFQEYKGVIPDMINQSQYLYQIYQASQSDYTGRVTVPVLWDKKFHTIVNNESSEIMRMLNTAFNHITGNTDDYYPDSLQGQIDEMNNFIYPKINNGVYKAGFATSQNVYQKEVETLFTALDQLEKHLSDNHYLVGEQFTEADIRLFTTLVRFDTVYYGHFKCNLKALHDYPHLWHYTKRIYNLPGIAETVNFDHIKKHYYGSHKTINPTGIIPAGPNLDWTI

SEQ ID NO: 9747 - DNA, 483 bp, Streptococcus agalactiae
atggctacttttcaaattaaagaaaaaatgttttctctaggcggtaaatttactattacagacctgactgggcttccctgttatcacgttgaaggaagtttgttccctctacctaagacttttaaagtctttgacgaagaggaacatctcattagtcagattgagaagaaggttttaagttttttaccaaagtttaatgtgacattagccaatgggaatcatttcacgattaagaaagatttctcatttttgaaacctcattacaccattgaagaccttgatatggaagttaagggaaatttttgggatatggatttccaactcttaaaagacaatcaagttatagcaaacatatctcaacagtggtttcgtatgacttcaacttatcaggtagaagtttacagtgaaacttacaacgatttgacaatttcgcttgtcatagcgatcgactatgtcaaagagttagaaaaaaatgcatcaaac

SEQ ID NO: 9748 - protein, 161 aa, Streptococcus agalactiae
MATFQIKEKMFSLGGKFTITDLTGLPCYHVEGSLFPLPKTFKVFDEEEHLISQIEKKVLSFLPKFNVTLANGNHFTIKKDFSFLKPHYTIEDLDMEVKGNFWDMDFQLLKDNQVIANISQQWFRMTSTYQVEVYSETYNDLTISLVIAIDYVKELEKNASN

SEQ ID NO: 9749 - DNA, 756 bp, Streptococcus agalactiae
atgaaaaattttataaaacaaagtgatactacatttgttcgaattatcaaaagtcttttaattggtggttttataggggccatacttggttccgtaggagctctttttatcatatttggtcaagataagtacttatctgaaattaatattgttcaatatttcctatgggttagtcgtattgttgtaattataacagctctctttagtctcatctacctctatcagattcaaaaatatcagaaagtttttttcaatgttgatgaaagtcaatctgaagaaatttatcgccagattaatttaagacattcttatgggatgacttttgtgtcaatttcaatagtactcagtatagttaatactttatttaactataaactaaatatttttgatgattcagttactttagttattccaatatatgatttatcactgctatttgttttattgggtttacatatatattttttaaaggtatatcggaatatccgaggtataaaaatgacagtcgctccaactttaaaagagttgaaaaacaatgtcttacaattggacgaagcagagttggaatcaaattataagatgtgttttgatattgtcatgaatttaagtggttttattttccctacgatctattttgtattattctttatctcatttgtttttcaaaaagtggagattgtagcaattattataacaacatctattcatatctacattctcattaagtctttaaaagcagcacgtcatttttataga

SEQ ID NO: 9750 - protein, 252 aa, Streptococcus agalactiae
MKNFIKQSDTTFVRIIKSLLIGGFIGAILGSVGALFIIFGQDKYLSEINIVQYFLWVSRIVVIITALFSLIYLYQIQKYQKVFFNVDESQSEEIYRQINLRHSYGMTFVSISIVLSIVNTLFNYKLNIFDDSVTLVIPIYDLSLLFVLLGLHIYFLKVYRNIRGIKMTVAPTLKELKNNVLQLDEAELESNYKMCFDIVMNLSGFIFPTIYFVLFFISFVFQKVEIVAIIITTSIHIYILIKSLKAARHFYR

SEQ ID NO: 9751 - DNA, 561 bp, Streptococcus agalactiae
atgtcaaaaaataacaacactacctgtcttattgaaactgctatttttgcagcgcttgctatggctttatcaatgattcctgattttgcgtcatggttcactccctcttttggagcaattcctctgatactttttgcattacgtcgtggtacaaaatacggtctatttgctggcttaatttggggcttattgcactttgttctttccaaagtatattaccttagtttatcccaagtttttatagaatacatcttagcatttataagtatgggacttgcaggcgtattttctgctaaatttaaagatgcacttagcagcagctctaaaactaaagctttatcattagcattatctggagcaatattagcaacacttgttcgttatgtttggcattatatcgctggtgttattttttgggctagttatgcaccaaaaggtatgtctgctacattatactcattaagcgtcaatggtactgctggtttgttaactctattttttgtagtcattagtattattattttagttatcagctaccctagcttctttttacctaagaaa

SEQ ID NO: 9752 - protein, 187 aa, Streptococcus agalactiae
MSKNNNTTCLIETAIFAALAMALSMIPDFASWFTPSFGAIPLILFALRRGTKYGLFAGLIWGLLHFVLSKVYYLSLSQVFIEYILAFISMGLAGVFSAKFKDALSSSSKTKALSLALSGAILATLVRYVWHYIAGVIFWASYAPKGMSATLYSLSVNGTAGLLTLFFVVISIIILVISYPSFFLPKK

SEQ ID NO: 9753 - DNA, 957 bp, Streptococcus agalactiae
atgacaacttactacgaagctataaactggaacgaaattgaagatgttattgataaatcaacttgggaaaaactaaccgaacaattttggctcgatacacgtatccctttatcaaatgacttagacgattggcgcaaactttctgctcaagaaaaagatcttgttggcaaggtttttggaggcttaaccctacttgataccatgcaatcagaaactggtgttgaagctattcgtgccgatgttcgcacgcctcacgaagaagctgtcttaaacaatattcaattcatggaatctgttcacgctaaatcttattcttcaattttctcaactttaaatactaaatcagaaattgaagaaattttcgagtggactaataataatgagttccttcaagaaaaagcacgtattatcaatgacatttatgctaatggaaatgcccttcaaaaaaaggtggcttccacctacctcgaaactttccttttttattctggctttttcacacctctttactatttgggaaataataagttagcaaatgttgctgaaatcattaaattaattattcgtgatgaatctgtacatggtacttatatcggttacaaattccagcttggttttaacgaattaccagaagatgagcaagagaattttcgtgattggatgtatgacctcctttatcagctgtatgaaaacgaagaaaaatacaccaagacactttatgatggcgtaggatggactgaagaagttatgacctttttacgctacaatgctaataaagctcttatgaatttaggacaagatcctttattcccagatacagcaaatgatgtcaacccaattgttatgaatggtatttcaacaggaacatcaaaccatgacttcttctctcaagtaggtaatggttacctacttggtagcgttgaagctatgcatgatgatgactataactatggatta

SEQ ID NO: 9754 - protein, 319 aa, Streptococcus agalactiae
MTTYYEAINWNEIEDVIDKSTWEKLTEQFWLDTRIPLSNDLDDWRKLSAQEKDLVGKVFGGLTLLDTMQSETGVEAIRADVRTPHEEAVLNNIQFMESVHAKSYSSIFSTLNTKSEIEEIFEWTNNNEFLQEKARIINDIYANGNALQKKVASTYLETFLFYSGFFTPLYYLGNNKLANVAEIIKLIIRDESVHGTYIGYKFQLGFNELPEDEQENFRDWMYDLLYQLYENEEKYTKTLYDGVGWTEEVMTFLRYNANKALMNLGQDPLFPDTANDVNPIVMNGISTGTSNHDFFSQVGNGYLLGSVEAMHDDDYNYGL

SEQ ID NO: 9755 - DNA, 867 bp, Streptococcus agalactiae
atggcaaatcaacttaatatttcccgcacagctatttggaaaggtataaaaacgttagaagaattaggcctagagattgagtctgtcactaacaagggctaccgattggtatcaggtgacatattattaccagaacaactcgaacaagaaattggtattaaggttagtcttaataataatagtgcttcaacccaactagatgctaaaatggggatagaaagtaaattaaagactccacacctttttttagctcctaatcaaaaaaaagctaaaggacgttttgatagacctttctttacatcaaatcaaggcggcatctatatgtctcttttattacaacctaatgtaccgattgaagatataaaaccttatactgtcatggtagcctctagtgctgtaaaagctatctcacggttaacaggaattactcctgaaattaagtgggtcaatgatatttatttagataataaaaaaatagctggtattttaaccgaggctatcgcttctgttgagagtgggttggtaacgaatgttattataggattaggtatcaatttctatatcaaagagttccctagggcgttaactaagcgcgcaggtagtctctttacagagcaaccgaccataactagaaatcaattgattacagaaatctggaatctctttttcaatattccactagaggatcacttaaaggtatatagagaaaaatccctagtcttagatagaaccgttagctttatggatggtcaaacaatgtattctgggaaagctattgatattacagataaaggatatttagtggttgagttagatgatggtcagttgaaaacacttcgcagtggcgaaatcagtctttcttcttgg

SEQ ID NO: 9756 - protein, 289 aa, Streptococcus agalactiae
MANQLNISRTAIWKGIKTLEELGLEIESVTNKGYRLVSGDILLPEQLEQEIGIKVSLNNNSASTQLDAKMGIESKLKTPHLFLAPNQKKAKGRFDRPFFTSNQGGIYMSLLLQPNVPIEDIKPYTVMVASSAVKAISRLTGITPEIKWVNDIYLDNKKIAGILTEAIASVESGLVTNVIIGLGINFYIKEFPRALTKRAGSLFTEQPTITRNQLITEIWNLFFNIPLEDHLKVYREKSLVLDRTVSFMDGQTMYSGKAIDITDKGYLVVELDDGQLKTLRSGEISLSSW

SEQ ID NO: 9757 - DNA, 564 bp, Streptococcus agalactiae
atgactaatcataaaacaaaaaaattaacggttttagcaattatgattgctttagatgtttttttaacgcccatttttagaatagaaggcatggcctttatgtctagtgtggttaatattatcgctggagttataatgggaccaatctatgcattagttatggcacttgtaacggcttttattcgtattttaactcaagcaggagtagcatctgttgcacctttagctattctaggagctggtccaggagctttcttagcgggttggttttatcggttttatgcgaaagactggatgtcttgggtgggtgagtttataggaacagggataattggagcacttttatcagctccaattatggtctggttttggacttggacagcggatggaaatcacgaagtgttagctaaagcatctgcagctcaatccatttttctttttatgccaaggtttataggggcgactataattggcggtgttattgctttgttgctacttcagggattaaagcgggttcctgtatttatgacaatacaagcattatttaaaggagaaaaagtaaaa

SEQ ID NO: 9758 - protein, 188 aa, Streptococcus agalactiae
MTNHKTKKLTVLAIMIALDVFLTPIFRIEGMAFMSSVVNIIAGVIMGPIYALVMALVTAFIRILTQAGVASVAPLAILGAGPGAFLAGWFYRFYAKDWMSWVGEFIGTGIIGALLSAPIMVWFWTWTADGNHEVLAKASAAQSIFLFMPRFIGATIIGGVIALLLLQGLKRVPVFMTIQALFKGEKVK

SEQ ID NO: 9759 - DNA, 1281 bp, Streptococcus agalactiae
atgagtaaacatcaagaaattttggagtacctagaaaatttagctgttggtaagagggttagtgtacgcagtatttcaaatcatttaaaggtgagtgatggcactgcataccgcgctataaaagaggcagaaaataggggtattgttgagactagaccgcgtagtgggacagtacgtgttgctcaaaaagcaaaggttaatattgaaaaactgacttatgctgaaattgcaaggattagtgactcacaagttgttgcaggaatagagggactcagcaaggagtttagtaaattttctataggtgcaatgactcacagaaatattgaaaaatatttggtgcaaggagggttattgattgttggcgaccgtgatgagatacaacatttagccttacaacatcaaaacgctatcttagttacaggtggctttaatgtttccccatctgtttgtcgtttagcagataaacttcaaattcccgtaatggtaacacactatgatacattcacagtatcaacgatgattaatcacactttgtcaaatgccaaaattcgtactgatttaaagaccgttgaacaagtctatcagtcgcaaatggattacggtttcttagcgcaggatgataccgtaaaagaatttaatcttcttgttaaacaaactaaaaatgttcgttttccaatagtcaaccaagctaatgttgtcgttggtgttgttagtgttcaagatattcttggaaaagataaagaagtaaaattggcaacagtcatgtcaaaaaatatcattgttgctaaacctcgaatgagtctagctaatatcagtcaaaaaatgatttttgaagatttgaatatgatgccagtagtatcggatgactttgaattattaggcgttattacaagacgacaagctgtagaaaatttatcgatgtcgcaagggacggatttatacacctatagtgatcaaatcttgtctaatttacaaattgaagatggtcacttttcgtttttagtagaacccgctatgattgaccatacaggtagcttaacacaaggagttttgacggagttcttaaaagaaatttgtattcgtgtcttaactcgtaagcatcaacgcagtattgttgttaaacaaatgacactttatttcttgcaacctgttcaaattgatgaaataataatggtaacgccaacaattatttcagaaaaacggcgcgaagctacactcgatttagaattaaaattagaaaataaaattattgctaaagctatgatagcggtaaaaattaat
